United States Patent Application Publication US 2006/0134663 A1 - sequence listing, part 52

SEQ ID NO: 122429 - DNA, 748 bp, Homo Sapiens
  misc_feature (733)..(733): n is a, c, g, or t
ttttttaatgtttcaccatgtttatttgatatcatgatttcttagtccttacacaaagggaaataagcactcccttcccttttttgttgcatgtgtgttagcaggagtcggaagaacagaatatgagggaacaagcagagggtgcagaaaatagaaagatggggaaagaaagatgctgttgaagacacagagtgagtgtttatatgaacccttctctaaataagcagtatcaacaaagagtacaaagctgacaacatggagtgtcttcttacagaaataatctgggaccacattcaacatacattatacagcatcagggtacaggttttccgtcagaaattatgtgtatattcttttttctcgcttttaagtttcattgatgacattgttcatatacttttagtgtattattaagcaaatattaatttaatcatataaaccaatcctggtcagcaaaaagcactgttagctgccatgtaaaggtccttctgtcaagtaaaacttcattctacacttctagcttcctatcagaggaacttcttgaaggaactctttcagttggctttacaactcatctgcaacaccaaatgtggattaaattcagatcacaccttgggttgtgtatatatgtatataacagcccctggcacaattagctaatatcttgttatttgtaaacgaattgttctcttttagccatttcccccccatttccctatacggtctttatcanatgctttggtgctcc

SEQ ID NO: 122430 - DNA, 391 bp, Homo Sapiens
tttttaccattctagatttttattaaaaaataaacaaacattagtcctactttttgtctctaacgcttcatgaatttatgtgtcagccttgtgcaggggctgtgctaatctctgcattgttcctattttagtacatgggctactgaaacaagcagagtcctacttcttaaacttcctcttccttacacgtaaaaagcccaccagtcaaggtcttttaattttggtgtacactatcactgaatgccatttataaattctaattttaaagagacccttaattttcaaaggaggactttgatagcatctggttttcagaaaagatgacttgcaattctaacttagtacttgaaaggtgagatttttatagggaggcttataaaaggtgtcttag

SEQ ID NO: 122431 - DNA, 688 bp, Homo Sapiens
gagaataattacttatattttacattttggtctaatatttttttctgacaagtatcaatgaaagcagaagaaaatccactccaatacttagttttcaagacacaatcctaaatatttaaaccccttgtagctggcctataatatatatatattagatgttatatacagtagacttaccaagtcaatagtttaagcaatcaagccacttcactgttcagtttctttacatcatgaaatgaatacttggtattaacctctcaaatttcaagaaaatgtagaataactacagatgtatataattagcatttaactgtccacaaatactttaggaaatcctatcatagtgtttcctctatataaaactgggaaaaaaacaagaattaagtccttttggtgaatatagcaaggcaatgtttagttcatttggcctgtaatatatatattagatgttatatacagtagacttaccaagtcaatagtttaagcaatcaagccacttcactgttcagtttctttacatcatgaaatgaatacttggtattaacctcccaaatttcaagaaaatgtagaataactacagatgtatattaattagcatttaactgtccacaaatacttttggaaatcctatcatagacagtgtttcctctatataaaactgggaaaaaacaagaagtaagtccttttg

SEQ ID NO: 122432 - DNA, 901 bp, Homo Sapiens
gatcaatgaataatttaataatgattaataaataaattaatgatgatggtgaagataaatttttagcatttattgaacgctaactacaaaccagggagtgtgttaaatattttataaaaatcaatgaatgagctaaaatgccattctattatttttttgtataggttttaatattttactcataaatatgcttaaagaatattataattatatgacttagattgtaaaacaatatgtacagcagtatcctattttttagaataaaattataaatatgtgctcacatatgtgtttgtgcatgcatagaaaacagattagaaaggaatatattctaacaccattatctctagctggtagaattatggaaaatttttatttccttctttttgcttctaaattttatataatgagcatatttggctttgtataatcatttttaaaaagttgttttagaagaatagtactgatatatcattcccttttagcagttttctctaggataaaaaataagaggaagtctgagcttaactaattaaaaaaacagatttctttaaaaaatattagcaaatcattagtgttcttactggagaaagggcagtgttcaaagaagaattaaacaaatcattccagttgcaggaaaaattcaatttactgcatgcagactgtttcttgactgaaaagttaattcctttcattcagaatcagtatgcatattcactggctatatttcatctcacatctgcaaacttaatttttcctttcttggtcatcagaagattaggaaataaattttagtccaggcaatagatcctacttggcaagctcaaaataactcaattattaaaaagcagcacacaaagaccagtagtgacttccaaaggattgttaacaatacttaaaa

SEQ ID NO: 122433 - DNA, 905 bp, Homo Sapiens
acattttagatttattttattatttttaatgaactatgtttaacattttacaaatcttcaggttgttacagttttcagcagtaaatatagtagtaacagcaataaatacaccgaaatatgagatttctctgaaagaatacaaaaaatagaaacacctggaaacaagaaggcaaaatgtcaattctagatctgaaatagaaattaatacagctgaattcctttacaatgctcgtacatgggaaaatgagaaactcatgcgccttataaatgaatgtgtgactttgagcttcacctttttaggaagttttgagggacatcatttgacccacagatctctaaaaccctataatacgtattgataccagaggattcaaacacatagtggtctgaaaatgattgccaaagcaaagaagtgctttcattcctcaacatttgtaatctctgtggtatattatgtattataaaagggcataatccctatagaactgaaagggcataatccctatacaactgcataaagtcataaaaattgatttataaagtctcaagatcataatatgtattcaaaaatacatacagctgtgctttagtaaatgaatccatcagttagtcaagagatagttttgcctttaatatatatccaaagtatatacaaaggatcgacaaatgttaacaatttgtgaccaaaatcatctaggtttatatttgaaaaaaccttggttttcaatttaaaaatttaagaaagttgtgaatattgtttattatcacttgggttaagaaaaagtagatggtttcagctttttaacaggaaatttgtgaactactcacaaatgagaagtcacactcttttgatcattagaaaagataaattgcctataattaccaattgagaacagcatgtgcag

SEQ ID NO: 122434 - DNA, 620 bp, Homo Sapiens
  misc_feature (542)..(580): n is a, c, g, or t
tctgatggcacagcgtggaagaaaatcaggtttccctacagaatcgcttgccgattttacatttgttcctccccaaaccaaagttataccttgatgtaaccagtgggaggaacttgagctgcttgggtaaataacccagaagaaatgtgatgagagtaggcctgtgagataattttaggaagatctgatggcacagcgtggaagaaaatcaggtttccctacagaatcgctcccaaaagaaaacttattttggttaaatttctggatttaggtagagctgatatcaaaccctcatttggtctgttttatcaagcttggactgcagcagatgtggaactagagattcgtcacagattccagtaacatttaggaaaatgtttggctctgctattccagttcagtagaacaacttcgaaactggatttttctgtagggtgtcatcatcaccctgagatgccaatgtcatctgtgttgttatagtcttgggtctgctttgtgatccaatgagcccaaaagagtaaaatgccctcaaaggattgagnnnnnnnnnnnnnnnnnnnnnnnnnnnnnnnnnnnnnnnccttcccaattgagactttagcagcgttgtttagtgttct

SEQ ID NO: 122435 - DNA, 463 bp, Homo Sapiens
  misc_feature (338)..(338): n is a, c, g, or t
  misc_feature (344)..(344): n is a, c, g, or t
  misc_feature (378)..(378): n is a, c, g, or t
  misc_feature (419)..(419): n is a, c, g, or t
ccagctgtctttacaatgataactgagcagttgaagaagacctactttaacatcctcatcaagcccgagactttggccaaagatgtacggcttttaatcctgggaatatgcccgttggtctatgattgacaagtaccaggctttgatggacggcctttcccttgagtctctgctgagcttcgtcaaagaattcaaatcccagctctttgtggagggcctgggtacaagggaatgttcacaagcacagaatctatgggatttcctgaaatatgttgttggacaaactaaactttcaagcctctgggagcagggagatgcctgttgcagtttccagggtntgtagnagctgcccagttgcccaccatcttttgcaaagtngaaaagcttttgaaccagggttatggccaactttggaagtncactgttgttattaccattcaggttaccaggattttaagagatt

SEQ ID NO: 122436 - DNA, 2223 bp, Homo Sapiens
atttaaaaatacattaaaaaaacaggtattagtacctagcatttagttattcaatatactggtcacgtaaggcctttcaagaagtagattctcagtctgagaggacacaggccagggcttctcaaagtgctgctgcaggctttctggtctcgcttggcccattctgctaattttcctttgccagctcctacagtaaccctgggtttattagtctcaacaaaggataaaaagtaaatcaaatgctatgatgccagtgcaaaacttcaatggaagccctaaggcagtagtataactaactccataaaatacaaacacacacattttaaaatacacattgcttcaggccaacgtgactgcagtttatttatttgactattttatggtaggggagaaggttgagtgttgttgtgaaagccctgatatcagtaatggggatgatacaatctgccagcagaggagaggttggcaggtaggtcagctgcatcacttcacaagaagaatttgaatcctcactagaaggggtaccatcctcttccagttcatacttcccatatccaacaacatgaacgctgagcattttacttcctggccctctatgggccttgaaccagttgaccaggtctgattttgagaatgacttcagtgcttcaatctcgtgggcaaggcggtcaaagaggtactgctgtgtaaccacttcattccagttcctatccacctcctccccaaggtgggtatcctcacactccttcagcttgatgagagctgtgacctgggtgttgaatgcctcttcagtgaggttctcaatcttctcctcaaagctagaaagaaactcttctatcttcttatcaacaacttcagaattgtatttggttgcctgagtccccacagtgacagaaaatcctagaatcccggatgtgttcctacaggtagggtagacatggtacccaagggtctgcttggttcgaaggaagtcaaaacaaggttcttccatgtgcatcacaagcagctccataagcgtatattctcttagactcctggtacctgactggtagtacacagtgacttcagagttggcatcacccttgttcagagctttcactttgcatagatggtggccactgggcagctctaccacctggaactgcacaggcatctcctgctccagaggcttgaagtttagtttgtcaacaacatatttcaggaaatccatagattctgtgcttgtgacattcccttgtaccaggccctccacaaagagctgggatttgaattctttgacgaagctcagcagagactcaagggaaaggccgtccatcaaagcctggtacttgtcaatcatagaccaacgggcatattccaagattaaaagccgtacatctttggccaaagtctcaggcttgatgaggatgttaaagtaggtcttcttcaactgctcagttatcattgtaaagacagctggtgtggaattgaactcagctaagtagtcaataatgagctgaaacagtagaggtagtttgtggttaaatcctttcactcgaataattaaaccatgttctccagctaccagtttatactccagctgtgccacatctgcttcataagctggttccgcaaggttatgcgtaaggatattgacaaagatatcaaagaggaccacatttgctgcagatttctgtatcaacggtgaaattagatggaaacgtatatatgctttggggattttgaatttgttgtctttcttataccacaggcaaccttgtggagtattcacaattttaactgggtattctgtttccgggcaatcgaaagccttcaacgtaaagtccgtggctatgtacttgttttcagctggaagatgaagatctggatttaattcgaaattactattccacagttcagcccaagagttttcaatatcttctatactatattgagttccaaaccatttctccttgaggtcacattttccctcattagcaccagacagtaaaacaagatttgctttttgaggaactagctgattcaaggcttcaccaatgacttctggcttgtattcaaaaagaagctgatctccagtgagaatgtcctgcaatgggtacagctgcatgttctcacacatgttttccacatactcaactggatctgtctgttcttggtaatgaaattcattatcctcaattttccgaatctcttcaaattccctcggccgattccatcccagcc

SEQ ID NO: 122437 - DNA, 433 bp, Homo Sapiens
tttttttgaactttgaccaaacatttctttattctgaagattcatttctaataacaaaactttgagtgttttttttctgccctctgtacagagatgtacggcttttaatcttggaatatgcccgttggtctatgattgacaagtaccaggctttgatggacggcctttcccttgagtctctgctgagcttcgtcaaagaattcaaatcccagctctttgtggagggcctggtacaagggaatgtcacaagcacagtgagtgtgagatgctctgtaggccaggtctgaatgcagttgtgaactctggaattgccatagttctttcctaaaggggaagctgtagttttggcaggccagcattatcatattctgtttagaagggaacctgacccctctgatgctgggcagctttcttcttaagatgaagactgctg

SEQ ID NO: 122438 - DNA, 416 bp, Homo Sapiens
tttttcaggccaacgtgactgcagtttatttatttgactattttatggtaggggagaaggttgagtgttgttgtgaaagccctgatatcagtaatggggatgatacaatctgccagcagaggagaggttggcaggtaggtcagctgcatcacttcacaagaagaatttgaatcctcactagaaggggtaccatcctcttccagttcatacttcccatatccaacaacatgaacgctgagcattttacttcctggccctctatgggccttgaaccagttgaccaggtctgattttgagaatgacttcagtgcttcaatcttacaagggaagggaagataggaaagaaattcaagaagaaagatagctcttaaacctaacccccaggcagatgtccctggacctgcttagcatctgaa

SEQ ID NO: 122439 - DNA, 475 bp, Homo Sapiens
ccccgatgtctctctgtggggtggactccgtgcaggtgctggccccgccgcccgccctaccccccaagcagcggcagctggagccaccggctgggaaagacgggcatcccagagatccctcagcggtcagcggcgttccctgggaagggacgctctctctgatggggatgatacaactctgccagcaggaggagaggtatgggcaggtaggtcagcgtgcatcactatcacagagaagaatttgaatcctcactagaaaggggtaccatcctcttccagttcatacttcccatatccaacaacatgaacgctgagcattttacttcctggccctctatgggccttgaaccagttgaccaggtctgattttgagaatgacttcagtgcttcaatctcgtgggcaaggcggtcaaagaggtactgctgtgtaaccacttcattccagttcctatccacctcctccccaaggtgggta

SEQ ID NO: 122440 - DNA, 1914 bp, Homo Sapiens
ttttcatgccaaatataactttctgaaagtgatggaaaatgttgtcttgtgcagacaacatcatggctcttggcagtttaaatttagtaattttaatttagtgaacagaattgagaagaacgtgccaaatgagaatcaattaggtggatttttggctgtcatttcaaaagtggaataaatttattaatttagtagtactaaatggtatccttagattaaaattttgtgcttgataacagctgttttttctacattagaaataagatgccacacaaggaactacattccagatttaaagaaatgaaaggataccattagtgtgtataacagattattgttcatacttgtaaagcatcttatgtcattgagaatataaagaacagtgccttagaagacagtgaaaggtaagctctagcttaatgtctatgatttgttctttgacattaaggaaggtaaggattggtcagaggatgtaacttgatgtgagcagtagtaaacctgttttagatatcatactgttaatattttattgaaaatttatttcagagcggagaaacttaagctaaagtctgttatacagaattgaaagccttcgtatcttgaacctcccaacatttttcttatggctgttgaaaagtatagagctaaattgatttaattacactttcctttgtactttaaaaaaaagtatgctagcactattgtaccttgaaaggatttccaccagactgtcttgagtagtgacttctttggtgaggcaagaaggatatacattattttagaatcatttactatttaaatgagacaatcatattattttagaatcatttattttaaatgagacaatcattttaagttttaagataacagaagtgaccaatgtaatttcacaacacctaaggattttttggttgatcaggttactgtagatttttactgattgtcctggatgaatagactgtgctttttctttttctctcccttccttcttggtttcccatagtataataagcatgcatactttaacttctatagttttctcctttagagggtcgtcttcagttttagaggtttacttctcccttgcctttgactcattggactagtgcagaggctttaagtagtttaaaatgggcttttgcttttctaggtcattaacgttttttatttagtttctttagccaatagtggctgagtttcgcacttgattttcaatattttatagtaagaaatgacaaactgctttgtttcatttcataaacaaactctgcatttagataactattaaaggttgttaagatgaagatttactgtttctttgttactcgttggtacagctgtttgttttacttgcacatttgtacatatacttaatgttttcaagtgccttaattgtttaaaatctctggcttcaaagtttcttggggaaaggtcggtttacctcacatttcttgtttcccttagtaatattctaggtacctcacaaaatgtattatggtgccatggctgttagtttttagtgagtgctgtaggattaattcgaaaataggcagaattccaattcctccccaaggtggcaaaaaatttaggctatactgatgttacttgtccattctacctgggttatgaattccctggacacacattcatgtcaacatatgttgccaattttggtggaaaaccaacaattgaagtctggtagtttgagcaatggtctaacaaaggtattataaatggttcatttggcagctcaaatgggcctgtgcaaatctcagctttaattttgccccacattgacggggtctgcccactgggtctcaaacacagggtgacacgaatcaaggcgggggcaaacaaaccgaatgggcgggtcaatacaaacctggtttgtaaaaaccaggcgcgctcctattg

SEQ ID NO: 122441 - DNA, 2156 bp, Homo Sapiens
  misc_feature (97)..(98): n is a, c, g, or t
  misc_feature (123)..(123): n is a, c, g, or t
  misc_feature (177)..(179): n is a, c, g, or t
  misc_feature (184)..(202): n is a, c, g, or t
  misc_feature (215)..(215): n is a, c, g, or t
  misc_feature (221)..(221): n is a, c, g, or t
  misc_feature (233)..(233): n is a, c, g, or t
  misc_feature (305)..(305): n is a, c, g, or t
  misc_feature (343)..(343): n is a, c, g, or t
  misc_feature (351)..(351): n is a, c, g, or t
  misc_feature (437)..(437): n is a, c, g, or t
  misc_feature (459)..(460): n is a, c, g, or t
  misc_feature (479)..(479): n is a, c, g, or t
  misc_feature (537)..(537): n is a, c, g, or t
  misc_feature (566)..(566): n is a, c, g, or t
  misc_feature (595)..(595): n is a, c, g, or t
  misc_feature (631)..(631): n is a, c, g, or t
  misc_feature (890)..(898): n is a, c, g, or t
  misc_feature (949)..(972): n is a, c, g, or t
tgtcgtgccgctctggcgggggccgaagaaaagtgatgtgtcgcgcggtcccaccgccggcagggtcgacatcactcaaacaatctaccatcaacannaacaccacccgcccgcgcggcgggnctgaccgctaccgtaggatgtacgatccgcgtcgactgcctccctcctcatgannnggttnnnnnnnnnnnnnnnnnnntctggcttccatncatcanatctaggggcgnccggcgcgcgcggttgagttctgcgctctatctatcacgtagttactgtttattcctcccccccgactggancagcccgtgttctcgtcgcgctgcatatgcatccacancacgcgcnccacaccaaaacagcctcggcgtgcgcgcgcgggacgccctcagcaattagtctccggcgtttggaatttgagagtagagggcggnggcgcgtagaaagggagggggnnagtggaggggggaccggcncgcgtcgacgctgtgtggtggtgggtgagggggggaggcaggggcccgctgccgcgcngtgggttggagttacgacggcgcgcggtntccgcatagccagggagaaggacgaatancccctccctgacgcctctagggtggtcggtgggatngtgttttgtgtggttttctcatagataaaaaaagactcacagcgacggggtgggtgtgtgtgtgtcgtctcgggcgccccgcgggcgggggcgcgggaggtttatgtttgtgagtggggtgggtggggggtgtcccgcggtcgaggcggcgcgccgtgttggtgggtgtgggggcggcgaagaggagtttcctctgttgtgcgaggaagaggagagacggagagaggcgccgcttcttgtgcgggtctcacacaatatnnnnnnnnncgagggtgcggcgacaaggaaaaagggtttttatggtgaagttttttgttnnnnnnnnnnnnnnnnnnnnnnnnaccaagatggttattttgtggtttgcgcgtttgtgtggtggtgttggccctaattgtattgttcgtttgtgttctggcgggttcgcggtgggaatggatggtgctcgtttttcttttcttgcgtgctctttcggggttgtggtggtgctttgtgttttggtggtttttttgcaataaacatgtagatttattttaagtcagtttggtacatgatacagattggttttgcagtttttaatgaactgaaatagaaatgtctaaatacagcagtatctgcctgtgcaacaaatatctgtaaggtaaaataaggtatttgatagaagaacatctgcaagaacaaatcagatgaaaaatctgaaaaggtttctatataccttctggattttaaaaaaacccaaaaattaatggctcaagatactacattgctaaagttaggggaaaaaagtaaaaaggctgtgagttctgttgcaagagctcatttgtagacttgcaaaatctaactaattttatattatgcttgttgttagagcagtgctcaaaattacagaagcttcaaattgttatgttttcacaaaatttgctacatatgttgacatgaatgtgtgtcagggaattcatacccaggtaaatgacaattacatcagtatagctaatttttgccaccttgggaggaatggaattctgcctattttcgaattaatcctacagcactcactaaaaactaacagccatggcaccataatacattttgtgaggtacctagaatattactaatggaaacaaaaaatgtgaggtaaaccgacctttccccaagaaactttgaagccagagattttaaacaattaaggcacttgaaaacattaagtatatgtacaaatgtgcaagtaaaacaaacagctgtaccaacgagtaacaaagaaacagtaaatcttcatcttaacaacctttaatagttatctaaatgcagagtttgtttatgaaatgaaacaaagcagtttgtcatttcttactataaaatattgaaaatcaagtgcgaaactcagccactattggctaaagaaactaaataaaaaacgttaatgacctagaaaagcaaaagcccattttaaactacttaaagcctctgcactagtccccggccgtaatggccgaattcccgggcatatgtccggtaccgtcgactg

SEQ ID NO: 122442 - DNA, 614 bp, Homo Sapiens
  misc_feature (104)..(112): n is a, c, g, or t
  misc_feature (573)..(573): n is a, c, g, or t
ttagttatataaattttattaaattaaaaatatcttaaaatttttaaaattcatgtacatttccatttatgcaaaccataattttttgctgactatatacaatnnnnnnnnntattgaagtggcagagaaaatcatttctgagaattacttttatcatgttttctgataatatccataagattagctcctgtaaccagatcattctgtgtctgtttatctttctgttgttcctttctcttctggtcatgaaggtatggggaatttaataactgagggggaagaatggatcctgtgggctttactcgttttgcaatatcccagaagagtctttttgaattattattgatgaaagtaatcgctgttccattttgacctaatcttcctactcttccaatctgatggacatactcatccatacttgaaggcatatcaaaattgacaaccagcctgacactgatcaagtctaggcctcgtcccaagactcctgtgctcactcacaacttcatagtctccttcaagtaatcccttcaatatgtttttcctttctatttgcgacttctccgaatgtatanatatgcttttcagccctgtgattttctgaacggcttcactc

SEQ ID NO: 122443 - DNA, 726 bp, Homo Sapiens
  misc_feature (676)..(676): n is a, c, g, or t
ttttttttacagaaaggatgacttttatttccatcctgaatgattcacaccattatttaaacatctgaaaaatcctgaaataatttaaactgaaggcacagaacaaaccaaaatatttaactatcagaactaaaaatgagaaaatccaaatagttctatagtaacaataaattatgaacaagtttccgtcaccaaatatcactctgaccaaaaatgactgtcttttgtcataaaagctacagcttaagctgattccaagatttctataaaaatgagagtgaagaaatttcttctttcaaaatactcattatgccaccaggttcaatgtaagtattttgtatataacaaagtagcagtcaggatatttgttgatggatggctactccccaagaaatgacacattcttacaaactttaaaaaaatagcaaagttggttacaaaattctatttggggagcagggaaaaaacttgttccatgtcaattagaatatcaaagcatttcaaaatcaaactgcttccaaagccaatcatcacacaacagtaatatactgtatgggccattccactgtatcttgttatatgttgatcatacagtgtaactaaggggttgaacaagtcagtagcaatgattgttgctgtatcttattccaaatagatatgttttttaaaaatcatntataaactaactgaaataatcagtgacatgctacagatacaataaaccca

SEQ ID NO: 122444 - DNA, 479 bp, Homo Sapiens
agtttggaataccttttattattattaacaaaccttaaatacagatgagcccaaaaaaggatctttatcaatgagcatacacaacaaattcacaactggcctgacatttcagctgaaaacagccacggtgacaaagactttttatttactgttaactaattatacatgtgtaacttagtattcatcagaactttacaattttaagtaaatatgtatttagcaaatactgtaacagcccagacacttgttaagctttcttaggtatttgggcactacaatgtcatctttttcaagcactctagtgctttcatccagtttgcgttgactggcatacaatttagaaactctgatagtttaacagaaaatagtcagtatgcctagtaaaagcaaatttttacttatttgtctatgcactgtattttcactttactagtattcaatgccaatatccttaattcaatactttttaaccaatcatt

SEQ ID NO: 122445 - DNA, 705 bp, Homo Sapiens
  misc_feature (502)..(545): n is a, c, g, or t
attaaaccattactgtgactttattataatagttaacaatattttagtggtatacaatcatatcacaattactcaagctatatacaaacaggtatttatataagtctacatttaaaaaagaaaaagcaattaatgacctccccaaaatcacattatcatcaacaagatttttttctaaaagttacggccaatccaataacaaaaaaattcacagttattctgcagacattttaaagatgcaggaattgtattgcacattatataattataaaccataacaagcagttatatattttaatctagtttttcacaaaatttacattatcatgcaatacttcactgtacacagaatgatggaactagaacaggttaacttacaaacttttaattatagccacaaatttagaattattttaaagttatatttcaaattattatactaaaaaaacactccagtgtaataaaacagacacaatcataatttgttcacagatcaaattannnnnnnnnnnnnnnnnnnnnnnnnnnnnnnnnnnnnnnnnnnnatcctgtagtgcagtaccgagctttttgataagaactgacagaaccttgtccagtggatccatgactcctctttgaagccatttaggaatagtagtcctagcatgatgaaagcccaatttttgaagaatataatcaacacctactggatcaatctttctt

SEQ ID NO: 122446 - DNA, 1483 bp, Homo Sapiens
  misc_feature (1392)..(1392): n is a, c, g, or t
tttttttgcaaacctgggctctttactcaccattttaatactgccgccaactataacagattaaaaatgtacacatgacaaagtggaaaaaagtcccaaaatgcaacagtttcagcaaaagaacatactggctaaggattactacagttaacatcggtacagtaaaaacgatggcaaacagggatttggcaccacatttacaaagtaaaagcatgcactgttaatacactttagatgtttctcaacagaaaaggccatgaagatggaaaacaagaggcaccatgtacaaaactccctataactgagacaaacaagcaagaatcaaagtggtcaatttagtaaatatgtagcagcaaagtcactggttctgtttggaatttagcaatttgcatttctgattggcagctgccctgggtgtgtctgtatccaagaagctgactttatcatactacatcagcagtaatttggtaatctgcacaaacaaggttaaccttcaaccataagcttaaagaaaagagagaactagaatcttattgcagaactttccaatgtaattaccatatggaaaccataatggtactttgagcaggataataacataaatttcatttaaaaagttgtatttatagccccagtaaccggaaagaattataagtaattatggaagtattatattctgaccataccaagagttaaaaacaaagagttcctactaaagaggaatattttcaagatgatctggtcacatcatgtgcatagttaagattgtttgttttaataaagattcttttgcaaataaagaaataaaatttagtaaagttattcttctcttgatgaaaaaaccttaaaaatgaaccactggtggtttaagaaggggggaaaaaaagagtaagctacatattgaagttctagaatgcagcacctcaacttcacatcttccataagcatttaagattaagaaatccaagtgatgtcttgacgatcgaatcacactttatagttcttccaattccaatgtctgactttagcatctcatgtcaattaaaagttccctaatacaaaatattgtgctaaagagtgctaagattctgcatgctgctgccattccctggtcccgttcatgcttgtagctgccccatgagacagcaaaaggtgtctggtctcaacactccacactgtagtaactttcactaacatccatgcttctcaataaagtccacattcctttaagttgtttttaatgatgacatctgtaacagcatcaaaaacaaactgcacattcttcgtgtctgtggcacaggtgaagtgagtatagatctccttggtatcttttcttctgttcagatcttcaaactggcattgaatataggcagctgcctcttcatatgtatntggaacctgtgtattctggataacagatagttaacggactcctctttattttttcctcaaaaaggtctttcttgttaaggaagagaatgcc

SEQ ID NO: 122447 - DNA, 354 bp, Homo Sapiens
gcggccgctccaacatcgaccaactgggcatatgcctttgtggaattaattcatcagtaaaaatgaatggatacaatttaatcatccatataccgaaaaaccaaggttatggcacacagcttgtgccagcgatgaaggagaagtaattgtttttggtggatgtgccaacaacttgcttgtccatcacagagctgcacacagtaatgaaatactaatattttcagttcaaccaaaatctcttgtacggctaagcttagaagcagtcatttgctttaaagaaatgttagccaactcatggaactgccttccaaaacacttacttcacagtgttaatcagaggtttggcctcgttcc

SEQ ID NO: 122448 - DNA, 1811 bp, Homo Sapiens
tttttttcagggtaaaaagcccaaccattactttactttaatagaggacagcttactggtgttaaatacatttattgtaaactttagacacaaaaataggttctctaggccattcacatgcacattaaaaccaacaggtgcaaactacaacaatgcatataattatacaaatgatgccactctgtgatgtttacaggattgctgtccatgcaaggtgatcataggcattatttatgaagccttaagatccagaagtgttgttactaccaaacctctgattaacactgtgaagtaagtgttttggaaggcagttccatgagttggctaacatttctttaaagcaaatgactgcttctaagcttagccgtacaagagattttggttgaactgaaaatattagtatttcattactgtgtgcagctctgtgatggacaagcaagttgttggcacatccaccaaaaacaattacttctccttcatcgctggcacaagctgtgtgccataaccttggtttttcggtatatggatgattaaattgtatccattcatttttactgatgcagtaagtccaggcatcacttagtggctgtttatcagtggtaaatcctccaaagagaaaaagatgatctgaagaaactggtgttagtgagtgccaagatcgaccaactgggcatatgccttgtggaattaattcattccactcccatgtatccagattaagatagtgaagatcattcattctagcatctcgatatctgcctccaaacacgaagcctctatttccgacagttgcacaggcatgggcagcacgaggtgaaggtgctttaccagtagttataggctggctccaggtaaatgtttcagtatctaaaatatgtacatgatcattccatcctcttggatgacttgaattccaaaaagatgtttcatcgaattcaaaagttcccaatactttatcttcaggcaaatatccataccctccaaaaaatattaacttgtttttatatacccagacaccaagtttgtcctttgatgatggaggaattccttggcaatcaattctttcccactgtaacactctgtctgtagaccttgaatccagcatgtagaacttattggtattgcctcttgaatggtgtcctccaaacaagtacagcaccctgtctacacacacagcacagcttcctgacatagaaggaggaacatcaccttcagtgttgatttttttccatcttccagtctccatgttgtagatccatagttcttctctaggcagataaaagtcatataatcctctgacttgattactcttgtagccgccccagacgaacatgtggcgcccgtcgctgacggctacgtggccgctgcgctcagcggggcaggcaagctccatggactcatagctctcgaaggctggcccaggcaagtcgtcagcccgcagatcctcgttgccatcagccatcttgaggctgcacttttgctaaccaacaatgcccacacccgcgaggggccaaaaaaacaaaggaaaaggagagaaatgcacagcggcgcgaggcaaggaaaaggcggtggcgaaagggacggcgttgaggcctctctgccgcctgcgctcgcgtttcccagcctcctcggccgaggacggctctccgccgccgccggggcacgcctgcagacagaggggccgcgagcggagccgggcggcggcggcgcgggcccgggactcggggcactgcagggaagcggtccgcgtcgggccggctccctcggacgcgtgggtcgacgatatcccgggaattccggaccggtaccac

SEQ ID NO: 122449 - DNA, 515 bp, Homo Sapiens
tttttcagctcccatacgatttttattgctaacaaagacctagagaacagatcgttcagttcaaactcctcattgcataaatgagaacgaccagagagagaaaataatatccagataaaatagatattgattgatctgcttttgctactttcccttaagattttacttctcgccatgatgttttggtctgaactaccttaagatcgctagtctttatttcatagctctattctgtagtataaaatggccaactggtgttctgggtggcttcaaactcgtttttgttttaaatgcaggttatggcacacagcttgtgccagcgatgaaggagaagtaattgtttttggtggatgtgccaacaacttgcttgtccatcacagagctgtaagtatactaccttcacattattactgaaacttacttgcaaagcatttgcttttaaatgtgttcttcctatttatttttcaggcacacagtaatgaaatactaatattttcagttcaaccaaaatctct

SEQ ID NO: 122450 - DNA, 1151 bp, Homo Sapiens
  misc_feature (578)..(981): n is a, c, g, or t
  misc_feature (990)..(990): n is a, c, g, or t
ttttaatattatacttgctttatttaccaattttctaaaaggcaaacaggtcataaaaagacacaagcagtcaaacaaatctattgcactgggtaaagaaagtttggtttgcacacaaacaaaccacttgtccagcaaggctcaacaaatcatcacagaaactctgagagcttatttacatatctcttcgggaatatattaaaaagaaggctcagtttaaaatagagaaaaactgtttaacacctgtgtaagcacacacactaaagaaaacatgacttgatgcttggcatcacgtaaacaaattcacaagatgatcctattaagtcaactgcttggcacgcgctgaagctacagttaacaatcagtgagcacatattaaatgataaaataatgctgatggtaaacattcataacagcagagtaagattttggcagttttgtgtttcggtaacataactgtaaccttagatgaacacctatcccttcatgatctgactttagaggcaaggagtttgtttacgtgatgccaagcatcaagtcatgttttctttagtgtgtgtcctcgtgccgaattcttnnnnnnnnnnnnnnnnnnnnnnnnnnnnnnnnnnnnnnnnnnnnnnnnnnnnnnnnnnnnnnnnnnnnnnnnnnnnnnnnnnnnnnnnnnnnnnnnnnnnnnnnnnnnnnnnnnnnnnnnnnnnnnnnnnnnnnnnnnnnnnnnnnnnnnnnnnnnnnnnnnnnnnnnnnnnnnnnnnnnnnnnnnnnnnnnnnnnnnnnnnnnnnnnnnnnnnnnnnnnnnnnnnnnnnnnnnnnnnnnnnnnnnnnnnnnnnnnnnnnnnnnnnnnnnnnnnnnnnnnnnnnnnnnnnnnnnnnnnnnnnnnnnnnnnnnnnnnnnnnnnnnnnnnnnnnnnnnnnnnnnnnnnnnnnnnnnnnnnnnnnnnnnnnnnnnnnnnnnnnnnnnnnnnnnnnnnnnnnnnnnnngggcagcanagggcaggaacgtaaaaggcgcgtgctgcgtttttcataggctcgccccctgacgacatcaaaaatcgacgtcagtcagggtggggaaccgacaggacataagatacaggcgttccctggaactcctcggcgctctctggtcgacctgcgcttacggaacc

SEQ ID NO: 122451 - DNA, 844 bp, Homo Sapiens
  misc_feature (778)..(778): n is a, c, g, or t
ggaactgaccagatatagtttattaaaatatgttcattataaacaattttacctcagttttgtaaaaattgtaaatacatcaaaaactgttacagtgtcgtaagattgcaaatattgccttataaaattataaagaagtaaaattgtttagtaaaaactaggaaatatcttatttcaattttccacatataaaaatatattttttattgcaatactgaacagttaaggccacaacactttagggagaatttgagatacacatattttgaaatgacttgttaaaaatattagcataaataaatatcaaaactggtcacacttatagaagctgaataaaacatattaagtcttatatcttttaaagactactatcagaaactttacttcataagttataacatttttcaagtatacattacaatacacttggtgactgtgaaaacataaatatatatttatagtattgtacaggattttgatcttctctctgtatttgttggtgggatattctgatgattctgactcatgtggttctggtcggcatctttattatcactttttaaaatgatctggtctcctatggattttatctctgggagcggctcattgttattcttgacaatcttttgatttattgaggggactcttttgaacagaaaaatcttctttgtttttttcatgtctttgcttggtgttgtttcactgttttctaggatttctaatgaactgctatctgcatcatcaagcatgtatccttttgggttttcattgtactcancaaatggcccgttcctcgtaggttggctttttctttcttttcaatgatgatagttcagctgaagct

SEQ ID NO: 122452 - DNA, 154 bp, Homo Sapiens
aaccttaaatatagacagactttattaatttatgtaggaagccaaaaataggaaataaaaagatccggagttcagatatactgatatattcagcaactgaaacttacaattccttcaattcagtcagagcagagacatttaaagtagtctggag

SEQ ID NO: 122453 - DNA, 1025 bp, Homo Sapiens
  misc_feature (752)..(752): n is a, c, g, or t
  misc_feature (792)..(792): n is a, c, g, or t
  misc_feature (794)..(817): n is a, c, g, or t
  misc_feature (819)..(826): n is a, c, g, or t
  misc_feature (905)..(905): n is a, c, g, or t
ttttttggtggtaccaatctgtgtttattgaatatgtctgggacacagtgactgattgattgaacatcaagaaagctataggtgtaccccccttttcagtgaaaaaccaccccctcccacacccaaacaatagtgagaaaaggcacaggacatacacacaacacgcaggcgggcagggtccataaattacagtgagagtaggggaggggcaggagagaaagaaagcaggtggggtccaagcacaccccagggataacattccagcctgcatcaaggtggccctgctgtgagcaccccccagtctgtgctggggctcctgcccaccctctgctccaaccagcctgaggatgaggcacagggaggcagggcccatcactcaggaggccatgggagaaacagtctccgggaggtgctgcacctggggacccagaaaagtaggactttttctcctaggacccgcatcgaggcaggggacctcattcctagtgcccaccataggcaaccctctgcccactctgaaaagaggggcttgccgctggggagggattaggggttggtccctgccatcctggtttatttattttcagctcaagaattaattaggtttaaatatatacagatatgcctcaacttaccatggggttacttcctgataaacccatcataaatgaaaatatcctaagtcacaaattcatttaataccccaacagaccaattgtaaagttgaaacatggtttaagttgaccactgtntaagttggggacagtctgtactgtggagtagaatgtggangnnnnnnnnnnnnnnnnnnnnnnnncnnnnnnnngccccggcccccactcccaggggggtttatttcccacccctgggccctctgcgaattctgggctcgaggccaatcctanatgagtcgataatcctatcatgcaagtgttctgttgaatgttacgctcaatcaacacatacacggacaaatgtaactggggcaagatgacactccatatggtgcccatgcgttcatcgga

SEQ ID NO: 122454 - DNA, 1225 bp, Homo Sapiens
  misc_feature (758)..(846): n is a, c, g, or t
tttttttaacaaacacctaatgtttattaataaattagtacacttgaaggcatttttctgatatcggtccttcaccactacccacaaaccccacccacacaaagggagtccacgccacctttgcattggaacctggcaactgagcattagaaggtacatttgtaaatgggagcatagttgcaaatatatcagacaagggttcttacagttgcagccatttttaattaaagtaattggtgaaggaatcccaccaggaccaaggccttgagagcagattggacctattgattatgtgtatataaaaaacaagacatcttttaaagcaaagctgggcaaattctctatggaaagggcgccactggcacttgattttgactttccaaagtgcagcaatgtgttccagaacagctcaaatcctaaaaggtgaagttcaagttctttggtggcccagttgtcaagccacttaaatagcaaatcctgatggcttgaggatttcatttctccagcccagagcatattagcataagaagagtacaagtaatcaagcattctacacggtgtccaggtgaaaaccatacaatcagcaatagtgtggtcaagtttcagccatgaatatgaactatacaagacatatttaaaagataactcaaagttgaattgcattacagtaactcaatggggtcttaaattttcttaatctttaagaaaatttataaaggacaaacaataataaaaatagtcctcgtgtccaattcttnnnnnnnnnnnnnnnnnnnnnnnnnnnnnnnnnnnnnnnnnnnnnnnnnnnnnnnnnnnnnnnnnnnnnnnnnnnnnnnnnnnnnnnnngagttcacacattatactatctggaattatacatgtgtaattcctggggtggctattgagtgagctatctcacattaattgcgctgtgcccactggccgctttccatccggtaatccgtcgtcgcattcgcaattatgaactgccaacttgtcggcgaatggcagtttggctattcggtctccctccgcttctcttctcaatatcccctttcctctgtcgttcagatgtagctagtgtatctattcatccacatgcgtgtgtcgtgtctccagatatcttgggatattctagtatgtaatgtcgtcaactgccacattatgcaggaccgtaaaaggtcctgtgtggctgtttcctagttcttcctaggtgtatcaaagt

SEQ ID NO: 122455 - DNA, 1865 bp, Homo Sapiens
  misc_feature (57)..(60): n is a, c, g, or t
  misc_feature (65)..(65): n is a, c, g, or t
  misc_feature (68)..(71): n is a, c, g, or t
  misc_feature (79)..(92): n is a, c, g, or t
  misc_feature (100)..(100): n is a, c, g, or t
  misc_feature (102)..(103): n is a, c, g, or t
  misc_feature (105)..(108): n is a, c, g, or t
  misc_feature (110)..(139): n is a, c, g, or t
  misc_feature (141)..(145): n is a, c, g, or t
  misc_feature (147)..(179): n is a, c, g, or t
  misc_feature (181)..(201): n is a, c, g, or t
  misc_feature (203)..(211): n is a, c, g, or t
  misc_feature (213)..(213): n is a, c, g, or t
  misc_feature (215)..(222): n is a, c, g, or t
ctctttggggggcgggcccccccgacaaaaaaggttttttaaaattttttggtgggnnnnggggnggnnnnaaattttnnnnnnnnnnnnnntttttttntnnannnntnnnnnnnnnnnnnnnnnnnnnnnnnnnnnntnnnnntnnnnnnnnnnnnnnnnnnnnnnnnnnnnnnnnntnnnnnnnnnnnnnnnnnnnnntnnnnnnnnntntnnnnnnnnttggtacccatatgcttatgtttattgtacagtcacaagttacatgttgtaaatcaagcagaacactgtaccagttttcactaactcaaatcaagttagcaaattacaaattttagaacagattcattttctgtctcacccaatgtgggtgaccacaaagatatttactttctatgttattaggtagcaaattaatttgatatactacacagcttccaagttaccttaggatatttcaaagtgtttcaaaactggtaaagaataattcatttccagcctgaaatacaatgcagaatggaccatttaggggtaaataacctcacttaatcactctttcctgctaacaaaaataatacaaatatttgtttatattaggcttactaaattaatgacaactttgaaattatctagatttggttacattgttatattgcacttgagaacaatgacaaaaaacatcaaagattcagtacctctcccaagaagttcattatatatcagaaattaaaatgaaatataagcatatattgcatgctgcatatttctatcgttcaaaccagccaaccaacaaactaaaaggaatactctccaaaacactgagtattaagtaatttcatctgccttttttgatcctacaatcatttttcaaattttaggtgtttttctttaaattattcatcaaactactacatatacaagctatccaagaatgcaaacaaggtgacattgagatgggtagtggctgcacataggtattccaagaacgactcattcttctccaccaagctcatcattacattttgcaacttaggaagatctgccaacttacaaattctgtttgccttacaaaaatcgctgatctattatatacaatacttttatcacacaaatctctcccttagggtcatgattcactatcaaaaatctttcacagccctcttaagccagtaaagtctcttttattaatacttgagttttctttatggaaatgtaagtgttaatgagaattaactatgaataagtagtttcataacacaggtagaatgatggcaataatattttgactaattgttttacctttcagattcagaattacagtgataatcgttaagagaaaagagaaacagaaaaaatgactcacatgtatttttctcaaaatatcaattctgaaataaatacctatataaaaatcaatatcagtatcaatatttcttaccaatgtcaaatgtttttaatatcttctagttcattcatgttttcttaaaactgaatcagatcataaaaattttacatttcaaaatggatttttattctcaataaatcacaaatatggtagtatttcaaatgttttagagatttaaagttttcatagggcaattttttgatatttaatcatgataaaaaaatcccaccattttcttcagaaagtaggctttcaaattactcttctccatatttttgtagatatataaatgttcattttttgaaggaaaatctatgctattatacaaactatatttcataaaggtaatttaagatatcatgttaatttctaaattcgacgcgtggcgacgcgtggtcgacgatatcccgggattccgaccgtaccagcctctttttaaccactggtcatattactatcg

SEQ ID NO: 122456 - DNA, 1479 bp, Homo Sapiens
  misc_feature (180)..(217): n is a, c, g, or t
  misc_feature (267)..(293): n is a, c, g, or t
aaaataagtgcatacaaatacagctagaagcatttctgatttgccaagtgctctaaaaaagcagcgcaagtcacagcctacatagaacggtaactgtcaccaggataataaagcacaaagatatgctaataacgttaacaaaagaaaaaaatgtctttataagtacataccttttgtcgnnnnnnnnnnnnnnnnnnnnnnnnnnnnnnnnnnnnnntcaaaattatacagccatgtttatgaagtctacatttcccttgtcttggnnnnnnnnnnnnnnnnnnnnnnnnnnncaattcaagcagttttaattaagggtaatcattgggtttttctgaaaccggaaaagtcacgagtctctctcttttttcactttcacatctccagcaaggatggttgcaatttccccttgcataaaggcccaggggacattggagcccacaagagggcatttttccccactgggacaatagacctctccactagctccctgctgtttgatgctttgtctggagcaagggaagcagaacttgtgcgaagggacggacgggcactgcacaaaatgggtgtcctccagccgctcgtggcagagggtgcagcacagcggggcactggttgccagagaggagtccgggaggctggcagggtgcactggctccagtcctcctgtgttgcctgctccctggccccccacctctctggggcccagccttctttggttcatagaggacggagagggcggactgttgctattcctcctggtagtggagtgaacctggttggcatcttttgaggcatgactgccccctgcattgtctgctactaagatcagggctgccatgggggactggccattctgggccgcttcaggcggtgtggtccggttggaatgaggtgaggcagtgggtggtggcggagacacaaaagaggatgtaggagtcatggggatcttgagcccctctgtggatgtggacagccacggctgggcctctccgttgatcttagggggcccgacttcaccttctggttctggagagggcttccttttccttgctgttcttgcaactggaaacacaaagaaatataaggaaaaaggtaacataagtggcggtgcactgaaagagatcattctcttcctaacccgaaacaaaagtcgttacagaattcctcctctctaaaagcacagacagaaaatactcatatacgagtttcaggtgcacatgcaacttaaaaccttcaggcgtacgggattctgaggcagcagactgatttaaaatggagccactgaaaatgacacgcttgtaactgcctgtttgtacacatgcacaaaagtaccctcgtttgcactcaacatgtgactgctaatgtcccccaataggttaaaaggtgactggtgccctcatgctcccatccaagaatgtgctgggaaagatcgcaaaattccggcccgttccacctactgtgggtcgtgagtagtaa

SEQ ID NO: 122457 - DNA, 1594 bp, Homo Sapiens
  misc_feature (239)..(265): n is a, c, g, or t
  misc_feature (308)..(350): n is a, c, g, or t
  misc_feature (532)..(534): n is a, c, g, or t
  misc_feature (842)..(861): n is a, c, g, or t
agttctgcttcccttgctccagacaaagcatcaaacagcagggagctagtggagaggtctattgtcccagtggggaaaaatgccctcttgtgggctccaatgtcccctgggcctttatgcaaggggaaattgcaaccatccttgctggagatgtgaaagtgaaaaaagagagagactcgtgacttttccggtttcagaaaaacccaatgattacccttaattaaaactgcttgaattgnnnnnnnnnnnnnnnnnnnnnnnnnnnccaagacaagggaaatgtagacttcataaacatggctgtatannnnnnnnnnnnnnnnnnnnnnnnnnnnnnnnnnnnnnnnnnngacgacaaaaggtatgtacttataaagacatttttttcttttgttaacgttattagcatatctttgtgctttattatcctggtgacagttaccgttctatgtaggctgtgacttgcgctgcttttttagagcacttggcaaatcagaaatgcttctagctgtatttgtatgcacttattttnnnaaaaagaaaaaagccaaatacattttctgacattgtaagattgccttactgtctgtcattccttattgctggcccctttctcaggccggaggccaagtggtggagaaggaaaggaaatgatcgaacgggcatgttgtcaagtgggcatgccactggggaaataccaccagtttaccctgaaacattgtcctcagaggagtaggaaagtggattttgaatctctattttgctcaaaagttcagttcctgagatactgatgactgagagtgctgctgggaaattttcaggattgtgtggtcttttggggnnnnnnnnnnnnnnnnnnnnaagacaaagttgaccgctgttcactgtccacgtgatcagttgtaagattacaatgctgcatgctagttggttacataagatacaattccagtgatggaaggcggttataatggatggtggtgtgtacaagatggcactgccatctttgagcagagcccagctctgcagcgccacttcatctttttaaacaccctagaggtctgtttgttgttgctgttgtcctttattttgaaagagttgcaagagaagttacagtccaggtgaacttggagattgtgggattggttttgtttctgttttgttttgtttatcatttacctgtagtgctattgctgttgatactatcacctataccctgtttctagtgagtgctgaatacagtatggtacaatgacagtaacagccgcgtggtgctgccaggactgcccttgggcatatcagtgacagcccaaatgtgggtggaggaaacctgtaatttccttcttaacatgtgtttgaaataccaagtgaataatactgttctggaaaaaaatgataaactagtggaaattaaagaaattaagggttttatataatagacaggccccacctctcaaaatatttttagaagtctttttgtaaactaatttcttttgatcactattttgcatcagtaaaatgatttttttaaaaccaataaatcatcaattattaccaggaacccccttaaaccgatgaaaatgtaaacttggcg

SEQ ID NO: 122458 - DNA, 507 bp, Homo Sapiens
  misc_feature (215)..(241): n is a, c, g, or t
  misc_feature (290)..(326): n is a, c, g, or t
  misc_feature (357)..(368): n is a, c, g, or t
aaagcatcaaacagcagggagctagtggagaggtctattgtcccagtggggaaaaatgccctcttgtgggctccaatgtcccctgggcctttatgcaaggggaaattgcaaccatccttgctggagatgtgaaagtgaaaaaagagagagactcgtgacttttccggtttcagaaaaacccaatgattacccttaattaaaactgcttgaattgnnnnnnnnnnnnnnnnnnnnnnnnnnnccaagacaagggaaatgtagacttcataaacatggctgtataattttgnnnnnnnnnnnnnnnnnnnnnnnnnnnnnnnnnnnnngaagacaaaaggtatgtacttataaagacannnnnnnnnnnngttaacgttattagcatatctttgtgctttattatcctggtgacagttaccgttctatgtaggctgtgacttgcgctgcttttttagagcacttggcaaatcagaaatgcttctagctgtatttgtatgcacttatttt

SEQ ID NO: 122459 - DNA, 647 bp, Homo Sapiens
gtggagtgaacctggttggcatcttttgaggcatgactgccccctgcattgtctgctactaagatcagggctgccatgggggactggccattctgggccgcttcaggcggtgtggtccggttggaatgaggtgaggcagtgggtggtggcggagacacaaaagaggatgtaggagtcatgggggtcttgagcccctctgtggaatgtggacagccacggctgggcctctccgttgatcttaagggggcccgacttcaccttctggttctggagagggcttccttttccttgctgttcttgcaactgcagtcagggccggctccttcttaaacttgctctcgaagggccccgagtggccgtgctggtgcagcgccagcagcgtgtcgcgcacggtcttgggcctgttgacccagtcctgctctccagacccgcggctcttgcccgcaccttccgcgctcagctcggcggccccggcagcggtggacaggctgtcggccgggccccggtgcgcaggcggcggcggttgtttctccttggctgccgcctcacgctgctcgtgctccacggcagcgctgctcgacacggatgccggccgcttgtgggcgcccagatcggtgggctgcgcggagcccaggctggcggccgca

SEQ ID NO: 122460 - DNA, 556 bp, Homo Sapiens
cagtgggtggtggcggagacacaaaagaggatgtaggagtcatggggatcttgagcccttctgtggatgtggacagccacggctgggcctctccattgatcttagggggcccgacttcaccttctggttctggagagggcttccttttccttgctgttcttgcaactgctttagacccgttggccccgttggcctcgaaacccaacaacctgcctgcagtcagggccggctccttcttaaacttgctctcgaagggccccgagtggccgtgctggtgcagcgccagcagcgtgtcgcgcacggtcttgggcctgttgacccagtcctgctctccagacccgcggctcttgcccgcaccttccgcgctcagctcggcggccccggccgcggtggacaggctgtcggccgggccccggtgcgcaggcggcggcggttgtttctccttggctgccgcctcacgctgctcgtgctccacggcagcgctgctcgacacggatgccggccgcttgtgggcgcccagatcggtgggctgcgcggagcccaggctggcggccgc

SEQ ID NO: 122461 - DNA, 1570 bp, Homo Sapiens
  misc_feature (177)..(206): n is a, c, g, or t
attagcattaatttaatacaattataacttcaatagtcactttgtcattgacaatgattgcttgatcacaggggtgagtgccccaagggctggtagtagaagctgttgctgcagaccagtgtctcctcttccctgcactgccagctcctacctgtgcatcgccccatatatactggnnnnnnnnnnnnnnnnnnnnnnnnnnnnnnttaaaaaatctgtcccaccacacaaacttctctctataaagcagataacagggaagaacaataacaaaagcaaaacaagccaattgctctctctttgggatatgattatttcccttgtgaatgaagtattcaacaacataagaaaaggaaaagaacgatttcttttgtatactccctaaacacacagagtttactgggtcagatttaactgtgagcatttatatgcctacttccaggcatcgtcatctgatgtttcactgctactggtttcggtgtctgagtcctcaaactctgctttgcaagtgcttctccaaggggagaacagactggaactgcggctctgcaagaagccattctttccaaagccatttcttctcagctgctctgtcttcatgtggaactctttgagctcatcctctgtgaggggaaggcaattctcatcattttcaggatattcctgccaacccatagctttcaataacctgtgctctgcttctagagagtgtgagagaacctccccttcttccactacagggagggcaagaccattttgatgacagccttcctccgcattttcctttggttcaggtgtgctgttgtcctccaaatcttccagcttgtcacagtctctattctctgagaagtctccattccggtcatccttcagagttttcaggaactcactcttcctgtcggtggttcggcgggtcaacttggtcagacgagaggagctgatctcaattggaggggtggtgctggagggactctctttgggagaactcagagctgcaccactagccagtaccactggtttggtaacagagattggactggtaaaagcagactcccggctagaggaaagggatcctgacttgtgctccatcctgttagctttcccatgcattaggcttggaaggaggtggtacaggcttaggaaccaggttcttatagacacttggaaccacggatgacaatttgttcccatttgcatggtgagatcctggtgaggtgaatgcagcagagaaggcagcagcaggatcctctttggaaacttttttgataactagcatcttggagggttgcttggcactaggcgggttttcccatactccagaaggtgtcccaataggtctgcatggctgatgctgtttgccagcttctggattcaaggaaggaaagtcctcctcttcaaactgcaacttttccaccttgtcttctttcttttcttccctaatctccataggtggcttttcctgaaaagcacaccctttccgggagtggaagctgccattccaatggcgatggtttcctgtgccacctccactacgttggctcatgccatcatgacctcgggaagagctatg

SEQ ID NO: 122462 - DNA, 438 bp, Homo Sapiens
  misc_feature (81)..(110): n is a, c, g, or t
  misc_feature (354)..(385): n is a, c, g, or t
  misc_feature (389)..(389): n is a, c, g, or t
  misc_feature (405)..(405): n is a, c, g, or t
ttttgttttgcttttgttattgttcttccctgttatctgctttatagagagaagtttgtgtggtgggacagattttttaannnnnnnnnnnnnnnnnnnnnnnnnnnnnnccagtatatatggggcgatgcacaggtaggagctggcagtgcagggaagaggagacactggtctgcagcaacagcttctactaccagcccttggggcactcacccctgtgatcaagcaatcattgtcaatgacaaagtgactattgaagttataattgtattaaattaatgctaataatttggatattttattttatttttggctgctcgggtaactttagcccttaaccaagcatatgtgggnnnnnnnnnnnnnnnnnnnnnnnnnnnnnnnncccntttccccttttggggnacagcccgtataatattttggagaataggggaa

SEQ ID NO: 122463 - DNA, 865 bp, Homo Sapiens
ccttgcggaggtcactctacccggggccaatgtccttattgtgcggaacaaacgcgatgtgcaaaaagaatttgccatttccaattcgttgtggttgattgaccccatgtgttgtatccaacaggaaagcctttgatctaaaataggaaatctggccaaacttcctccttagcttccttgataataatgaattgccttccaggttgcccagagcttttcagtctgagaactgcttctacagctaactttgtaaagtggtctttgtgatgagtaagaagttttgaggataatgttgtgcccgcaatattcattaaatcttgacggaatttaacttcatcggaaccatgatcaactgcagaactcaacagcgcctctcttgcagccttcgtggcttctctccaacccgctatgatggtctgtggatgaatcttttttgcaattaaagattctgcttcccttaataattctgctgctaaaacggtaacagaggtagtgccatcaccaacttcatcatcttgaacccttgacatatcaactaaaactttagctgctggattgtcaacaccaatgttttttagaatagtggcaccatcattggttaccataagagaggcatctcgtccactgcttagaagaattttgtccatgcctttgggtcccaaggtgctctttaccaagtctccaatggcgatggcaccaataaaagaagtcagacgagctgtctctgctctctcttcatcagctcctgccttaaagatgttaacaggtgcaagggaaagggacgccatggttccgaggagttccgcacacaagtgaatcccctcacagctcgtgctcgggaccagcccactgaaggaaaccggaa

SEQ ID NO: 122464 - DNA, 2705 bp, Homo Sapiens
  misc_feature (335)..(350): n is a, c, g, or t
  misc_feature (532)..(587): n is a, c, g, or t
  misc_feature (594)..(697): n is a, c, g, or t
ccgccgtatattccctccggcgggggtttctccctaaaaggggttttttgtggcggaaaaataggtttatttgtttcttcggggccgcattcccctcgggggagtttatttccccccctgtgtgggttttataacgcgcggcgccaaaatggggccccaatttttttccgcccccgcgttttttcccccctggggcaaaatttgttcggggttagtggtaccagggtggggaatttccggtgggcgctttcagggtttcctaaggcctctttttggagggcttcccacgttggcgggaatgcgctcaaggaattttccccccgggctcttgtttnnnnnnnnnnnnnnnncgaatttttgttttcccctttcttggggttccctttgaaaggtcccggtattccccccgaaattcctttggggtttgttagaacgcttgggtttctcccggggggttttttctggggagaattccaagccttattttttttccgaggttttccttgggaaccgcctattgcccttttttgcnnnnnnnnnnnnnnnnnnnnnnnnnnnnnnnnnnnnnnnnnnnnnnnnnnnnnnnntcctggnnnnnnnnnnnnnnnnnnnnnnnnnnnnnnnnnnnnnnnnnnnnnnnnnnnnnnnnnnnnnnnnnnnnnnnnnnnnnnnnnnnnnnnnnnnnnnnnnnnnnnnnaattgttcaaatttttattttaatgcacagtatgagaaatgaacttttttaaatcaactgatttgtatggaaaatgacacggcaaataaattagacctatgttaaagcgaaggtcagctaaatatccaaacttaaggatataatgggcaccgataaacagattccacagtcttctttaatagagtatctttcaaacacaactttgctagaaactggtccaaagatcgacagcacgtgggaatgcttaacaggggtggtgatcagggacacgtttcctgggtgccgctttgatgatgttgtccacacgcagaatcacctctgctgcttcagctgcactcagaagaacctgtcgcttcacttgaaaactttctgttatacccaggatagccatatctccaatggtgccttccctcatatccaatccagcagtggtattgccttcactgtgagcagccctgagctgtgccaccaggtctgcactgtcatagcctgcattgtcagctatgatggttggcaacattctcagtgctttagcataagactccattgcaacagcttctttgcctggtgttctattggcaagctgtgtcacagcatgagccatcaacatctcagaacagcctcctccataaactgttctagagtcctttacagtttgcgcaagaacacaaagagcatcatgcaatgatctttctgcttcatctaaaatttgttgagtggcaccacgcaaaacaatggtacaagcctcaccaagggcaaccccagaaaagtgaatgagtttgtcttctccaatcatgacttcctcgataagtttgcaacttccaagcttcaccagttctgggtgatcaaaggtagaggcaatttcaccacctgtgacaagagctaggcgttccacacctgcaaaatctgcatgctcaatagccatgacaccagcagcaccaaagagctgttcaggataattataaattaattgcctgttaataaagcaatttattccatgcttaagaatacgttcaactttctccttcattttttccttttccgcatgttctatttctgcaacctttgctgtagagtcaactcttacccgggaaccaaatatctttattttgtctgtatccataccagtatttgcaataagaattttagcattttcaattcgttttggttgatttactccaatttttttatccaacaggaagccttcatctaaataggaatctgccaaacttcctcctagcttcttgataatatgaattgcctccaggttgccagagcctttcagtctgagaactgcttctacagctaactttgtaaagtggtctttgtgatgagtaagaagttttgaggataatgttgtgcccgcaatattcattaaatcttgacggaatttaacttcatcggaaccatgatcaactgcagaactcaacagcgcctctcttgcagccttcgtggcttctctccaacccgctatgatggtctgtggatgaatcttttttgcaattaaagattctgcttcccttaataattctgctgctaaaacggtaacagaggtagtgccatcaccaacttcatcatcttgaacccttgacatatcaactaaaactttagctgctggattgtcaacaccaatgttttttagaatagtggcaccatcattggttaccataagagaggcatctcgtccactgcttagaagaattttgtccatgcctttgggtcccaaggtgctctttaccaagtctccaatggcgatggcaccaataaaagaagtcagacgagctgtctctgctctctcttcatcagctcctgccttaaagatgttaacaggtgcaagggaaagggacgccatggttccgaggagttccgcacacaagtgaatcccctcacagctcgtgctcgggaccagcccacgcgtccgcggacgcgtgggtcgacgatatcccgggaattccgggaccggtaccagcctgctttttgtaacgacgtgttcttatattcacctatc

SEQ ID NO: 122465 - DNA, 2277 bp, Homo Sapiens
ggattcagcaagaagttagttggtggttccccatggccccaaggtctgcagggctggattgtccacttttcctcctcaccaccagcactggctgctgctactgagaaaggcacagtggactcatgtgtgtgtcatgactttaatggttagctacagtatgcatacacatacaagaagtaggggagctgaagcccaggaaaaggctacaaaatacaacacagggaccaatacatttgcaaaacattcaaaatccttataaaaggggctgtattggtcctttcaactttgtcattattcagcttagcctgtatggccattcattcagtggggtaatgggggagaacaattaattaatgagatttggttccctttcctatattcccactgtttttaagtttcaggagaggattgggggggtgagggtaggggtgggctttaggcctggtctggtttccctttatataaagagctgacccccatctcaggcggctgaggtgtataatccccaaaagaaataagatggtacaaatgcagtcagctttggaatacgtttgggtagagacaaaatggaaactcatgggattccaatagtgagcccttcccatgttcctggacatatccaattctagcacatccacatttttaataacttagtgattttcaaggtcccctgtccacattaaaaaaataagttacataatattcaaactggctttttgctattctttgggacaccaggaatgtcagaagacatggagctatgccctcagacaagtgcatggcatcagctgcctcttcattacaaggtaccagtttatgtacttgccttggacacagcttgcacaaagccaagaagttccagacaaaggttttctctttcatgtatttacacaagttcaaaatgatattcacagcatcttctaaattttggccaagagtcaaaaaaatgcatttaaactttggaacgtgcccacataagacaggaggctgatcccaacagtagttggggcagatacccacaaaccaaagggctgggaaagtcaggaagagctgaaaggattcttcagtcagtttatgaactcggtgcagtgagacctctagactgacacgtacaacagagatgcagtttcgtctaactggcacctgtcccttccattacttgctgggcctgcttctgtcccatgcagcactgtgcgaccgactggaataacttttcgatttctggggcacagtgtacaaattcatggttccagaacttaaacgctgggtttttaatcagctcaatgaaggtaataagaagaccccaaggatgtggcctatttacaatcaaccgttccaagagaactcttgtgatctgttcttggatggcttccgtattggcctctgcaaaaaggtacagcatggtgcaactgaagtagtgagtgtggctatttgggtaccggagctgatttgcaattgcattcaaaaagagatagcgaccctcagtgtccaagtccacagccaaattctggaagatatccatgtgtgctgagtgagtgatggtgctcattgaaggtgtgctgcccttgttgtggatgtgcgcaatggcctgagtcccgacatagagcaccagtgcattgatgagctggaggttgtagcgattcccaggttcattggatacctgtaggttgctgcgcagatcagacaggaaagtgactggtgatcgagttttaagataggaatccaaatcctttttgaactgaggtggcattactccagtgaaattggtgagaatccggggagcaatgttaatttcactcaacatgtccacctttagattaggagtgaatgggtcggggagcctcatgtttcttggaaaggcactcaggatcaaatttcttaactggatacaattaggtgggatcacatcacagaacccataatggtaatcacaaaggaactctgggaaatcatgcaaaagaaccagcagcactcttaaagtgcccttgtagaggatttgcataggtttggtgagttccacatttctaaggaaaggcgctaaatatttgaataaatcaatcagtagctgtgcatacataggccaccccttctgctgtggcgtgtgtgccagcattcttgcaataaatatccgatgggaaatcagttcaagccaggcatatacaaagccaggagctttggtaggcctcaagatgtggaatgtattgcagaaagctgtaagtgtctggaaattaatggtttccaacacatgctcaggtgcattcagttccaagagaagca

SEQ ID NO: 122466 - DNA, 526 bp, Homo Sapiens
gagaatccagctgtcttttattaagcaagacttagagatctgcaaaatgtagaaagacttagtgatgagtgtcaccagaaaatagttcatgtttcttacattagcacatagtgggtctgtttttaaaaatgaatatttttaaaatctaatttctaatgtggaaaattctgaaataaaacgcacagaaatgagaactctttggggtcccaagaaccagtgctttaaaccaaagattaatttgaaagcctctgtcagaaacccaaaccctagccagttagaactgtcttcccatgttggcctttcagactaagtcctaagtcaaggtttcttaatttctaggtcgctatctctttttgaatgcaattgcaaatcagctccggtacccaaatagccacactcactacttcagttgcaccatgctgtacctttttgcagaggccaatacggaagccatccaagaacagatcacaaggtaagcgagcagcttattttttaaatgcttcaaaaggatctcctccctttcatc

SEQ ID NO: 122467 - DNA, 2973 bp, Homo Sapiens
ttttttttgagctacaacacaaatgaatgggccattttattgatttttacctcctaatagtggatacaggttgccgtggtttccagcaggatctcagatgcaaagggaagtgaagaaaacagatgaatccctagggtaccccgccatggaaccaaacaccacatcaactggaactcttcttgcaaacgaaggctgaagatcaagaatgacattctcacaccacagcacagcttaaatacttctttgacaaaaataataataaattatatttgactcagaaaataaattctgttcagcagagtgacaggagggtccattcattgcattgcacgaggggctctacggaggggtgaggatgggtgcaggatgccacagtgacaagggacatggggtgcgggcccagcagcacaggctgaagttagctgacgcatgcttttggcttttatcccacgggcgggtagtggccggacccctggctgtggcctgtcccaagtgagactgcaactgtccccttcctcctcacgtccgccttgtcttctgtttcttggcttgtctctttgcatcttctgggccgctattgtcagaggctgcctggccgagcgcgccgactccctgtagccggcttgtcaactgcagcagcaaaggaatgagcttgtcatggttgtaaccggccagcagaaccagcagcgtcaatggcagggcaatgtaggatccttgtgcgatgtcctgttcaggcagcttcctcgtgggattaaaaatcaaggtgatgtgtttatggtagcccactgcggtgaaagaaacttgaggcaagatgtagtcatactgggatctggggagtgtggagtccagaagcacaacatagttctcgccatctctgagcagtggggggaaatggaagaacagggactggccaagggaaactgtctggattggattgtcgaggttttcgcttttgtaaagcttgacccataacgtaggaaggtattcagaggaagtgatcacatttccacttaaatcaaattgattaatctgccggaaaactatgatgtttacatcatcgatgtcattattcccaacctcaatcaccctatggtgggggagcgcccgctcaatgtggtcgttgccttctgccttgagctgaacgtggtacacacatcccggcagcaatccacgtaatctgaacttgccctcttcgtctgtcacggtgtcttctccgtaaatgctgcagtcgttctggcccaccgcttccatggcaaccccttgttcgggctctccgtttaaggaagacactgtgccatagcaactgtaagcggttcggtaccccgtgatggtgatcttcaggttctggccttcctgcacctcgatcatctgtgaggatggctcaaaccggaactccttcatcatgggtttgaagtaatactggccagggctcaggtttgagaatgtcagaatgccgttgtcctgggtcaagaggttggaacgaaacaggccaccgctcagggataagaggactcccgggaggggctggtcatcctcagcttttatctcaaagcttacgcctgccagggcataggccttgaagtctccgatggttccttccaccgcagtcagaacatagccctccttctgtgaggtcaccgtgtactccaggtcactgtgcagggggccaacactgtaggcacctttgtcatcagtaaagactgtgatcagcggtgaacttgcccccttttcactgatgacaatctcgactccttccaactcggggtggatctggccttctaaaaacaggcctgccttcccatggatctcgatcagcttccctgggcagctttctccactgacaacggcttccattgaagggggataaaagagcagctctttagatgacggtgtaacagtgattttctctccagaccgcgcccagtaagagaaatcatacgagaaggggccttgtaactcatctaccatctcctgcacgggaggcttggtcattctttcttcaccttcctcattgccgtttttctccctctcctgcctgcgggcctcgatctcagccagctgctgctccctccgcagctcctgcacagacttcagagggcctaagaccaaggcgggttcactgtcgatggaagacttgatagtcacagtgacatccatcattttgtcggtggtgatagttccaaggacatggtggcgaatggctgtcaatgtcaagatactaggtgaagacgtgtcataggtgtagaacgcttgctcaaaccggtggcaggagcgaggggtcactttgtacacaccaggcttggacaggcagaatcggttgactcctttggagaggttataaatccccacattctcacgcccatttccatcctgataaaattccagagtgatggcgtgagacagggaacatctcagcatgtagcccgtctgcctgaactcaactgcagacatgtcatcctccagcacttccacctccaggctcttgttcttccagcaccaatcctcatgcatgatgcttattttgtattttccagggagcacgttgtcaaaggtgaaagtcatggcgttgaccttgccggagagctggaggctccgcttctcaccctggcggctcagggactgtagagtcaccagcaagtcaccacaggtgtccaaacaagagactttcccagaaactgatgccaagaactgtacaaaggccacatccatcatgggcctgttggtcacagtaagaggaaatgtctggggtttcaacgtcagccctgctctggtttctgcctcaggaaccatcacctgcactttgtaagtccctggttttgctttaaaacaaaatgatccatgagcatctgtctccacggtgaccaaagacttgtccttgtcttgagatgacaggacaactttgtatttattcatctgcttgacgcctcgtgccgaattcggcgcgccgtcgacttcatactctctaacacatag

SEQ ID NO: 122468 - DNA, 1298 bp, Homo Sapiens
cttctcttttcttctttagtaactaaagaggatgtcctgggctgcaatgtctcaccagtgcctgggttccagccccaagacgagagtctggtgtatttgtgctacacggtctccagagaagatggctcgttctctttctattccttgccaagtgggggctacactgtgattccgttctatcgaggggagaggattacctttgatgtggcgccttccagacttgacttcacagtggagcatgacagcttgaaaatcgagcccgtgttccacgtcatgggattctccgtcaccgggagggtcttgaacggacccgaaggagatggtgttccagaagcagtagtcaccctgaataaccaaatcaaagttaaaacaaaagctgatggctcattccgccttgagaacataaccacagggacatacaccatccatgctcagaaagagcacctctactttgaaacggtcaccatcaaaattgcaccgaacacacctcagctggctgacattgttgcaacagggttcagtgtctgtggtcggatatcaatcattcgcttcccggacaccgtcaagcagatgaataaatacaaagttgtcctgtcatctcaagacaaggacaagtctttggtcaccgtggagacagatgctcatggatcattttgttttaaagcaaaaccagggacttacaaagtgcaggtgatggttcctgaggcagaaaccagagcagggctgacgttgaaaccccagacatttcctcttactgtgaccgacaggcccgtgatggatgtggcctttgtacagttcttggcatcagtttctgggaaagtctcttgtttggacacctgtggtgacttgctggtgactctacagtccctgagccgccagggtgagaagcggagcctccagctctccggcaaggtcaacgccatgactttcacctttgacaacgtgctccctggaaaatacaaaataagcatcatgcatgaggattggtgctggaagaacaagagcctggaggtggaagtgctggaggatgacgtgtctgcagttgagttcaggcagacgggctacatgctgagatgttccctgtctcacgccatcactctggaattttatcaggatggaaatgggcgtgagaatgtggggatttataacctctcccaaggagtcaaccgattctgcctgtccaagcctggtgtgtacaaaagtgaccctcgctcctgccaccggtttgagcaagcgtctacacctatgacacgtcgtcacctagtatcttgacattgacagcattcgccacatgtcct

SEQ ID NO: 122469 - DNA, 696 bp, Homo Sapiens
gcaatgatgtttacttaagctttatttatatatatagtgcgtaggttcctggagcacaaagaagaaagttgctcagatttatccagacctcacataagtttatagatttcaagtagccactgtattttattacagaaaatacattcttcaagaggaaaatgttaaggccatagcagctttcaccttagctatctaagcttgtattaggtcatcattaaatagtatctgtatcattcttatgtgttccgtaagttatgccacaaataccagaccaagtacactcagtctagaaacaaaaaagtgggaaataaaggttaaaacattctaataggtgtaatgggctgatagatgactttatattacaaagctacttaagacaattctacttttctagaatacaacgcattaatataaacatttgaaattcagaagatttggcctgtggatgctttgtttctcaatgcaattcttgttaatatgttagtaagtaataatttattaataccaataataaaaaattaacatggttgagagcaggtgtatctcatagcctttatcaatttaatgcttaacaccaaaatgctattcatatttttatttcagcctattaaaaaaatttataccacagctctgggcaagtggcagggtggcgccagtgacaggaatcagttctgcgtatttcttgattcctagctc

SEQ ID NO: 122470 - DNA, 1030 bp, Homo Sapiens
tgggcccaagtgatcctcccgcctggacctccctaaagtgttgggattacaggcatgagccactgcatccagcttgcttctaattttcctacccaggctgttttaaacctagttctccagctaagtaaaatgtgcccaaatggaaaacatctaaatcttctgcagcccattcttcctgtgtctttgtgttgacaaacctctaatcttccatgtctttgtgttgacaaacctaaccttccatgtctttttgttgacaaacctctaaccttccatgtctttgtgttgacaaacctctccatgggtggtgcatctgaccctatcccaacatgccttaggacgctcatctccttgactgtctgccatcccctcccaaaactaagtggaggctctgtcttttcctcctagtttgaggttctcttctcccagtgtctaaaatgatcaatatgcctagagtagatgctgctgaagaggcaaagtagtaatcctgccacctggaagcaaaggctgtgggttggagggggaagcgggtgtgagggctgatgataagccctaggaggctcctgagtcatattcctatgtttgctctctggagagatgggctaaactgtttatcttttaaaaaccagatgattaaaaagttacattttagtattatactgataggaatataggataatctcttctaaagcctatttggtttccagaagagttagatacttgaacaagagtggacagagtaagatacctagctacagcaatagaaatcacaaactgttctgtggttttaatcttcctatttctgatttagaagtatgaagtgatcatatttaatctttctgctcctgctcaaaaataattctataacatcatttaggttatagaaagtttctacttatagcccttacattctttatgaccgaaatctgtgtctttcctcatgactgataattatctcccaatttggtcacttctgctaattgctattttattaaacttgaaattttaggttgggaagcaaagggaaaccact

SEQ ID NO: 122471 - DNA, 1663 bp, Homo Sapiens
  misc_feature (16)..(16): n is a, c, g, or t
  misc_feature (1193)..(1202): n is a, c, g, or t
  misc_feature (1497)..(1545): n is a, c, g, or t
  misc_feature (1564)..(1565): n is a, c, g, or t
gagcacattcatcatnttaggatgtcaaaaggagattgaggagatcagatcaataatgaggcaatgtatgactccaagtgctattgtcacagatgaaattggcagtattgaccttatactaaaaggcaggggttaaaaatgattatatacattttccttaaaacacttgcaaacattttattcagttgtctttagctacaattgctttgctttttaaaccttggcaattgtggcaaaattatattgcccattttgtagcaacttattttgctcccttccccccatttttgttttaatagggactaatgtgggaagaactggctaatttgtcacagtgcttagttacaactgttaatgtgtgacctgctgttggtgtacatgtgggtacagggtgtttttaaatccaacaagatagagtataatatcaatactgctaaatctgcatgtcctctgtgtgactgatagagcgttgctatttcatttttttaagacaaaatgaaagcaaaatatagagttccaatgtattggtgtagataatctagttgggaatacttttaagtctcaccttcccctttaaactaatattcataattggttcatatgtttaaaagactttaatttacaaattaaattgcaaatgggagcattagatttagttttagacttaggtgggtagcaatgccagtaaacttaaattacgtaacttcttgcaaccacgaaacctgtaatacgctgtacagtaacaagtgttggcattatcagttgaactgtaaatacaaaatgcttcttccaattagtctctatgatgattaagtttctaaaatttatctgaacaccattcagaaacttgttttggggaatttgatagttattgatgtgcatctgttaaactgatgacagacataactcatcattccccagaaaccttttttgattacagtatctaacattttgcctcctcttttttggttttgctggttataaaggtttggattggagagggctcactggatcccaatccttggagctggatcattggattcaaatcataatgtggataggatagggaggatgaattaccaggattcatggagcgggatcagattaccaggaacataggagtggattcctgccccaaccaaaccgcattcgtgtggatttttttattcaacttaattggctattccaaagannnnnnnnnncctatttttgacgattggagcccttaagatgcacgatggaattgtgttttgcgttttttggtaaaaggagcaaagcgaggacctggagataaacgctggagcaatctccttggaaggattcagcacgagtagatggtaaacatttaaaggggaaagggggggtttgtttaaaatagtaaatcagtaagtcacttctaaatttaaagaaaacaaaattggagttgaagaataagtaggtttccaatttggctattgccgttttctttgaaaaaataaacatttttttaaaaactannnnnnnnnnnnnnnnnnnnnnnnnnnnnnnnnnnnnnnnnnnnnnnnntataaacccacaaaaacannccctggtgggcccccttgggccctcaaaaactttttcaaaaaccttcctttgggcccccgggcccccctaaggaaaaggaaaccgggcccaaacttgc

SEQ ID NO: 122472 - DNA, 1869 bp, Homo Sapiens
  misc_feature (1568)..(1577): n is a, c, g, or t
ggggcgccgagctgataaaggcgccattttggaggggccgcgggagacgtggtgccgctgcgggctcgctctgccgtgcgctaggcttggtgggaaggcctgttctcgagtccgcgcttttcgtcaccgccatgtcgggaggtggtgtgattcgtggccccgcagggaacaacgattgccgcatctacgtgggtaacttacctccagacatccgaaccaaggacattgaggacgtgttctacaaatacggcgctatccgcgacatcgacctcaagaatcgccgcgggggaccgcccttcgccttcgttgagttcgaggacccgcgagacgcggaagacgcggtgtatggtcgcgacggctatgattacgatgggtaccgtctgcgggtggagtttcctcgaagcggccgtggaacaggccgaggcggcggcgggggtggaggtggcggagctccccgaggtcgctatggccccccatccaggcggtctgaaaacagagtggttgtctctggactgcctccaagtggaagttggcaggatttaaaggatcacatgcgtgaagcaggtgatgtatgttatgctgatgtttaccgagatggcactggtgtcgtggagtttgtacggaaagaagatatgacctatgcagttcgaaaactggataacactaagtttagatctcatgagggagaaactgcctacatccgggttaaagttgatgggcccagaagtccaagttatggaagatctcgatctcgaagccgtagtcgtagcagaagccgtagcagaagcaacagcaggagtcgcagttactccccaaggagaagcagaggatcaccacgctattctccccgtcatagcagatctcgctctcgtacataagatgattggtgacactttttgtagaacccatgttgtatacagttttcctttattcagtacaatcttttcattttttaattcaaactgttttgttcagaatgggctaaagtgttgaattgcattcttgtaatatccccttgctcctaacatctacattcccttcgtgtctttgataaattgtattttaagtgatgtcatagacaggattgtttaaatttagttaactccatactcttcagactgtgatattgtgtaaatgtctatctgccctggtttgtgtgaactgggatgttgggggtgtttgtggttatcttacctggggaagttcttatgtttatcttgcttttcatgtgtctttctgtagacatatctgaagagatggattaagaatgctttggattaaggattgtggagcacatttcaatcattttaggattgtcaaaaggaggattgaggaggatcagatcaataatggaggcaatggtttggattggagagggctcactggatcccaatccttggagctggatcattggattcaaatcataatgtggataggatagggaggatgaattaccaggattcatggagcgggatcagattaccaggaacataggagtggattcctgccccaaccaaaccgcattcgtgtggatttttttattcaacttaattggctattccaaagannnnnnnnnncctatttttgacgattggagcccttaagatgcacgatggaattgtgttttgcgttttttggtaaaaggagcaaagcgaggacctggagataaacgctggagcaatctccttggaaggattcagcacgagtagatggtaaacatttaaaggggaaagggggggtttgtttaaaatagtaaatcagtaagtcacttctaaatttaaagaaaacaaaattggagttgaagaataagtaggtttccaattggctattgccgttttctttgaaaaaataaacattttttaaaaaact

SEQ ID NO: 122473 - DNA, 2250 bp, Homo Sapiens
ttttagatgttttaggactttaatgttctttacatattcaacataaaatactgacaatagataaacaataggggaaagacttttcagcaaagtatcactctcgtagtcatacattacaaagaaaacagtagagaacaaaggatagggtaatttaacagaaatgtttagtttaatggcataattgaaaaacaaccaaccaatcaactttctcttctacctatggaaagaatggtaaaaatgaatcaagaacttctaggtctttttcataaaacagcttaaaaagaggaaggcgaagactggggagggggtacaactcttgctaatggaatgctataatgcacaaggtcaaggatttaataaattctaaaagtgtctacatatatcagtgataactgtattattagaaatataaatgtatagaaatataaagtatatggtattaaaaacagaccttgctaatataaacatatataaagtatgtcacttctcctgtaataacagcataaagatcgatctacagtttgcccttcgcctggcactcttaaaccactcctccaatggtcaatgttgaccttgaatcaacagccgctgaacccaggagaccccacagatgtgtagattcagcacctagagggcccccctaccctctgtgctgtgtgttcccatgactccagaaataattaatcgcaacttgcattattaagtccacaggcaagtttgaaatctaactagaaaaagtagcagcaaaggcaaaatacgcgggaatttgttagaaaagcaacaagatttcttaaaatgcttccagttcaagtcagaattaaggtgacattaggtcccaccagctttacagagttgtggatgttttgctgttgttctttcaaaaaagaagaatctgcaataaacatgttcatttgagaaaaatactgtgttaactttttgtagccatccccaagttactttaaactttgtatgttgttcaagaacagagtatatcctggttaggatgtgttcatagctgatgcatctccaaaaattttttcatgaaggcggccagcttctgaacgtcttcaattgtgacagcattatacagagaggcccggatgcctcccacagacctatgccctttcaaggacaacatattgagttcaagagctttatcaagaaatcttttttctaaagcatcatctcctttggcattgccaatgcggaatggaatattcatcttgcttctattttggggctccactggacaaacgtagaatccttgagaattatccataatctcataaattgtttgagatttgatggagctaagcttctccatggccgcggcacctccattgtttttaatccactccagaaccaagcccatgacgtagatgctgaaacatggaggcgtgttgtacaaggagctgtttccagcctgcaccttgtattccaggaccgaggggcactctcggagggcaaaccccagcaggtcatcacggacaatcaccacggtgaccccagcagagccaacattcttctgggcaccagcaaaaatcacaccaaacttggaaacatccactggcttggacaggaagtttgaggacatgtcacaaaccagtactgctcccttgacatcgggtataaagtcaaactccacaccatgcaccgtctcatttgcgcaataatacacgtaggaggcatctgggttgaggttccaggtgcttggatctggaatttttgtataactcccaagtttagggtgaacgatatttatagtcccaaacttcttggcttcttctgcggccttagctgaccaagctcctgtcaccacatagtccgcacaccttcctgctttcaagccaatgaggtttaaggggacagcactgaactggccgcacccacctccttgcagaaaaatcaccttatagttgtctggaacagctagcaattcccgcacaagattctctgtattgttaataatcttggcaaaatctgatgacctgtgactcatttcaagaacactaatgccaactcctttgtagtctaataattccttttgtatctctaacaacactgagtgcggcagcttggcgggaccaggcccaaagttgaccacctgcctgggggcgtccatggtgcggcggcgagggcggtgagtcagccaaggaggaccgaacgcgtgaacggctggcgttcctgccgctgccctcgtgccgaattcgccacccaggcctcgctaccttaaaccgttagagttactgc

SEQ ID NO: 122474 - DNA, 926 bp, Homo Sapiens
  misc_feature (63)..(64): n is a, c, g, or t
  misc_feature (120)..(120): n is a, c, g, or t
  misc_feature (127)..(127): n is a, c, g, or t
gggccggcggcacccttcccattgttttttaatccccactcccggaaacccaagccccattgnncgtagatgctgaaaccatggagggccgtgttgtacaagggagctgtttccaagccntgcaccnttgtatttccaggaccggaggggcacttctcggaggggcaaacccccagccaaggttcatcacggccaatcatccacggtggaccccagcagagccaacattcttttgggcaccagcaaaaatcacaccaaacttgggaaacatccactggcttggacaggaagtttgaggacatgtcacaaaccagtactgctcccttgacatcgggtataaagtcaaactccacaccatgcaccgtctcatttgcgcaataatacacgtaggaggcatctgggttgaggttccaggtgcttggatctggaatttttgtataactcccaagtttagggtgaacgatatttatagtcccaaacttcttggcttcttctgcggccttagctgaccaagctcctgtcaccacatagtccgcacaccttcctgctttcaagccaatgaggtttaaggggacagcactgaactggccgcacccacctccttgcagaaaaatcaccttatagttgtctggaacagctagcaattcccgcacaagattctctgtattgttaataatcttggcaaaatctgatgacctgtgactcatttcaagaacactaatgccaactcctttgtagtctaataattccttttgtatctctaacaacactgagtgcggcagcttggcgggaccaggcccaaagttgaccacctgcctgggggcgtccatggtgcggcggcgagggcggtgagtcagccaaggaggaccgaacgcgtgaacggctggcgttcctggccgctgcggtgagagtctgcagccggcccc

SEQ ID NO: 122475 - DNA, 999 bp, Homo Sapiens
ttgtttcataggctggatgcatttcccaaaaatttttttcatggagggggggccagcttttggaacgtcttcaatttgggacgggcattattccagagagggcccggatgcttccccccagacctatggccctttcaggggacaacatattgagttcaagagctttatcaagaaatcttttttctaaagcatcatctcctttggcattgccaatgcggaatggaatattcatcttgcttctattttggggctccactggacaaacgtagaatccttgagaattatcaataatctcataaattgtttgagatttgatggagctaagcttctccatggccgcggcacctccattgtttttaatccactccagaaccaagcccatgacgtagatgctgaaacatggaggcgtgttgtacaaggagctgtttccagcctgcaccttgtattccaggaccgaggggcactctcggagggcaaaccccagcaggtcatcacggacaatcaccacggtgaccccagcagagccaacattcttctgggcaccagcaaaaatcacaccaaacttggaaacatccactggcttggacaggaagtttgaggacatgtcacaaaccagtactgctcccttgacatcgggtataaagtcaaactccacaccatgcaccgtctcatttgcgcaataatacacgtaggaggcatctgggttgaggttccaggtgcttggatctggaatttttgtataactcccaagtttagggtgaacgatatttatagtcccaaacttcttggcttcttctgcggccttagctgaccaagctcctgtcaccacatagtcagcacaccttcctgctttcaagccaatgaggtttaaggggacagcactgaactggccgcacccacctccttgcagaaaaatcaccttatagttgtctggaacagctagcaattcccgcacaagattccctcgtgccgaaatcgccacccaggcctcgctacctt

SEQ ID NO: 122476 - DNA, 898 bp, Homo Sapiens
  misc_feature (786)..(786): n is a, c, g, or t
cagtctgaaaagagattgtctgtttattatctctatgcaaaaacccagggctatgctgtggtcttcaaaatccctctttatgttccaaaatgaaaacttatcatttaaatttgacatataggaaaggactagagccttttcaggaatttggagtttgattagaattctggggaacacagaaccttttgctgtactgtgatttacctattcaggtttatttaataaatacagtagaggttaacagatgatagtgcaagttcaatagaagtagggtgatttaaaaacattctggattacaatgaaaactcacttatgtgggagtttgagctcacatttacagcctccaccagcagaaatcatgcaaataagaaccactgcagagttctttgtccacagacaccatctcccttcaggatggtcctgcttttcccccagcacctgtgcaggcatctctggcgagccttatcacagtctttctgagtttgcctgtatgcttcacataaatgtagtaaaaaaacaatgagacgcttctttggggcaactgctgtagaggccactaatgagaaagtgtagatgtttccatcatggaaaattacaagtttacttggtttcagtccttggcactaagtcttaggttccttgtcactgaacagccttctttccacttggcttctcttggccagcatcctggcacaccatcagaggagaaaataatgagaaagaagtgtcttacagggatggggagcactggtggcttaccatatgggcataatcatggctcttcanacaaatccttgaccagacagtagcactatttgtcttcttgcctacacaagctacatgtggggttcacacctcctgaaacatgtgcacactaagagaactggagaatgtttgc

SEQ ID NO: 122477 - DNA, 700 bp, Homo Sapiens
aaagccctgatatattttaattagaaattgaataatacatgccttggaaataaacaataataaattcaacatgtgtagtaaatatataataacaaaggaaatttgggtgaaacatttctcagttataaggaggaagattttttgatttgtattatagagtgtttagtccggaaacatttatcattacaaagaacagcatgaaatcttaattagattccctcactaggagttatcaagataaaagaaatgcagaggattaataacattatatttaaagtaaatatccactgtctatgtgcgttaaatattccatttcagaaaacttagagattatttatttatactaggatgaatgtatatcatattagacttcttaaatgaataacaattctgctttagggaagcagtagtaggatgctgatagtaggctatcgggatatttatctgtctttctatccatcggcttgtactgcatctaagtatttatacatcctatcagaatcacaaaatacatacaagtaaatgccaacaaaatctcaaaatgcaattaaatttaggacatttttgccttgaatggcctccatacttaatctcaattattccttgaaatttgggagaataatacattttattacacacataaacatatgatttgagttagcatcactgatgacaaaatgttaatctaaagtaccaacac

SEQ ID NO: 122478 - DNA, 1414 bp, Homo Sapiens
  misc_feature (1005)..(1059): n is a, c, g, or t
  misc_feature (1189)..(1199): n is a, c, g, or t
  misc_feature (1225)..(1354): n is a, c, g, or t
tttcacatcataaaatatttattaataagtaaaatgattttcccctgcctttggttattaaaaaatgagtatcattgatgataccaattgccaacactggttttacattattcagtcatgaaacagaatagaaagatgatcgatagatatctatagacataaatgtgtagaagaccataccatacagcgatttgtttaattacaaaatactggttgtgctagcagttggaaatgtacttgcacatccttaaagttatctttttttatataagtaaagaacacacaaataaattcacttgaatttgataatttggaacattggcaatgaatacagtgcctgttgaggcctgaaagagagaggaaatcaagaacagtgtgggagaagaaaggcaatccttcgttgaaaagcttttctcttaacaatccttagtgcctgaaaaataagccattttgataacaagagtataaaaagccttatgatctgcaaagtaaatcgtatctggtttaaatttcatcccaagtctcaggttatggctgaggagctatactaagtatctttgtaacacatttctttgaatttttataactaagacaagaaaatttttttatcagatctaggcagaaatactgatcttcatttacaagtatagtaattacttgcactcaggactatatagacatggggctctgaaaaccaaacagaaggaaacgccaaaccatacccgcaaggcaaacttaaaagtaactcagagaagcagcgggtgatagtttatgatttcaatataaaaaagaatgcattacctctcagatgtcaccttaaagccagaaaattaagatacaatcaagaaggggatgaatggttttatgactataccacctactacttcaagattaaaatcatcccagagttctgaaatgtcttcattagttaagtaactatacaatttatttcagtctctttttaatgtagaaaatcactttgtaataagatctctacataaggtnnnnnnnnnnnnnnnnnnnnnnnnnnnnnnnnnnnnnnnnnnnnnnnnnnnnnnntttttacaatgaaattaaggtgtgcctgtggaatactgagactgatgactgatctcacagagttcaaacaggtttccttttagaatagtcctgttatttgcgtcttccccttaaccttggatgcattagnnnnnnnnnnnggctcaggctgggggcggtggctcannnnnnnnnnnnnnnnnnnnnnnnnnnnnnnnnnnnnnnnnnnnnnnnnnnnnnnnnnnnnnnnnnnnnnnnnnnnnnnnnnnnnnnnnnnnnnnnnnnnnnnnnnnnnnnnnnnnnnnnnnnnnnnnnnggccgcgtatgcggccgcaagcttattcccttgtagtgagggttaattttagcttagcac

SEQ ID NO: 122479 - DNA, 345 bp, Homo Sapiens
ttttttaagtagattctgagtttattgttaagatttctttatttacagtacaagtctccaaaagttcaaggcagttatcttttaaataacatgtcaatcatataaaatagctagaaccaaagtagagaaatatatacaatacattaagtactttcaatatagtggcatttttcatattaaattaaaagaggctactatgatttacaatgtcatttccctagtttaaaattcaacatgtcaaaagacataatgtacattttttacaaaactgacacagcagtattaaaactgctaatgattgtagtttttattttttctataatacactgcacctgtgttaccaat

SEQ ID NO: 122480 - DNA, 703 bp, Homo Sapiens
ttttttggctgctccagactttgtggctcctgcaggccatttggatgtatacgggcaggtcacaggggttacaaggaccttgctccggcttagaggcctgacaatcttcctctggcctgacttctgtccagtgtttgctctttaaaatcctctccttcttgggctttctcgggccaggcctcctggttttccttctttttctctgctactgctcagcagttgggccccaggctccatctcctccgccacggcctcatgcttggtgtctcacctgtcttctcactccaccgccttgggagagcccagccccactggctgtagatcaacaactcgcagcacagtctccaggctcacatagcccactgccatctggatgtcctttgtacatgttgaaagctgtgtgccccaaatcaaatttgtcctctccctcctccctccctattctcagcatctgagtgacatctacttctgtcacccaaggtagaatcatccttgcctcctgctggctttgcctcatctgtcactgagccctgttgatctcaccagcctaaaccttgcagacctgcctaccagttctcacgtaacaccagggttagaagaacatgaaaacactgctgcaaggaagcaaacaaacaccttgcaggcaggcaatgagtcaatgtccaggcagaaggaaagggcggggctcttcacgggagattga

SEQ ID NO: 122481 - DNA, 801 bp, Homo Sapiens
  misc_feature (413)..(474): n is a, c, g, or t
aaagatctaattggcttttattagcgattcatgaactgggtagcatccagcctacaaaataaaacagaagccctgccaggtatgatagaatggtctgcatttgtaaagcagcactagcaggaacaaggaaacagcatagtagacacagcagattggttaacatcaggttacttcaggttacgttccttgtgtggattaaagcagagggggcttcctcatcataatcacgcttgctcacgttgactggactccctttgatcagttgctgtgaatctcctgacttgttgaaagtgtcctatttttaagttcactttgattacatggactccattcctggatggagaggtgagatcttggagttccattcaacataaatgtattgtaaagtttttgttagagggcttgttaatgtnnnnnnnnnnnnnnnnnnnnnnnnnnnnnnnnnnnnnnnnnnnnnnnnnnnnnnnnnnnnnntaaatgctcctaacattatgaatctaagaaatgtcaggattagctaaattgcttaatggcacaacaatattagagtggaagctgagaagcaaaattgttacactgagcaagtatttttaactgattgaaatgaaagataagagctttttaaaagtttatcttcccctcaaccctcccaggctctcaaaccactgtattagcttgctagggctgcccataatacataccacagattggggggctttttacattaatttattaggggggtagaatagggtctactatgttgtcaagctggcttgactcctggctcagcatcctctgcgt

SEQ ID NO: 122482 - DNA, 626 bp, Homo Sapiens
taaagatctaattggcttttattagcgattcatgaactgggtagcatccagcctacaaaataaaacagaagccctgccaggtatgatagaatggtctgcatttgtaaagcagcactagcaggaacaaggaaacagcatagtagacacagcagattggttaacatcaggttacttcaggttacgttccttgtgtggattaaagcagagggggcttcctcatcataatcacgcttgctcacgttgactggactccctttgatcagttgctgtgaatctcctgacttgttgaaactgtcctatttttaagttcactttgattacatggactccattcctggatggagaggtgagatcttggagttccattcaacataaatgtattgtaaagtttttgttagagggcttgttaatgttggccttgggctagtcctttcccatctctgatcctctgcttcctaacttgtaaaatacagattaaatgctcctaacattatgaatctaagaaatgtcaggattagctaaattgcttaatggcacaacaatattagagtggaagctgagaagcaaaattgttacactgagcaagtatttttaactgattgaaatgaaagataagagctttttaa

SEQ ID NO: 122483 - DNA, 1335 bp, Homo Sapiens
  misc_feature (126)..(148): n is a, c, g, or t
  misc_feature (1272)..(1272): n is a, c, g, or t
ggtttctcttttcccaaaaatacttccatttaatatagtcatatgaaagctaatcagcaagaagggagattgacagacatgcttaggaaaatagctacgtaccataccaccacaccaaagtgttgnnnnnnnnnnnnnnnnnnnnnnnaaacaaatggagaaaagacagaccagccaggatgacttcccacagggaagggatttaagggctgcccccatgaatttcttcaggccacgacagctacttcctcctcttgtatctggatttagatttaaagtttcctcctcgtctctggtggggcaagcccaactgtttcctttcttcaaaggaagggccagctcgatactgtttcagggccttcttgcttgtgttggtgagttcttcatcaaatacagatttcttcccctgcttttgcttcttggcaggacctctcactggctcctcctcgggcattgctcgggcccgcttggctctgcgattcctcttcgctagccgttcagcaaacatctgcgccttgaggatttcaaactgagacctttcctctgctgtcatctcccccttttttttggcatccttcataaacttcttccttttcttctttcctcttaaggccaagtcaaattcctgcagagctttggcaattttctccttcttcctctcttctttggtctggaaccagctcctctcgggctcttggaccactgcctccttccccttctccaggagccgctttgctgtattgatctgggcttctgactgctgcatctctttttcctccgcctctagctgcagaactgcatacacatctttctccattttctcaatcttgtcccggaatttgaggatgacatcttggggaagtatcctggccttcacaggggccttggcagcttttacaatctccttcagcatcttccgctcatcttctcccaccagagagactgagcgcccagccctgccagcacgtgctgttcgccccacccggtggacataatgtttgatggtattaggcattgtgaagttgattacctagaaggtcaaaaatgaacgtcaggcctggcaagggaaggggggtgtgaagaggcaaaaagacttccaccaaaagtccaaggaagatagtgtctgctcaccgttttgaccccctcaatgtcaagtccacgggctgccacatcagtggccacgaggatgtcaatctgttcatccttaaaacgcctagaaacagtcacaaacagctgttcatccagacaccctcccctaataatgctccacangagcctgagccagcagaggacagaacagggcaattaaatggggatagaggctgggcacggtgg

SEQ ID NO: 122484 - DNA, 2060 bp, Homo Sapiens
  misc_feature (19)..(19): n is a, c, g, or t
  misc_feature (52)..(52): n is a, c, g, or t
  misc_feature (59)..(59): n is a, c, g, or t
  misc_feature (123)..(123): n is a, c, g, or t
  misc_feature (137)..(137): n is a, c, g, or t
  misc_feature (150)..(150): n is a, c, g, or t
  misc_feature (235)..(235): n is a, c, g, or t
cttaaagggcccaaagtcnaaaattccttggcagaagcttttgggcaatttnttctccnttcttccctctctttcttgggttctgggaacccagctcctctcggggctcttgggaccactgcntccttccccttctnccagaagccgctntgctgtattgatctgggcttctgactgctgcatctctttttcctccgcctctagctgcagaactgcatacacatctttctccatnttctcaatcttgtcccggaatttgaggatgacatcttggggaagtatcctggccttcacaggggccttggcagcttttacaatctccttcagcatcttccgctcatcttctcccaccagagagactgagcgcccagccctgccagcacgtgctgttcgccccacccggtggacataatgtttgatggtattaggcattgtgaagttgattaccgttttgaccccctcaatgtcaagtccacgggctgccacatcagtggccacgaggatgtcaatctgttcatccttaaaacgccggagggcctccagccgctgcgtctgtgacaagttgccatggagctcacccacctgcagccccatgagccccaggaggatgtgcatgcggtgggcctgcttcttggtttgcgtgaacagcatcacatggtcagtgaaggtcctcgtcaacaaagctgccacgatggcttcccggtctccttcacgattaggccggatccggatgaactcctgccgcaggaagggagccacatctgtgttgctgttcacaaatatccggacaggattcttcaaggagacagaagccagatctttcacctcgtctgtcatggtggccgagaagagcatggtctggcggtggtgggaacacattcggatgatctccttcatctgctcctcaaagtactcatccagcatcctgtcagcctggtccaggatgagcacttcgatgctgctcaggtggaaggaagggcagttgtggaggtgatcgatgagccggccctggggtggcgatgaggatgtcaggcgctgcccgaagagctgcttcctgagacttcacatccaagccgcccacagccaggcaggtggtgatgttgcagaactgggccagctgtctggtgacagagtgcacctggatgcccagctctcgggtgggcactagcaccagcacgcgggtgactggagcctggcggggtttataaatcagacgctccaaaacaggcagggcaaaggcggcagttttacctgtcccagtggctgcacaggcacagatgtccttccccaatagacccacaggtatgcacgccttctggatcggggtgggctgcttgaagcccatggctgtaatggccttcagaagagggcgggaaaggttcatgtcctggaacgagaggttttcatcgtactgagatgcatcttcaaaaaatcctcctgcttcctgtcctttcttcttcttcttcttccgatcctttactttgagtgtatctgctttggtgaggatgttctcatcagctgatgagtagtcagtctccgaggcttcatcttctgagccttcctcatcattctcttgaaggtcttcctgctcctttggttcagagccttcctttgcttctttctccttttccaacttcccagacttggcttctttatcctctgttttccttttctttcgaactttctcaatcttctcatctaatgtagtggctgccctcttcttcttgagttggctcatgacatcagccagggcccagctgccatcgtacgtcccctccttctcagtgaaaacgaaatcagggttgaaatcagcactgcggttcttccccaaagctttttgtcgtctgcccagcacaatgggcccctcctcttcctcgtccccggagtcagactcgggctccaccggcacctcgtcatcctcgcctatggttccgattaagccgaggtccgcaagcatgttgtcgcagaagccacttccggaagcgagcacagcctgcggtccggcccttaacttttcgcagcctcctcgtcgtctttgcgcaagtaccatgcgtcacccc

SEQ ID NO: 122485 - DNA, 303 bp, Homo Sapiens
  misc_feature (124)..(146): n is a, c, g, or t
tttctcttttcccaaaaatacttccatttaatatagtcatatgaaagctaatcagcaagaagggagattgacagacatgcttaggaaaatagctacgtaccataccaccacaccaaagtgttgnnnnnnnnnnnnnnnnnnnnnnnaaacaaatggagaaaagacagaccagccaggatgacttcccacaggggaagggatttaagggctgcccccatgaatttcttcaggccacgacagctacttcctcctcttgtatctgtaagaaaatcagagttaagaccagaatgaggatggagaagc

SEQ ID NO: 122486 - DNA, 1077 bp, Homo Sapiens
  misc_feature (427)..(580): n is a, c, g, or t
  misc_feature (803)..(811): n is a, c, g, or t
gaccatgcctagctcacttccaggtttaacagacaaaataaacttactctagtttccatctctatcattttataataaccgtagcccacattgtagtagtttttcagctctttactaagtcccaccaattcatgttttcacccttaaaatctttctcactgatactctctctggacagaaaaaaggtgaaataagcctactataaggaatatatgacatgctaaattttatttttaaatggttcttcaagtcagattaaagtaataatagcaaattatgtgattatccatgtcccagcctctctccaaaaaaatagtaaacaagatgtcttcttcttttcccaaagatacacatacacacatgtacaaatttttttatcagataataatagctaatatttaatgagtacttaccttagtgtgtcccnnnnnnnnnnnnnnnnnnnnnnnnnnnnnnnnnnnnnnnnnnnnnnnnnnnnnnnnnnnnnnnnnnnnnnnnnnnnnnnnnnnnnnnnnnnnnnnnnnnnnnnnnnnnnnnnnnnnnnnnnnnnnnnnnnnnnnnnnnnnnnnnnnnnnnnnnntagctctgccccccagagctgtactgtctcccatgagggtacttctccatggagcagcctgaggcgatccctttattctgggcttctctcagaaatggattcccacacagtattcaaagcaaatttccccagaggaaatcctattggaagaacttaaaaactcagaatctttttctttgtccagagagttgaggaagcttaagctaaatgatacatgtttttnnnnnnnnntcagattataaatttagtttttggtgattcattaaattctttactattatagttattttctagctgttcatcttttagctaaatttgttccaaagaagcaaaagtttggtttctactaagttctggattctggatgggagattgcactgtgtgtgacatgcaagtttcatggtgtgggagattgcagagcatttgggttactgcttttactctttggaagctgttatcatctgtatctgctttaaataaagttaaagatttggaac

SEQ ID NO: 122487 - DNA, 680 bp, Homo Sapiens
ttttttgttccaaatctttaactttatttaaagcagatacagatgataacagcttccaaagagtaaaagcagtaacccaaatgctctgcaatctcccacaccatgaaacttgcatgtcacacacagtgcaatctcccatccagaatccagaacttagtagaaaccaaacttttgcttctttggaacaaatttagctaaaagatgaacagctagaaaataactataatagtaaagaatttaatgaatcaccaaaaactaaatttataatctgattttttttaaaaaacatgtatcatttagcttaagcttcctcaactctctggacaaagaaaaagattctgagtttttaagttcttccaataggatttcctctggggaaatttgctttgaatactgtgtgggaatccatttctgagagaagcccagaataaagggatcgcctcaggctgctccatggagaagtaccctcatgggagacagtacagctctggggggcagagctatgggggcagactacctggttcataccccagcatttccacttattaactgtgtgacctttggcaagttgcttatcctctctgtgcaccagttttctcagttataaaatgggaatatgaactgtatcaatcacacagatgtaaagctgttgtaaaggggacaaactaaggtaagtactc

SEQ ID NO: 122488 - DNA, 1151 bp, Homo Sapiens
  misc_feature (709)..(721): n is a, c, g, or t
tttctatttgggtcaaattaattttattatgctccatgatgaattgccaccagtgcaacatcctattcactatacatttcaaaaaaagaattcacatactaaacaaaatttcagttgtctgaaaatgaaatgattgaaagtctttatgaatctcatacatacaatatgtggctagctgaaattgtctatcacgtagcatttagatataaaaagcctcatgctagtttgttaaatgcaaaggctaccagacgaccatttagctggagaatatacggaaggctttcagacaacgcacaggtatagtgctgctcacagtgcaggatggtagaggactgaaacatgcaaccttacaccttacttggtaaagcagatttagtcttcatgcctggactgaactccacagctgctgtgtttcaaccaacagtaatttagactttttgtaacaacaaccaatgtctttttcttctttaagaaaaaaagaataaattaattacctttggcaaattatatatccattttacatgtttaaaattgtgctttgaactcgaagaatgggtactctctgctgagagaagttcctgataaatatatattataccaaagtcagctggaaaatctagaatttcttggccacaagttaagagagatcttaaattggcattaccctgaagacatttctaggaaatttaaaatgttttttatattgtcnnnnnnnnnnnnnttttgtcacattaacattacttaaaataattataatgttccactttaacttcttgtacaaactcctgattttattggttagtagttgtccagcctcatctgcaccagacttgactgagctcaagccacatacaaaatgatagtaagtagaaaaaggtttctagcagcagagggcactgttgttgcaagaaacacaaagtctagaatctttcccatgtgcttaaattactcttgcaagaaagatcaacattctttgaataacttaagtattttactgcaccacttactgctttcagcaacaaaaccttttaaattatttcttatgataactagatgcatgatcactagagattatgtaataaatggttaaaattcaagccacatcttgcaggtccagcctgtcaagatctgccatacgctatctagaattg

SEQ ID NO: 122489 - DNA, 537 bp, Homo Sapiens
  misc_feature (139)..(362): n is a, c, g, or t
tttaacgggagagaattgttttaaatttttaatttgttaatgacatgcataatcacatagtacatagactgtgttcatggcaattacttgtattcttagaatgccagtttttgcttcatgcagccatttatattagagnnnnnnnnnnnnnnnnnnnnnnnnnnnnnnnnnnnnnnnnnnnnnnnnnnnnnnnnnnnnnnnnnnnnnnnnnnnnnnnnnnnnnnnnnnnnnnnnnnnnnnnnnnnnnnnnnnnnnnnnnnnnnnnnnnnnnnnnnnnnnnnnnnnnnnnnnnnnnnnnnnnnnnnnnnnnnnnnnnnnnnnnnnnnnnnnnnnnnnnnnnnnnnnnnnnnnnnnnnnnnnnntactagaagttgtaagtttttcatcccccatgggctagatctgatatgcagatgtattttattttgcccatacaatatttctaagtaatttttaaattagttgatagcatacaaatttctggcttgatgaaaatgtagttgatgtagtaactctgagcctatattccagcaggat

SEQ ID NO: 122490 - DNA, 991 bp, Homo Sapiens
tttttttcagtgtccatatttcaaaaatttatttatctcaaactgtgcataatggagtaaaaacttaagttgaaaatgtacctgttataaggatgatattagttcaaatatatacatggattctcggcagactgattcaaataatacagagccgaatcttttaaaatacaactacggaaaataaaggggggaaaaccttaaaatatcacaataaatttacagaaatattacaaaccataagaaaatatttcaaacacagtaatttcatggttttttttatctgaacaaaatggaaagttgggatcgaacaaaagctattataaattaccaacggtgtcaacctgcatggccatttttgcttttaacagtaagttataaaatttagtacagtctaaaacttttgccctttttaaacaagaccacagagatggttcgccagtacttattctaattttttccttttgtacaatttttaaacaattaaaatgtccaaatttgaataattttcttcttttcacgtttgcaactgtcctaaatttcagctgcagaatcaaaattcagcaagaagcctctccttgaaaaatattggcaaattctcagcttataaacaatggacattttgattgccatgtttatctcgataaatactgtacaaaagttgcttgcaaatattaaaacatttttttcgtcgcttggagactagctctaaatattattggtaaagacttttgcaaacttcctgcaaagctcctaccgtaccactagaacttttaaaaagtttttcgtagctttctttcctccagatctatacaaggtccattcccccgccctccccaccctccccaggttttctctgtacaaaaatagtcccccaaaaagaagtccaggatctctctcataaaagttttcttgtcggcatcgcggtttttgcgtgagtgtggatgggattggtgttctcttttgcagctgtcatttgctgtgggtgatggga

SEQ ID NO: 122491 - DNA, 840 bp, Homo Sapiens
  misc_feature (772)..(772): n is a, c, g, or t
tttgttagcccaattctaaaaatgctcagtaacactttttaatatacaagaatcaaaagtacagcagttttacaatgtaggaaaatttaatacatactatataaacaacattatttacatcagaaatcactaggacagtggcatttttcacaaatataaattaattactgtttagtcaacaggttttaaaagtccacaattttacaataaagaaaaaccatctgtccccagatgagtggggcacagatggcctaaagcagcctggacccttggcatggctcccctcgcccaacgtggcagccctcagaggagccggaagaccgctggtgctgggcctgggctgctgctcctgctgacaagtggattttggtctgtaggatttcagtgtcattgtgtgacttcctaaatcaactgtgtttgcaccgtgaggactgatgcaactttcagacacaccaggccagaatgtctgcagcacagcgtgcaaagtgtttgggcttcccttcgaagggctgaggaatgactgaaaggagagtgagccccgggctctgctggcacctgtctgtccggctctgaaagaccgcagtgattagcttggggtttcacctggcccttttctaaggccatagtgtatcatgtcaacccttgttcacgtgcaggttttaggtgatgctaactccctctttctcaacctgttatttctaccaacaatgaaatctttcaaagccagactccagggaataccatcctcacagattcctggggcagcttctcncattcacaagtgagagaatttacctgtgcaaattttttatttaggcatataatattcatactgattta

SEQ ID NO: 122492 - DNA, 494 bp, Homo Sapiens
acactgtaggaaaatttaatacatactatataaacaacattatttacatcagaaatcactaggacagtggcatttttcacaaatataaattaattactgtttagtcaacaggttttaaaagtccacaattttacaataaagaaaaaccatctgtccccagatgagtggggcacagatggcctaaagcagcctggacccttggcatggctcccctcgcccaacgtggcagccctcagaggagccggaagaccgctggtgctgggcctgggctgctgctcctgctgacaagtggattttggtctgtaggatttcagtgtcattgtgtgacttcctaaatcaactgtgtttgcaccgtgaggactgatgcaactttcagacacaccaggccagaatgtctgcagcacagcgtgcaaagtgttggggctcactctcctttcagtcattcctcagcccttcgaagggaagcccaaacactttgcacgctgcctcttgcc

SEQ ID NO: 122493 - DNA, 546 bp, Homo Sapiens
ttcaatggtataaaatatttaatttttaaaacacaggctattcatgtcacataaatatcttcaactgtaggttagctgcttatggtcagcagaattatcaagtgtgactattaagaataacttagatactgtcacttataggaaagtctaaagctctaagactcaccatattaaaatttcagatacttgaatactgttgctattttgctaatttcaaaatatttcttcatttcctgcaatgtagtttataagttgttagtaatcaatattcaaataaaagcaacatatttttttcttccattcatttctttctcccaacaaaaagagtccatcaaaaaataaaatggtcaactgatatcaacttattttatagtagtaaaatggtaaattatcctctttaaaataattttactcttatcaaactacaggacttcccacatactgttttgaaatgaaggttcataagttagagggcacagggttaactggctttagaactggagcaatatacattctgtaacagttgttccaatttaagattccaat

SEQ ID NO: 122494 - DNA, 2167 bp, Homo Sapiens
  misc_feature (980)..(1034): n is a, c, g, or t
cagccaaaactgaagacttactgggctatgtggtggataagtcacagctgaagagagacttagggaagtggaagggagaactgtagaagttacccagtgggcagcacaggcccttggtcagtgtgagggaggccgagccaggaggaggaggacaataagaaggcctaacaggcatctgaagattccagaaggaagggccagaggaggagatggcttaacttttccagaattgctaactacggggccctgggagtcagggagcaagcaggatgtcgaagggtcactgagagcctgaagttctggagggcagagccatgtattggacagagcctcactctaggatggcgaaggggcagtgagagccttaagttctggggggcagagccatgtattggaccaagcctcactccttgagggagaagtgcattttgtcgttgatcatcttgcgctcggggttgagtcgcttgaggatctgggccaacacgttcactgtctgctcgctgctcagccctgtcttcttggtctggaactttttcagcaggtccttagtggtcatgggcttccgtgtcaggtagcggcgcacggcatcctcagtcacctgcacgtcgccgctgttgggtgttgtcttgcctgatggtggctggggtgtcgacttcccagacaggctctggggtcccgtgtccagccgcaaccgcttggctgcaggcatctcgctcacccgcttcccttgctcgagtttgctggcagccgcccgcagggtggaggaggtgctgccaccctctgcgctgggcgtgcctgggcggctgttgccccttgagctccctcccgacggcttccgctctctcttgggtggcgtcttcttcttcgccatgaagagggctgaggaggcctcgctgtcaatgtcgctctcctctgagctgtccgactcctcgctgctgtctttcctgcgcttcttctcctgcggggtgggtgccttcttnnnnnnnnnnnnnnnnnnnnnnnnnnnnnnnnnnnnnnnnnnnnnnnnnnnnnnnctactgtcgctttgctcatcgaccacccttgggccccttctcctgcttgcggcgccttggccttgctctcaggctcttcttgggagctactggagccgtctgacatgtagtccacttcttggccctcgaagtccccatcatcgctgtcctcgaaggcctcgtcgtctgaacccttcttcttcttctttttcctgccgcccttggccagcggcgctttcttcttggccttggggactctgcccccctcctcaccactggcatcactggcatcggacgacatctccaggtcgtcctccaggtcgtggatgcgcagctcgctcgccttcctgcggccacgtttctccttctcctcctcatcctcgtcctggtcctgatccttgagccgccgctgctgcatgatgctgaagtggttcagcaccttgttcctcctctcccactcctcctcggcctcctcggcagtgagcgtgcgatgccgggccagcggtgtgaaattgtaccagttgtgcacggggaaggcctcgaaggccccgtcggggcactgggtgaagatgtagtaggacgtgttctctgttacgcctcccttcttgatgcccttgaacttcctgcctgatttgccgttgacccggagcagccagggctggtcctcgggccggaactccttgaggacgatgccgtacttcttcctccgagcctcctcccgaagcttgcggttgaactcactgcccgcgcccgattcgggcatctcctcctcttggtagattttcttgttgctcaagtcccgctccagccgagcctgattccacgtagcaaagttgactttgtcggctgcattaaaagccatgatgttatattttttggttgtattcttaggaactcgaacgacgtattcagtgacattctggctgctagggcctagggccgccatgggcaatggtcagtggttccgatctggtccgacccgggttcctttcgtctcctctggcgtgcgcgtccctcgatcccggggaagccgccgctcggtgtcgggtctctgtgcctgagcgaggaccccaaccctaggcgcctctggcgctgggaaaaggtaaccggaagaggcgctcaagctcggacgcgtggtcgacgatatcgcagga

SEQ ID NO: 122495 - DNA, 840 bp, Homo Sapiens
tttttaaggataaaataagtttttatttatagtcttatagtaaagggggaagccttaacttgcaagacaattcttcggcagtatgtacaacatactttttatttccatggaatggaatcaaacacgaactgagactacagagtatacactagaaatcagcaaatgccaggaacggagtaggaaaaagacaaagaaatgaggcctaaacacacaaaacccttcactgggatctgctgaccacagccagaaccagggctggatcacacaatggagacaggttccaggacagtaggaaaggaagtgggatgagggctgggaagggtccgcactggggtgcgggtttagtaccaggtaaattgctcttggtatttacatacaaaatcagttggctctatttcttagaaatacacacgggaagaaagaaagatttcatcattactttatgaatctgtcgctttgcaagaccgacatcatcagaaataggtacaattcactcagattcaaatttaagtagcaggaaataaatatcaaaacatcatcactggccctcaatacaaaacctctatgccacccaaaacaccctccctgtcccaaccccaaatggccactccctggtggctgctgcttcactgctgccatctcccatacataccacgagagtgtcacacggccctccgtgaggctggcgccgcaggcttaaacagctggctgagagaagcaggagtgaaacatgccagcgactctgtgctgcgaatctgtccccactttctttttataccacaaacttctttaaggatctggtctttcaataggagcgatacatagctttttagaaaaagg

SEQ ID NO: 122496 - DNA, 587 bp, Homo Sapiens
  misc_feature (565)..(565): n is a, c, g, or t
  misc_feature (574)..(574): n is a, c, g, or t
tttaaagtataaaataaacaattttattagatgaactcatttatttgacatattaaattagacaaagaaatatatatgtaaccagataaaaacaatcacattctcatactacttgaacacatagcagtggtcaaaaataatggattgtaaaatggaccccaggatttaatgcaaaaaccaccccatacgagaaaagtttcaggcttctaacttcactgaatccagtactaaacgtgcttctttatattcctcagcttcttccaagtctttttcattttctagtatccgttgaagatccaaatatgcggcttccaacctgcgctggcaatctgggatcatcatcctggattcttgtaggatctctgcctgctttttaatgtcataattttcaccgtcttcagctctcattttttcaatcttttcttcttgttgttttgcctctttttcatacatcactttttctttgaccaaccgcttcaccacgccggtcttgatcttgatctgtctcacgcgaggatcggccatggtccctcgagcgccgcgagaaggaggggcggagagccgngggtaaccngtggagcggccgc

SEQ ID NO: 122497 - DNA, 1367 bp, Homo Sapiens
  misc_feature (15)..(15): n is a, c, g, or t
  misc_feature (113)..(113): n is a, c, g, or t
  misc_feature (360)..(360): n is a, c, g, or t
  misc_feature (607)..(617): n is a, c, g, or t
  misc_feature (776)..(804): n is a, c, g, or t
  misc_feature (1087)..(1087): n is a, c, g, or t
  misc_feature (1211)..(1269): n is a, c, g, or t
ggaggggatgttttntccgccgccgcacccaagggttttccgtcgagagatggtgtaaacacacgccgggggcgcgcgccccctgagtattgtgggggggagcgacagctttngggtttgtgttgggcgcccgccccccgcgtgtttgtttttccccgcctacagttggggcgcacataaatgttatctatatctctcgccccaagggggccgagaccaccaaggggttgtgccgtggaatttcccccgcaccggggcgcgatattctccgaggggttttcgttatccagataccccgtctttttgtcggagaaggggctgtttccacacatgtttccggggccccggaaatatggcgtnttataaagggagatcttttccccacccacgttgtttctttcggcatagaagagttgggccccagggggtcgcgaggggggctactatttttggcatatttatcgggagcgttcgcgctttggggggctccccccgtgtggtgtaaagagtgtccacgtggtatagcgcccctcccaggaaatctcccctacttgtggatattgtgtttacaagaaccggctcgcggttgtccccccccgggggctgnnnnnnnnnnnggggggggaataccacaaccccctagtgcctagtgccacggagttttccttggagaacacagtattggccacagtttccctttgccttctgtggcccgcggcggcccaaccgaaaggttttgagaaactttttgagggccgcaaggggcccgacaaggnnnnnnnnnnnnnnnnnnnnnnnnnnnnngaagtataaaataaacaattttattagatgaactcatttatttgacatattaaattagacaaagaaatatatatgtaaccagataaaaacaatcacattctcatactacttgaacacatagcagtggtcaaaaataatggattgtaaaatggaccccaggatttaatgcaaaaaccaccccatacgagaaaagtttcaggcttctaacttcactgaatccagtactaaacgtgcttctttatattcctcagcttcttccaaggtctttttcattttctagtantccgttgaagatccaaatatgcggcttccaacctgcgctggcaatctgggatcatcatcctggattcttgtaggatctctgcctgctttttaatgtcataattttcaccgtcttcagctctcannnnnnnnnnnnnnnnnnnnnnnnnnnnnnnnnnnnnnnnnnnnnnnnnnnnnnnnnnnaccaaccgcttcaccacgccggtcttgatcttgatctgtctcacgcgaggatcggccatggtccctcgagcgccgcgagaaggaggggcggagagccc

SEQ ID NO: 122498 - DNA, 727 bp, Homo Sapiens
tttttgcattttaaaatagctaactttattgtcagtgaaaagataggcacaaagtggatttaaacctgcttaactttattggaactagctcagttgattacagaatggggtcacaatcattaggggaccacatacattttaaaccaaaggcgattcttctctagccatctgccaaccccagctatccattttacaaacacatgccattaatcacaagggaggccagaaggaggtttcatggctccatgtaacccatcgttgctactggaaaaaaataaacaaactcccgacacttgtcctactgatgatggatggcacttggaagacatatttccaagaatcgtggcaggctgaaattggtggcaattagcccacagctgataccttcctttgaaaacattttcagtaagaatgcacacgttttaagtaacatattccatatgcacataagcaattgagataataggagactgtgtagctaacagatatgagaatataattgatcaaagttagtgcatatgtatacactttaagctgccgcattatgagggtttaggcttgtcataaaaagtagtttgcacaatcaatcagtttgttcattttccaattgttatacccacccaacagtgtaacaacaaaaagagaacatgatgggtctctgggtatctttcctatggcagatgatggcagatattttaggttcctgctgtcctattaccttgaagct

SEQ ID NO: 122499 - DNA, 450 bp, Homo Sapiens
  misc_feature (373)..(389): n is a, c, g, or t
tttgctgctggaacgttttattaagttaagaggttcagggagcagaagagaaacaccttttgggtggctctggcggttctgcacccagcacagcctcgaaggaggctgtggggccatggaggccagctgctagctccctctgtcctgagccccatggtacgggtccaaatggggcaggaagtgttagtaggaggtagggcaggaagagggtggcaggctcccgcctctcccctgtagagacaccccgccatggctgctgcctgggcctccgccagacctctgggccagggccaccagctcagaagcccaagcagagggtggctggagacagagggggaccagggttggaggcacacagccaccaggaattgcnnnnnnnnnnnnnnnnnaaagtatacagtgttttggcaaaaaaggaaataaatcttatataaaaatctcttcacatac

SEQ ID NO: 122500 - DNA, 713 bp, Homo Sapiens
tttaaagaaggaagaggtttttatttggccggtagcattggcagactcatgtcttaagagccaagctcccccaaaaagaaattcctagcccttttaagggcttacaactctaaggggtccacgtgaaagggtcatgatagatcaagtaagcatgaggaatgtgactggaggctacatatatcagctaacagaacaaaaagttttacagtgctttctcatacaatgtctggaatttacagatagtaccagtagtttttatcggtaataagaaaaaggatggcttaatagtgccaataacacaactgtctgcccattcattaggtaactgaatgtaggctctctgcccacatatccagtatagtccagcgagagccatccagtcctgatgagatcctggacaagcccccattatatcaggagctggatcagtgggcaccaactctcaggcttcccaaggccatcggtctctgatagtggttcccccgcatatataacaagaagtaacattaagggaatgagctacattttctgctaattggagaaacaaattttttatctttttcagaagttctggtgctggcagatttaactcctcataaaaggtttgaaacactggtttgggagagtgcttgtggacctctccttgaactaaaatggcaacttgggggtttaaccctgtcccttcgatcccagggttacacattctccctttt

SEQ ID NO: 122501 - DNA, 986 bp, Homo Sapiens
  misc_feature (340)..(372): n is a, c, g, or t
  misc_feature (723)..(723): n is a, c, g, or t
  misc_feature (768)..(768): n is a, c, g, or t
  misc_feature (783)..(783): n is a, c, g, or t
  misc_feature (826)..(826): n is a, c, g, or t
  misc_feature (837)..(839): n is a, c, g, or t
  misc_feature (913)..(913): n is a, c, g, or t
  misc_feature (929)..(929): n is a, c, g, or t
  misc_feature (953)..(953): n is a, c, g, or t
aaagaaggaagaggtttttttattcagccaggagcgttggcagactggtgtcttaagagccgagctcccggaaaaagaaattcctagcccttttaagggcttacaactctaaagggtctacgtgaaaaagtcataatagatcaagtaagcctgaggaacgtgactgggggctacaaacatcagctaacagaacaaaaagtttttacagtgctttctcatacagtgtctgggatttacagataacacaggtagttttggtcaggggttaatattattgttgttttaaccaccggggccaggtggtggcgccaaggtcctctagctatttattttacttctnnnnnnnnnnnnnnnnnnnnnnnnnnnnnnnnngctgtcttacaaactagggaaaaggggaggttggggagaaactgggaaggacaacaggagaagtggtggtctcataccttatttcccccctttgagcattttcactttttagtgggagttctcactctcatctttactttttgagtctatttgtgagatagagcgatagtgatttatataacacacgtgtgctgaagttttctgatgaaccaaagtagctacaaaacctttgatcatttgaaaaagcaagggtaatacacagggggagcagcaagcaagttcctatcactagcaatacacctacaatgagggttttaaatcctcttatagctggaaacatttttcaaatanagactcaggattaaactcgtgccaaacctgtacaggcacatgtgncacctttgtcatgtncctgactatgtttttaacaactgtccttgatcatttattgtangcagcaatggnnntagtaatttctacaactcctcttcagctactagcagtagtctaaggcagtctatctgataatagcatctcattnggtttctgccagctanacagcaagtctgcagttcatagantattctagatgctgcacgtagatcaatgacagt

SEQ ID NO: 122502 - DNA, 1180 bp, Homo Sapiens
  misc_feature (1077)..(1077): n is a, c, g, or t
  misc_feature (1089)..(1089): n is a, c, g, or t
  misc_feature (1093)..(1093): n is a, c, g, or t
  misc_feature (1113)..(1113): n is a, c, g, or t
aaatagaataagaaaaaaatgaggtgtagtggaaagcacaatatcagttccaaaatttgaactccttcatatttattcaacatagggaaatgctcttcaactttgggtggttagattccatttgtgaaagatacatatttctaatgtagcaggatgagtcacagacaaaactcctcagacaccagattaaagaaggaagaggtttttattcggccgggagcgtcggcagactcgcgtcttaagagccgagctccccgaaaaagaaattcctagcccttttaagagcttacaactctaaggggtccacgtgaaagggtcataatagatcaagtaagcgtgaggaacgtgactgggggctacacacatcagctaataggacaaaaagttttacggtgctttctcacacaatgtctgggatttacagataacaccagtcgttttggtcaggggttaatattattatcattttaaccaccagggccaggtggtggcgccaaggtcgtctagctatttatcttacttctgtttctttccagctttttgctttctcccttttctcctgtcttataaactagggaaaaggggaggttggggagaagctgggaaggacaacaggagaagtggtggtctcattccatagcagtagcgctgtccccttttccttcctgggcatctgaaccccctgggattcccctgagctgggtgcaggcacggagctgctggctggcttgctcatactgctgtctgagtgactcttctcctgggggtagctccctccccaccctggaggtcagcagcttgggccaaggtccctggcacagggccataagctatttcagtgctttcaggttgcctggaagggatgtcagggagcccaccggcctctgtacggccgacctaatctcacccactgaaacattagcctcgggggcaactctggcctcacccttggcagggacaggaaggactggtcacgctagagcacagctcggctgtcaccagggcacatcaggggtgggtgcatgctagtcccaagttttctgttgcgtatcccatcccacttatcctacatcagcncgtctaatcctnccanagtcctgggcacacaacaanaaagggaaagtgtgctcaaatctctgaacttggcacaaggtctgatcgttggaaagagtaaaccaaa

SEQ ID NO: 122503 - DNA, 485 bp, Homo Sapiens
  misc_feature (329)..(377): n is a, c, g, or t
tttttaaagaaggaagaggtttttttattcggccgggagcgttggcagactcatgtcttaagagccgagctccctgaaaaagaaattcctagcccttttaagggcttacaactctaaagggtctacgtgaaaaagtcataatagatcaagtaagcctgaggaacgtgactgggggctacatacatcagctaacagaacaaaaagtttttacagtgctttctcatacaatgtctgggatttacagataacacctgtagttttggtcaggggttaatattattgttattttaaccaccagggccaggtggtggcgccaaggtcgtctagcnnnnnnnnnnnnnnnnnnnnnnnnnnnnnnnnnnnnnnnnnnnnnnnnngctgtcttacaaactagggaaaaggggaggttggggagaaactgggaaggacaacaggagaagtggtggtctcataccttatttcccccctttgagcattttcacttt

SEQ ID NO: 122504 - DNA, 704 bp, Homo Sapiens
  misc_feature (610)..(610): n is a, c, g, or t
  misc_feature (631)..(631): n is a, c, g, or t
  misc_feature (674)..(674): n is a, c, g, or t
tgtataagaaagtgtttattcatggtggggcggagggtcacacatacaggccttggatagtgtgcagggactgcttccagctgtccttccagcgctgagcctcctttatctgagatgtacagtcatcctggatcctctttagctcctcctcaaatgatgctaaatatttcaggtacacagcatctcgggcttccacggccgccaggtggcccagggtggttttggtggtggaaatcgatgatgttggctggagaagaatcttgttttggatggtgacttcggtgggtttgatccctggccacttcctgcttccacgttcaatcaggggtttctcactctcttccttcagggagagcccagcgagtttccttcgtatgagcattgataatttctgtttggggggctccatccttgcaacctggacatcgtcaatggtgaccacctcatccaactgcagtaggaacttctcggtgaaggtggccaagttggttatgaaaacctggccattccttctggtacattcctccagcttctccttgttcatcctaatcatgctgtccagctcttcctgcctttcctcttcacttaagtgtagagactccatttcttnggaaatgtacggggtgtccangatttagatggagcttctgggcattttgtcctttcttttctcncagcgcttctgctgttcctcgaactgtcct

SEQ ID NO: 122505 - DNA, 1042 bp, Homo Sapiens
  misc_feature (735)..(735): n is a, c, g, or t
  misc_feature (755)..(755): n is a, c, g, or t
  misc_feature (806)..(806): n is a, c, g, or t
  misc_feature (824)..(824): n is a, c, g, or t
  misc_feature (829)..(829): n is a, c, g, or t
  misc_feature (844)..(844): n is a, c, g, or t
ctgtataagaaagtgtttattcatggtggggcggagggtcacacatacaggccttggatagtgtgcagggactgcttccagctgtccttccagcgctgagcctcctttatctgagatgtacagtcatcctggatcctctttagctcctcctcaaatgatgctaaatatttcaggtacacagcatctcgggcttccacggccgccaggtggcccagggtggttttggtggtggaaatcgatgatgttggctggagaagaatcttgttttggatggtgacttcggtgggtttgatccctggccacttcctgcttccacgttcaatcaggggtttctcactctcttccttcagggagagcccagcgagtttccttcgtatgagcattgataatttctgtttggggggctccatccctagaggcaaaagacaggctagtgactgcagcctcaccgacagcctgagatcgagggatttcccctggcattacacttagaaaagggaggactggcacccctcctcccacttggagttatggcaggctgagccctctccatggagaagctgaatgcaccagccacacagctcggggtggtgacaggggcagggggtcatggatggaggaatctaagcagtggtgtgggtgctgttcccagctccaacccaagcttgatgctctgacgttgctgcagtttccatgagtccccggatatggttcatagagacttctttggcttangctagctcatatgggttccngactaagaactccccctggacaacacgttcagggttgtccttgactatctnagctaatatcccctcgtngcganttctggctcgagggncaattcctatatgagtcgtataattcgtatctgtcaagcttttctgtgtgaatgtatccgtcaaatcacacacatacagcggagaaaatgtaagcgggtgctatgaggagtatcacatatgggtcgctatgcgcttcatcgggactgtctgcactgatatgatcgcacccgggaagggttggatggggctccctctcc

SEQ ID NO: 122506 - DNA, 2968 bp, Homo Sapiens
tagcggccagggctgcggaaacacgtctggaggtgggaacgctttgtgggtatacgtgagatgtaacgccagtaaagtttgagttatgatttcagtaaacactgtatgtgttcccgcgcgttagtgatgagatttggggcaatcagctatgtgtagcccgcgttagaaatttgagagggcgacatcgccgtgtagtagggcgctgataagtacttagatgagacgctagtatctttgagacagtacgggaatccatgtgaccctgtgaggatgcgaatgtgtgcgtcctgtaggagttgcgttcaacgtagtctttcaagaagtgcacaagtcggttgggcgacggaagtcgaggctaccccagtagagtgtaggagctaagattaaagggaattcgacataaaaaggtggtggcggaagcattggggttgaaaagacaaactagtgtaatgttcatactgaggactctgccttctgggagatcagtatggatggccgtacagttaagccaaggtgaacttagggtgttattatgaaaacgtaaaacatatgtgaggagccaagggacactctttttgtatttaatcttaaagaccaaggtgaaggagaaaaatccaatgggcgggggtcctggccccttccccatagccccttttgatcacaattttcgcccatgagcttcaaaacagaagaccataaattgaaggtttattttaaattacctaagtccctgaaatagaagagtaatttatttttagtattaaagagattaacaagttgtctcattattctgatttacccatattcaaaactcacctactcagaaaactgcaaacccatagttgctaacaatcctatttaaccattaagaaaggatttacaacaataaaagctatgtacataggaaatatcagagagtagaaagtgctaaccagaggtacccagaaaagctttctgtgactgaaacaatacttcctgtctaaggttcaggagtaagatgcttctttgggggctgagaaattaacatgagaaacctttggtatccaaattggatttctgagctctttgccacggcatttttggctagtctaaaacaatcatttggagaaagcaacaccaaggatgaggaggaaggaattctcaacctcggaccaatctctggccccagggttaggactgagaacaaatacactcaagggctgactttgaatggcagtgggacaacttggaaaactaatcacttagtatcaagtcaggcctgttgtgaatacccaggttggctccatcccagggcccttgtactgagaccctcagaagaatgacaggtgagaggatgatacagctagagttatgcgacttaaaggtagcaacccacaaggatggcagcagaagcccttaacagtgacttcagatcagtgacataactccactgttagcggcagcagggctgagtaaatccctaataatttcaggttaggcaggatcttgactcatataactcatggtagaagctataggttctattctataaaatctctgtatacatccaagaggttgggatactcagagagagtggcagaacacgtggtcttcaaagatctgcttctctgtagctgggaagatcttgtcacaaattggacaattgaaacaaaggggctgcatctgctgttgctccaaggtgtgatcacaaatatcatctgctttgcagatagggcatttcttgatggagagcgggctggcggaagaactttcttggataccagaatatgggtttccataggcaagtcctggattttgtcttgcgcctccttcatctgaagtaggtacttgatacggcaaagaattaaaatccagacccatgtaactgagcaatctgctgttctccctcttcaaaagatcattttctccttccaatctctctttctgtctctgcagagcattacatataatttcgttctcactcagtctttttgacaggtcaaagttttcatccattaattcctgttgtttcttcattgcagtagtttcattctgcttcatttgctccactgtctgctcgagcttcttctggtccttcctctgttcagttaaactgagaaagaggtggtcattttcctttttcagctgctctaactgctctgtcttatcttgatctccctgaacaagcttctccatttctttctcttgagttgacagctgggcctgaagctgatccactctgattcccttcttctcattttctgaggacatcttctggttttgttctttcagttgaaagcagctctgtctcccaatagtccttctgttctttcactttcagttccaacttcttattgatgctctgtagggtttctagctcctcctgcttcttttggagctcagcctgcatgtctgagttctgcttctggaggctgatacagctgtccttcagctcctggttttctttgcaaagctccttgttgtgctgctcaatctcttccacctctccctgagtggtaacaaccaggatgtcttcctcattttctggacggaattggaaaggaatacttgctccccggaccacaccatcctcatccacatagcagaactggtaatactcatcatccttgggcaggtagtaagctttgaattggacttcctgctgtttagctgatttgttgtttaggtcaatgggcaaagtaacccacatgaaggtgtaatactcacgggttgtcttccaccccactctaaagatgccaatccaatcctttcgacgagggatgaaatgctgggtgaaggtataatgacatgtgacgtcccctccagggatgtagaacttctccacactgttaaagatgacctgagagaaatgacagtgatccagcaagacagctgatgtggggggatctttgatggtctcctccatggtaggggtccagggacagcaaccagcagcggcgcgacagcgccacccaggcctcgctacctt

SEQ ID NO: 122507 - DNA, 1150 bp, Homo Sapiens
  misc_feature (67)..(93): n is a, c, g, or t
  misc_feature (117)..(130): n is a, c, g, or t
  misc_feature (143)..(144): n is a, c, g, or t
  misc_feature (151)..(268): n is a, c, g, or t
  misc_feature (986)..(1087): n is a, c, g, or t
gttgtgggagatcccaacccttagtcgagggcccgggttttccttggaacacagtaagacccaggtnnnnnnnnnnnnnnnnnnnnnnnnnnnaaaaaatgttttaaaaagtttttnnnnnnnnnnnnnngcccccaggaatnntttatgnnnnnnnnnnnnnnnnnnnnnnnnnnnnnnnnnnnnnnnnnnnnnnnnnnnnnnnnnnnnnnnnnnnnnnnnnnnnnnnnnnnnnnnnnnnnnnnnnnnnnnnnnnnnnnnnnnnnnntgctctttcagccatttctttttatttacagtttgtgttcaatgcaaatcaattccataagaagttactatgaatcaaagcgtaaatacacaaacacaatatacaatccaaaatagatgtacagcattctggaataaagcaagagtgttcattcacacacacagtagcttcaaaactgttcgatctgtttgttcccatgtagttttctaaagatggaaaaaaaggactttggtcatcaagactactgtggccatattagattactggaacatctaagcatcagtgtgtgaccatgcgaacaaaagacttcggggagtgtctatttttaaaaaggtttatgtgtgtcgaggcagttgtaaaagatttactgcagaatcaagcccacttttaggcttaggaccaggttctaactatctaaaaatattgactgataacaaaaagtgttctaaatgtggctattctgatccatagttgttttttaaagaaaaaaaatgtatatacagaaagagtataaaagtttgtgaatttaatgcaaattagcttccagtcttcacttcccaaatacttgatttatagttttgactcctttacatttttgccttcttaatttcaagatttgcaattttgccttcaaaacagatcatttttttaaattgtaaaaagtattcaacatatgcagaaataaaaagcattttgatggctgggcgcgggggctcannnnnnnnnnnnnnnnnnnnnnnnnnnnnnnnnnnnnnnnnnnnnnnnnnnnnnnnnnnnnnnnnnnnnnnnnnnnnnnnnnnnnnnnnnnnnnnnnnnnnnaattacaaaaattagccgggcatggtggcaggtgcctgtaatcccagctacgctcgagaattg

SEQ ID NO: 122508 - DNA, 829 bp, Homo Sapiens
aaaaagtatctccctttatttcaaatatgcttttaaaatatttattgagcagagaaaaaggaagggagctaaaaagatgaaatagatgttgagttaacagctttcttccaagttctggtggacttcagactttaaatgtgtggctcaaacttcaattctccagctggccctgatggaggaattccttgtaattttttttgttccatctgctgtatgacctgatgatattccagcttctgagcctccagttgatcatgctgacgttgtagctcttctttttgtttctgaagctcatctgccttcttcttaagttcattttcttgtaaagcaataatattttcatattcttttagttcttcctctgtgaagaactgttgctgatctaatgtctcccagctatctggctccaagaattcttttttttctgtggctttcaaaaactcctccagagtcaccaatctgtctttgttagtatcaacctcattcattacatgttccctcattctaagcctttcttcttccatttctaccatatcatcctcttcatttttagggtcatatactttctccaactctttagtaaatagggcttctaattcttgttcatccaggaatccatcactattgacatcatgtaatttgaaaaatgtcttggggtcaaagtcattaggatccaatccatcagtctcttcccatacctcttttagttgatctttgcttcctgggtgattaactttagggtgattttcatgctttttcttcatttcttcaaatttagactcttcttcttttctcttttcttcattcaatgtttttaaatattctctcc

SEQ ID NO: 122509 - DNA, 997 bp, Homo Sapiens
  misc_feature (57)..(94): n is a, c, g, or t
  misc_feature (329)..(391): n is a, c, g, or t
  misc_feature (883)..(917): n is a, c, g, or t
ctgtggctttcaaaaactcctccagagtcaccaatctgtctttgttagtatcaaccnnnnnnnnnnnnnnnnnnnnnnnnnnnnnnnnnnnnnnttccatttctaccatatcatcctcttcatttttagggtcatatactttctccaactctttagtaaatagggcttctaattcttgttcatccaggaatccatcactattgacatcatgtaatttgaaaaatgtcttggggtcaaagtcattaggatccaatccatcagtctcttcccatacctcttttagttgatctttgcttcctgggtgattaactttagggtgattttcatgnnnnnnnnnnnnnnnnnnnnnnnnnnnnnnnnnnnnnnnnnnnnnnnnnnnnnnnnnnnnnnntaaatattctctcctttcatgttccttcatcatttcatattttttaaattcttcatgacgagtcttgtcatagtgttccagatcacttgttgccgctttgattagcatatctaaatctgtggattcaaacttgtcaggattcaggtggtttaggtgatcaaattgttttagaagagcttggtggtccatgcctatatcttgaagggaatccaacttagctttaattaacattcttaaccttcctacttcttgccttttcagttcatcaagttttgtcctcacatggtgacttactaaatccagttctttgcttagcctcccactctttatttcctctatgtctgctttctggagcttttctctgaagtgtttatctgtttccagcacatcaatcacttgcttgagatattcatcataataaagtccagtatctggtggttccccggccgtaatggccgaattcccgggcatatgtccggtaccgtcgactgnnnnnnnnnnnnnnnnnnnnnnnnnnnnnnnnnnncgccgcttcctcgctcaatactcgctgcgctcgtcgttcggctacgagacgctgagcccctatatgagtctatacatttt

SEQ ID NO: 122510 - DNA, 1026 bp, Homo Sapiens
  misc_feature (62)..(80): n is a, c, g, or t
  misc_feature (956)..(977): n is a, c, g, or t
agtgccaagctaaaattaaccctcaactaaagggaataagcttgcggccgcggctgtaggcnnnnnnnnnnnnnnnnnnnactaaaattactttattacagttgatttttttaaacatttcctttgctatgatacaaaggatacttacaaacaaaatattacatatgaccttgttttcgctcttatgttctgacaacttggtaacagcttttaatgcacaatctatacaattaatacaggttatatatgaactataaggtatgctgaaccagaagaatactgacaatatactgtacaataagccttaccagttagtgctgtggaccatttataccaaaaggaaaatgcacatctgtacagtcacctttaccagctggtgctgacagagagggagaggcttcttccccaatgcaacccttgataagcctccactgtgagcgtctgtttggtccaaaaatcgagaggacaatgtgtatttaaaattagttattggtaaagtggtagaacatcacactttcgacacgatactctctcaaaaaagtatcagtcccagttttaaaagaccacaagttctttgtccactatgaaaaccctacgggctcagggggtttgggagatgagaagatgaaggctgccaaaaaaggaggcaagaaaccaagccaaaatctaggtcttgcaaaatcatcatttttcccttcaccaaagggaactagaaatgtacaaattcattgatgaacctcaatgatagcatatcagttagctgataaccctcattttatctggacccctgacttgtgggaataactaaaatacattgtggataacagataccacttttagaaaagaacctcttgcttaattaacatattccctttagccaccacagctggtcctgggctactacaggtgtgcattcatcgctcaatggtctactcagaaatgataaggttacagcnnnnnnnnnnnnnnnnnnnnnnaaataaaaaagcaattgactgaagcattttctttttttaggtaaatagc

SEQ ID NO: 122511 - DNA, 1123 bp, Homo Sapiens
  misc_feature (88)..(136): n is a, c, g, or t
  misc_feature (918)..(918): n is a, c, g, or t
  misc_feature (997)..(997): n is a, c, g, or t
  misc_feature (1003)..(1003): n is a, c, g, or t
  misc_feature (1009)..(1009): n is a, c, g, or t
  misc_feature (1020)..(1020): n is a, c, g, or t
  misc_feature (1026)..(1026): n is a, c, g, or t
  misc_feature (1033)..(1034): n is a, c, g, or t
  misc_feature (1047)..(1047): n is a, c, g, or t
atttttgctagaggaggcgcggggggcggcgcccgccagggaaaaaagacggcggtgcggggggggaaatggaaattccctacaggtnnnnnnnnnnnnnnnnnnnnnnnnnnnnnnnnnnnnnnnnnnnnnnnnnagaaaaaccgtaaaaggtaatcttttaaggaaaaggatgtaagcgttataaaagaagggggtcataatgagtgatgtggagatggctacatatactttcttaagaatggcacatcttttatcatacagatttcaaatgctttttgggtacataagtgctttaaaagaattgagctacatcaattaaataacaaatataattagttcttcatcatcacaataagataacaatgattaaaatgttttacctcatatggtgaaaatactaatcttttcattcacaaatttgtaggcaaatgtgtaattaccaaacaacgtatagtacagaaacaagaaaaatattgtaagtctagttatgatagttttttctaatagacaaaattgtcaacaatttattataaaaaacctatacaattaatacttgatcaaaagtctttaaaaatatattcataatgaaatgtatagaaagagacatttcaaagtcatagcagttactactattacaatatttaatcatttttacaataggtctgctggtctatttcaattaaattcattctcagaaccatcacatatcttgctgaatttcatttaaagcaaaagcaagttgcttaatttttgcttccattgtttttttgttcttgcatgtttcttccaaaagttcacgcatttctttttcaatttgatggacctttaaatttgcagaatcaatacacttctgcttttcattggccagctgtgctatttcagcttgatgagcttcaacaattgcatcaacttgtncttttaaaggcatcatccatactatgaagtttttccattgcattcttttgtagttcaaacttttgtctcttccgctttnagttcntttccntgtttcaattnttcttncacttcnnttactgtgttcangatgacaagaagtctcctttacatgcacttcgatcagtgtactgtagcttttctgattctcaagtctactccttcc

SEQ ID NO: 122512 - DNA, 638 bp, Homo Sapiens
ttatgtgcaatcaaatttattaatcagtagaaaaacaacatgtattcaatttaatgttaatccacaaatagctcttggtcagatttatgaaagtctgtgtaagttagaacacaattttacatttttttctctaagcaatatgcaaaagataacaatatttaactacaaatatataaacaattttagtattatactaaggattgtacttgaagaagttacaatgtaatggaaataataacttaccatattacaggtctcaacactatcatgttggcccctattcagagactgtgcagcgtacacaattagtgcagcagcagttcttggtataatatatgacacccaagtttactggtaagcttgaaaataattcttatgtaaaaattagagattttatgaatttctgatggttcagtaattttttttcagaaatgttatttcagtcacttaatctgccacttctataccatattccaagaggtctgtgagttaacctcatcacaattgctgattgagttcttctcactagtttgcaatttcttcttaatcacttcacagtctccttttttctctcactagtcactggagaccaccacttttccttctccccactggctgcctattcagaaacctcgtgc

SEQ ID NO: 122513 - DNA, 1225 bp, Homo Sapiens
  misc_feature (1115)..(1149): n is a, c, g, or t
tttttcatattttaggaatatatatttttaaaaggattcaataatctttttaaagcaaaatcaaagtatggctacaggaggagaggaaatatccaaattgtaatcaatgcagattgtttacttaaggccttatatttgtacctgtataaataccatatcacagcacaaaaacataccccatctggctctcttaaggtacatgataaatcagactaatgcacattcatcaaagtggcatcatctcaggatatgtgcatatttgacgtgggtatgaattcagggtttccttgggtctctttcaaggactctcctttctcgtcggtatttctatttccttattttccttctgtttatgaagaactgttatttttatatttaatgcccaattttcactacttgttcatgtcagttctctgaaatgttactgcctatgaaccgtgacatgtactctttataacagaaccagaagttaaaagatgtagacatcacacaaatcaatgattattttaaaaatagaaaacaatgataaaaattcagttgccaacttagaggattttatacattatgaagtgttctattttccttccagggtctgaaatttatttctcaagaaaacagattttatttctaagcctttactatctttgctagaaacagaaaaaccagttttctctttgacaaaattgtcccaggagaacaacacaaatgctttttccaaattagagcataagtcttccttaaatgtcctagtgtgacaataaggatacaacagccatcttttaaatgtcatgaaggctattgttaagacggtgtttttggccgttttgcagatggtccatcgaagttagttctgttatcaatgttattttcatcttctgcatcatcttcatcatcaccgtccaagtcctcgtctggagccgccgccacccggtgctgcacttccccctgtaccagagggtcgaataattccgttaccatgtccttcatctgggccacgccagacaacaggccctggaaagggtcgccgtcacccggcgcctcacaggacacccgcagcttctgcccccggccgtaatggccgaattcccgggcatatgtccggtaccgtcgactgnnnnnnnnnnnnnnnnnnnnnnnnnnnnnnnnnnncggccgcttcctcgctcactaactcgctgcgctcgtcgttcgctctcagcctacgccctatagtatctatacagtt

SEQ ID NO: 122514 - DNA, 689 bp, Homo Sapiens
tttttgctgaaaacagaaattttgctcacgagttagttcaaatacatttatgtagctcccttatatactatcaaaggagctccaaccatctggtatgtctggaagacacttcagtgagtagaaattagaagccagcatttgaaattttctatcacagggacatgaaagcctaaaccggccttaaagggataagaggattttacatttttaaaaaataaatcaattaacattcattgtcaaataacctacaagaaagttccactagcattctgcaattgtatagaataagagaatatttgttgctaatgattacattccagaaagcaatatgtttagcagctgtttttcaaaagacttgtcaagttttactattgttatttaatccaggcataaatgtgtaaccttaaacaaaaactgtgcattattcaaccagctagtgacaaattatcttaacaaagtagattatcttttgcttttctgtacatgaattttttctttattaggcattttgtattccaatttttgttttagaatttagtgcacacgtagaaaggggaagaaacgcttttggatgttggtaattatgtacatcaaataatgtcatatatgaaattaggagcagatcacaaaacggagattcatgcctctatttttaccaaggggaggaaacatgagccatacagccagaa

SEQ ID NO: 122515 - DNA, 689 bp, Homo Sapiens
ttgtgggtaaaatgtaatttattaactttcctctctttcctaaaagggtgctcaaaaggtaatctggaagttgagtaacagcaaaccatcgatgaagtgatgcttacacatcctcgcaggcagaatccattctccactttgaggctgcaaacccatccaaatgccctaatttcagggctgacccatggaacaaagcagatggcagaaagatccagaacctctcccaggaggcctaccctttcccctccaccaatcttgcaggggaaaatggctgtgacagaatgaaatgctgatagaggctgagagcacacggtcagcccacaattcattccttccacaaatatttgccaaacattcacaatgtgcctggcccctgtggtatgcagtgaagaagccactaagaagacagtttcagcatcctgacccctctcgggtcagcccctcagggatcagcacgagctcctatgtaacccccacaaagaggccaagggtgctgatcaggagaggacagaggcagactccactcaagagcacttggggtttatacctcagggtcactcagggtgccctcctcccacagcaacgtgattcaggatgaagcagtctcattgcccagaaaatttacgagccttcggctgcttcccagaggcttatataattctttgcagagctctgtctcatacttgata

SEQ ID NO: 122516 - DNA, 1096 bp, Homo Sapiens
tttgcaaatcaatatatagtgcttcataaatgttaacatgttactaaggatcagtgaatacagccctcctcctttcttaggtttcccaccattttcgagaactcatgcagctcttccacactgcctgtgaagccagctctgaggatgaggatgatgcaaccagtaccagcaatgcagaccagctgtctgaccatggggaccttctgtctgaagaggagctggatgaatgagactctgggaatcatctacacaggaccaaacccaacaggcgccctggcaccggggaggcgggtagttgtactctgcttgtacagtccttgagcccagtttacagatctggagagcaggaggccaggacaaggacaaaggctggaggatggagtaggacccaggggctctgccatcctaggcatcattcaaggtcttttatgaagactttacagatgtcctctgtaagtagcatcgagagtggagttcagctcctttctctacttttttttggtctgatggcacatatttattgttctgtggtctaatcacagtgtttctaaatgtaaaaagtgcatatgttggtgtagctagtcccgcgacattgagctcctctgcatgaagacactgggctcctgcatccagctgtttttattgcaaactagctcctttctcccacactgggaactttagtccacgaggctgtcaccaccctggtagcactgggccaggctttgtagctcctgcagcagctctgctacgtcatcgtgctccactccagcatccatgaagctggcccagcgccgcaagtcgagtttggtgaggtctctggccaaggcttccagggtctggtgcagggacgaagaggaacacagtgccccaaacactgggatgctctccactgctgtggagggagaggaaacagagacctgtagatggatgattattctgccctgggactcgccaaactgataaggaagtccaaccttagtagacttgattgtaaactcaacaaatttggtgtattgtccccttagtacaccagtactccagaggaagaatgcttttcttgggagccatagggtgaataaaggaatgtttaactgtg

SEQ ID NO: 122517 - DNA, 441 bp, Homo Sapiens
atattatatatattatgtattcctgttattaagtgtagagttttatgagtataatttgattttattaccttcttttttacaagctgttttctcagtatttttctttgatgggatgacgctaggctggaaagtttttttcatcactatgattttataaaacaattttttctatgaacctttacttacttgactggattggactaaaagcactgatcagaggccacgacataaaaattcagtccctttgtccttccccgtgcctcccaaagttactttaagatccttagaatatttctttaaatattttatagacaaaaaatttaaagactatctgtattgcaaaattaaactatttctttaatgaatatattgcttattttaagttccaaaggtgaagtctttaagaataaaacattaccaactcctgcttaaatatgtaaa

SEQ ID NO: 122518 - DNA, 1530 bp, Homo Sapiens
  misc_feature (247)..(256): n is a, c, g, or t
  misc_feature (499)..(542): n is a, c, g, or t
acatatatataacaacccccgttcgtaaaaaaattgtcgcgagaataataaaccccgctagttgcgcacaaatgtctctctacgccgcgccaggctaaatgttgcctgctgttggtggttgtaccccgccatgtaagaccacgcctataaagactatgttataagatgctcctccttagacggcctttattaaaaacctctcttggttgggggaggattggtgcctcccccacatagatttgttgtnnnnnnnnnngcacgaggtttagggttgtcccctctcccccacaaaagtgttcgccccaggcgtgtccacgtgttgttctccccgtcgcccgcctgttttaccgcgcgcccccgccctcggctcttatattaagacgcccgcttctcctttagggggccctcctttgttgccagaaaaagcgggggtggcgctagagctggggggccccccgccccggggagatttcttttgtggcggccgcgccccccctcnnnnnnnnnnnnnnnnnnnnnnnnnnnnnnnnnnnnnnnnnnnnacccagtagtgaaatgacatttattaattccattaagacacaactacatattttattcttataatggccatgttaataagttcaaggcatacttcaaggttaggatcaaaatttggccagggcttcttaagatagaccttaaaacattgcacgttgatgttcttttgaacaagtttgtctccaggaccagtaaatatgacactttggattttaagctgattaaagagaacaggttttattaataaagactgatctcaaaatgctgggattgataaaagaattaaagtttcaacatatcaattttaagaagcaaagtgtttcaacaactgagaggtaagaaaatcttgttatttgcatgtatttttatataatcaatcaggttgcagattctaaaattgctcatatccagcatgatggtgcttgagaccaataaaataagccagcaacactagaataagtactcctgccaaggcagctcccaccgctatgggcacaaggaagttgtcgtcatctgcactgcagtcttgagctgtagaatactttccttgtgtcacattgaaaggctgaacccttagatcaaaggtatttatctgaaatgctccagacactgaaacagtctgctctttgttgcacatataagaacttcccaggggggcatcccagtagctgagattgttatttgcaatgctgaaaacggagccattaaccaaatacatgctgatgttcacttccttcagataaaatcggttttcatttttcacagcaaagacaaagtctagatacttaatggtgctgctattgagtctaagtagagcagtgtgagaacggcagctgcctgtggagtgagttgtattggggtttgatgttaataactgaagcaaccttcaggagaagaagaaagggaaaaggtacaggttagctataaaagtggccagcaaagccttacactctaccaaacaaaatcaacttcagcgtagaacaaaaaatc

SEQ ID NO: 122519 - DNA, 1010 bp, Homo Sapiens
gtgacctattaactatttcgcgcttgggtggtatatattaaattcctatgttaccacctttggatgccaacacgtgggttcatcaccagtccacaagctacctttctctgagaccctttagtattctccaaccctgtcctagaattttctaagggcaattcttgcctctgtgtggactaattaagtaatttttgggtgaaattttccatgtttgggggtgcattagccattaagatgaccaccaaggccaaaatggagagtggcaagctctagtaatactctcctgctcaaaatgcttttgatgcctgagaaagaagtaggtagttttgagccaggtaaaatgcgatacacatatataatagtcaaacattataatttaatgttttctatgtgaattcacaattgaaatattgtataatatgacaccaataaactgtgcaaaggtctttgaggtagagccttatttaaattctgcactcaaatacatatactttacataaatatgatcttctcagagttataaacaaagtttagaaatatggtaaaatctctagaattatcagaggtaatttagaggcaaagtggcctgcctgttcagtaactgatatttcagcaaaaggtcatagcttcttctattgattcatagagtggggttagcctgtggatagacatttgtactaacatacactgattacattcatactacagaatcatatgttagatgccagagcataatcttaatctttcatcctctgcatacactcctatttgggtacttagcatgccactgcatttactcttgatgaagtttgttttcccaactagattttaaacatccttggaggcagaatcatgagatattaaaaatctacaaatatgttggctcttcagcgctaataaatgataaaatgtacccagtaaaaaaccaagcagtatttacagccagctattaagaatcttcccggccgtaatggccgaattcccgggcatatgtccggtaccgtcgactg

SEQ ID NO: 122520 - DNA, 1192 bp, Homo Sapiens
  misc_feature (44)..(58): n is a, c, g, or t
  misc_feature (66)..(222): n is a, c, g, or t
  misc_feature (1072)..(1106): n is a, c, g, or t
ccttgggggcccgcccccccaaaaaagtttttaaaaaatttttnnnnnnnnnnnnnnncccacaannnnnnnnnnnnnnnnnnnnnnnnnnnnnnnnnnnnnnnnnnnnnnnnnnnnnnnnnnnnnnnnnnnnnnnnnnnnnnnnnnnnnnnnnnnnnnnnnnnnnnnnnnnnnnnnnnnnnnnnnnnnnnnnnnnnnnnnnnnnnnnnnnnnnnnnnnnnnaccaaaaacattatttaattacgtacttttacctatattttataattccaaacacaaggggcaaaaaaatcctccataaatggaagttctttaggtggttccaggtatctgcttcagtttataactatcttcacagtttacatttacagaaatataaatattatttcttaaaattcacatttaatacaaactttcaaagatatttaaacgtaggatagtagtaaggagaatcttaaatcttagaaacttgggggtatgacaagagcaattcctaaatccagatgatgattttaccattgctatgtataagctgccatttgtagcaggttttacatgggacattattgaacattttcgggggtgggggaaaaataagaatctattttatcatctttgattgcaaacatgggttcatgacatgtcacaaagctactttctctgagagcagttagtatctccaaaccaggctagaatttctaagggcagtcttgccttttggtggactattaagtattttttggtgatatttccatgtttgggggtgcattaggccattaagatgagcaccaaggcaaaaatggagaggtggcaaagctctagtaatactctcctgctcaaaatgcttttgatgcctgagaaagaagtaggtagttttgagccagtaaaatgcatacacatatataatagtcaaacattataatttaatgttttctatgtgaattcacaattgaaatattgtataatatgacaccaataaactgtgcaaaggtctttgaggtagagccttatttaaattctgcccggccgtaatggccgaattcccgggcatatgtccggtaccgtcgactgnnnnnnnnnnnnnnnnnnnnnnnnnnnnnnnnnnncgccgcttcctcgctcactgcttcgctgcgctcgtcgttcggctgcaacgacgctagcgccctatagtgagtctatcaggttcttg

SEQ ID NO: 122521 - DNA, 963 bp, Homo Sapiens
  misc_feature (113)..(113): n is a, c, g, or t
  misc_feature (279)..(323): n is a, c, g, or t
  misc_feature (850)..(884): n is a, c, g, or t
tttttaacaccaaggtctttttgtcccccggaccccctttacacacaccagtattggtgccctcccttttccacctcttctctgagtacgcgtcttagttttttaagctcgcncctagtatacacacacattctctgtgggggattattgtagcatatttaatcacagagcgctctctgagcctcccgatcccccacgagagtctcctccccttgtacccaccccagttactctattctctatatatttgtccgttattttataagacacatcttagtnnnnnnnnnnnnnnnnnnnnnnnnnnnnnnnnnnnnnnnnnnnnnacaaaaaggttgaccggcattataaaaataaaacagctgcactgagttatgggcctaagaaaacagtggctttgcccacatcagatgggttgaaggagggcagtgtttgtgggcaagttggacagagttataaacagagtaggcaggaaaagcttctctgtacatatatattaatctctaagtgtaaactttcaattaaagggaagaaaattatataagtagcctgagattttgctgcttttatattaacagacaactgctagaagataataaagtatactttgggtggaaatggaaattcctgattctttggaatttggttttctaatatttcatgcattgatgcgatggacctgaaatttacaaaatatcttttaactgtttagtcaatattacagagattcacctgttatagtactgaggcatacaacttaatgatcgtacatttaaaattatcatcataaatttatgtgccccccggccgtaatggccgaattcccgggcatatgtccggtaccgtcgactgnnnnnnnnnnnnnnnnnnnnnnnnnnnnnnnnnnncggccgcttcctcgctcactacttcgctgcgctcgtcgttcggctgcaacgacgctagcgccctatagtgagtctatca

SEQ ID NO: 122522 - DNA, 1013 bp, Homo Sapiens
  misc_feature (765)..(765): n is a, c, g, or t
  misc_feature (959)..(960): n is a, c, g, or t
  misc_feature (978)..(978): n is a, c, g, or t
  misc_feature (988)..(988): n is a, c, g, or t
ggtgggtagctaatatggtatatttatttcacagtttcacatctttatcattgtttttatataaaaacaatgcttaagtggggtttcagaacagatatttccttttaaactttttttaaaaaatcacaaatatgattggctcatacaaccacatttcacctcttttcaccagcactcccacccattcccgttagaaatattttgttaaaaaaatcaggtgatcaaactcatagaaactgaattgtgagaagtataatgggaaaaggaatgagaacctgtggctctagggagttacagaagggaaatcatcttttagagccttggtttatttctgacaggaaaggtaaagccgtgcatttattagaacaggaagctaagaaattaaagatggcgagattgtctaaaataactgaggctgaactggaagcctttaccctggcacactcaaaaatcacttttggtactgttggctgagactggccgaggaatgtgcatctctggctggatttggagagggcagctcacccgcaacctgaacataggttctgtaacgtgtctcattgttactcagaaagttcagtactcagggccagcacgctcctgctcatgcgggataagccactcagagcagaccagctggaaggatcagggatctgagcacagccaagtttacttaagctaagcacttgttcctgggtcaagcagtttgttttctaataagcatcattcctgatcattagagcaagggatgaagctcctcttggnatgataaggggatctgcactgggagagtgtgctcaagtgtagagtacagcatgacagatgacagcgatctctgagtcaaccagtacttttagtacccatcactatgtgaataaaggcagctagaaatggactcaattctgcaagcttcatggaacagcctcgttgcgaattctggctcgagggcaaatccctannggagtcgtataattcggnataagtcaanctgttcctggggtgaatgttaccgg

SEQ ID NO: 122523 - DNA, 1003 bp, Homo Sapiens
  misc_feature (79)..(113): n is a, c, g, or t
aatgataatcactatagggcgctagctcgcctcagccgaacgacgagcgcagcgaagtagtgagcgaggaagcggccgnnnnnnnnnnnnnnnnnnnnnnnnnnnnnnnnnnncagtcgacggtaccggacatatgcccgggaattcggccattacggccggggtcttcagttgtctgctactcagaggaaggggcggttggtgcggcctccattgttcgtgttttaaggcgccatgaggggtgacagaggccgtggtcgtggtgggcgctttggttccagaggaggcccaggaggagggttcaggccctttgtaccacatatcccatttgacttctatttgtgtgaaatggcctttccccgggtcaagccagcacctgatgaaacttccttcagtgaggccttgctgaagaggaatcaggacctggctcccaattctgctgaacaggcatctatcctttctctggtgacaaaaataaacaatgtgattgataatctgattgtggctccagggacatttgaagtgcaaattgaagaagttcgacaggtgggatcctataaaaaggggacaatgactacaggacacaatgtggctgacctggtggtgatactcaagattctgccaacgttggaagctgttgctgccctggggaacaaagtcgtggaaagcctaagagcacaggatccttctgaagttttaaccatgctgaccaacgaaactggctttgaaatcagttcttctgatgctacagtgaagattctcattacaacagtgccacccaatcttcgaaaactggatccagaaactccatttggatatcacagtatttgccaaagtgccttagcagccatgcgacattgccggtggttcgaggaaaaatgcgttctcagtccacaggttaaggtctccatcagactactgaaggacttgaggaatcgtttcctgggtttgagccctcaaccctggatcttgactaaatagcatatgctgttgatgacaacca

SEQ ID NO: 122524 - DNA, 904 bp, Homo Sapiens
  misc_feature (332)..(332): n is a, c, g, or t
caaaggggattcccccaggggtttttaaaaaggggggtctctaaaaaaccccccggggaaaaaagcgaaatccctccaaaagtcccttccaagtaagtttcgaaaggggagaccttttaaccggtggggcgtggagaaggccattttcctttggaacccagccggggcatgttgggaatggcttgttaagggcccttctgcaaatcctttgatattccaaaatggagttctgggatcccagtttttcgaaagatgggggtggcactgttgtaaatgagaatcttcactggtaggcatcagaaagaaactgattttcaaagcccagtttcgtntggtcagcatggttaaaacttcagaaggatcctgtgctcttaggctttccacgacttttgttccccagggcagcaacagcttccaacgttggcagaatcttgagtatcaccaccaggtcagccacattgtgtcctgtagtcattgtcccctttttataggatcccacctgtcgaacttcttcaatttgcacttcaaatgtccctggagccacaatcagattatcaatcacattgtttatttttgtcaccagagaaaggatagatgcctgttcagcagaattgggagccaggtcctgattcctcttcagcaaggcctcactgaaggaagtttcatcaggtgctggcttgacccggggaaaggccatttcacacaaatagaagtcaaatgggatatgtggtacaaagggcctgaaccctcctcctgggcctcctctggaaccaaagcgcccaccacgaccacggcctctgtcacccctcatggcgccttaaaacacgaacaatggaggccgcaccaaccgcccctcggacgcgtgggtcgacgatatcccgggaattccggacccggtaccagc

SEQ ID NO: 122525 - DNA, 1066 bp, Homo Sapiens
  misc_feature (1041)..(1041): n is a, c, g, or t
ttcgggcggagattctgaagctttttagccaggcccatgtccttgctgttttagggttcaggaccgttgtgtacttctaaaattgcccactctccccaggggtcagtgattaccccccggaacctgggcaggaaacagtcctgccagcccagattttgcaagccagcgccctgtatgcaacgtttagggcccaaagggctgtctgggtgggggttgttcatcacagcataatgccctagtaggtcaaggatccagggtgtgaggggctcaaagccaggaaaacgaatcctcaagtccttcagtagtctgatgagaactttaactgtggactgagaagcattttcctcgaaccagcgggcatgtcggatggctgctaaggcactctgcaatactttgatatccaaatggagttctggatccagttttcgaagattgggtggcactgttgtaatgagaatcttcactgtagcatcagaagaactgatttcaaagccagtttcgttggtcagcatggttaaaacttcagaaggatcctgtgctcttaggctttccacgactttgttccccagggcagcaacagcttccaacgttggcagaatcttgagtatcaccaccaggtcagccacattgtgtcctgtagtcattgtcccctttttataggatcccacctgtcgaacttcttcaatttgcacttcaaatgtccctggagccacaatcagattatcaatcacattgtttatttttgtcaccagagaaaggatagatgcctgttcagcagaattgggagccaggtcctgattcctcttcagcaaggcctcactgaaggaagtttcatcaggtgctggcttgacccggggaaaggccatttcacacaaatagaagtcaaatgggatatgtggtacaaagggcctgaaccctcctcctgggcctcctctggaaccaaagcgcccaccacgaccacggcctctgtcacccctcatggcgccttaaaacacgaacaatggaggccgcaccaaccgcccctcgtccggaattcacacnccagcctcgtacctagcgttatttt

SEQ ID NO: 122526 - DNA, 1064 bp, Homo Sapiens
ggcatgtcatatagaccaagtggtcaaaaagcaggctggtaccggtcggaattcccgggatatcgtcgacccacgcgtcgctcagaggaaggggcggttggtgcggctccattgttcgtgttttaaggcgccatgaggggtgacagaggccgtggtcgtggtgggcgcttggttccagaggaggcccaggaggagggttcaggcccttgtaccacatatcccatttgacttctatttgtgtgaaatggcctttccccgggtcaagccagcacctgatgaaacttccttcagtgaggccttgctgaagaggaatcaggacctggctcccaattctgctgaacaggcatctatcctttctctggtgacaaaaataaacaatgtgattgataatctgattgtggctccaggacatttgaagtgcaaattgaagaagttcgacaggtgggatcctataaaaaggggacaatgactacaggacacaatgtggctgacctggtggtgatactcaagattctgccaacgttggaagctgttgctgccctggggaacaaagtcgtggaaagcctaagagcacaggatccttctgaagttttaaccatgctgaccaacgaaactggctttgaaatcagttcttctgatgctacagtgaagattctcattacaacagtgccacccaatcttcgaaaactggatccagaactccatttggatatcaaagtattgccagagtgccttagcagcatccgaatgccgctggttcgaggaaaatgcttctcagtccacagttaaagttctcatcagactactgaggatgaggatcgttttcctggttgagcccttacaaccggatcttgaactaataggccaatatggtgggatgaaaaccacaaaaaggcttggcctaaagtggataagggcgggcgacggcggggcacggcgccgcagggttacgcccggaaggctcagcccaggtggcccaaacgagggggcaccaaccccgacccaggggaaccccggggccagcgcaacgcggggacagtgccacgagacccaaggccccggga

SEQ ID NO: 122527 - DNA, 1468 bp, Homo Sapiens
  misc_feature (34)..(34): n is a, c, g, or t
  misc_feature (128)..(162): n is a, c, g, or t
  misc_feature (175)..(175): n is a, c, g, or t
  misc_feature (177)..(180): n is a, c, g, or t
  misc_feature (213)..(221): n is a, c, g, or t
ttttctagggggagagggggggcgccaaaaaaanaatttgtggcaaacacgcagtggaaaaagaaacccgaggggccactagaatgggcggtgaacgaaggggggaagtacaaagtacgatggttacnnnnnnnnnnnnnnnnnnnnnnnnnnnnnnnnnnntggtgagtgggtnannnnaactaggaaggtactttaatagtttttcttagnnnnnnnnntttccagacacttaacatttcacaacatttcaacagcaaagtattagttgagagaggggttttcaggagttggagattatagaatattaggaagaaatgttggtatcctccattatagatggatggcataggtcacaaatgggagactggcagctaagccaatatcaaaacccagtggaatgacacttctatggagtttacttttcttcctgctatcttccctatcccacggaaatgtctgtcaccatgtaaagcccagtagcaggcagcttaggctccagtcttcccccttgggtaggaaaaggagtgaagggaatgtcactcctgagtttccatgctttcttcttcctctccttgaggtggttccttctgtattctcctcttcttcctctccttccttcttctctggtggcttctcataagccttttctgaaggtgttactatcactccatcccaggtagatatttcagaagcaagatagctggcatcaccctcctggccaaggatcttcctaaagccaccatgtgagaggattcggacgagagtctgagctgtatagcagaccatgtcctgctgttctagggtcatgactgtgtgtactctaaagttgccactctcacaggggtcagtgatacccactgaacctggcaggaacagtcctgcagccagaatctgcaagcagcgcctgtatgcaacgtttagggccaaaggctgtctggtggggttgttcatcacagcataatggcctagtaggtcaaggatccagggtgtgaggggctcaaagccaggaaaacgaatcctcaagtccttcagtagtctgatgagaactttaactgtggactgagaagcattttcctcgaaccagcgggcatgtcggatggctgctaaggcactctgcaatactttgatatccaaatggagttctggatccagttttcgaagattgggtggcactgttgtaatgagaatcttcactgtagcatcagaagaactgatttcaaagccagtttcgttggtcagcatggttaaaacttcagaaggatcctgtgctcttaggctttccacgactttgttccccagggcagcaacagcttccaacgttggcagaatcttgagtatcaccaccaggtcagccacattgtgtcctgtagtcattgtcccctttttataggatcccacctgtcgaacttcttcaatttgcacttcaacctcgtgccgaaatacgccacccaggcctcgctacctt

SEQ ID NO: 122528 - DNA, 1103 bp, Homo Sapiens
  misc_feature (950)..(950): n is a, c, g, or t
  misc_feature (1037)..(1037): n is a, c, g, or t
  misc_feature (1056)..(1056): n is a, c, g, or t
  misc_feature (1087)..(1087): n is a, c, g, or t
attttactgtgactcctgaggtagtttatgtgggaaacagcaggcaagccattaaaaccctctggggcttagttcattctgcacacgtctcactctggcaaaggggttctcacacgaggtcaaaggagcatggatcaaggtgggcagggggtggaggtgaggcaggccttgggaagtgtctccagatatggatcccaatttccacaaaatggctcggcagattccacaaacgctaagagaactttattttaataaaaatgtcctatttttcaggtgaccccttcctttaccactagaaagcagctctattgctaaaaagcaatccatttatttagacattctcttcttaggcaactttaaacttttccaccgccgtaacaccactctgtatttttcactttcagtcttctcttcaaacacttttttcaagagaatccgcataactgtctctgttcctgcttctttatcctctccaatgagaagatccaatgtatctcccactttcaccgttctgcttttcttccataatttttcctcattcagcctgagttcacctttgtagaaagcatcttccactttgtttctcccaatatctagccccgtcttcaggacaacatcataccgaaaagactgaactgctttttccaggtctttatagtttttgactacagtaggatcatcctcaagctcctcttcctgctcactcatctcatcatgatggctttcttcatcagagtcctcttcatctactttttgcagagactttttagtagattttgtagaccttatattacttttgagtcttacggaaaaaggaaaaatacattctggagatagtaaaagccctgggagtctcagtgagaaaatattataaaaaagtgttttataatttggtgcacgtaacttggtactagaaaaatacaagtatcgattccaggaacgtacagagntttgtatgatgaagtgtgtccctcgagagaacaccccagaggtccaatccatggcatctggctttcttaaaacaccggcaaagcaantttaacactagcacatagnccatggcgatatataattctgtacgtcaggnccctctcagtccctcc

SEQ ID NO: 122529 - DNA, 851 bp, Homo Sapiens
ttttttgcttttaccacacaagtttatttaaataaaagtgaacacatatgcaggctggtgcccgaggggcagggggtggggagggcaggtgggaagcagacagacaatggggtccaggcagagtttgtgtggtgaaccaggctgctggagggagtggctgggggcctcagggcagcgctgggattcagtgctggggcagggggccttgggtgggtgagcctggtgccaggaggtcatttccatccctcacatgcccccctccctttccctgaccccctgggcctacagcactacctcctcagccccctctccctctcctgacatcagccttccccttagctactgagaagccaaaagacaaaataaattagaatgggtgagtcctaccccagcccccagccatggggaagggaagccaagccaggcacactgcgccggagcccgtgctgtcagctctggaaaagaacaggtaaagtgcaaggagaatccagtaagtaaaaatataccaatgactttgtcaaatacacagctgctggctgtcaggagcaggtggctggctggggcgggtggcagcagcaccctgggaagtgttgggcgacacagcagagagacaacggaaataaatagggtgggtgtggacaggggtcccaccaactgggccagcaccacccaggacgggcttctgcctgctttccggccccatgcccccaagcccccctcgcctggctccccagtgctgcagcactgacacaaagcacccggccgaccgtgttaggaaaggactataatgtgggagtggagcagggagggaggcacggggaagctgtgcagtcagccagggctgcggccgc

SEQ ID NO: 122530 - DNA, 624 bp, Homo Sapiens
tccccggtggggagtacggaatgcacgctgtgagaccccagtgaattttgttgtcatgttgatggttattcgtctactaaaacagacatcatttttatctttcctatcaatcacagtaacctcgtgcctcaaatattatgggctgattcagttaaatagatttctttgcaggcaaattcgtttttgccatctgcttgaccttgctttaggcttgtgcttgcatttgtccacgtaagactgtgcgtttaaatgtaaaactgtatgctgtacccaggattaactttcatttttttgtgtgtcagaagggcctgtggtgttataaggggaagactgcttagcaaaatcagttggttccctagttacttatgaatcattatgtgattcaatacaattgcaatgctattaagagggtcatcagactatttacttattattcactttgggttgtaagttatctttgatgtctagaaatattttcaaggcaggctttttcctagcttgctgtttggatggggacctcagcatctacttcctagctctttcccaggatagtccatgttgatagtattcctctcctcagctgtgactccagcagcatcttctaagtaaggctctcagaagcat

SEQ ID NO: 122531 - DNA, 446 bp, Homo Sapiens
tgatttaagaaaagaggtttgtttaatgagaaacgtcctttcactctgtgaaaacatcgtgtggataatacataaagggcagagtcaggtgccgggggcgcatgcaggaagtgctcagctggactctgccctcggacaccgcgccactgttacatggagaagtcctcccggaggtgaatccgctgatgctgacacatgttggaactgtgccggaaggccttcccacactcgctgcacttgtagggcttctccccggtgtggatcctccggtgctgaatcaagtacgtgctctggctgaaggctttcttgcaatcgctgcatctgtagggtttctctcccgtggtgcagcctctggtggtggaatgagtctggaactgttgtgggaaggccttcccacactcgctgcacttgtagggcttctctcctgtgtggattctctggtgctg

SEQ ID NO: 122532 - DNA, 762 bp, Homo Sapiens
  misc_feature (655)..(716): n is a, c, g, or t
  misc_feature (737)..(737): n is a, c, g, or t
cacagaactcagacaagctgttttattcaccattatggtttattacaacaaaagaatagagattaaaatcagcaaagggaaaaggtgaatagagcagaatcaggagagaccacgtgcaagtttccagttgtcatttcacagtggagttttacagacagtgcttaatccccccagcaatggtgtgtgacaatacgtaaaagtgttgccacccaaggaagctcatccaagtctggatgtccagagttttactgggggtcagtcaggtaagcatttagtgcttatgtgactcacttcagctactcagtctcagctccccaaatacccaaggtcaaattaatacagtgcagcccagggtcttagacacaggaaaacaggtattcactataaatcacattgttagcataaactatctggcatggtcaaaggcctcaggcaaacagaaacattcctatccaggggctcagagctcatttcccagtagccagtcaaaggtcagcactggggtcagacctttctttggaatgtgcaaggtttaagcaacccaagcttgctgagttaaccctttaccacacgtagaagtttttgttgtttgttttttaaatttaggagatgaggactcactatgttgcccaggcttgaattcctgggctcaagnnnnnnnnnnnnnnnnnnnnnnnnnnnnnnnnnnnnnnnnnnnnnnnnnnnnnnnnnnnnnncatacagaagtcttaaattanaaaatacattggtagaatatattaa

SEQ ID NO: 122533 - DNA, 624 bp, Homo Sapiens
tttttattaaattcaacaaacatcagtttatttcctgccagaacactggtttttcattgcttagacatggtttgggaatattttccaccatagagaaaatttataagcaacacatacaacgactaatcttcttttcgaagatatctcagatattagtatttaaaattagtagcttttattcaagaatgatgaaatggaataatttaagcaatgattgattatattctgaatactagaaagataaacttcgggtgcaatctagatgacaatcttgattctgaagatgctttgaaggactatttgattcattcattttacaaatatttgttgaaccatattatgcaccaggtactgtgccagccattagggatccaaaaatgagcaggacatagacctttccctcagggaacctgcagttttgtggaagaagaaatataatttaacaggcaactccagtatcacgtgatagtgacctgaggtttgtgtaggtgcctcagacccccgaagatgccatcagtatccaaacaaatgccccaaagaaaccacataccaatagaagaatagaatctgtcacaattgccagccacaaagcacaccataaactacttagtgcatatgaatagc

SEQ ID NO: 122534 - DNA, 945 bp, Homo Sapiens
  misc_feature (824)..(858): n is a, c, g, or t
  misc_feature (862)..(900): n is a, c, g, or t
tgcctggccaggaagtagcggttgaagtagaagaccttcccgcaagtgacaccccgttggctgtgcttcgcagtagcccgtgtagcagtgagaagacgtagtccctcaccaccatgcctagcttcgcacgatgtagctgaggtcagggggcaaatgctccgttgttggcagcctcggagcagcctcactgtttggggtattgtttttgggaaatagtcgaacagcttccctggcctgcatgaacatctcccccatcttcaattggggccgtcttgaacctgccacctccgcagccagctccttagcttcatcctccgttgtagcacacgcccaccaggtggcggtaggccacgaagtccatgctgtggcaggaggcgcacacctgcttatatacctggaaacccctccggatgctggtgtggtccaaggaagagaggaggccacggtgagaccacggatagctgggggggtgcagctccaggtcactggcactcacagccgaatgcagagccacggccagccccgcaccccctgccgccagcatgcccagcgctgacagcatcactttccggcctcgggaaaggccagacttcgacgacaaggccactgcctgaggtgtccgtagcgggagctgcccgggccgcgcgctgcacagcagaccccgggcacgcgcgcccgggagccccgcgccccgcgggcccaacactaccccgcgaagcgaagccgcagctgccgccatcttggcctcctccgcgcggccgccactcccgtcccccggccgtaatggccgaattcccgggcatatgtccggtaccgtcgactgnnnnnnnnnnnnnnnnnnnnnnnnnnnnnnnnnnncggnnnnnnnnnnnnnnnnnnnnnnnnnnnnnnnnnnnnnnnagaataagccgacgctagcgccctatatgatctatcatcttgtta

SEQ ID NO: 122535 - DNA, 1063 bp, Homo Sapiens
ccacgttttcaattccgggagcgaacttccccctttccaaggagttcgcccccctgtcttggtagcttcccaggcacaactgccgtccttgcgccaatcccttcactttcgggccctggcccttatggtagcccggcacacgaccatttcttcacttttgaccatgcttttcatgtcttctctgctcaatcccagccagaaggttcacacatccttgctatctggacatggtactggggtccatcgtcaactctaagacatctgtgtagatggagggccatgcaatgcctgccagtaaagtagggttgaagtagagaccttcccgcagtgacaccccggtggtggctcgcagtagcccgtgagcagggagaagacgtagtcctcaccaccatgcctagctcgcacgatgtagctgaggtcagggggcaatgctccgttgttggcagctcgagcagcctcactgttggggtatggttttgggaaatagtcgaacagcttccctggccgcatgaacatctccccatcttcattggggccgtcttgaacctccacctccgcagccagctccttagcttcatcctccgtgtagcacacgcccaccaggtggcggtaggccacgaagtccatgctgtggcaggaggcgcacacctgcttatatacctggaaacccctccggatgctggtgtggtccaaggaagagaggaggccacggtgagaccacggatagctgggggggtgcagctccaggtcactggcactcacagccgaatgcagagccacggccagccccgcaccccctgccgccagcatgcccagcgctgacagcatcactttccggcctcgggaaaggccagacttcgacgacaaggccactgcctgaggtgtccgtagcgggagctgcccgggccgcgcgctgcacagcagaccccgggcacgcgcgcccgggagccccgcgccccgcgggcccaacactaccccgcgaagcgaagccgcagctgccgccatcttggcctcctcctcgtgccgaattcaccacccaggcctcgctacctagcccgtaagg

SEQ ID NO: 122536 - DNA, 1239 bp, Homo Sapiens
ctgggtggcgtactcaagacgaggcattgagaaaattaatttattcccatgatgggggctgaaggagggcccagagctagagcctggtctcctgcccccttgcctcttcttccagatgaagagaggcttagctgaggcctgaacaggcctgggatggctcttgggcttgagggcctgttctggcaggatggcaagcagacactggacagggtcacttgggcggccgatatgccagcttccgactcttcaggactgaccacttgtgccgctttatggtgtagaccaggggcaccagcagagccatcatcatcaacatcttgagccccatgcgttttcgatggtcgtgctctggctcagatgcccagcgcaggaaggtgcacacatccttggctatctgggacatggtagctggggtgccatcgtcaaactctaagacatctgtgtagatgggaggggccatggcaatggcctggccaggaaagtaggggttgaagtagagaccttcccgcagtgacaccccggtgggtggctcgcagtagcccgtgagcagggagaagacgtagtcctcaccaccatgcctagctcgcacgatgtagctgaggtcagggggcaatgctccgttgttggcagctcgagcagcctcactgttggggtatggttttgggaaatagtcgaacagcttccctggccgcatgaacatctccccatcttcattggggccgtcttgaacctccacctccgcagccagctccttagcttcatcctccgtgtagcacacgcccaccaggtggcggtaggccacgaagtccatgctgtggcaggaggcgcacacctgcttatatacctggaaacccctccggatgctggtgtggtccaaggaagagaggaggccacggtgagaccacggatagctgggggggtgcagctccaggtcactggcactcacagccgaatgcagagccacggccagccccgcaccccctgccgccagcatgcccagcgctgacagcatcactttccggcctcgggaaaggccagacttcgacgacaaggccactgcctgaggtgtccgtagcgggagctgcccgggccgcgcgctgcacagcagaccccgggcacgcgcgcccgggagccccgcgccccgcgggcccaacactaccccgcgaagcgaagccgcagctgccgccatcttggcctcgtgccgaaattcaaacccaggcctcgtacctagctaatttt

SEQ ID NO: 122537 - DNA, 1082 bp, Homo Sapiens
ttttcggggtggcctttgttcccctcttttcggggttggcctacctggtcctgctggcttttcagtgcacaccgtggcgtcctgccctattcccttcgatttaggcgccctgtccgccttttggtaacccgggcccgtcggcccttcttgtcaacttttggccccctgccttttcatggtcctactctgctcaattccagcgccggaagtccacacatcctggctatctggacatgttagctggggtgccatcgtcaaactctaagacatctgtgtagatgggaggggccatggcaatggcctggccaggaaagtaggggttgaagtagagaccttcccgcagtgacaccccggtgggtggctcgcagtagcccgtgagcagggagaagacgtagtcctcaccaccatgcctagctcgcacgatgtagctgaggtcagggggcaatgctccgttgttggcagctcgagcagcctcactgttggggtatggttttgggaaatagtcgaacagcttccctggccgcatgaacatctccccatcttcattggggccgtcttgaacctccacctccgcagccagctccttagcttcatcctccgtgtagcacacgcccaccaggtggcggtaggccacgaagtccatgctgtggcaggaggcgcacacctgcttatatacctggaaacccctccggatgctggtgtggtccaaggaagagaggaggccacggtgagaccacggatagctgggggggtgcagctccaggtcactggcactcacagccgaatgcagagccacggccagccccgcaccccctgccgccagcatgcccagcgctgacagcatcactttccggcctcgggaaaggccagacttcgacgacaaggccactgcctgaggtgtccgtagcgggagctgcccgggccgcgcgctgcacagcagaccccgggcacgcgcgcccgggagccccgcgccccgcgggcccaacactaccccgcgaagcgaagccgcagctgccgccatccctcgtgccgaattcaacacccaggcctcgtacctagccgtatgtttgtttcccccccca

SEQ ID NO: 122538 - DNA, 1849 bp, Homo Sapiens
tttttaaactcagtaattcctttattttgattttaaattaatcacaaccatcgaagtggtaagaaacagctgacaggtgtacttaaaaatactgaattgacagctacattgaatgcagggtttcccagggtagttcttattttgtcacttactccaattacattcaaggtcgttatgcctcatctttttcctgagctgtggcagctctaactggggcacccagagagatacataccaggtaatctccacttctacttttctggtagcttggccctggcaaaatgagccccacaatctagaaagtaggatgctaaacaaagttgaatcaacatatctttttagaaaatatcaggttagagaatactcctgaggacctgtttctaaccagagttgacaaatgtgaaaaatgcatcagctagacagcagtcatgtgaacacagcccggaactgcaagtcaaggaaatgggttctgggcctgccttcccaggtaaccaaaaccattattcaaaagcaactactgaaatgccagcttgtggggaaagaaatgggaaaggtgataaaatcacaattaaatgcatgtatatacatgaataccaaagctattatgtagaaataaaatcaaaacactttagaccaagaagaaatcagagacctcctagtctattgccccagtgtaaaaattaaaaaactctggagtaatcattgccattaagcattagtatgagggaaataattttaactctgaggaaaaaaaatgattttttaacattttcaattttatatcaaattagatactgatcacatatatcataaaattaataaatcaagcagatttttctactccataattcatgtcacatttaatagtctcttcacggattctttgtactgagaaatggaattttcattttcctcctcatttttaagactaacaacagactttttgtactcttcaatttctttagtaccaaggagctcttctttatttatttccatatttttctcagcagctttcatctggagaagcgtttccaggatatttctttctgatgagctattttcccatatatactcttccatgtctgcttcagtcttacttttttcccattcttcagtattccaagactcatggtataacactgttagtagatacactgcataatcgtaattctgcctccttaaagggcacctatctgttttgatggtaagcacatctgtggtcttgcagtatcgctctcctacaagtttaattaatttcttctttgcgtgatcatctaaattcaaactggaaagctttactcttaagactactactcgtgctctggggttccgaacagatggtcctgatgaaacataatcagtgctgtcaatttcaattggaaaatgcttctcacatttctcgtcactgtccagtgcggctggccactcagtgcaaaaatctttaagggcttcacagtgctttttaattgctacaggagtcaaatgcagaaaattgggaatctttaaaagttctagatttccctcctttgccatgggcacgcccttttttactggataacccattcgaacaggaagaggtactgcagagggtttaaatggtgctgcaactgggtaaacactaggccagtcctggtcaacagccattttctctgtcctaggaggtagtgcctttcttcttggtggcctttcatttccgggtgttctttccggcaggctaggtgtcgggaccggagtggccgagtagacggcagtggagaatgcacgcagagtccttgccctcgactgcagagacagccatgctgggagcgcggcggccgccatggctgcgaggacggcaagccggaggccc

SEQ ID NO: 122539 - DNA, 599 bp, Homo Sapiens
tttaggatactgagattttaatataataagagttgttaaacatcaagatgatttatagaaaggagacctatggacaaatatcaacttattggtcaataaaacttgttccttaaagtcttttacagtattttttgaaaattaacttttttttaactgcatatatgggtcttcacttcatttttcagtaaagacaacttatttggatatcagtgtctcatcacttgataagaccagtggaggatttggatagtagccagctgtttttgaattgcttgaagagaatcttgtaaatttgtagtccagaggtaattctgcgattgcttcaatacttggaattgcaatagtgctgtaagtactgattctcttacaagaccatgtataaaccaaggagtcttctgtattttccagtcccaaaactgaatcaataaaaaaagagccccattttttagatgaagtatttaaaggttttgcttttggtccctcatattttcctttcttctctagaggctctgactcctcaggcctctgactcctcgtgccttcatcccctctgagttcttccaggatgaggactgtctcccaattactatagtgacgga

SEQ ID NO: 122540 - DNA, 688 bp, Homo Sapiens
  misc_feature (496)..(506): n is a, c, g, or t
gcagtttcacatgtttatttttggcaggaaggaaatcattgcaaaccttttgattgacaatactcgcccctggaaacgtgcacattccgcatgtagcatttcctaagtaatgctggattgtttatcacattcaaatgtccagcagaaatccatgactacccagacaccagcatctccactacccggggtgggggagggtgtgtcagtctgcagagaagctcctgggagaatggaacaggaacagacatgatcaaagttacagtacagtaggaacagaggcagccagccaattttgcacagttaactgcaagtacgtcaagccattcactcttctcgaaccctggcatgccaactgtccagcacagcacctttaaaagcagaggcacaaacgtaggattgtttgaccatagggctgtgtggttctggattttttattagaaagccatctttaaaaatacagggttgtaaaatgttgccaggttacagacttacaggnnnnnnnnnnnaacaccaaaagttcaaatgctgcaaccatgacaagtcagcatcattagggcatcctcgtgtccccagagacatctcatcaaaattgcaccacgtcaaaggagcttcctcaccatcaactgtggcaggtggcattcctttttcagtatgcagatgcattatttacaaacagctaatgcatgga

SEQ ID NO: 122541 - DNA, 480 bp, Homo Sapiens
  misc_feature (44)..(44): n is a, c, g, or t
  misc_feature (166)..(167): n is a, c, g, or t
gcatctgtggtcttcagagccagtaagcttttttcccgcccccnagaccgtcatcgtaacacaccatccggattattaagtagagagcatgcctgtgcaaaacatcatattgatctgatgttgatacttttatgccatacttgaaactcccataataaatttcttnntccggaggaacaaaaggcaacttttccatgttctgggcaacgtctatataatttatcaggtctaatgcccttcaaggccttttccctcggagagtttcagtttctcaatggcaccaacatattttattcgaaattctgcacaggtatctgaattattgttgctttgtcctcgcaaccgcgggcccatccccgggttgcggacttcggggtccgcgtgggagtgccgcggcctttggcgcccaggcagctactcccgttcccgctccagcgccggtttttccagccctcctgcccacgtccgtccgccgcgccg

SEQ ID NO: 122542 - DNA, 946 bp, Homo Sapiens
tttttttcactgtgtaataggacacattttaataaacaaatgatcagcattttacacaatccattttcttcagaaaatctagagcaagggataacttcattatttgcataacatttcagcattgcagtttgaaaacagctgaactttcagatgaagttgacttctacttgattgcaggattcagggtttctcagatgttaatacagagtcaaaagcggtggataaaaccttgcaaatggcttgtgcttgttccaggctgttgcactgataaacccacaggctgtattcctcattgcttgcatctgtggtcttcagagccagtaagctttttcccgcccccagaccgtcatcgtaacacaccatccggattattaagtagagagcatgcctgtgcaaaacatcatattgatctgatgttgatacttttatgccatacttggaaactcccataataaattcttcctccggaggaacaaaaggcaactttccatcttgctgggcaacgtctatataatttatcaggtctaatggcccttcaaggccttttccctcggagagtttcagtttctcaatggcaccaacatattttattcgaaattctgcacaggtatctgaattattgttgctttgtcctgagcttttggtggaatctgtgtcgaggctggccacagtgctggatcgtgaaagacccccaaggctagaatccacagacttgctcttagtactgatttcgctactttgggaactgctactactgtgtcgttttttgcccttgcgaaacatttttcaccaccattgcttgatccagagaagatcccctcgcagccgcgggcccatccccgggttgcggacttcggggtccgcgtgggagtgccgcggcctttggcgccccaggcagctaccggacgcgtgggtcgacgatatcccgggaattccggaccggtcc

SEQ ID NO: 122543 - DNA, 469 bp, Homo Sapiens
ctttgcaggctgcagtcgctgtttgctttcctctgaaggagggcagaaagggcccacgtgcagggaagctcatagtatgggttccattgacccaggcaggcatgtgtggtcggcttgcttaggagaggtcttaagagggtcaggtgtgtgcctctgctagccaaattaagttcacgaagagacagatgaatgttgctcttactctatctttcatgtaatgtaggaacaagcacaagccatttgcaaggttttatccaccgcttttgactctgtattaacatctgagaaaccctgaatcctgcaatcaagtagaagtcaacttcatctgaaagttcagctgttttcaaactgcaatgctgaaatgttatgcaaataatgaagttatcccttgctctagattttctgaagaaaatggattgtgtaaaatgctgatcatttgtttattaaaatgtatcctattacccagtga

SEQ ID NO: 122544 - DNA, 464 bp, Homo Sapiens
ggagctcggtgactcctctgcattgccagggcgcctggcaggggacgcgcttactgaagccgagaactttctggggaggtgacaccccaacagcgattcccatgtaccaaacgcctaccacgtgccatgcacggtgctaggtgcacagatccctctcaccctcaccctcaccgaccagcaaggctgcaggataacagcccctttcaaacgaggatgccaaagcgcccgaagagtcagtgacctgcccagggtcaccagagtaaggacggatgcggccaagctcggggcctagggagagccggctccgaagttcctcccagacgccagcctgcttggcacctgtctgtcaccgtgatggagcaccttccaagcgctgggtgcggaggatgtgacagcgaaggggacagacaaccccgaccctgagaggcgggaggcggccgaagcggggcagaggaagaggcaag

SEQ ID NO: 122545 - DNA, 534 bp, Homo Sapiens
ggaccaacccgggatcgccttgaatcttctcaacaagaatattatgccattgaggcttcctatccattaatgatatatctctctccatttatgaggtcttctttaatgtccttcaatattttctccatagaggtctcactcatgttgttaccataatccttggtaaaactcacctacacgaccatccaggcacaccatttctgttgtagaaaaagtgttaactactgagtttatcctttaatgagcaaaggactgcttagatttttaaagtattttcttggttcaattttgatgacatgttttcttggaatatatcaattccatcaaaattttccaattttgttataattagtttatacaatatttgtttttgctggtttaatctctgcagcatctatagttgtggtctcttttgtgactcctaaatcatttgctgtgccttctctcttttatatgcttgtttttcttcatttatttttgctccccggccgtaatggccgaattcccgggcatatgtaccggtaccgtcgactg

SEQ ID NO: 122546 - DNA, 558 bp, Homo Sapiens
accagcttgaaacaataagcatttattatatcactgttttagtaggggggattctgggagtagatcagctgggccccccagctcagggactgcagtcaaggtgtcagccagcactatagtcacctcaaggttcaagagcaggaggtccacttccaggctcactcacaagggtgttggcaggtctcaggttcccagatgctgttggctaaagacattggatcctgccatgcaggcctctctggaggcttacttatcacatggcaccttgcttccaccacaccaagggcaccagcttctcagttgggggctggcgtggctggaagacagcaggcccttcccttttcctttagagtctctcatcctccagggcctcattttcttcaggtgctatctctctcatgcagcacaaacttctttacatcacagctggctcaaggaagactgtcatcaaatttggtatgtggaggtcatcacggtgtgtctctctcttcattatggaagcatcccatgttcactgaagggatcttggaaaatatttttaaaactgcgcaggtaccc

SEQ ID NO: 122547 - DNA, 1025 bp, Homo Sapiens
  misc_feature (482)..(519): n is a, c, g, or t
  misc_feature (687)..(687): n is a, c, g, or t
  misc_feature (734)..(734): n is a, c, g, or t
  misc_feature (751)..(751): n is a, c, g, or t
  misc_feature (767)..(767): n is a, c, g, or t
  misc_feature (772)..(772): n is a, c, g, or t
  misc_feature (796)..(796): n is a, c, g, or t
  misc_feature (833)..(833): n is a, c, g, or t
  misc_feature (839)..(839): n is a, c, g, or t
  misc_feature (863)..(863): n is a, c, g, or t
  misc_feature (877)..(877): n is a, c, g, or t
  misc_feature (880)..(880): n is a, c, g, or t
  misc_feature (935)..(935): n is a, c, g, or t
  misc_feature (942)..(943): n is a, c, g, or t
  misc_feature (982)..(982): n is a, c, g, or t
  misc_feature (1005)..(1005): n is a, c, g, or t
tttgagggttattttatttaaggcagaaacatgaaagcatcacgttatacgtgctacttgatggaaatatgctatccattgagtcacagaaatgttgacgaagaaagtgagttacaaagaaagaacatgaatttgcctggatccagtcttcagactttatctttcattttatgctacctccctgatggcagtgaacagcacaaggtagtacaattttaaggtgtctcagttatgcattttagcttcatcctaagtataatttatcttaggctatctatgtacttgttagcatagatagcaaaggaacaagcattactattagatttctaatcatttgcttgttatcctgtcactgacattacagctactagcacaaatacaaattaagtcatatgcatcaaatccaagactttaagccttatgtttatactaataactaatatttattatttgctatgtgctagaaactctaagcaatttannnnnnnnnnnnnnnnnnnnnnnnnnnnnnnnnnnnnnaatcctcttcacaattttaagaggaaaatgtttttcccaacttgtagatgaagaaactgaggacatataggtagaacaatttcctctaagttatgccagaggcaataccaggcacatatagaaatgaaattcgtataaaattccaagtctgagttgtttccttttctntatttggtggttgtcactcttcatgtttgaaaatgtatcactctcangaacttatttaatgtcnttctcagatcactgcntatanattacgtcagctcttccttcatanagaagaatctctatatacaatgttgtattttttttancactanaagggcagcaggttatgggtttangaagtaccaattantantgatacttagaatatgtacaagatccatagtatataaatgcatcattttacatantttctannacctctaatgatgctggcgctccacaatacttttggcangacagatatttgggatcatttantcactagttcattagagtct

SEQ ID NO: 122548 - DNA, 992 bp, Homo Sapiens
  misc_feature (302)..(320): n is a, c, g, or t
  misc_feature (351)..(406): n is a, c, g, or t
  misc_feature (439)..(560): n is a, c, g, or t
  misc_feature (661)..(662): n is a, c, g, or t
  misc_feature (680)..(680): n is a, c, g, or t
  misc_feature (685)..(685): n is a, c, g, or t
  misc_feature (697)..(697): n is a, c, g, or t
  misc_feature (716)..(716): n is a, c, g, or t
  misc_feature (805)..(805): n is a, c, g, or t
  misc_feature (888)..(888): n is a, c, g, or t
ttttgttttaaaaagcattaaagtttatttttaaattacacaaaaagcactgtttaaacaatggttataactagtgaacattaagaaatcttgcaggcaggtggatgggattgaaatactctttcttgattttatagtttaagggccaaattgagcactgtttatgtctgcatcagctaccattaaaaactttgaggctgctggacactcagtaaggaatcagaagttttttaaaaagatgcaaatgaatggaatgtgtcatttcaaagcctgtttggtaaaggagaatggatgacccaccnnnnnnnnnnnnnnnnnnngagagagggtcttgttctgtcaccaaggctnnnnnnnnnnnnnnnnnnnnnnnnnnnnnnnnnnnnnnnnnnnnnnnnnnnnnnnngtgtgtgctatgccacacccagctaattcttannnnnnnnnnnnnnnnnnnnnnnnnnnnnnnnnnnnnnnnnnnnnnnnnnnnnnnnnnnnnnnnnnnnnnnnnnnnnnnnnnnnnnnnnnnnnnnnnnnnnnnnnnnnnnnnnnnnnnnnnnccaacccccatctcaattttgtatagaggctgtatagtctgagagacataaaagtttttgtagctcaacagacctagttaacattcctggcttcacccctnnttgtagttgagtaacctnctgcnattattttctcntgaagccaatttccttacnttgtaaatgcctggtgaagtgcctggcaacagaaggtatcaagaatacagttctctgtgaggggtttcctcgtgcgatttctggctcgnaggcaattcctaagtgatcgtataatcgtatctgtctagtgttcctggtgaatgtatcgctcaatcacaacatagacggaganaatgtaactgggtgctagatgacatcaatatggtggccacgcgctcatcggactgctgcatgatatatcgcacccggaaaggtggatgggctcctccccagacc

SEQ ID NO: 122549 - DNA, 1246 bp, Homo Sapiens
  misc_feature (571)..(579): n is a, c, g, or t
  misc_feature (1171)..(1205): n is a, c, g, or t
aagagtaaagtcactggttttattgagcagctcaaactagttctgaaggcaactgttcagaaggcgttcccaacagcttttgagcaatgcaacagcttcccataaacccttaaaaagtacatctgttaatgtgcacattagtctttgttagtcacgttcactaaaatgtattaaccttacatatacttccaattaaaaaaacacataggcttttcagtattttggcctagatttttgttcaaatgagtccaaatgtgtgagtgaggtttacctgttttctgattctgatctataaaaatgggtggtctcaaaagaccagaaagtttattcatagccaaaaatgacaaaaagagttcttattctcccaaaataggaaattttgtattcctatagtcaaaacaataaacaatttttgaaattaaaaaagttgagaatcttgaaattcatttttttcagtagaataaaacaataagcagcatgaaaacgtaaagtgctacataaaagccccacattacataaattttgaaaagtttattggcttaaacagttacaggtgaaacagattacgtannnnnnnnncaagcatgctattttaattaccttgatatctcatcatgtgctatgttggtcaaataaaatgtcatgagttatctagatctgaggattaaagaggagtcctcagcctttacttgccagaatatacatccagttttagctgtatgctggaattaaggagttaaagtagggctttaaagataatagttttctgaagaggcctttcagtggggcttggacaaaaagggccccaaagaccaattttgctcattaacctcacactggggatcagattgacaacttaaggatttttagggagcatatgtgagatcaaagggaagaagaaaatggtgcccctttcagatggtgcttcaggtgctaaaaaatatcccaacacaaacaagcaggtggctagctgacaggtgggggaagagatgcaagtcagatagcaaaggatctgcacagtgcaaaatcttcttggctttttatttaacttagcagtgaatgcagcaggattggcttaaagtataggtacaccccatggaaacatgcaataagatcacatcccggccgtaatggccgaattcccgggcatatgtccggtaccgtcgactgnnnnnnnnnnnnnnnnnnnnnnnnnnnnnnnnnnncgccgcttcctcgctcacaaacttcgcggcgctcgtcgttt

SEQ ID NO: 122550 - DNA, 929 bp, Homo Sapiens
  misc_feature (833)..(833): n is a, c, g, or t
  misc_feature (851)..(851): n is a, c, g, or t
ttttcatagaagtcagtagaattttattcaatgaaatcactcgaaagctgtgtcatctatgtttacccttaaattataattttttacataaaaattcaaaatttgggtgaagattaatattccttgaaaatttccttagaatatactgatttgctactacatttcatttttcctacattcagctagatgaccacttcatttggtgtctctcagccttctgctgagacatttgagtccgagtatatcctcagcattaacagtaaacctacataaagagggcagcccaacagcaaaacaagagttgtataccctcgtgagtaaagaataataacaataggaatattaatgtcagtgatcagaatagttatactgctaccatttaatttctatcaaatatcattctagtcactctgtacccattaatcctcacaatatctttattaagttggtatgtttattctcattttacaaatatggaaactgagggtcagagggaagaggtaacttgctcagagcatcaagacagtggtgagagaacccatcattaaaacaaggactatctgggtaccccttgaggcttctgttatcaaaagggcttggcctcaattcaacaactatttatcaatgatatctccattcctggccttggtttgggtttaggaatgcaatgatgaatacacagttcttgcccatggagacattatactgcagtagaggagacacaaatagaaatatattttcaaaacaatgtggttgacaggagaggtaaatacaatctattatgtaggttttgagagggaaggcaagcccagaatagggcctaggaaggtttnctgtggagcatgatgctntacactgaatcttaggaaaaagtaagaagtcaggaaaagaagtaggggaagagactattttttctaggtaagaaacat

SEQ ID NO: 122551 - DNA, 685 bp, Homo Sapiens
ttgacagaccaatggtttattccaaaggggaaagcccaagctggatgtctccctccccaacccctgcaagctggcccatccttccagagcccccataggcctggggctgttgagacgggagatgtccccactgtgctgctcctggttttgtctcctctccaatccttgagcaccctgatatgcaacatggggggtaatcagaaggaggaggcagcctctgatggggcaacggctgagggtgggggcagtgtgtaaggcaccttttgcggtcagcccagccacactccatcgccagagagaatgccaaagtgtaaactgaatgaaattctgtaggcaaatggtaaatggtagctgggccagtagctatttgcatgggtggattatatcatgttaagggaattctttatctcagcagagggaacagaggaatatcttggctaaggtcatcctgccagtcaggagaagccaccctccagggaccacagactcaaagtggctgtggtggaaacccaccgcctgggtagggtgatgtcaagacactgagaggtttccatctgcagtggccaagggctgcaggttctgccatgctgggcattgataggtaggacgagagagagcacgtagggccagtcctctgggaagcaggaggtgggccatgtgaatgggagatgggtggctgtgctgt

SEQ ID NO: 122552 - DNA, 1143 bp, Homo Sapiens
tttgctgctttccagcttttatgaaaattaataacattaatagctcacagacatatacatacacacacattgctatgtacacagtcattaagttattaattaggctctgtaaaaaaaaggtttctacattagtgttccgggctaggcccgatcagtccttggcatattcacagtggcagccccagggcttggccccacaggcaggcagaggggaggcaggaggccacagagcagccggccccacagtgagcacagcaagtgtcctgggccacctccttgagtcttcagttcccttcctagcacctgcagtccagctgctcagcaagccggcagacaggtcctgatcccttctgtggccttctgcatggtggcttcgggcaacgtggcgggccctagaggatgctagccagctctgtggagtctgtttctgagcagccagagctgctggcctcgtccctcagtgcctgcagggccttcttattctgccgccgcctctcctcatcaatggggtacattttgaagagcagcaggcccagcaggatgagaactatgggagccatggtcacgagcatgttcagtgtaaacttgacacgttccggctgcgagcagccacgggtctggtaccctgcaaagtccagactgagggtagaaatgcccagtgacactccagaggcaaacttggtgaagaagacatagaaggagaagaagatgggctcggttccatggaagtggggctgcttcagatggaagtcgtcaatgacatcaggcagcatggaccagggtagtaagaaggcagctgccacactgatgccagctgccacagctaccgcatatgtaatgatgaggttactctccatgagggccaccaagatgagaaatggcactgctgatgagatcccaacatatacagctgtcttcttgccaaaccgggtcaagaaccactgccagatgggaatggttaaagtggccgagagcatgatggccaggagtagattctggaattcattgcggaagcccaaaggtgtaggtgcaaaacaagacaaagttcccctccaccagcatgaaagccaaggaggtgaagaggaagccagtacccggccgtaatggccgaattcccgggcatatgtccggtaccgtcgactg

SEQ ID NO: 122553 - DNA, 1923 bp, Homo Sapiens
  misc_feature (148)..(157): n is a, c, g, or t
atccttttagttcaggaatttaaatgttactttatgaacataggactttatcattcataaagacgaaaactctaacaacaaaactgaaaacttgcaggcagcacgtaaagcactcaatcaatgctaagatttcattaccatgtagtannnnnnnnnnaataggatttctctgtgctctacagaggaatgggtatagccagccccttaaaccactcttgatggttctaagtgttacttacccaggagttgccttgataatggttattaggtttaactttaacagcttgaaacaatttacacttgtcttgaagtatacttaaggaatttattcagctgatttttaagtgaaggagctcagttagtcaatatcctaccatcttgaaagctcccttccaatgtaattttcatagtctttacattttaactgtcattgtttattactgttttggctatactctctacaatttcagcagcattttaaagagacaatgtgtctatgtacaatgaaaaaacaaaatggcttgcaacatcagaaatacagtttaactgtacaatattaaagagaatccgtggtacgtataacctttttctgcaacatgaacaacttacatgtaagtatcagcattatgaatgtgacaataaagaaaaagtccttacaggagtgaaatacagcatcctgaaaaatattggtttctaccctacgaggcagttagaaaacgttcacattttaacaaatctgtacaaaccacaagaaatttgcttatgggaccatcttgctgataagaactttctagaaatgtagaataaccatgaacaaattaaaaatctagtatctatgtgttctacagccctagaacccaataaactgatttaaaaactcaattatgtccaacatggatcacttttacatcttgattgttaatgactgtctgctttttaatatctatgatgtacagtcaacttgcaccttctaggtcatttaattttttagcaaagaagcaacatcatttagcagcaattagagtgccttcaagaagacttaaaaaaaatacaatatccaattagaaaagccatattttaaacatttgtacaagaataagctgctgaaacttagtaattgaaatatgacatctgtacaacaatttacaatagagctagaagggaatttatcattatcctgcatagaactggtctgcatttggttactcactgtcacctgttttgatgaacaaggcctggtaacaaaagaaaaatacctgttatcaattctaacgtgttgaaaacactggcaatattataatttagtgaattcaactgatttcaacacaagcagctcattttgtcaaaggtgtaaagtatttagaaataatagctctccctttaatataaccagtgaaagaaaacggacatgtgatctcgaggtacaacttggtaaaagtctgaataggcaaatgacaaagcctaactttgtccaaagattctaactctcacattctattactataaaacacaactgtcactgtcattcagttcttactttggtttcagcagattaactgccaaatgctgaagaatgtatccaggcactatagttcgtatgttagaaatatgtctcatatttttccatgtgtttttaaataatgaaaaactacccttcatattagaactctctagtaacaaccaaatgtatttaagtattataaacgttatttacagtgttcccccaaataaacaaaatttttttcctctatcttaacatggtattcctgtttctgtgtaacaggcagtcatccttccttcactgctcaaaattatagtcagaagtgtgcatttattcattgtccatgatcctctctcatacaaatgacactatgaggaacttcagttcacaaacagttcttaaccacgtcttgtgtaaaaaaa

SEQ ID NO: 122554 - DNA, 1158 bp, Homo Sapiens
  misc_feature (1050)..(1088): n is a, c, g, or t
aaagtgacaactagatttaataaattaatatacattttgtttaaagatgtacaatgcacattctgtttaatccaaggttttagggtatcaaggaacttgtatttacacatatacaaatctcagacagcagtaatgtcagaagatccagggagaacagcagaatcttacaccgctgctctctgaatgctgagaacacaagtcaaatacatttaacttaaaaacaacgctgagagatcactgggaaaaatctccaaagagagaagtccacaaaaaaggacatgtaaaggggaaggtcaagttgttgagacaactactttattcttgggatgactgtggaggtggtggagatgagccttgtttgccagatttccgttcgtagttcacgagtcgttgacccacaaggtacttgtcatttttaatatgttcataaaggcgcttaaactggcggacttggaaggacaaaattgccatcaataccacgaccatcagtaaaaatggataaatccgccgatggactaagttttgcatttccgcagtaacacctagtaaaggaacaacaccagaagctatgacataaggtacacacagggaaagcaacagcacagagatcacgggagctgccagtttacgaacaatatagtgaaggtcaatgttccggatgccatttgcgtaaacctgttcaattacagttttcaaccaccactgaggacccatcaatgttatagctgcaatgattttggcatgcaggactccaagtgcccagtcctgccatggataaaaaagaggagtctgatccaagggaaccctcaggggagccacaatgaccagctcaaacaggagccccagaaggagagggacaactccagccaacagcaccgcaactatcaaagtcttcatgatcatgagagaccactctttaaccttctggaagatcactctgcgtccctgaggcatccatgccaccatcaccgtcacagcccttatggttagccagcaaaccccggccgtaatggccgaattcccgggcatatgtccggtaccgtcgactgnnnnnnnnnnnnnnnnnnnnnnnnnnnnnnnnnnnnnnncgcttcctcgctcactgacttcgctgcgctcgtcgttcgacagcgccggtagcgccctatatgtgtacct

SEQ ID NO: 122555 - DNA, 492 bp, Homo Sapiens
tttaaatcagatttgatttttttaattcaaattgacccaaagcaaaacttacattaaaaaggaagaacaaaatacattatgatataacacactaggagttacatgaaagctaaatttgtgggcaaatggccttatcccaatcacattctgggctcatgagcactcctgcaggaaagttagaatctcaatttcgtatggtccacgccggtcattaaactacacattcttgtctcttggggtgtgcatctgacgagtcatgctagagtccctcatgctccagatgtgtactcttgctactgccagaacgctggattctctagtggaaatgctgttccaagcatgactgacaatgaattaaaaaatgagacagtcaagtcctccaaactaacaggcatggattactgtgtagtaaatagtttagaaatatgggaattaaataatctaaaaaacactcttactctgctgtacatttataaacacaaatatttacaa

SEQ ID NO: 122556 - DNA, 614 bp, Homo Sapiens
gggttcctgtttctgctcttggtgcaggatctgcagctactgctgcatcagaagaaatgtatgtgccaagagttgtaacctctgcacaacagaaagcaggaagaactattacagcccggatcacaggaagatgtgattttgcttcaaaaaatagaattagcagcagtttagctataatgggagtttctcctcccatgagctcagttgttgtggaaaaacatcatccagtcacagtgcaaaccattcctcaagcaactgcagcaaaatatccccggaccattcatcctgaaagtagtacctcagcttccagatcacttggaaccagatcagctcacacccagtctctcacaagtgttcattccataaaagtggttgactaaagtgaatatgtccatagtggggtcttttaatccctctggtcttaccaagggttagaagtcttttggttttaacttttccatattgttagaacatcatggagacatcatgttcatctgttcaaaattacaagaggctttttcaagctctaccatgctttgtaactatatgtagaaattattttaatgttattttttatttaagcaattaagtaaaacttttttaaattaaaaaag

SEQ ID NO: 122557 - DNA, 728 bp, Homo Sapiens
tttcgtacaaacataaatatatttaaattttttaactgtaagtaaattcaaacaaactgttataaaacagaatacacagttgtctgcatagatcataaaaaacataaaaaccagaatgctgggtaggtgctggtggtgaaaactgcagggctaaaacttgctcaacaatgaactagggaccactatggcttaatgaacatggcccacccctcctactaatggttttgtcaacttttggaccctagaaattcagaattttctccttcttcctctgccagctttggtccgtgtccgactacctggctggacagtaacttgctttttaaagtccactaagcaatctgtggcttctgaaatggaaacaaaagacttgacgggagattcatttaagtcacgacgtgtgaaagaactctgcatctctctgctgcagcctgcctcttccatccctggtgaaggcaccctgaaggctcctgtttctgaagacttgatgtctgcatctgaagtcttgtgctcagactgttccaagaaactaaggagtcggccttcactgtggcctttttcctttgggttcttcagcctctgctgccacttcccctccacagttgaacatgctcttccactcccttcaggtccatctccttggtcagcctttgcaagctggagacaggagtccacatgacactgatactctctaaatgggaccagggatttacagaggtacacttctc

SEQ ID NO: 122558 - DNA, 694 bp, Homo Sapiens
tttaaaataagtcaaaaattttaatgggaaaatctgtgcccagtcctagaacagacaattcaattcatagcgttaccataaaattactgtcaaaaaaacgaactgaagtgggagaatgagtggcgtttcaggccatctcgagtcgcagcagacacatgagccggcgccacgggcctggctgaggagcaggggctcatgggcaccaccacccatctgggttttctgaggtcgtcggcggcacgttcagtaacaaagcaacggctggcgatacatggcagctcacgcagcgctctttcctgcttatcccccaaacttaattagatgtactggagttgatgctgccagggtctccagcaggtgaggcagttgcaggttggggggtggccccctgccagctaccctgggcctgggactgcaggcagcctcccccaggaggaggctggagagaggccagagtccgcagggtgaggaaggcgtccccagcgctgggcagcgggaagggtccagaggagcctggaagagatgggagccggggtgggcagagtcgtggcgcctcctcaggtggaacccacccagcccctcagccggcaggaggcctcgaatgtggctcctgcccctcctcagcatccggcctctgctcctcagcccccacccaggcaggccagcgggccctccccaccacactactcatgtc

SEQ ID NO: 122559 - DNA, 560 bp, Homo Sapiens
agagctttcttcatgttgtcaagcaacagagctgtatctgcaggttcgtaagcatagagacggtttgaatatcttccagtgatatcggctctaactgtcagagatgggtcaacaaacataatcctggggacatactggccatcaggagaaaggtgtttgtcagttgtttcataaaccagattgaggaggacaaactgctctgccaatttctggatttctttattttcagcaaacactttctttaaagcttgactgtgtgggcactcatccaagtgatgaataatcatcaagggtttgttgcttgtcttggatttatatagagcttcttcatatgtctgagtccagatgagttggtcaccccaacctctggagagggtctggggcagtttgggtcgagagtcctttgtgtcctttttggctccaggtttgactgtggtatctctggccagagtgtaggagagggccacaaggagcaagaatgctgacactggaattttctccatggcaactctgccttgtgtgagtcggcggctaggatgcggtccaagcttctgagtccc

SEQ ID NO: 122560 - DNA, 1884 bp, Homo Sapiens
  misc_feature (812)..(822): n is a, c, g, or t
  misc_feature (856)..(857): n is a, c, g, or t
  misc_feature (859)..(925): n is a, c, g, or t
  misc_feature (995)..(996): n is a, c, g, or t
  misc_feature (1071)..(1085): n is a, c, g, or t
  misc_feature (1160)..(1170): n is a, c, g, or t
  misc_feature (1563)..(1563): n is a, c, g, or t
  misc_feature (1569)..(1569): n is a, c, g, or t
  misc_feature (1601)..(1611): n is a, c, g, or t
  misc_feature (1686)..(1686): n is a, c, g, or t
accgcatcctagccgccgactcacacaaggcaggtgggtgaggaaatccagagttgccatggagaaaattccagtgtcagcattcttgctccttgtggccctctcctacactctggccagagataccacagtcaaacctggagccaaaaaggacacaaaggactctcgacccaaactgccccagaccctctccagaggttggggtgaccaactcatctggactcagacatatgaagaagctctatataaatccaagacaagcaacaaacccttgatgattattcatcacttggatgagtgcccacacagtcaagctttaaagaaagtgtttgctgaaaataaagaaatccagaaattggcagagcagtttgtcctcctcaatctggtttatgaaacaactgacaaacacctttctcctgatggccagtatgtccccaggattatgtttgttgacccatctctgacagttagagccgatatcactggaagatattcaaatcgtctctatgcttacgaacctgcagatacagctctgttgcttgacaacatgaagaaagctctcaagttgctgaagactgaattgtaaagaaaaaaaatctccaagcccttctgtctgtcaggccttgagacttgaaaccagaagaagtgtgagaagactggctagtgtggaagcatagtgaacacactgattaggttatggtttaatgttacaacaactattttttaagaaaaacaagttttagaaatttggtttcaagtgtacatgtgtgaaaacaatattgtatactaccatagtgagccatgattttctnnnnnnnnnnntaaatgttttgggggtgttctgttttctccaccnncnnnnnnnnnnnnnnnnnnnnnnnnnnnnnnnnnnnnnnnnnnnnnnnnnnnnnnnnnnnnnnnnnnncaaaaaaactacccggaacacacaggagacaaaaccccagaaacccataacccgcccaccatacatcgannggggttcttggggcggcccctccccgcccccaaaaaaattttcccaaacctcccctgggggccgcccgggccccnnnnnnnnnnnnnnncacgcggatcctggcctttcccaaaagggaaactcggcggcagaaaagaaacggggccggcggctcttccccacnnnnnnnnnnnccaccgcccggggggcgctgctacccctaagcggctctcgtaacaaaaaacctccccccaagtgacgtgctcctttgccgggccgctcctccccccttgggcgtctaccaacccgaacaacgcgggtggtatcccgcatccgagtaggctgcccttcatcacacaccccggctattttaggtgccgccgttctgcgcccgccggggagccttatccccattatacccccgcgaacgccccgtgagagccgggggccagaatagacaccacccgcctatccacgagcaccgtattcgcgcgccgcttggcgctattcccggaatgcgaaatgctcctgcaccccgaccacatgcaggcgccgtacgcagagttagaaagagatcgcgatcgcanaatccnctcgcaccatttgggctgggttttttcctttnnnnnnnnnnnttttgtttcccgtcccctccgtgtcgtgcgggggaaaaataaacacattatttatccccccggcggcacaccaangtgaacaaaaaataagtctccacgtcttatcaaaacacatacaagatgtgcccttcacatcatacttgggtccctcgccgaatttgtcactgctgggcgcccgccatggtgctgtgtgttgaggtaaatgagtctgccccgcactggtgggggcaccgacggggggcgcccctcgtacccctctcgcctcccccctcc

SEQ ID NO: 122561 - DNA, 366 bp, Homo Sapiens
  misc_feature (24)..(24): n is a, c, g, or t
aggggttggataaggcaaaggttnaagtgtcttctctaggcacgtttcctagcatgtttccttttacttggttctgtctcacaaagctgggaggtagatgattcttccgggtcctgagcacctgcttcatgaaggaagataggtagcccagagaagaagttttggacttaacaacataccaaggcagctttggcctgtgactcaggcgtttgttggagagctgcaggaaaacccctgcagtgtgcctgcaacaggacaagacccactcctgtttctggcggtaccagctaccctggaatggtggcgtgtcctgctgtacccaactgacttgcttaggtacctggcagctgtgaccacagctcaagt

SEQ ID NO: 122562 - DNA, 507 bp, Homo Sapiens
tttttataaagaaaagaggtttaattggctcacggtcctgtagatggtacaggaagcacagcagcttttgcttctagggaggcctcaggaaacttacaatcatgttagaaggcgaaggagaagcaggcacatcttatatggccagagcaggagggagacagaggggaggcaccacacactttgaagcaaccagatgtgatgaggactcaatatcaggagaacagcactgagcgggtggtgctaaaccgtttgtgaggactctgccccataatcccatcgcctcccaccagggggcttacatttcaacatgagactcggtgaggacacagatccaaaccacatcaatagtgctttcatgcttttgattatcttttgtaactatgttattgaactataatttacataccatacaattcaccaacgtaaagtgtgtaattcaatggtcttaagcatattcagagttgtgtgaccatcgctacagtcaattttaggacatttttatcactg

SEQ ID NO: 122563 - DNA, 304 bp, Homo Sapiens
cagttcagtatatgaaaattcatttatttagtgaaaccctgacattaaagcgtcccaacacaaagcagattcgaacataacaactggtgattggctcatctcacaggctcacatcatcagtgtgttaacatacaataggactgtacccttttacaggattgagtgttttggatcccactcacacactaaaaccctgccataaagttgtatcaattagggctgttcaaatgtgaaactgtattggaaaatgggaaactttatctccttatatatgtatattttttgagatggcgttttgctcttt

SEQ ID NO: 122564 - DNA, 472 bp, Homo Sapiens
gtaacaaacagtaccaatttattttggccgtgggtttttgctttttttccagttgatgactttgtgaacattcccaggtattggagcctctgtggccttaaatgtggctcagtggagggagacccagcatagccaggccagtatggagcacctcacgcacagctctcagaagctgcaggcggacgaacatctgaccaaagaggtgtggtcgaggctcccccaggatgtgtacccggttgtagtaggagctgaaatccatgctgagctgtaccaggaacttgcatatcatctctgtgcgtacagcaatgtggagccccggggctgtgcagtccagcactgctgtccggctcagcagatccggaaaggggaggatactcatcatgtagcagtgagaagtccagactgctcacaggaggaaaagtggggtacagaccttgttccatactacacttgtaactctcaaagagtgtgg

SEQ ID NO: 122565 - DNA, 808 bp, Homo Sapiens
tttttttcactctacactctattctttattctggcctggggcacaagagcaaagagatgggccagtgactcagtctctgtctctagatatgcaagttcctggtacagctcagcatggatttcagctcctactacaaccgggtacacatcctgggggtgagcacacagcaaaacggggtgggacgtgcagagaggtatagggtaaaggcaaaggaagcagaggatgagaccagcaggccctttctctttcaggagcctcgaccacacctctttggtcagatgttcgtccgcctgcagcttctgagagctgtgcgtgaggtgctccatactggcctggctatgctgggtctccctccactgagccacatttaaggccacagaggctccaatacctgggaatgttcacaaagtcatcaactggaaaaaaagcaaaaacccacggccaaaataaattggtactgtttgttacaaagttctgtcttgtcatggggagtcgggcatattcttggcagcactccactcaccttcagctcctgcaccgacatcaggaacccacggccaccacctcctcccctcaaggcatgctgagcatgggcacagacagcccttccctgctccatgctgtctgtgagcaggccccatgcccagcacgccagccaccgcaggatacctcagtcataccagttgtaaacctcaagcccctgacccccaagggcacaacggtggccaaactcatggctcacaggccagcagtccatgtcagccacatcaggcacatggaacacagtgctattcatgaatgtgggttc

SEQ ID NO: 122566 - DNA, 532 bp, Homo Sapiens
gtaacttacagtaccaatttattttggccgtgggtttttgctttttttccagttgatgactttgtgaacattcccaggtattggagcctctgtggccttaaatgtggctcagtggagggagacccagcatagccaggccagtatggagcacctcacgcacagctctcagaagctgcaggcggacgaacatctgaccaaagaggtgtggtcgaggctcccggttgtagtaggagctgaaatccatgctgagctgtaccaggaacttgcatatcatctctgtgcttctgtctgagtggagccttgtcaaccaacttccgccaaagcaggtccaacttctgttgctggaactcctcctcacagctaacaacatgtacaaccaggcagccgcctgtaccagtatctgaggccccagccaggcctgggtggctgtcctcgggccaatgccatagagcctcttgcagctcagccagcacagagaggagatcctcagtcaccagacagttgtccaggttggggtcatagccagctgtgc

SEQ ID NO: 122567 - DNA, 1535 bp, Homo Sapiens
  misc_feature (88)..(88): n is a, c, g, or t
gggtggttatgtcgcaacagttacaagaaacagtactgtattaatgggcacacagcaatgatcacacgataggcggggtgaggatggntgtgtttgcggacttgcccagtctcccctgccaccccctatcctttgtaggcagggggggaagttcgaggcttgtgttctctgggaggggaaaaaggggggtattagaccctttgttccatatttacaccttgtaactgttcaaaaaaatgtggcaagccgggcccaatttatcaatggccaaaggtgccattctttgtgcccttcgtggagatattgctgtcagccagagccaggaagagctgactctgtggggctgtgctcagcatctcaaacttgatggtggccacagagagaacaccaaagatctctgtccaggctgggtcttgtgccagatccccaccatgcttcagtgctgaggccttgcacacctgggtatgccggaactcgtagtactcaggggcagtcatcagagtgccaggtgcaccagctactttcacagggccacagatgaggtgcttctgtctgagtggagccttgtcaaccaacttccgccaaagcaggtccaacttctgttgctggaactcctcctcacagctaacaacatgtacaaccaggcagccgcctgtaccagtatctgaggccccagccaggcctgggtggctgtcctcgggccaatgccatagagcctcttgcagctcagccagcacagagaggagatcctcagtcaccagacagttgtccaggttggggtcatagccagctgtgcggccctgttcttccaccagctccttcagacacagtctgcctaggatgccaggggacagtgtcctcccgtcattagcagaggtaagttcttcaagggcgtggctcctcagggtgtgggaggaagctctctccgaggcagcgggccagtccacccgcagttgctgcaggaaggtcagcatgtgcggatcccgcacagctggcactaggcgcacgcacaccccgtgagcgcgcagggctcgcgccaggtgatcggccacgagcaccgtacgcagctggctcaagcggagtgcgcagggggagctgcgcagtgctgggcagtgtagtaagacgcgctggcccagcgaggcaggcgaggcgggcgtggcataggcggccacggcgctgaggacgcgctcgaagacggcggaccgctgcagttggagagacagacccgcgggggtcggcgcgcagcgcagcaccggggccacaccggggccctgcaggcaggcgagggcatggagcaaatgctccggaacctggccgtcatcgaagcgcgcctgcagcgcgcggtgcggtgccagaaagtctcgggaacgcaggtggcgggtgcgcgtctccttgatccacaccggaccgcctggccccagggccgcgttgagggcccccagcgtctccccgaccccaaggcgcctggtcgccatggtcggacgcgtgggcggacgcgtgggtcgacgatatcccgggaattccggaccggtacc

SEQ ID NO: 122568 - DNA, 841 bp, Homo Sapiens
cggctgtactggcccggaattttgggatcatggcgaccaggcgccttggggtcggggagacgctgggggccctcaacgcggccctggggccaggcggtccggtgtggatcaaggagacgcgcacccgccacctgcgttcccgagactttctggcaccgcaccgcgcgctgcaggcgcgcttcgatgacggccaggtgggcgtgagccgggcggggcctgtgcggccgggagatgggcccctgtgcctgtggctcttttacacgcccgttctccctgcaggttccggagcatttgctccatgccctcgcctgcctgcagggccccggtgtggccccggtgctgcgctgctgcgcctgacccccgcgggtctgtctctccaactgcagcggtcctgccgtcttcgagcgcgtcctcagcgcccgtggccgcctatgccacgcccgcctcgcctgcctcgctgggccagcgcgtcttactacactgcccagcactgcgcagctccccctgctgcactccgcttgagccagcttgcgtacggtgctcgtggccgatcacctggcgcgagccctgcggcgctcaccgggggtgttggcggtgcgccttagttggccagctgtgccgggatccggcacattgctgaccttcctgcaggcaactgcgggttggactggcccggtgcctcggagagagcttcctcccaacagcctgaggaagccacgcccttgaagaacttacctctgctaatgaccgggaggacactgttaccctggcatactaggcagacctgtgtcttggagggagctggtggaaaaacagggccgacagctggcttatgacccaa

SEQ ID NO: 122569 - DNA, 774 bp, Homo Sapiens
  misc_feature (84)..(92): n is a, c, g, or t
  misc_feature (138)..(149): n is a, c, g, or t
  misc_feature (153)..(244): n is a, c, g, or t
  misc_feature (246)..(261): n is a, c, g, or t
cccccgacccgggggtgttgaaaaaaacgccgccccccgccccttttttataaaaggcccccccttagggggccctcttttacnnnnnnnnnggggggcgcgaaaaatggggcccccccggggaaattttaaaggggnnnnnnnnnnnntttnnnnnnnnnnnnnnnnnnnnnnnnnnnnnnnnnnnnnnnnnnnnnnnnnnnnnnnnnnnnnnnnnnnnnnnnnnnnnnnnnnnnnnnnnnnntnnnnnnnnnnnnnnnnttttgtaacaaacagtaccaatttattttggccgtgggtttttgctttttttccagttgatgactttgtgaacattcccaggtattggagcctctgtggccttaaatgtggctcagtggagggagacccagcatagccaggccagtatggagcacctcacgcacagctctcagaagctgcaggcggacgaacatctgaccaaagaggtgtggtcgaggctcccggttgtagtaggagctgaaatccatgctgagctgtaccaggaacttgcatatctagagacagagactgagtcactggcccatctctttgctcttgtgccccaggccagaataaagaatagagtgtagagtgtcctggttgtctatgcctcaccatctctgtgcgtacagcaatgtggagccccggggctgtgcagtccagcactgctgtccggctcagcagatccggaaaggggaggatactgttgaagagcaacaaccactcacatcccgggaattccggaccggtcca

SEQ ID NO: 122570 - DNA, 1452 bp, Homo Sapiens
  misc_feature (108)..(136): n is a, c, g, or t
  misc_feature (1336)..(1370): n is a, c, g, or t
tttttttgtgaggaccaaataatttttattcacatacatctagttcatctacctaaagtgttcagaacaatgttcagcacatattaagcttgatataactgttacctnnnnnnnnnnnnnnnnnnnnnnnnnnnnnaactgtacagtcactgtctttctgaagttgtttggtgatcaagaatgtgtttagaactatctctttattagacaaagtcataaaccaaaaatttccaacttcctgtacatgttgaaagctttaaataaggatccttggatacaaaatatggtccacatggctgaaaattaattctatgacacaatattattctaaagtcatccttattttgaaagcctaaagattttcttttatggctataaaaataccaccaagctagacattttaattctgttgagatatacaaatagaattaccacagcagcctacaccttctatgatttctaaacacttaaacatcaatggttttgggaagatgctgttgtccttcacagttcattaaaagttcagatgccttttgtgaaagcccaacttttcttctacctgctaaattgtcttttcagaagtcttgccggatgttttctttgtttgcctctccatgttgctgcttaatttgatagatttcattttctagctgaacaatagtccgttcaatctcataattcttactgaccagggatacccaatttgactccatttctctcaatttagatccagctgtgagttgcatgttctttctctgccagtttaaatcttgaatatgttttcttaacttctgaagttccttctgtgcgtgttcaatcatatgaactagattttcattgtatactttccaggcattacatccatgctgtgacattagttccagattctcaattctaactgcttgatgctctaactgggccatagaattgtttacacattcttgccatgcagtaatgtcatttttttgaccagaggagggggctggaagctcatatcgtttcatactgagcaattcaattggttgtcgagcagccagtctttcaaattcatttctcattatgtcagtttcaaaggcagaataatccggggctgtcaggtagctcaggtagttcttagtaggtcggtatctgcgagtttcctcctccaccagcgctgcagccgcttcccgcacaccaggggcttcataaccttgatcaaaatacggcagcgcatccaccacaacctctccagccaccaaacctgtgcccgccattctgaggacctcaggtttgcctgcgttttctccccggccgtaatggccgaattcccgggcatatgtccggtaccgtcgactgnnnnnnnnnnnnnnnnnnnnnnnnnnnnnnnnnnncggccgcttcctcgctcactacttcgctgcgctcggtcgttcggctcagacgagctagcgccctatagtgatcgtatagatt

SEQ ID NO: 122571 - DNA, 562 bp, Homo Sapiens
cagttcatcagctgtcatttgtgttagtgtattttatgtttggcccgagacattactcttcttccagtgtggcccaggaagccaaaagattggacacccctgcactagacccctgaggatcttttttgagaccattcctttctcttattcaaatgcaacccagctgcagtttccactgctttcagcaccacacatggcgtgcgtgaggcccctggccccatcctgccagagctgccctggcataccacaaagattgtgctgcttccactcttatcccatccttcccattctccacacccaggtaagcttccataatgtcaatcagatcttgttcttccacattcgaaaaccctttaatgacttctaattacacttcgaataaagagtaaaatttgtccgtggcatcaaaatccacagctgagccagcccctgctctgccacctcgtctcatgtagcttcttccccttactccatttcagttccgctggcctttggacaattcctctttcaggcctcatggttgttaagtggccataagaatatcagttcgccatatggctgc

SEQ ID NO: 122572 - DNA, 909 bp, Homo Sapiens
  misc_feature (194)..(194): n is a, c, g, or t
  misc_feature (198)..(198): n is a, c, g, or t
  misc_feature (211)..(434): n is a, c, g, or t
  misc_feature (745)..(767): n is a, c, g, or t
ttggtccccttgatgagtgattttattcccgggcgactttgaaaccagcacgcctttacggtctgctttgtgctttgccactgtctctgcgttcccggatcttgataccgatacgccttgagtagtgtacgctcccgcaccgacgaccggccagcgatcaggaggaggagcggaggcgcccatacgcaaccgcnctcnccggcgtgccgannnnnnnnnnnnnnnnnnnnnnnnnnnnnnnnnnnnnnnnnnnnnnnnnnnnnnnnnnnnnnnnnnnnnnnnnnnnnnnnnnnnnnnnnnnnnnnnnnnnnnnnnnnnnnnnnnnnnnnnnnnnnnnnnnnnnnnnnnnnnnnnnnnnnnnnnnnnnnnnnnnnnnnnnnnnnnnnnnnnnnnnnnnnnnnnnnnnnnnnnnnnnnnnnnnnnnnnnnnnnnnnaagaattcggcacgaggaaaaactggccactgtgtccgacccaaacctactaatgttaatagaaatttgttaactgccttaggtacaataatgggattgtggttataagggagaatgcctctattcttcagagaggcacacagatttacttgcttttaaatggtctagcaaaaataaaaacaaatccactcataaaactaatatgacaaagtagatggttctataggtgttcaatgcatcatcctttcaattttctaaatatttgaaattttcttaataaaaagatagggaaacaaaggtggcttggaggnnnnnnnnnnnnnnnnnnnnnnngaagatccagtctaatggaaagatgcaatggactcagggatcctgcagccaaaggctctgcttgaccaagagcccctggctgcgcttagaactgcttttccacacagacatatgaatgagactggctgggcctggtggctca

SEQ ID NO: 122573 - DNA, 1265 bp, Homo Sapiens
ttttttatgtttctaaaagtactgagtttattttaaagcatagcatcaagtttgaatctcatgaaacaaaggcatctcttcattatatgttgattttggcaaaaagtaaagaccagcatacaatagatatacatgataatgtagtttaaagtaagaggtgtttgcttttggtaataaggtagtgtgaaacttactatgtaaatctatgttggttatttaggccatgtttcttgtctttttagaagtcttcaggcttaatattttaaaagttgccctttttatttgatacttctactttttgctggaatagaggcatagaaaagattctcactgcttagactaatacactcatacaatacatggctaaactgaaataaaaaggtaagatatcttaggaatagtagcatttacgattgtgagttgttttaaacgggcaaaactactaagatttgttttagcaaaaactcaagggaaaccaatcttgggaaatgatcgccaacctgttttataagagttatttaaaagtctaatctctttgctagagaatgccattttaagcttacttggcatcccactttcatgatatacatatgcatatttcactgaggcaaggaacttggatatatcattccatcatagctgtgtagttaaacaaggaacttgtccactgaatgaatctattgcttttgtgcgtgtaaaaggatatctattctgatcactgaaatgtgcaatgaaaggctacatttagaagctcagaaaatctgtggttcaatatgtagaagtttcatctacaaaagaatgggaatgttataattacgataagaaattacaacgtttaacatatcataaacattacctgcaagaactttttaatcgcagtaatatagcatcaaaaaggtacatattcttgttcatgaaaattaatgaggcaacttaggaatgagagacaggttatttctctttctcctttttaatgtagagctgcagatacacttaagttgccatagtaatggcagaaggagggaagggtgttttctttgtaaaatcattggtgtatacaggatggcttggcaggtaacaacactatttctacgatatctacttattaatataattttatgttaatatcccattctcctcaccataatcaccataatgttcaaattttaattttgtattcattttgaatgtttgcatgtgaaaacccaactaatccccggccgtaatggccgaattcccgggcatatgtccggtaccgtcgactg

SEQ ID NO: 122574 - DNA, 1051 bp, Homo Sapiens
  misc_feature (932)..(966): n is a, c, g, or t
  misc_feature (970)..(1010): n is a, c, g, or t
caagggacaattcgggtccagggaattaaggggcaccttaggatgtgaggcccggttattcgcgttgctccttgttaagggtagacctccagattacacttaagttgccataagaatgccagaagggaggaagggtgttttctttgtaaaattcattggtgtatacagggatggcttggcaggtacaaccactatgttctacggatatctacttattagtatgattttatgttaatatcccatttctcctccgccataatcaccataatgttcaaattttaattttgtattcattttgaatgtttgcatgtgaaaacccaactaatctattatttcaacattaagcctatttcttttgaagcaaagctaattctgctattttataaaagcaatggagactcatttttcaggatgcttaaagcacagtgcttaaggttcatgcttgctgctttgcttgcacttctgcttcctttgaaccaggtggggctgtcaagcctaagaaggcatacactgcattattttctctggcttcaaagaaggcatcatagtccccgcgatactggctttcattgaaaatctgaggtggcagggggtaacctgtggctggtcgactattttcaggtacattttctctcatccacttccgattctcttcattggctgcaatatctttttcttcaaatcctattttgttggcttctaggaaaccaagcacatcttgttgtttcttcttaatcgctgtagagccagaggaagatgcaatatatacacggatcaccatcctgggaacagcggctgcggttgtttgggtcctgaaaagggctgtggagcagctgcagcaatggctggaatccagctaggggctgaaacagcggttggcccccggccgtaatggccgaattcccgggcatatgtccggtaccgtcgactgnnnnnnnnnnnnnnnnnnnnnnnnnnnnnnnnnnncggnnnnnnnnnnnnnnnnnnnnnnnnnnnnnnnnnnnnnnnnnataatagagggctagcgccctatagtgagtctatacagtct

SEQ ID NO: 122575 - DNA, 1686 bp, Homo Sapiens
  misc_feature (182)..(182): n is a, c, g, or t
  misc_feature (1573)..(1608): n is a, c, g, or t
agggaaattaggatggccgtttgccggactgggtgaggttggttttaaacgcgggccaaaaaacttaattaaagatttggttttttaccgaaaaactcccaggggaaaaccaattcttggggaaagtgatcgccacaacctgtttttataagagtttatttaaaagtcttaatctctttggntagagaatggcattttaaggtttactgggcatccccactttcatgatatacatagccatatttcactgaggcaaggaaactgggatatatcattccatcatagctgtgtagttaaacaaggaacttgtccactgaatgaatctattgcttttgtgcgtgtaaaaggatatctattctgatcactgaaatgtgcaatgaaaggctacatttagaaggctcagaaattctgtggttcaatatgtagaagtttcatctacaaaagaatgggaatgttataattacgataggaaattacaacgtttcaacatatcataaacattacctgcaagaactttttaatcgcagtaatatagcatcaaaaaggtacatattcttgttcatgaaaattaatgaggcaacttaggaatgagagacaggttatttctctttctcctttttaatgtagagctgcagatacacttaagttgccatagtaatggcagaaggagggaagggtgttttctttgtaaaatcattggtgtatacaggatggcttggcaggtaacaacactatttctacgatatctacttattaatataattttatgttaatatcccattctcctcaccataatcaccataatgttcaaattttaattttgtattcattttgaatgtttgcatgtgaaaacccaactaatctattatttcaacattaagcctatttcttttgaagcaaagctaattctgctattttataaaagcaatggagactcatttttcaggatgcttaaagcacagtgcttaaggttcatgcttgctgctttgcttgcacttctgcttcctttgaaccaggtggggctgtcaagcctaagaaggcatacactgcattattttctctggcttcaaagaaggcatcatagtccccgcgatactggctttcattgaaaatctgaggtggcagggggtaacctgtggctggtcgactattttcaggtacattttctctcatccacttccgattctcttcattggctgcaatatctttttcttcaaatcctattttgttggcttctaggaaaccaagcacatcttgttgtttcttcttaatcgctgtagagccagaggaagatgcaatatatacacggatcaccatcctgggaacagcggctgcggttgtttgggtcctgaaaagggctgtggagcagctgcagcaatggctggaatccagctaggggctgaaacagcggttggcagagaagggtgggggaaggtggaaggagaactcgccagagccccgcctccgcctttagcagcttccaccgagctctctaagcgctgcagttccagcccaaaccccccccggccgtaatggccgaattcccgggcatatgtccggtaccgtcgactgnnnnnnnnnnnnnnnnnnnnnnnnnnnnnnnnnnnnccgcctgtcctcgctcaccgactcgctgcgctcgtcgttcgtctatcgcgactacccctatggtgatcgatacatctt

SEQ ID NO: 122576 - DNA, 649 bp, Homo Sapiens
acttttagttttggagtacctgtgcaggatgtgcaggtttgttacattgataaacatgtgccagggtggtttgctgcacctatcaacccatcacataggtattaagcccagcatgcattagttattttttctaatgctccccatccctcccctccaccccccatcaagccccagtgtgtattgttctccaccctgtgtccatgtgttcttactgttcagctcccacttctaagagacaacatgtggtgtttggttttctgttcctgcgttactttgctaaggataatggcttccagattcatccatgtccttgcagaggacatgatctcatttcctttttgtggcggcatagtatttcatggtgtatatgtaccacattttcttcatccagctttgtgatactaaagaggccagttacttactacacattcaccaaaaatacagtggcaaaacaggaataatgtctctagacattcctgttgaaaaaaatgggaaaatgcacagactaaaagaatgattggtccaccacattttaccatcccagtggtaaatgttgcaagtcatttgattatattcaacgcctgtgaataattattcatgcctctcatctctgacctctaggctcttcgttctgccttttgagttattc

SEQ ID NO: 122577 - DNA, 432 bp, Homo Sapiens
tttttaagaacaatcaaggagtttaatcatagcaaccaaatttgcacttccctcagtatcagtcagaaataaatacaggaaatttaagactcaacttttctgttctgatcaagagatcctatttatgaagggaagattatgaaaagtctcagtgatggacagaaagccaaatagttgcgattgttgatatctttgtcttcttcagatgatgcctttagatccagcattatccctcttgttctctcttgagaaagaagctgtttctgagacatgcagctaacagtagagaccgtggaacaaaatgcttgattcgtaggtcattttgtctatacgttcagctcccacttctaagagacaacatgtggtgtttggttttctgttcctgcgttactttgctaaggataatggcttccagcttcatccatgtccctg

SEQ ID NO: 122578 - DNA, 511 bp, Homo Sapiens
aaattaaaataccatttatttagtgagagttacatgttcttttagctgaatagaatacaaccttttaaaatattttattttattttatttaaagttccggggtacctgtgcaggatgtgcaggtttgttacataggtgaacatgtgccatggtggtttgctgcacttatcaacccatcacctaggtattaagtccagtatgcattagctattttttgaataggatacaacttttatctgaaaagcgtatttcaaactttggaaactaaagcaaacattatatatgaccattaaaatatacatatacatatcatgataggtaaacattatatatgacaattctatgctatacataaatacataaagtctatgtgtataataaataccccatttgtcatagaaagacatactgtgtggtttagctacgattggaaaggtacagttctctaaatcaccatatgcacgttcttttagcaagttagggcctatttctatatagtaatgtgatgatt

SEQ ID NO: 122579 - DNA, 1057 bp, Homo Sapiens
  misc_feature (866)..(949): n is a, c, g, or t
cctgcgggtatattctttttgtgtgtgggcacaccccacacgttgctatgttacccccggggggtgtaaaattgtggagaatttcttgctcctttttagacaggttcaactttcttagaggtttccgccggttttcagcgccccctctgtattttagctcccagtttcctgtaaaggaaaagttctccttcgcatcacatcgggttatttacacgtttctggaatgcccttgctcgtccatggaggccaggtgcgtgcagtggactcactctgcctcttccctcgttctcaggaccagtccccgaaccttttgcccttgcagatcctcctgtttccgccacactctcgcgctcggaagcgagctcctggatcatacagctgcaaggctggccggtccttgtttgccagtcgctcttttctgggtgctggactgtcgtcacacctctgcgctcttcccagtctctccatggcctcccccggagccccgctgtcctggctccccttcttccctctgtcttggccaggtcctttcccccatctctgctcatcctcactccttctggaaagccgttcaggctcgtggtgagctctgtgcctcctgccgtcatccacatggtatctttgtgcttcagattcttgttcttgagatctctccacatccctgtgctctttatcactgccgctgtgtgacgtctcctggggctcctccagcgagccttccatgggcctggcttttacgactgcaccgggggcacaggattcctgcttgccacctccagtatcaatctcctctcctctttcttttggtttctctgtggttggttcctctcccttttctggtttcttaagaagcttaatccttactnnnnnnnnnnnnnnnnnnnnnnnnnnnnnnnnnnnnnnnnnnnnnnnnnnnnnnnnnnnnnnnnnnnnnnnnnnnnnnnnnnnncgcaaacgtttcttttctaactctctcctcctccgttcttctcgcttctcttctcgaattctctgcctcgtgccgattcaacacccagcctcgtacctagcctatctg

SEQ ID NO: 122580 - DNA, 475 bp, Homo Sapiens
ttttttttagcctgagcagaaaaatctaaaaaggctctccaaaatcttgagtggaagtatcatactctgcaatgaaatgcttgagttcttcaacacaccgctcacctatttcatgtaaattctgcctcaatgcaaactgtatagacttttctaatgaaggatctttttcaatcagcattttcaccaccatcccgaaagtttcacagtcttgtcggtaaacctaaaaggtaaaacacattctggttagctgagaatgaaaataactagccaaatacttagctaactgagttggcagaattatgatgctgacatctaaaagagagacacaaaaaagaaagcggaacctttctcgcccttgcattgtcactattaccagaggccatttaaacctctatccatgagatctgctgacaatacctgaatgagaaggaaaacattaacaaactacattactgaatatagaagtttggcatgg

SEQ ID NO: 122581 - DNA, 1199 bp, Homo Sapiens
  misc_feature (76)..(110): n is a, c, g, or t
ccttttgaataattctatggcgctagctcgccgagcgaacgacgagcgcagcgagtagtgagcgaggaagcggcgnnnnnnnnnnnnnnnnnnnnnnnnnnnnnnnnnnncagtcgacggtaccggacatatgcccgggaattcggccattacggccgggacctgggataacggcggcgagcggacggctgcatttacggggtctcccggagggccagagtcgtggcttacagaagagacgaaatgtggtctgagggacgatatgaatatgaaagaattccgagagaacgagcacctcctcgaagtcatcccagtgatgaatctggttatagatggacaagagacgatcattctgcaagcaggcaacctgaatacagggacatgagagatggctttagaagaaaaagtttctactcttcccattatgcgagagagcggtctccttataaaagggacaatacttttttcagagaatcacctgttggccgaaaggattctccacacagcagatctggttccagtgtcagtagcagaagctactctccagaaaggagcaaatcatactctttccatcagtctcaacatagaaagtccgtgcgtcctggtgcctcctacaaacggcagaatgaaggaaatcctgaaagagataaagagaggcctgtccagtctttgaaaacatcaagagatacttcaccctcaagtggttcagcagtttcttcatcaaaggtgttagacaaacccagtaggctaactgaaaaggaacttgctgaggctgcaagcaagtgggctgctgaaaagctagagaaatcagatgaaagtaacttgcctgaaatttctgagtatgaggcgggatccacagcaccattgtttactgaccagccagaggaacctgagtcaaacacaacacatgggatagaattatttgaagatagtcagctaaccactcgctctaaagcaatagcatcaaaaaccaaagagattgaacaggtttaccgacaagactgtgaaactttcgggatggtggtgaaaatgctgattgaaaaagatccttcattagaaaagtctatacagtttgcattgaggcagaatttacatgaaataggtgagcggtgtgttgaagaactcaagcatttcattgcagagtatgatacttccactcaagattttggagagcctttttagatttttctgctcaggct

SEQ ID NO: 122582 - DNA, 1319 bp, Homo Sapiens
  misc_feature (87)..(87): n is a, c, g, or t
  misc_feature (275)..(275): n is a, c, g, or t
  misc_feature (336)..(357): n is a, c, g, or t
cttgcaaaataaaagggggccacagggccgggggcctgtaaattttgattattcgaagcttcgggctggggaattccctgttggatnaggatcccaggttaaaggggcctccagaaaactcccattctggaattttggttcagaaccgcctcgggttggccgcccggggcgtttttttattgggggagaattccaaagcacttagtcattgacccaggatcctccctagggaaaccaggctatgacccatgttcactttaccctactggggcccngcgcgccaaaacgaatggttctagaaagcttctcgaaggggccgaggcgggccgacatggnnnnnnnnnnnnnnnnnnnnnnttttttatcataaagtttactgtttcttttccatcatttggcacatatccaaggcacattagaaaattagaaatcataaattactttgtagaaaaataatcctccctcccttctgtacatacacaagtatttccaagaacatggacaaaaccatttccctatcaatcacaaggtcatttgaaaacggactcaggacaaacccatatacgtgtagctctaggccaataacataaaaataacagtataatctatagaaatttataaaaaggaataaatggcaataaattctaaccgaaagtaactctgacctggtttgtgctgttaagttttgaatttgaatcaaaagactaagaaaagatgtgccaaatctactctctaatccagtaaccatcccgtcaggtgtgagtgtgacagacattcaagggaggttctcaacaaaaagggatgtttctagaaatactgctacaggtgcacgtgtagtaaccgaatatctgtacctacttgttagaaggaaaatgataaccaccctttcccatgtgcatgatgtggaacaggtctgatgcatcctttcactaaaatgaatatcaaaatgggattgaggcatcttttggttcgagtgttgctttgcaaagaaacattgtccagctgctgctttcttccttcagatatgacatttcagcctggcctctacagtaccatgaaacctaagattacttacttctctccagcttaatcctaggtggaggaattctagctgtggtttgtgaactgtacacagagtcagagaggtttagcacctttagggaggagaggtcagaatgcggtggtgaaacctctcccagtgtgaccaacaaatgctcattactttgaaagacgcatgcacctctggcttagggatctggatgctactggaatatcgtctgtttccattgtattcattagctttgaagaggagagacatg

SEQ ID NO: 122583 - DNA, 995 bp, Homo Sapiens
  misc_feature (26)..(26): n is a, c, g, or t
gcggccgcggctgtaggcttctttanaccagagcctttaagatgataaaggacccaatgcaggtaatcctgtttttggactcacgtaatgtagaatgcaaagtttagtgattatttaatctgggcctaagctagtgagagtatggaacaatggcccataaggactcctaagcgccgaagccaaggagcctcctcccttcctggttcaccccgcccaagggacctgcccccattcctgtggccctggggcccagcttccaatagtgtcagaagcaacttgtggctttgccttggttgtgagatgggtacattccaaaggagcagcctgggggagggggcaggctcagccagcccttggaggctcagagcagctggcccaggctccagctcgcctccagtggaagcccgagcgccctcagaaacgaccctggccaatgtcaacgcagagccgaggcggtgttgtcacggctaatgtgaaatctcttcccgtggcgcccatcctctgactctgcagtgccagcttggacagattgaggtctctgtggctttggtgaccctgcttaagcattcccaccgtgtcccagctctgctctaggactgcctcccactgcggcccctcacctgacttcagggtatggggagggagggagccagtgctccaaggccagggggctttgctcatgagagatgtcaggcttcctggaggcatcaggctttgagccctgctggggtccaactgacctgggaccaggtgtcgcgcagagatgtgcctcattctgtgcctccttctgtgcctcctaccatgttccctttaactgtgcctcagtgtgggttagggaacaattttgttattgtattaagtttattcagttaattcacttgaggaactaaccagtttttactttctgtctagaatgatgtacatgtagtagagtaagccataatgctcccaaaagtgccttgttttctctgatacaaacatatttataaggactt

SEQ ID NO: 122584 - DNA, 991 bp, Homo Sapiens
  misc_feature (158)..(158): n is a, c, g, or t
  misc_feature (916)..(946): n is a, c, g, or t
aaaatttttttcccgggggcgcccatcctttggatttttgcaggtccagtttggccagaatgaggttcttcgtggctttggggacccctgtttagcatttccccccgttcccaagttttgctttaggaatccttcccactgggggcccctcccctggnttttcaggtatgggagggagggagccagtgctccaaggccagggggctttgctcatgagagatgtcaggcttcctggaggcatcaggctttgagccctgctggggtccaactgacctgggaccaggtgtcgcgcagagatgtgcctcattctgtgcctccttctgtgcctcctaccatgttccctttaactgtgcctcagtgtgggttagggaacaattttgttattgtattaagtttattcagttaattcacttgaggaactaaccagtttttactttctgtctagaatgatgtacatgtagtagagtaagccataatgctcccaaagtgccttgttttctctgatacaaacatatttataaggacatattcctgtgggttcttgggtgtgtttgccacatcaagattttagggaaggggggtatatgtgtagtagggatgccgtttgaaaacaggcactcttcccctgaggatgggaaaggagctcttcagttggagatctaggcagtgggttaagccagacccctaaagtgaccctttcctcttctgccctattcttctcagaccctcagaaagacatccaatttttttaaatccctgtagctccaagcctggtctcatttgcttccctgccaggctcatcgtgtgtataccacatttgtgccccactgacctgaaggttccatgtaactgtatacacatgaatacttaaatgccaacatttaaaataatttgataaagtctttgtagccactcnnnnnnnnnnnnnnnnnnnnnnnnnnnnnnnctcgagactagttccctcgtgccgaattcgccacccaggcctcgt

SEQ ID NO: 122585 - DNA, 804 bp, Homo Sapiens
  misc_feature (17)..(17): n is a, c, g, or t
cgatttagtattttttnctaatagactatgttcaacaaataagtaattctcgaatagttcagattaaaacatacaggaaccaagtacatacccagcatagaagaactttactaaaggcttcttggaaagcccttttttgaaacgacagtatcgtaagtaacatatcatttataatagaaatcttgacccagtgcagaaaaataaatatagtaaaatttatttatctttggccagttttccaacacccaggtattagccttgaagttgaagagataaggtttcttgtatattatttttcatttgtgttctacaattaaaggttctgctttgatttgtcagataatttatagaaattttgttctcaaaacaaatgtttgataaaacagattattaaatttggggttgagatgtctaaattgaatgctagaagtaaagtagaagtgaccactattaaagatgtatagggagaagagtacagcacaaagtgataaaatagtgacacttttgtaggggtgtttattgtttggttaagtctgctaaattacggtatgcattatctggtgactatttgtgcctgaaaattcgttttgtattaaaattctggagaaggaattcaggactagaataaagagaaattttgtaaccttttttatcatgacagttttagaataatttttttagctgagattaaatgttcaaggctccaatattatttttaggaacttatttaaggagtgctactttacagaaattactaacacaccaaaacattattaattaaataaaatataagtttacaataat

SEQ ID NO: 122586 - DNA, 1737 bp, Homo Sapiens
gtggtgtgtttgagccctcagtcgtcctgacagggcacaggagctgcggccagcccttgcccaccgctttttatttggacacagatggggagccccccaggctcctgctgagaccccccacatatcctcatatctagcctgagtatctgtcctgcaaaatgacagaggggctaccagtaggaagccatcctcccttccttgtgagatttgcctgcagggggaggatgggacctcggcagagaggctctgagaagaggtcagggaatggccactccaggggaggctctgcactgggagcctgaggcatgtaatgcagcaggcaggaagtgttgccaggggcctggagtacacagtctgagccgtccaaccactggtgtgtgctgtctttcggcacttctgactgcagggcaggcagctccagctggtaagggtcctcactggggagggcacgaagctggcgggacaacactccatgctcagctggcaggctcccccttgtgtcagaggagtacatagcaggtacaaggaggaggcagaaggagactagtaggaccaagatgcaggtgctgctgctgctggttttgtttgatatctcaatcaccatggcctggagtttcctcagttgatctagaagggacaaattctgttcctccagaagctgtactttgttctgaagctccatattctgggctgtgtatttcaagaccctgctctctaaacccccaacatacaccttctttttcctgcggctctcttgagcagatcttttatttcgaatcttcctccgcacacgtttcagaatttgttcctctgtcttagtgagaggaagtgtctcaggcagaataagcccctccttctccaatagactcttctcctcatctgtcagtactagcctagcaatctcctgctctgccagctcctccatatgctgtggagtcatctgggtcccctcttttctacagctctcactctctagatccatagagacagtttcccgtgggagggagtaggtgtggtcatggtggacaaggcaggggttggaggagctgagaatgttcaacgacgctgggggactcagcagggagcacagcaaatcatctacttcccagtcgctcggtacctcagaaagcggcagcgcccagtccagtggggccctcacggcctcatcgggtgccgtccccaaatctccactttcctctagcaggaaggccagcaggtcttggtcaccagcatccaattccagctccatttgggacaactacggaaagggtgggccaccgggccccaacgtccgaagcccagacacgagccccaggccagctgtaggcctcgggcacctatccactgtccctctacggccgggattccccgccggcggctttccatagccctctccggacccgcctcccaggctcaattctcctcagcctccaacgcagcgaaagtgacgcaccccaccccgtggcactgtgggacttggagttccctccaactgagaagaggcttgggtgcagcgccacgtcccaggggctatgcaaatgtaggggacggccctgctgccgcctcagcaccccgagggtcgggggttccggggctccggctccgccttctaccccaagctagaaaaaggaagagttctagcctgaaagggaactcgggcgtcgtcctggcgtcctctccggattgcgccgcaccctcctcgtgccgaattcaaacccagcctcgtacctagcctat

SEQ ID NO: 122587 - DNA, 617 bp, Homo Sapiens
  misc_feature (84)..(84): n is a, c, g, or t
  misc_feature (165)..(165): n is a, c, g, or t
gaacaaattctgaaacgtgtgcggagcagattcgaaataaaagatctgctcaagagagccgcaggaaaaggaaggtgtatgtgngggtttagagagcaggtatgaaagggagagggactctgttgtaagtattaggtttttgaagggaggatacaggccatatcnccgtatctttgttatttcccccagggtcttgaaatacacagcccagaatatggagcttcagaacaaagtacagcttctggaggaacagaatttgtaagtatccctccaaaccattcccttcctatgcccctcatttaatgctttctcactctttcccctgccctacacttgatttctaactgggcagctgccttcactaggtctctgattccaagaagctcccagtagtgaggaatacatttacaagtaactaagaataagttaagtaccaagaaaaagaaagggggtaagaaagacgtcatgggctttcatagtagttaggattctggggttgggttgggaaagcattctaggcagagagaaagcatcctaggcaagaggactagtccagcatagtcatcttgggctggaactcttaacacacatgagctgggacagaaggtagctcgacc

SEQ ID NO: 122588 - DNA, 705 bp, Homo Sapiens
  misc_feature (40)..(40): n is a, c, g, or t
tgaagagatgtcccaggatgtcttgtcatcaagccacatntcaagagttccagtgaatggacccttccagttatcattcactctggacctgcttagtgcaggagagggttgggggcacagttccttccaagggggcctgtggctggctgatgtagcagttgtgacctgcaattagcctacaatgggggcaaaatcatgtaacaaaaagcctattttgtattaaagcatcaaatatctcatgtagtttattgaatactgtattgaaagtgaaaaacagattggttgtataggcactcaaagagatctcagttctcttgcaagctccttaaagatgactggatgaggctttacaccattgtgtgtttgccaccgtgtttgtacacaggaagggctcaataaacaaatcattggtgactctttgacaacacagaaaacgattttgacttacagtgatttaaaggaattttagacccttttagcttgaagtcttaaaggaagttaagaagatagaaacttatttttaagagcttcccctacttgcattaataatggattaaatgttgaatcaaattagaatgaccaggctgcagtgcgtataccaatgtttgggaggtgaatgttctcaatgagggtcatgattctaacaaaattagttgttactcaaagcctgtttttcaacttccatttgcctcctactttgccccc

SEQ ID NO: 122589 - DNA, 907 bp, Homo Sapiens
  misc_feature (885)..(886): n is a, c, g, or t
caggatgtttgcaatgagttttatttatgcaggcattagtacatcaaggggtaaataaggcatcctctccactcctaggcgatcacaagcagccccctcacaactccacaaagaacgtagtccaggccttagcagccaaacgtgatctaggccaagaaatcatggacatcaagaaccacccaaaggagatgcaggtcacagatacactatttgaggtctccctctttaaatcctacaatgacagtgagtcaattagaaatagaaaatccctaagcatgtaacaagcacagacggttccctacttacaactgtttgacctatgacctttgattttttgactttacaatggtgtgaaaacaatacacattcagtagaaaccgtactttgagtgcctatacgaccaatctgtttttcactttcaatacagtattcaataaactacatgagatatttgatgctttaatacaaaataggcttcttgttacatgattttgcccccattgtaggctaatgcgcatttctgggcacagttaaggcagacaaggctgagctatgatgtcagtaggtgtattaaatgcattttccacttacaatatttttaacttatgaggggtttatgaggatataccccactgtaaattaagaagcatctctaccaactttatcccaattgtgatttcaatcatggagtcagactgctggatcacacagtgtaactctcgaagccatgggaaaagaagcaggaaaaccaacaccttcttcctttccggtttccatgacgtcacaatgggcagtgccagaaaccactttcatgccacaagagtcctctacctgaccagccgacttgggtatgaaattaaagtggtagggacccagaggccagannaaatatagaaatgcattttgg

SEQ ID NO: 122590 - DNA, 1340 bp, Homo Sapiens
gttttggtaacagagtgactttctctaaatttattagggagtttgttacaaatgtttgggctttacaggcatgatttcacggattcaaacaagaaattaacactgatatttagccttctcatgacatacacagaaataacattgctacaaactgcaatggagagaatcttgtttcaaatggcttagtttggggttttgtctaaatgtatcattatataatgaaagcaccaatttgagggtttctcaaatagtgatttgaattttaggacataacagtataacatggtaactttattcttcatatataaataaggcataatcggatgtgtattaatgctgaaaatacattttatcaaaagcataaatacaagtatttgggtacacattgaaagttaggacttaaccaatttcttcttacaaaaaatgataaggacatatggtatttgttgaatctaaatcagcacttctaatcatttctggtattaaggcgatcttatttccttctactttaaaccaaccactgccaccaactgaataaggatttccctaaacagcctcaatttgagagactaaccagaggaccttctctatgcaaattacatgccaatacaccttaaaagaaaataagacaaaagtgaatgagttttttcattccatattgctttctttggttgcagagcaatccagtgccctttccagataataaaattgaaatgaagatttcaatttaatatttggcagacagcaccaatgcaggttattacaaatattaaaggggcagaggcatgctttgaattactcagattttcagaaaacatttgacaaaaccctttctctataaaagttatggtctaaatttatgttgttttataaggcaactgtatatacatttcttcaaggtcaatgaagacacttgtgtgatatttcctcagaattaaatgagaaggcattcagatttaagaacagaatgtaacacaggattaggcacattttattccaaatcataaccataaagatttagaaaatcaaatacatcaaagaactttaaatctaaattacttttttagagactggggtaagtttgcatagtgaaattatgagcaccttttcaattctgttcactaaatttcatctctctcttcatatagtggtatttcaaaaggattcagttttcatgatacaggtgtaagactcctttcaaacgtttttaaaatacaacgtataaaaaaatgtggacctgaagcctttagattgaacttaaacgacgcgtggtcgacgatatcccgggattccggaccgtaccagcctgctttttgaaccactgttcatattcctcagca

SEQ ID NO: 122591 - DNA, 1124 bp, Homo Sapiens
tttgttggttctaccttgatttcttgccttcttgtctgtcgtcttgtccgttctttactctttttctctcttcctctctcgcgctctgccttgtcttgctgttcttgtcctgtatgctctctcgctttctctctctgctttgtgcagctcctctggtgtctcgtgcgtgttgttcgtctctgcctgtcgcccgttttttccgctctgttcgtaccagcgggtaacccctggtttttccttttgctgcgctccctttatgtgggccccgcgggtttgcccccttgtgccgacaaaacgttggctacgggaccacgtttggccctggccagtcgtccgtctttgtgccgcaacccgaatagtccccggattttctgttggtgtgggttgttctttttggctgttttaagttttttcttgatttcaaatcttcttttcaacacctccctcttctctatgcgattgaacagttcttgctctctctctttctctgtcatctgttccagacgggccctgtcttcctcatctcccatgaggtcttctccatagccatcatggaactcttcatcttctgaggaagagtctgaatctgaactggaagaggagctgttgctgtcagagtctgacacttcaccttcctcaggggctgagctctcagctgaactgtctttgtctgaactgcctgaggaggcagttttgttggcctgtttcttcatggttcctttcttctctatttttctggcttttcctttcttcttatttttattgctcccaaatgtccactcatcgtcactgtcagacgtctccgagtctgacgaggctgcaggctgactcacaggcggctccttctcctcagagtcactgcgctttcgctttgccagggacaagagctcctgatccaggttctcgtcgctgccgctgtcctctgtgtccgagtcgatcacgacgcggcctttccgcttctttaccatggtggtcccccggctcccacgccggccgccgcccggactcccctcttgcccgcctgccagtgggaccgccactgccgccgccgccgccgctgctcggcctcgtgccgtatttgacacccagcctcgtacttagccgtattttttcttctggtgccc

SEQ ID NO: 122592 - DNA, 767 bp, Homo Sapiens
  misc_feature (83)..(83): n is a, c, g, or t
gttaagtacggtttaatcacaactttgaacaagaattttatcataaattagtaagaagtagaacataaaaaaagttacacatngctcgatattaagttatttaaaaaatgaaaactgaagtcaattttattacaaaagattaaactcattagccaccaaaaagaaatataattccaactcagaattgaaagtaattttttattgataaacatttacactagaattagaaatgtcagtagaaaaataaaatttaaataattttctattgtacaaagatttgatcattttgactgtagcagttagtgaaataacataatataaaaagttaagctgatctgagtcacaaccagccttatagagtgcacaaaaaagaaatgcaagtacacgacatttctgcatatggtctgctaatggcaccgatgcttcacattccaggaaatggttacttagggaaggttgatatgtgctgcagcataataggaacttaattcaaaccagagcaaccagaaaggatactggaggcaaaagccaaaatacaatttaaaatcttaaaaaaaataaggaacggtttaaaggtaattaatgaacttttcctcacctagtgtaaacatttcataagaagtaatattttgtggtcacaaaaaaagcacagatacctcttttagaatattcatgatgctcttgtgtatgaacttaagttttcatgaaatgctttcacctcaaaaccccgtattcaagaatcaagaaggccaagcacgatggctcat

SEQ ID NO: 122593 - DNA, 1364 bp, Homo Sapiens
aatttatgttgtttgcctttttatttggccaaatccataggggctatatttaaaccaaaacatgagctaagtaaatgaaaactactttcttctggaggtttattttggataaaatagttgaagacagactacaatgagacattgtaaaataagactagaaaataatttaagagcgtattttaagcacgggattccgacacactcataaacgtgtttgctcccagctcttacaaaagaaaataaggtttttctccatcaaaaacaacccagttacaccagtaaatcttcccagttctgaaaatctgaagcaactgatactccattaaatgtggaaacactgtctactcaaaatatttgtaatattatgcagtgacaaaaatttcccacacctatatagggttaaccatagttttcagcaaagcaacaagtgctttacttattttgtctttttcagtttatacagagctccaatttcatgaaaccatactgtgccaaaccaggaaataaacagcaacactctagcgaagccacgccaaccaaacggatactatctcctgtcctttttaccagctttcctcttcccagacagcaagtgcttgggcttcatatcaaacacgtgtctatccgcctcccctttcttccccaaccgattcatcttcttctgagcattcttcatcatagtcttggctttcttcaccatcttgacatccctaagaccagaaacgtcacgtggagttcgagagcaactcccactccgggccacagaggacgggggagcagagtcttcccgctttcttttcctagtgatgctccgggatcttcttgcctggactgcgtaatgggcatcgtctttatcgtccatgtcaacaccaagactacgcatctccttctccaaaactgtcctctgaaccttcttagcagttcgcggcatcctgggtccctgtgtattcttttctttggactccagaattttcaacttctttttctctcgaatttgctttgccagctgtcggatttccagcatctcttcgtcttcactctcagatacactgtcatactctccagcagctgttctcagctcttcttctttttctaattcttccaatttcttcatgatggctggatcaatataatcagctatattatggccttcccagatttctggtatcttatcatgtttttcagacaaattcattaaatcccagtacttctgaagatccaaaatataatcatctcccatttccagctcaagatctcgttccctcttcttcctggactcctcagtttccatcctcttcctgcgagccaccactccttcagggatgaaaggggcctctccttatcgtccctcctggttagggaat

SEQ ID NO: 122594 - DNA, 548 bp, Homo Sapiens
tcgagagaaaaatatgcataaaactccagcagaaacttttaacgttaaattgcaataaaaatttcagtaaacaggttttattcatgtcattaagtttcagggtaaactctctcttctgagacaatctggagagacctctatcagtgtagttggtttatggccaaccctgtctagaagcaaagaggaaggatgcaatgctacgtatctttgcaaagttcggtataccaaagaaataataatcctactttcaaaaatccagtcatttaaaacttcagtcttatttttctattactattttcaaccatgccattttcctcatgaaatctgatttgccatcagcttttcagagttcaactgtttccaaggtttctgtcagactgtcctaccatcctcccactcctaactacccagctgccccttgtgttctagccaaataaatctcttggcaccattgtccttacacccactgctgcctccacatcattctccaccccctggtgtgtggaattgtctcccacttccatctgccatttttctctctcttctct

SEQ ID NO: 122595 - DNA, 1372 bp, Homo Sapiens
acttgaaagagaacatgtttatttacatcactatttcctttttacaatgcctccaccttttgaataataaaattttccaggaaatcaggtcattttaaattattaaggtattttaacaaatacaattttcaccctatgatttttatttacatgagttttcaagagttttaaatagttcttttgaaactgcacaatataaccagaaggcctgactcagaccctgcatcttttccaaaaactttcagtctaggaaattatgtttataatcaaatccttgcactttggatcttttccgatgaggattttattaacacctctaaaatatgaacctgcttcataaatgatccatattttggcagcaagctgaacctatttgacacttcttgatagtaagcaaagatatttttgataccttaattaaactgctttgattaaaactttctggaagttttccgtatcagtcatacaactccctatgttgttgtgtatgtgttctgagtacacactgaatttatgagaatgatttatgttccggtctggccagctctgaaagagacacatgggggattcggaactttatggcacaggcactggtgcatctgctctctgttgtccagtcacacttgggatgcttaattttcctgatattatacatgcaaatcacttacttttcatagaatttaccattcatcaaatgactttcaacaataacaatggtctgacattctttcatgtcgtactgagatttcagatatttattagagaaactataagacagattttcctaatatttttgaagtatgagttcctctgaatagttggtataacatccattgaaaaaatagaaaaggttaactttttaccatgatcaaagctagagttcacaatgaaacacctgcatagctctgcccaacatctctgtaacaacagccaagggcctgtcttgaacatcatgcagcagcaatagaggtatcatccatgagtcgacccttgtggcttgacaaaaatactggtaggtataaaacgcctgagcagctgatttgtgaagttaggaaatctaagcaagttgatgttgagagatggcagcttctggtatccagccatcagaggatagaaattatatagcatttcctgctccgtgccagggaggatacgtaatcgaatctgtttgagacctgagaacatgaaggcatcactgggctccacagaaatttctacatcttgaactaagtcggtcttattctgtaggtgatacttgacaggtaacgactctctgacacgcccaaatgacggcagatctgcattcacatggagagggatattctccacaatcacgtgcggcagagtgatgacagttgtgatgatggggatc

SEQ ID NO: 122596 - DNA, 1919 bp, Homo Sapiens
tttaggtgagaaattattttatcatatttagaatcaaaatatcccttaaaatatttacattttacagtaaaaaggatagcaaaacacaagatcatgtacaagcttaagtattcaagtttctgaagagccaaaaatgaaaatgaaaataatggcctaccacaaagctgtagtatatggtaataaatgacttcaatgagtgcagattaaagcaataaatgtaccccttgggcttctgattcttggtcaaaaactgctcaactaaatgattagcataatctgattatgaagttgcttggatttttgttgctcctctacagtttctttaaaaacagtgcaatttaaaacaaacttacagagcacacattactcccaaattagtcattatataaaggacattcactagaggaagtaaatatattccatagttaaccatatttaccaattaaggaataaaactaaaatttctaagcctttattgcatattaataaaacaaatctttgaatatacagcaatgtaaaacttttaaaaatattaaattcctataactagggaccgttggtatgaagaagggatgatgagcactggtacagagcactctgtaccaacacacagaatttactgttctgcaaatgaccaatagtaaaaattttaaagatggcacaatcctagcaggcaatctttcttttgtttacaagatacaacattttaacagttatttaaatgtaatcctgaagcagcctgcaaattttaccttttgcttttagttctgtcagtgtggtccctatctttgtggtacctatccctgtccttttctccttctctgtgtttacttttctctcgttctttgtccttctcatagtcttcacttttaggtttatctggcttcttgtctacattcctactatctctgcttgcttttccatctgttcctcgatcaccatgtgataaccgtgccctctctttatctttgtgcccttcctccctgctttttctgtctctgtccttgtcttggcttctgtctctgcgtctatgcctttcagattcttgctcccattccttttcatgtcgctctcttttcaaatggtgtgaatcactataaaatctctggcggtcccctttacccctattaaatggcctatccagttgctgttggtcttgcctaccccaagggtcactatggcgcctttctggcctccgaatgtctttaacctggtaaaaattctgcgggcctatataccttgatgcttgtgagagaggacccatcatacgctgtggctgacctgggagatgaacaacaggtggccagggaaccatgggattttgagcaaagccaaagcctggagggggaagtaatggaggtggcaaatgtggtggaaatccaaacatgctttgtgggggaaaattaggaggccctggaaatggaaatccaggtgggctagacttgagatgctgaaggttgggctgctgtggcctcatgggtgaaaagtttgtacttgttctggggctggtgcttctggaagtaaaggtgatgcttttagaaggaaattctgatggacatgtgtttccaacttcaaaatgagatgtcgctactgctgatcctcttcgaaatgggtgcacagtttcaatattttgcattaaaatatcctcctgtaagggttttgcttgttctgcttgagaagtctgtatgttttctactgatggtgagttttgtgcaacttttaaattgtcactctgctgaacacacgagtttttctctgcagaacacaacttttcctctacattgatttgttctgttaagtgctccttgttgtgtgacaggccaggcagcatgtgtttttctccattccggcaactatctccgacgcgtggcgacgcgtgggtcgacgatatcccgggaatatccggaccggtaccagcc

SEQ ID NO: 122597 - DNA, 587 bp, Homo Sapiens
tgagtgtggccctggctattttattccatgtgctggccctggggacccagctgggccaggtcgacgcccctggggagacagtgtggctcggtcagcctcagtggcttctttggggtgcaggagggctttggggttaaggctggggaggaacaggaagtaaagtgcttgcaggggccctcggggcttggccccagccaccctccctgctccggggcgggccagaggccggacacccctgggctgtgcaaacaggactctccagggcccagccaggcctgggtgaggggcacatactggctggcaggcatggttcccaacacccgcagccacggaggctctggcggggctgggggcccggatgaggggtgagtccagaaccgattgtccgctgattgtctgcttgtctggttcgtggctgtgtcggctcttcccggtatcggggcctgctgcccgctttctgggggctgcccgccccatgggctcctcacctgcggaggaaaatagtcttggaaatgttaaatatgatgggtaaattaaaagttttacaacattctacctaatatttttcttttaacatactctttctg

SEQ ID NO: 122598 - DNA, 1044 bp, Homo Sapiens
  misc_feature (140)..(164): n is a, c, g, or t
ttttaagccacatacttagtttattataggcatgtctaattgaaatccatgaaaacagttacatttaaaacattctttatgcactatacttgaaaatgtaaaatataataccacttaagtacttcccacattaaactgannnnnnnnnnnnnnnnnnnnnnnnncctagtcgttatttagctttcggacaccataatacaatagaacagaaaaagtatgttaaaagaaaaatattaggtagaatgttgtaaaacttttaatttacccatcatatttaacatttccaagactattttcctgcgcctcatctgccctcagagagaatgatccccacagtgatgaggggtcagcactctgaaagccagttgacgccagacaagctgctggaacagctggggcacagctccgcctctcctccagcccctcggtcccatgaggccaaacaatgaggacagaggggctgaggggtgtgtccagggcccagtcccacctcagcaggaaggtggcgtcagcactcgcagtcccagcctcacgccgcatcgcagtcccgggggatcttcacacagggagggtgagctggttaagaaggcgggtgatcctccccccggatgcttcgatacttagccatgtcttccggaaatactttagaaagttcttgaatcaacaggcttttaaatttcttcatggtgtcgatcttgcctttaacttgctcatttttagctagagccctctccaggcactctttggtgtagagctggggatttcgaccttgatctatatattcaaaaacttctaacggtacagtaatatcatgaagctgctgtctgcacttgtcaatatcctgtaagccagtaacaataaaattcagcttttggttgagcccggcctggctgctgggctggaagtcactgacgatgatgccgagctgccgaatgttctccacgaacttctccaggtgctcctctaggtggtcaaacttctccgccatcgcctcggcccgtcccccacccacacagcctcaaccagcagcgccgcaggcgtccc

SEQ ID NO: 122599 - DNA, 1027 bp, Homo Sapiens
  misc_feature (630)..(671): n is a, c, g, or t
aaagaatggtcaaaacaatatcctttcagaaatagaattgttctttaatatctttccaaaatgactttggttaaatggaccagatgtatattagttaaaatttaggactaagttgttgatattctttgagtttacaagttaatccttattggagatgtgccaatatacagttagaatatcattaatttgcactgtattggggaccccatttaagaatgctgaattttgccaactaagaagtaagcaaatgcaatttaaaaagtaaatttgagcattctgtattaaatatgtgcagttattatcacatgaagaaacgcagtgtgtcgggctgtaatattaccatatttgctgtcatgttctcccatctcagtgctgggaaatcaccatgtggaaaccaagcaaacgtgttgtgcatcagccggcttgagtttgttcaatatcaaagctgaaaactagcgaggtctgctgtactgcttattgaagtattgtgattattttaggcattgattcttacaaaatatatactgtaacagtatactttgtacagatttaaattttatttgaacaaatgaaataaagtagggcacagcacacaatacacagatgctcactttattcaatggtgcactnnnnnnnnnnnnnnnnnnnnnnnnnnnnnnnnnnnnnnnnnnttcggggcgcgcacccgcgtgggcgtcacgacaaccacgccgccaacaaccactacgtgcgcggcaccagccgccccactaaacgctgacacgcgcacaaagagcgcccaatgccgcgccaaccaacaaacagcacaaccaccgcgggaccaagagagaacagatagcgccgtggagaattagcacacaaccccagacgacacaaacactcgcccgcccgggagacgacgacagcgacacaccgtctggccgacagcatgcccaacgaacagctgctgacgagggacaaaaccacacgggagcacacccaccacacgaggagaccccacacagcgaaatccccgaccccacccgcc

SEQ ID NO: 122600 - DNA, 604 bp, Homo Sapiens
ttttttgcagttaagggacgtgttttatttcatagctttctgcaagcaaaattgctctgatacaaaatgagttcaatgatacaggtgctactgtccactcaagcaaaagaaaacctcacatgtatatgaacgcactttatacttatattcttacagtataataggtctaatatccaggatgcctctggcctcattgaaagcaatggcagagaaatgctgcaaggtacttgaatatcatagtactggcaagtgcttgaagtaacttcctgtgagttctctgtcagatactgcaaagactgcgtgtgggtgtgtttgtctttttgtcttccatcttttggtttacatttaaatcatctcaaaaaatatcccctgcatgtatcattcagcttctcagagtttccataaaaacaggaaaatgtcatgaggtatccctaacgtcaagggattgatgtagtgctgtggctgtcagagaggatgtagacttacctgtaggtacagtaactgagtttagtgtgtgcccggcacgttacagtgcagaaatgttagttcatgttaaacttttcctcctcacatatgatgtgactttaaccccagaatatctgac

SEQ ID NO: 122601 - DNA, 790 bp, Homo Sapiens
ccaacttttcatttctttttattgatcttcatgttttcacatcttgagatgcaatttgttagcacaggctgtcattccaagacacacaaatgtcattaaggcaaccgcttaaaggagtgtgatattttattgaggtagacaggacaatagataaatatttaatctgttacatgtttgctctgtgtggagccagggttggggctgcacaactctctggctgctatgtgtcttcctggaaaccctgtcaaaggccttaccgcctgcctggagaaacacagtgcctgcccttggcaaatatatgttggtgtatctgaaaaacagctcctggaagctttttctcattcaggctttaggggttaccccatctttccttatgtgtgtaatattggagaatgtacactctcactgaactggggatgtttgacttaaaatgatggacaataagatagtgagcagtaagtgtgctctaggctaggctacgagaggccatgagctcctcatctcttctctgttctgagctctctgatccactgcacttggggcagggggtgcattctctgtgcctctcctgagtctactttctgcatcattggttctcccagctcacttccataatgtcctcctaggctgcattggaattgtgtgttgtctagacccatggccaagactgtcattgcctgtgagggagaccaagctcaccaccaagggcttttgccagattgctttcatttacagaatttgcccattcatgtgtctttgtgtttatggattaaatggctttctgaccagc

SEQ ID NO: 122602 - DNA, 1595 bp, Homo Sapiens
  misc_feature (1483)..(1483): n is a, c, g, or t
  misc_feature (1492)..(1492): n is a, c, g, or t
  misc_feature (1522)..(1522): n is a, c, g, or t
  misc_feature (1526)..(1526): n is a, c, g, or t
cagtcttgggtctatatcagggcttcagcctcaccacttactataactcctctaggcatgaatcactttaccaagccacagctttctcatctgtaaaacaggaatgacatctgcccttaatgatgctgtcaggggatcaaaggtgcaggcctgtggtactcaaatcgacacagaagccccgtaagtttaagttagtaagcaaagcaactcactgcaaagatgtgctggatcgacacatccttgggcataagagaggaacgactattccaaggtctggaagcacaatgggacttttacccaccccatcccgttcatttgcaactattcatgaaattcaccaaaattatttccttgtgttttacctttattgttttgctttttggatcaccttcagaaatggttatatctgttgagtttaccttctagaagatgcagaaacagtaaaaaaacagagccacctcagatcactcaaggggttgttctattttcaaaaacacactgacttttgaaaagtccctgcattggttggataaaatgtctgaagtggttggggggaaagcaagacaaagtcttaactacagaatatatttttaaggaaatgcagctttattactttcaagtacaaacaataacttgggcttggctaaccaaatttgcctaattgagggaatctgctttaatgtacagatataaatgatttatagttaacacaatcactcacgggtaaaaagagtgcttctatgatgcaagaaaataacttctcatcttagagacatcttgttccacaatcaccccactatttgcttaagcaacctcttcttccccctaccccacacagttcaaatataaactttatctcatgccctctaaatcacaacatacatcaaattcgtgaaatatgagttgattactttttccacattgctatagatgttggattgctgacagaactatctcttcaacctgagcattctcatcaagtatactaagtctaaatcagtgaaatatgcctgttcacaatctgagtacaaagacaccaaaacatgagcttttatcatctgaattactaattttccagggttgaatattaaaaacacatatttacttgggcacatttatgaagagtagaagtagctgaattctttaggctgcaataattaagtgggtttacactggtcaggattgaattactaaatttaaacaactgaactgttccaggaaagacaagaaacactgaaacatcctaacagcaaaacagctttttgcactgagcgtgaccattcagtctgattaggctgatgggaatggtgcaaagactactcagtaatccatttgaggatttattctgaaaaaagtttactttcctagagcaggcatggggaacctttgatcagaaacactgccaaagatggctaatgggcaatgtgtcaaaaaagtgaatctgttcttttcatcagacattctgaggacagcatatctcaangtgtctggntgtctaaacaagcgaagcacaagcgtacangtangaggctgtgtcaagaagacggactaaaggcttctccctatcctgaaactgtgtcaaaagcaaaaggaca

SEQ ID NO: 122603 - DNA, 836 bp, Homo Sapiens
  misc_feature (356)..(394): n is a, c, g, or t
attcaagtagaagtatttttatttcaaggcaccataaaatgatgatctctctaagaaatacctctccttccgtgtgtgaaaatccttgggggaaaaaaaatcccacacggtgttcttggccatcaggatcatgaaaacaaactttggtgaatgtgagcaactgcgccagacaggacacaggttacagggcctgacgtcactaacggtaactgacaatcttggaatggaccctactgctgatgtttcaaaaggacacagaggtgaactggtcacttctaattaagaagagccagtggggtgggggaagctgaaaaccaaaaatccacgtagacatacgtggcagtgtgaacgtctgnnnnnnnnnnnnnnnnnnnnnnnnnnnnnnnnnnnnnnnactcaggctggtattctcctggtgtgcggatgtcagcttgccctgcagaagggctgccagttttttagatgtctttttgagaaacgagctgcccggatgggcactgttcacgtgcaggtacaggtcctcctgggtggggcccgtgtagccgcaatcctcgcagacgtagagcttgtcccgccgctgcttataggcatactgctgctgcaccccatggattttcttcaggtgggactccagagagcagcgctgggtgaaggctttattgcagacgttgcatttgtagggacgaatgcctgcaaggatgagggacagacacagcatcggttggtcatggccaagccagaaccacccaactatgaagccagtaaaagtcatgccatgaccaaggattcatggcagcatgaggacaatggttacagcaggagagaaaactgtctac

SEQ ID NO: 122604 - DNA, 1024 bp, Homo Sapiens
  misc_feature (705)..(768): n is a, c, g, or t
gggcgttttgacatcggaggccatgcaagacggggagtgcttaaaaagccggggggatgaaacgaaaccaggaaatactgcagggaagtggcgcctcttcgctgagtcgtctctcgtaattagcgtggatttcctgtggcggagtcagcttcctcaagaggcggccatttttaagaatcctgtttgagaaccgagctgccggatggcactgttcacgtgcaggtacaggtcctccttgtgtgggcccgtgtaccgcaatccgtcgcagacgtagagctttgtcccgccgctgctttataggcatactgcttgctgcaccccatggattttcttcaggtgggactccagagagcagcgctgggtgaaggctttattgcagacgttgcatttgtagggacgaatgcctgtgtgtgtgcggacgtgcctcttcaggtccgaaggtgtcgttgaagcccttgccgcagaaggtgcacaggtgtcttttcacctggttgtggcacttgaggtgacggttcagcatgcgctgcagacggaagcccttgccacacaggtcacagctgtgaaccaccgagtcgctgcacgtgcctgtggtgaacttgattttcgatctggcgaccgggcgctgcttggtcgccaggtgtccatcggggccctcggcgtcgccgggctcgggggtttcgctctcgggggcgtgcggggacgagnnnnnnnnnnnnnnnnnnnnnnnnnnnnnnnnnnnnnnnnnnnnnnnnnnnnnnnnnnnnnnnncgctgcggcagtcctcgggggggtcgtggagcaggcggcctaggcccagttgcggggcgcgctgcccttcccaaggccttgttcgggtgcgcccaggacaaccggcacagcctcttgtgtcgctgcggtcgccctcctccaggaggtcgtcagacgtgtgccagctgccgggtgctgcgggggcgcgtctggtcagggatgccctggagcccaggctcacccaacagccctcgtgccgattaacacccagcctcac

SEQ ID NO: 122605 - DNA, 1150 bp, Homo Sapiens
  misc_feature (811)..(811): n is a, c, g, or t
acttttcttcacacggaccagagtggacgtgggctccagaagtccaggcggtttgttggccccatctgtgggcctctctttccgaggcagctccttgctactcctgctcttggtggacgccgactgccttcctcggcctggggcgctggcctctgcctcgccagcatccacaccactgtcctcgcttagagtctgcccgctgtccgagagctgggagagcgtagaggctgtgcgcgtctggggcagcgccctcacttcattgacgtctggctcgctgtcggggcggtggacctccaccatgacagagtgctggtttgtgcctgtctggtttgggtggccagagggttatgggggcagaaggcagcccccagccacctgtggcttcttcagaaggggcttttcaggtgcggggttgactggacccgtgggaagggtccgatggggtgttggttgaccagggccagatgggcgtccagcggcctcttggatctggtggttggcaggggagacggaggcatagatgggggaagagggcaagtcctgtgcagaggaggtccctggggtgggtgcggtgcccgctggcgggcttgcggttctgtggagccgagaagacagtgcccgagcaggaaggcatggaggaaggtggctggaggtcctctctccccagcttccttggctggcctagtgggaggtcgttgccttgggccagaggtggtgggcgaggcagtggcttgaagcttgacagcccctgggaggtggatctgacatcatccacggacacatctgggagggcgttgatattgccctggancagcctcgccagtttcctccaggtccagagtgttcctggccgagctgacggtggtggaggtgccgtggctgcctgttggatgaacccgtgtcactgtaggagaccatggagtaggtgtccccagccccggggcctgggggctgccgcgccttcatggactcaatctcacgcctcagcaccaggtggtcgaagcgttctaggtcttgcggggaaatggtgcctctcacctcagagaggagtgagaacttggcgtgggtgttgagcagcttgaacagggccatcctcgtgccgaattcgccacccaggcctcgctaccttaaaccgttagagtactgccgt

SEQ ID NO: 122606 - DNA, 1004 bp, Homo Sapiens
  misc_feature (80)..(273): n is a, c, g, or t
  misc_feature (277)..(277): n is a, c, g, or t
  misc_feature (282)..(283): n is a, c, g, or t
  misc_feature (292)..(292): n is a, c, g, or t
  misc_feature (301)..(301): n is a, c, g, or t
accgacgaccagccagcatcagtagcgagagcgagagcgccatacgcaaccgctctcccgcgcgtgccgattcataatgnnnnnnnnnnnnnnnnnnnnnnnnnnnnnnnnnnnnnnnnnnnnnnnnnnnnnnnnnnnnnnnnnnnnnnnnnnnnnnnnnnnnnnnnnnnnnnnnnnnnnnnnnnnnnnnnnnnnnnnnnnnnnnnnnnnnnnnnnnnnnnnnnnnnnnnnnnnnnnnnnnnnnnnnnnnnnnnnnnnnnnnnnnnnnnnnnnaatntgccnntcgagccanggaattcgncacgaggggaaatcagaaagaaagagaaatatttcattatgttaatgaagaaaagagaaaattgaagcataaatgtatttttgaagtagttattcggtagctgagaacttattaagggatttaggaatttaacctcctgatgtggattcctcaaagacttgatcggagaatactcttgtttcaccattatgttggtacagtatagtaccattattttatgttgtgccagtgaatccagttgccagaaataagtctgaatgttttcatgcatctttttcttaaatgcaagagcttctactgactcttaacaagcatgcttacccaaattttgttgcatgcttttaagtagcattagctatgcacacttgacatttttaaatatccctttcctagtgtaccagccttcacaggataagaggactgggaataaagtcagatgtaatgtgaccctagaaaactgtagcaagcttcagaaataaatcttttgatctttccctatcttgattagatccaaagtcaaagcaaccatacttcacctagagaagacagtattggcaatcatgacacctgtaataaaaacttgactccaaagtcaaaacttaagcaagatacaaatgtgctgcctgcagttagtcctgcatgggaataaggactagttatttttttagtgctgcatttttttaaagttggattgctgctattt

SEQ ID NO: 122607 - DNA, 803 bp, Homo Sapiens
aagaacaaaactagtttatttggatttgggactctgaacagttctgtctctattacccgacttcctcctcccacgacttcggcacctagaggaactttggctccggctgcggtggctcctgcggttctggctccggcggccctggtccctgctgcggtccctatttcttcctctgcttcgtgaattgtgcctctcccgactctttgatgtgcgtttgtgagatttcttccccctgtgacgactacttttcctctcggattccccatttcttttgtaggagtggtctggactagggtttctccttccccgcagcctgctgtagtagtcgtcgtggtggcccatcctctccctcctttcggagttcttcccaaaggaggagccagtccgatctggagacaagtagatgtctctattagcttcccagaattcattgttgggatttctgaacacatgaagaaagttgcagtgcttttcctcttggacattgttgtatttcaaataaaccacaaatcgccattttccaccgggtcacggggcagaattcacactgcagctgtcgtcctgcataccatcgtccgttaaacagagaaagggctgcttggcattcttcttccgactggtactgaacatatacattgcccctcaggtgaggttccaaattgcagctgaccttgaactgaatcactttaccccacgtttcttgaactcgggcaccacagtcctcatagaagtctaaggaactgtcggtaggtatcttcctcgctgtactccaagcttgcagtcagggtcatagtcatccctct

SEQ ID NO: 122608 - DNA, 852 bp, Homo Sapiens
agaatcatttctgctttctcaaaacaaaataatattaatgagtacttctatttgctgcatttttcttattacagcctttgagacagctggtaattataagtcattttccattttttaaaacataattttataaagaattctcttatctcgactatgtagaataccacctactggacagaacaatttttgtactcacaaacactgccattttcttagagatggcttgagaggagtaacactatggtttaaagcttgcagtaaaaatgccaaacactgtagtaccttggaacccagtttattcttgtgctaagcagaactgtaaaatagttaaaatgtcttatcaagtaattcgccgattacaaagacaccatttgttttttatttcattctttgttttaactcatgtggtagtgatatttaatactttctgatcaaacaggttcaaagtaaaacgttaaatttcacatttcttttaaagaactcttaaagtgtaacagttacgccatacttcataagtggtaaagaaaggtataaaatttggaaacattttgttgggcatagtagtgattgggtgaaaaggataaattatatcaaaatgagaatgtgctgtaattggaagtagggagctaaaggatgtttctttcagtttagtagaactggaacgttttactattaaacatggcttttataaatgcatggtccaataattttattcactgttagtatttaattcactgtcagcttattaatgttttctgtacccattaatgaattttaaattacaaaaaattgtctagcagctacagtttaaaaatgaaactagacattaaaataaatttgataatttttttt

SEQ ID NO: 122609 - DNA, 745 bp, Homo Sapiens
  misc_feature (232)..(263): n is a, c, g, or t
aaatctgatgaaataaaacttcatgttttatttatggacactcccaacatgtaaaggactcagggagacattcatttttactgccatttcctcctcatatctataattaaatccaggctacagctctggcccaaagcaatgcagcattttaaagctggacttgaacattccctcccgcatcatctgcctttaattataattaccattcccagtatgtaagaggctgatggtnnnnnnnnnnnnnnnnnnnnnnnnnnnnnnnntgatggttgccattgtgttttaaaccgacaggctgaaggaggattttaggcaggagggcgtcttctctatttccagttttattctgtaccaagtgcacaatcccttcattttacttttgacataaaaaaaggacttcatgaacaagacaaaataacttatgattatatgaaacataactgtgacaaatcacaaaactatacatattaatagaaaaaagtgtacctaattctttaaaagatttatgacaataagcaccagatgtgcctctagagtaaaatcggccccatatccagtatgatatatgcagttcatttctctacgtgagtgtatataactatgtacaagagtctgtgtgatttatggaaaacagatttccacttttttcccccaaagtgctttatgtcagcaacattacacaggatactttgctgtctgtacaaaataaatctctttttacactcactatttctccaatgagtgc

SEQ ID NO: 122610 - DNA, 1038 bp, Homo Sapiens
tcgctcctgtgagcccctgtttgggccccgtccttgtttggtctcccggggggggtcgtggcccttgcgggttagcccgggcgaaggtgctgccccccctcaggtacacgcctccgatggaatctaacgcccattgccaactgcgatttgtgacgctcacctttcaggtttcggtcgggaaacgactgtacaattatattgcgcggccatctgcactgcccgctcgtgatcaccttttctttctcatacaggacaggaactcagcatggcatacgcagatgaaagttgtctgctcagggtccttgaactgtttcgctgactgagcggatgacgggcagcgtctcctccagcttggaggccagctggtctgcgttcatgtcccccaggcccagcatgttgcacatctgtgagatgaaagggctgatctggttcttgatctgcataagccggcccggccccgctccacgatggtggggaagttgagcagcctcagggtgtggcccgtgggtgccgtgtcaaataccaccaccgagaagttcatgcccttcaccagcctcatgacctcggcatagctcatggcctcatcgatgccgggaaatgcgctcatggcctcctgcatcatcttcttgcccatgctcagcatgttgtcctcctcgaagaactcgtcaggcagctccgccacgcccaggctggggtcaatctccatagcaaagaggttgtcatagcctttgaccttggtaggcacctttgagaacttctggtcaaaagcatctgagatgttgtgtgctgggtctgtggagatgatcagaacactctcacgccccttggagagctggactgccaggctgcagctgcaggtggtcttgcccacaccacccttgcccccgacgaagatccacttcaggctgcgctgctcgatgatgttgctaagtgtaggctccagcggctccacatccaggagcatcttcgaactcctctgcctcaaccccccacccggccacccctgccgccatttcctcgtgccgattcacaccggcc

SEQ ID NO: 122611 - DNA, 1354 bp, Homo Sapiens
ttttttttgcagtttaagatcattttattgaagagcaagaggtgggagaggtagggggcaactacagctccccaccagccccaccagggggaatggacccctccctgcctcctgcccaagtggctccccctgtattatgggggggactttgtgcaaactctgccccgagggggtggggagggtggagggtgagtgtgaaatggcagcggttggggctggcagctgtgctactgggcactggggggcttgtagggctccaggaggagggccgagaaggtgttgaccttgtctgccccccgcacctcatggggtaacagcggcagcttcacgatgtggaagtcttcatacaggtcctccatctggtccagatacttggcctggatcttgtgacgggcctcacacatcttgcagggcttctcggggtcggggaagacgagctggttgacaattatattgtgtgtgtcaatcttgcacttggccagctcctggatcagcctctctgtctcatacagggacaggaactcagcaatgcatacgcagatgaaagttgtctgctcagggtccttgaactgttcgctgactgagcggatgacgggcagcgtctcctccagcttggaggccagctggtctgcgttcatgtcccccaggcccagcatgttgcacatctgtgagatgaaagggctgatctggttcttgatctgcataagccggcccaggccccgctccacgatggtggggaagttgagcagcctcagggtgtggcccgtgggtgccgtgtcaaataccaccaccgagaagttcatgcccttcaccagcctcatgacctcggcatagctcatggcctcatcgatgccgggaaatgcgctcatggcctcctgcatcatcttcttgcccatgctcagcatgttgtcctcctcgaagaactcgtcaggcagctccgccacgcccaggctggggtcaatctccatagcaaagaggttgtcatagcctttgaccttggtaggcacctttgagaacttctggtcaaaagcatctgagatgttgtgtgctgggtctgtggagatgatcagaacactctcacgccccttggagagctggactgccaggctgcagctgcaggtggtcttgcccacaccacccttgcccccgacgaagatccacttcaggctgcgctgctcgatgatgttgctaagtgtaggctccagcggctccacatcaggagcatcttcgaactcctctgcctcaaccccccacccggccacccctgccgccattttggaactggctcacgtgatccagcggagcgcaccatacgaagaacaccaatcactcttatgttccggtagcgccaacc

SEQ ID NO: 122612 - DNA, 1012 bp, Homo Sapiens
  misc_feature (781)..(781): n is a, c, g, or t
  misc_feature (790)..(790): n is a, c, g, or t
  misc_feature (816)..(817): n is a, c, g, or t
  misc_feature (854)..(854): n is a, c, g, or t
  misc_feature (945)..(945): n is a, c, g, or t
tttaaattgttcatagtatttattaaggtcaggatgcatgaatagactcttctcaacagaaagataattcaacagcaatcaatttacagaatttagaacagcactacatttcagcaaaatgcaactagagaacatcagataaattatagtaatttgtttttaaaaatccattaaactatctcttacctctgcaataatgtatcatacatgcagttacagaagttagtagggaaaagcatgatcttccttccctattctctgcccatccatcttccaggaaaccacaggctgctgctgcccagagttggcatgaggcttcgaggctgctgcttttccccctacatcataaccgatttcaaatggtgctagacaaaaacagactctgaacaccaggagaaatcggtcagcctgtgtaagagatgggccagtggtgctcccagggtctgcacctcgacagtccaggtggcaagtctgatttcgggtgccccgcaatcaacgccgaatactccagggcatcctctaagagcagactgatggtgtcgatgtggacaaaatggtcctccaggtgtactgccctctcccctgccccatgacaatcgacacccaatacattgttatccaacagaatatgacaatcgccacactcaaaggccctacgaacacattcatgctggtgatggctgctaggagtcaacagaaatagcatcacaacctctgcccctgctcaagccactgtgtttattttaaacacaacccccttctctactgtcacctctcccanaacccacanactcaagagtgtattttgctcttcanngttttccctggacttctcgaacagactcaagtggcangaggagaggagccagttccatgagcagcagttctctgcagtcacccttgggtgtgctgcattctcctcgttgcgatttctggctcgagggncaattccctatatgagtcgtattaatcgtatctgtcatactgttctgtgtgaatgtatcgctcaatc

SEQ ID NO: 122613 - DNA, 1051 bp, Homo Sapiens
  misc_feature (1027)..(1027): n is a, c, g, or t
tgaatgtatttctgaaaaacacccagagttttattaccattaattcagcagaaagttcgttgcactgaaattatcactctggctcattcagctcaaagactcttcgctgctcaaacacatagctgtgtgggccatggaaatacatgctgcaggaaacagcctctgaacatcgcatccaagaaaaatagggcaatttccaaaacacaaaggcaaaaaatacaaaacttgtttaaatatttcgttgcactcactaagcacaaaagttcatattttggggggactgtagagagctttaaagtatacagagggacttacgacatgacatctcttaagggaacccgttctcttttgacctcattagcatgacgtgtcctgcactatgctgaggaagaatgtgcagagagagctccaagtctctccacagaactccagggcagtcttcctctggtttgccatatctgggtcctccacacactcgggagctttggtggccatggtctgggtcactgctaggctagagggggtggtctctttgcccttgatgtgctccctgggggacatctctgttttctccttcctgggctttgtgttcccaaatagagtggagctgactagcttaagactggattctggaaaatcctttctgcacactctggttttcacagctgtcttggaatatctacagatgtctttctgtgagcgcagattccgggcaacttgtttccaatagactctctcatccttgagctttaggcatgaggttggattgccagcaaagacacagggaaattcatggtccatttgagtgcactcaaccttgagagagatgccctcctcctgctcagtagcagccatctgcagttggcttggtctttggtgacaacttgcctttgttccggggctgcttttctgcttatctgggtgttgccagagtgtccttttgttctgagacactttgctgtgaagtccatctcacttttttcctcgggcgattcttgcctcgagggcatttccctaaggagtcgtntaattcgtagcatgtcagctggtc

SEQ ID NO: 122614 - DNA, 1959 bp, Homo Sapiens
  misc_feature (316)..(328): n is a, c, g, or t
  misc_feature (469)..(477): n is a, c, g, or t
  misc_feature (641)..(729): n is a, c, g, or t
  misc_feature (731)..(731): n is a, c, g, or t
  misc_feature (1749)..(1792): n is a, c, g, or t
cccgcgcctttttgcggctttttaaaagcgtggtggcccccacatatttgggggccacactttttgtttgtcggccgcccccggttgttttccccccacccgggggggcccaaataatttatttcctcccacaaggggcggaccaaagagggggtttgggaaaccccccgctgggctcggaaattttcgagggttttcaccccacaccccccctttttttgcgaggggggcttttcccaatttttggcgccccggaaaagtcctctaaaaagggaattttcccccccggtttcttttccaaagggagggcgccacnnnnnnnnnnnnnccgtaaatattgaattttttgaggctccgccttgggggcccccctggttggaaagaatcccccgaacatggccctcctcggaacttccccattttggggatttgtttcaaaagaacccttcgggtttcccccccgggccgnnnnnnnnnatcgtgtgaggaattcccaaggccctttgttcattgcccccgggtttttccttgggaaaacacgctatggcccatgtttcactttcccttcttggggcccggcgcgccccaacggaatggtttagagaaactttttcaagggccgagggcggccgcccaagaannnnnnnnnnnnnnnnnnnnnnnnnnnnnnnnnnnnnnnnnnnnnnnnnnnnnnnnnnnnnnnnnnnnnnnnnnnnnnnnnnnnnnnnnantaaagagcccactctgctttatttacaacacgcaggctgtctgtacaaacagcggccgatattattaaaaacaaaagaggtgagtgagaatcgtcacctttctgctttccttcctcacttggccaggctctagtactccacctttgagctgccatgcccaataggggaagtccaaaattaaaaatacaaccggtgtagaagaaaataaatggggagtgaaatagaagaaaagatgagggaggggagtgctaatatttacactagagttttatagacaactgtcccattccatcccaattccaatcctgacccagaaagtgatggtggcaggtccaagagacagagattatgtgtcgggacacagacagcctcccatccccaaccgtaatggattcaatttcaagtccacagagtggggaggaaggatagggtgggaaagtgagacactcattttcaaacaagtctcccttgagaattcctgccttgaagtgcagacagtatccaagctccaggggataggctgaggaccctgaggctcagttcccaaatcatgttgtcatttggaagttccaggctaaagttggtgccatcagggctctccagatttgggaggcccccctaaccgccgggcctctggcctcagttccttgcatttctggcaataaaagaagtcggggacgttggtcttcttaatcttagcacaggagaggtggatccacgtcccacacaggctgcactcaatcatgggccgccctgcaaagggctttcgacagtaacatgtgatcagatcccatgagtcatcacctgattctaccatgatgtcctcgtccatgacccgcatctcgccttcactggagctggcatctccatcttggcttgtttcagtgctgcccacctccttgctttcactgtcagcaggagggactccttcagggtgcactgtggcagggggcctaggagcctcagggggtgttggcagcacagggactggggcttcaccccctaccactgttgccannnnnnnnnnnnnnnnnnnnnnnnnnnnnnnnnnnnnnnnnnnngagtctgtatcactggggggtgcctggggaggcccaggaggtgggagtctatccccccgttctgccttttttaacttccgcttcgacgcgtgggtcgacgatatcccgggaaatccggaccggtaccagcctgcttttttgaacaaactgttcatattcacaagccc

SEQ ID NO: 122615 - DNA, 586 bp, Homo Sapiens
ttttttaatgtataactgaaatgtattttttcatttataaagtataagttatctttaataacacacatgtacaataaataattcatatatgaaaattctcatcagatagcttcatgctttgtcagtggaagaagccacagcaccagggaaatcagaaggcaatcttagtaactcttctacctcttcttgcagggcttctgctttttcatgcaacagcatctttgctgatgaaacaatttgcttggcttggcgtcttgataaatgatcaattgtccttacgagcacttcaggatttgcattagctaagtgcattagacttttgtaacctgcactgtataactgttttgctcgaccctctaaaactccagtaacttccatgagagggattaattctgcctttacacagtaagtcagcttcttggtaagttctaccaaaagggctctgtaaacccaaaactcctcaagctcctcacagaaatgtaacacacaagatgagaatgaggcagttccagtgagaagattttgtatatatcctcgaggcatattaaatttttcagatacagtccaaatgttggtctctttgagc

SEQ ID NO: 122616 - DNA, 768 bp, Homo Sapiens
  misc_feature (643)..(643): n is a, c, g, or t
  misc_feature (673)..(673): n is a, c, g, or t
gggggagagaagtttattcatacacaaaggggcacgccaagggcgccagtctagggttacaccacgtgaaacagtagaaaattcaaccaggaaagcaggaaattcagtgaagctactacaaagtggggcgagtggactgaaaactaggattttccttgcaagtttcttttcataaaatttttactttatgaattaaatacattgagaaacagtgaaaatatatttacagtcatttgaagtgggcactactaacatatttaatttaaaaaaatctttgctgtttctttgcctgtttctttcaaagagaattttaaatatgactttagcttttaaaaaatacaataaggaaataattacattcttaatatgaaaacattttacaacgtatcaccatggtcaattaattctgaatatcacttaaaagttgatgttaaaatgtaaagtgaatatttcctttcttgttagaaaatcaaaaagattatctcattaaaaacacctttggtcctaagacttatgatctgaagatgtccttttgaaagtatcttccatggctacactaaaaagacccggtaacacttgtgcacggtgaagttgagattttctggaagacaaagccggaactatttcatgaactacgggcganaggatgcgtctgacgcccaccacttcctgngtgcagtttccttcttttacagacgccctgctatggcttggggactcacgaatagaggtgactgctttttctgcagtgctgtgccacgtatttac

SEQ ID NO: 122617 - DNA, 2155 bp, Homo Sapiens
  misc_feature (76)..(95): n is a, c, g, or t
  misc_feature (250)..(259): n is a, c, g, or t
  misc_feature (2081)..(2115): n is a, c, g, or t
ggtggtaacgacggccagtgtcatgctcaaattatcctcactaaagggaatacgcttgcggccgcggctgtaggcnnnnnnnnnnnnnnnnnnnnactggtcataccacttttatttatattgttatctatgttacattgtttattcaatatagaaaaaatatgaatacattcatagtattctcttttaatttggtaattccacattgtcaaatattgactgtttttatattgggtgtcctacccaattnnnnnnnnnngaggaagaatgacctggcagacagttcttgttgtgccatgttattgatataacagcaatatcatatatgtctctttttttaaacacctagttttgaaaagaccaatgattaaactactgtttactggctcagggaaatgttttaagaaatagaaattaattcattctttccccaagaaaaactttaaggtaaacatcttaaaacacctaagtgatgaaggagaaaatttgtattccttaaaaaggggtcagtgctgaaagaaaattgcatggtagaccccactgcacaacggttctgcaccaaaagaaaaatgaggaccatattaacataattatgttggagagaagaaaaacccacacttagaagtcaggtttcttttaaaactccttgttacaaatagaatcaatgattatatctcagacataataatgggtcaaactcacaaaatcagtgctacaaaatacagtatttttccatcacttttagttgtaatgtacactatgtacagaaagataatactacctattttaaactaaatatagatgaacaaacagcttgttaaaaaccagaatcagggcttataaatagtgcagaaaatgcaaacgccaaaaaaacgatgcctcctatgattgtcacagttctgacagagattttctgtgctatcattcttcctccaattactgccaatcccgtgcacaggcagtgccccacagttccacccacggctacaccataggggtcctctctagctgccaatacaattgtagttagttgagagcgatcaccccattctgctaagaatgttaatgtaagagcttgaacaaaaatgggtgaaatacaatgccaccactttttctgaggtactgttatgcttgtacccgtttcaacatctcccggtccatttaaaagtttggttcgttgaaattcttcatctttcttctttaattcagcttgaacttcttccagttcctcttgaccctcatcagggctcatctttaagccttcccgaagcattctaatgccaaaaatggcaaataatacagttgaaacatagtatgtatagaccctggggatgactgtggtggcatagccaaacaaaactgacaagcatgtcattagtcccaaggcaagcattgcaccagccagcacggtcaggcggttatagcgcattgccatgatggctgctataaaaaatgtcttatcacccaattcagatacaataataactgatatggcagcgacaaatgcatggataaatcccaaattagtttgggtagcaggatcttctttattggtatgaactggagctgctggtgtaaatattttctcgacccgggccggctcggggccctgcacagccacaggctgcggctgcagctgctgggccggcgccggcggttctttgttccggtggctaaggtcttcatctgggccggcccggaccgcagccggggcccacagcagcggaaccagaaagagcagaagcagccggggcgccgatgcgcgctcgttccctggagcacgcgccgccatcccgcctgccgggccgcacgcgcacgggcgccgcaagaggaagtgccggcgacgggaagcctcgaccccgaacagcctccgcggcgcgatcctcactgactcgccgccagccgccgcttagggagcagtcagcaccatccgggaggtgcaagcagcgggagtgaggtgaggggcaggccgaagtccgcagccccggctcggcgcccgtcctctccggcggcggcataaactggagtcccccggccgtaatggccgaattcccgggcatatgtccggtaccgtcgactgnnnnnnnnnnnnnnnnnnnnnnnnnnnnnnnnnnncggccgcttcctcgctcaatgactcctgcgctcttcgtta

SEQ ID NO: 122618 - DNA, 797 bp, Homo Sapiens
  misc_feature (176)..(187): n is a, c, g, or t
  misc_feature (337)..(351): n is a, c, g, or t
  misc_feature (517)..(528): n is a, c, g, or t
  misc_feature (667)..(667): n is a, c, g, or t
gtcacagaacactgtttgcagtagaggaaactggcattgcagtctggtggtataatggcttgtccacataaaccagtacatgttcatcctttagcgcaaaaagccctaatggcgcgtaccctattaaaattcaggacatctccaatattctctctctctgtttttctttgtcatcnnnnnnnnnnnnaaataaacattttcaaggtttgtccaaaagaaggccatataggttcttggctagcggaagacaattcagaacagctgttgcacacttggactgtcaccttctccaggctggcagttgatatcttattttttttccaactcatttttattnnnnnnnnnnnnnnntgctccaactatcagctttacaaaatctctaagggaaacacaagagcaaggtgctgaggtaaaaacacctgaggtagcttcttctgtgtgtttttctcgttaaaaaaatctgtgaatttaacgccctgggccaacaaccttggtaaatttctactttcctccacannnnnnnnnnnnaaagaaaggaatcattttgctgaatattgatggcttatacacacaaatgcaaaaagacaaaatacattctttcattgtggaattttttctttgtttggttgattggttggtttggtgggttcctgttttcctcttccanaacgctaggacaagtaccattgactcttgttcttttgagtaaccaagtgtaagttgagccgacgcgtggtcgacgatatcccgggattccggccgtaccagcctgcttttttaacactgttatatccatt

SEQ ID NO: 122619 - DNA, 509 bp, Homo Sapiens
aactttttggtagggatgagtctttctagctactctaagacacatctgatcaataaaacgcccatcccggagcagcatcttggccctccggagatcaacgtttatagcgggctcctcttggactctccctctccctttccctaaaggagcgggcaagaccaggcctcaccggaaaacagcgcagccgaccgccctccaccccgggagcaggggccgggctcccctcccccagccgaggccggcggagtgcggcgctttcaaaggcctggagcctggtactcggcgcagccggccctgcagcctcgctcgccccatcccggcccgctcacctcgacccgggccggctcggggccctgcacagccacaggctgcggctgcagctgctgggccggcgccggcggttctttgttccggtggctaaggtcttcatctgggccggcccggaccgcagccggggcccacagcagcggaaccagaaagagcagaagcagccggagcgccgatgcgcg

SEQ ID NO: 122620 - DNA, 798 bp, Homo Sapiens
  misc_feature (250)..(280): n is a, c, g, or t
atcatattttttctctttaaatcattttgccattctccagggtatatcctacggggaagggtaggggacccatggccagccctggctcctactgccatcctcccaagtgaacttagcacagagactggggaggggttgacccccactccagaacaccaatacctctttcaaacatgacagtggagtgaggatcagaggatcagccccctcccgtttcctggcacagaggaaggacagttacacttagaannnnnnnnnnnnnnnnnnnnnnnnnnnnnnngtctataaaaatttatcacacttgatcaggactatccccctaccctttcacttgaccccaagggaatagggtcctgccctgggcccattccctgggtcttgctctcttgttgcctctctggccctgagcctgatcagtgtgagacagaactcagcattactgtccaccatgccctgcagcgaacagaccaggtgctgaagagtgatgcctatgggctctgacacccacaaatcctcgtggataacgggaagcccctcccaccccacaagtccctggagcctgagccagagtcagatcctgtactgcagccactcgaatcgccaaatcatttgcgcctgccaaagatggacttcttgccagggttctttgtcgcccacacttaaaccaatgaggagccggggcttctgctcctcttcctgctgatgcatgatcaagtcctgatgagtatctagcttgtcccggacctcagagcctgatgcagacttcagccttagcttctctatgattacctgggcaac

SEQ ID NO: 122621 - DNA, 1266 bp, Homo Sapiens
  misc_feature (64)..(65): n is a, c, g, or t
  misc_feature (1060)..(1090): n is a, c, g, or t
ggggccccctgttgggggtatctctgttaaggagcattttgaggtaaatggtggtgcctctcannccatccagctgacacaccagttcttccacagaatgatgggctttttctttcctggccgaagtgtggaagatgatgaagttggtgatgaagaggataagtccaaactggtgactactggaataccagtggtgaagcctcggcagctgattgcaacagatgatgcagtaccactgggccctgggaagggtgtggcacagggtttgactcggagttctggggtcagaaggtcatttcgcaaatcgccagagcaccctgtggatgacattgacaagatgaaagagcgagctgccatgaacaactccttcatctacataaagattccacaggttccactgtgtgtcagctacaagggtgagaagaacagtgtggactggggtgaccttaacctggtgctgccctgtctggagtaccacaacaacacatggacatggctagactttgccatggctgtcaaaagggacagccgcaaagccctggttgcccaggtaatcaaagagaagctaaggctgaagtctgcaacaggctctgaggtccggggaaagctagaaactaaatcggacctgaacatgcaacagcaggaagaggaggagaaagcccggctcctcattggtttaagtgtgggcgacaagaaccctggcaagaagtccatctttggcaggcgcaaatgatttggcgattcgagtggctgcagtacaggatctgactctggctcaggctccagggacttgtggggtgggaggggcttcccgttatccacgaggatttgtgggtgtcagagcccataggcatcactcttcagcacctggtctgttcgctgcagggcatggtggacagtaatgctgagttctgtctcacactgatcaggctcagggccagagaggcaacaagagagcaagtcccagggaatgggcccagggcaggaccctattcccttggggtcaagtgaaagggtagggggatagtcctgatcaaggtgtgataaatttttatagacnnnnnnnnnnnnnnnnnnnnnnnnnnnnnnnttctaaagtgtaactgtccttcctctgtgccaggaaaacgtggagggggctgaatcctctgatcctcactccactgtcatggtttgaaagaaaggtattgggggtccccggaaaggggggggtcaaaccccttcccccaatcctccgggggctaagttccccttggggaaaggatg

SEQ ID NO: 122622 - DNA, 891 bp, Homo Sapiens
gcagtactattatttaattagcagcaaattaatattttaaatctggtatatggacaataaatagtctgcttctttggatgtgaatgtttaaaatgtagtatcactgcagcttcataatgtgattgctattttacagagcttatacacacacaaaaaatatgatctttgtctatattttatacaaatacaacagtagtttgtgaatacattttaagtacacgatatacatgataagccacttgatttcccaatattacagaatagcaattttaaatgcaataaaaatatacaaaattcggcctggaatgcagatttttttcttttctattttgactcaaaactttatcattagaacatttttagagtactagtccaaacactttttcattagctaaaaatacaatttcagcagtccagcttatgttcaggtatgatgcaatccgtttcctaatggattcccagtttttgttaaattcaaagggctgttagtaacatacagcatgttcttcactccacaccctattataaagcccactttccattctgagttacagtcaccttgtggacaaaagctgggtttgttctggtaacatttgcatgtccgagatctccttttgcaagtgcacatgaatacattgtggtggtgtaaaagtttgttaatgacaaattaagtcacagtataaaaatatattgtacacttttacacctaatgtagtcctttttctatggataaaaaaatacgactgaatgagacagagaagtttgtagcaccatgaagagttgtagcccaagttacattagcagcatgatccaatataatattgaaggagtgtttctgagaagataaacattcattctggttcatctgtaccactgaagcttatataatga

SEQ ID NO: 122623 - DNA, 1847 bp, Homo Sapiens
  misc_feature (703)..(703): n is a, c, g, or t
  misc_feature (854)..(871): n is a, c, g, or t
  misc_feature (1574)..(1591): n is a, c, g, or t
ttccctagaacttgcgcgtgctgggggaggcgcagaccaaggcgcagcatcagcaggcactgtcctccctggagctgctcaacgttctcttcaggacctgcaaacatgagaagctgaccttggacctgacggtgctcctgggtgtgctgcaggggcaacagcagagcctacagcagggggcacactccaccggctccagccgcctgcacgacctctactggcaggccatgaaaaccctgggagtccagcgccccaagttggagaagaaggatgccaaggagatccccagtgccacccagagccccatcagtaagaagcggaagaaaaagggattcttgccagagacgaagaagcgcaagaaacgcaagtcagaggatggcacgccagcggaggatggcacacctgcagccaccggcgggagccagccccccagcatgggcaggaagaagaggaacaggacaaaggctaaggtcccagcccaggcaaacgggacgccaaccaccaagagtccagcccctggcgcccccacccggagccccagcacccctgccaaatccccaaaactgcagaagaaaaaccagaagccgtcccaggtgaatggagctcccgggtcccccacggaacctgcaggccaaaagcagcatcagaaggctcttcccaaaaagggggtcttgggcaaatcaccactgtccgcgctggcacnggaaaaaggcaaggctgtctttggtcatcaggagtcccagcctgcttcagagtggggccaagaagaaagcacaggtgaggaaggcagggaagccctgagcacaggtacgggcccccctcagcccctgcctccatctgcctgagacgcctannnnnnnnnnnnnnnnnnaaaccatgattttaatacgcaagctgtttctaaggcgctgccactggggagggtggctgttgccgcctgcccgggcatcctgctctggcaagcacagcctgagccattcctgcaggggtcccagggtgcagagacctccccacccccggttctgggctgggaccctggctccagggccatgtccagggctctggtgtttgcctgggttggtgcaggttgatgtgctggctgcaggcaggtgtgaccatctctcgtgcctgccacctctttgcccccaggcttttttgctgtgagggagccacccagggggtgatttaaataggtttatttcttcatttacaagaggaatatatttggcttctctcttaagactctgagattcacaatcagcagctctaaaaaataaaggagcagtttggcttccggaaggaagaggaggcaacactcggacctggttcttgtacaacaagaaaacatcgctggggccccgctgaggctggagtggggggtggaggctggtctttggaggatgccacccccaccccatcctcttgtcaggccctcggggtaccccagagcttggtgggtgagtattccacctgcttacacaccactgaagccacagccagccagtaactaaggggcaagaagagcattgtccaagctggctcttggggggtcccccattggccacaaggcctcnnnnnnnnnnnnnnnnnngcaccagaaccaccttgattgcagcagaagtgcagggagtgggtgacgcagggggctaagctcccccaaagcgggttggggctggtgtgaagttggcagctgcatcctggtgtgtgcatggatgggaggtgggtgatcgaaggcctggcccctggggtcacttggtggaatgccagcagccagtgtttgggtacgggccgcctctctcggggcctcagcctcagctctggggcaggaagctttgtggatagctgct

SEQ ID NO: 122624 - DNA, 577 bp, Homo Sapiens
ttttccttccggaagccaaactgctcctttattttttagagctgctgattgtgaatctcagagtcttaagagagaagccaaatatattcctcttgtaaatgaagaaataaacctatttaaatcaccccctggtggctccctcacagcaaaaaagcctgggggcaaagaggtggcaggcacgagagatggtcacacctgcctgcagccagcacatcaacctgcaccaacccaggcaaacaccagagccctggacatggccctggagccagggtcccagcccagaaccgggggtggcttctggtttttcttctgcagttttggggatttggcaggggtgctggggctccgggtgggggcgccaggggctggactcttggtggttggcgtcccgtttgcctgggctgggaccttagcctttgtcctgttcctcttcttcctgcccatgctggggggctggctcccgcggtggctgcaggtgtgccatcctccgctggcgtggcatcctctgacttgcgtttcttgcgcttcttcgtctctggcaagatccctttcgtttccgcttcttactgatggggct

SEQ ID NO: 122625 - DNA, 614 bp, Homo Sapiens
  misc_feature (404)..(434): n is a, c, g, or t
tttttataagaaaacattttgaagcctttatttacaaaagctttaaaaacaaataataccctctgttttgcaaataatgttttgtttaaaaaggaccacccagttacagcactgtaatatcatgaataaagaatgtacaagggagacaaaccaatgtgactaacatttggagatttgctaatattactgattgaagtgtaggtaacacacattataacttgtagtccatcatttcggggtagagttaatgattactgtaaagtcttcctacacatgctctggtctggtcacatattctgcatggctaagtatttcacagtctcttttgtcaatatatataaaatagattgcaaagatatacacaaaaaaataagcattacactcctcaggtaattttatcagcnnnnnnnnnnnnnnnnnnnnnnnnnnnnnnntttgttgttttgtaccaaatctctccattatttacctttgtagcaactatgaaagcacaatttttgtcttctaatttaatttggtacaaaatatacctaaagacttatctttggatttttaataaaattgatttgtgtaaccaacaaatcaagagcatcataagaatggctacaaaattt

SEQ ID NO: 122626 - DNA, 1548 bp, Homo Sapiens
acgagaaaccatcaggactaatgaggctttctatttgtccattaacagacttgagtgaagtcataatctcatcggtgttgattttgaaatccattggttcatctccataatacggggcaaaaccgccagctttttcacctccaatcccagcaatggcagcggctccaacaccaccacagcaaggaccaggggcaccaggaggtccaggagggcctggttgccctgggtggcctggggagccctcagatcctctttcacctctgttacctcgaggccctggtggtccaatgggacctggatgtccactggttccatctttgccaggaggtccactgggtccaacaggtcctctggggcctgcaggtcctggactgccgattgcaccctgctgaccagcagggcctggagaacctggggcacctggattaccagggaatcctcgatgtcctttgatgccagcagctccacgttcacctgtttcacctttgtcaccacgtgggccttgaggaccaggagcacctcgggaaccagcaggaccgggagcaccagcagggccagcagggccactttctcctctgtcaccactctttccagctggaccgacaggaccaggtgggcctggatgaccaggagcgccaggggcaccaggagagccattttcaccacgatcacccttgccaccaggagatccatctcggcctggaagaccatctgatccagggtttccatctcttccaggttcaccagctgtaccagccagaccaggaagaccctggggtccagggggaccacgttctccactgagaccgttagctcctggtttcccactttcacccttgacaccctgagggccagggcttcccctaggacctggcatgcctggtggtcctgcaagaccccgtgctccagtgatcccagcaatcccaagtgggcctggagctcctggtgggccctgggcaccaggcgatcccttctctcctggttggccagcatcaccttttggtccagacactccagggctgccaggagcaccagtgttacccgcaggacctgggggcccatccttgcctggagaaccgctgggacctgggggtcctgggttaccattactaccaggaggaccaggaagaccacgagcaccagggaagccagcagcaccaggtccaccaggactgccacgttcacctttgacaccttggggaccaggaggaccagcaggtccagaacctccagtgggtcctgcaactccaggagggcctccttcacctttctcacccggagcccctctttctcctttaccaccaggttcaccattctgtccaggagcaccagggaaaccagcaggtcctggagggccagtttcacctctctcaccagggctaccacgaggtccagctatacctggaagtccgggggcaccaccttcacccttatctccaggctggccagctgggccaggaggaccaataggaccagtaggaccccttgggccatctttccctgggacaccatcagcacctggaccgcctggttcacccttgtcacccc

SEQ ID NO: 122627 - DNA, 2112 bp, Homo Sapiens
agcgaggcctgggtggcgattcggcacgagggttgaatgcacttttggtttttggtcatgttcggttggtcaaagataaaaactaagtttgagagatgaatgcaaaggaaaaaaatattttccaaagtccatgtgaaattgtctcccattttttggcttttgagggggttcagtttgggttgcttgtctgtttccgggttggggggaaagttggttgggtgggagggagccaggttgggatggagggagtttacaggaagcagacagggccaacgtcgaagccgaattcctggtctggggcaccaacgtccaagggggccacatcgatgatgggcaggcgggaggtcttggtggttttgtattcaatcactgtcttgccccaggctccggtgtgactcgtgcagccatcgacagtgacgctgtaggtgaagcggctgttgccctcggcgcggatctcgatctcgttggagccctggaggagcagggccttcttgaggttgccagtctgctggtccatgtaggccacgctgttcttgcagtggtaggtgatgttctgggaggcctcggtggacatcaggcgcaggaaggtcagctggatggccacatcggcagggtcggagccctggccgccatactcgaactggaatccatcggtcatgctctcgccgaaccagacatgcctcttgtccttggggttcttgctgatgtaccagttcttctgggccacactgggctgagtggggtacacgcaggtctcaccagtctccatgttgcagaagactttgatggcatccaggttgcagccttggttggggtcaatccagtactctccactcttccagtcagagtggcacatcttgaggtcacggcaggtgcgggcggggttcttgcggctgccctctgggctccggatgttctcgatctgctggctcaggctcttgagggtggtgtccacctcgaggtcacggtcacgaaccacattggcatcatcagcccggtagtagcggccaccatcgtgagccttctcttgaggtggctggggcaggaagctgaagtcgaaaccagcgctgggaggaccagggggaccaggaggtccaggagggccggggggaccaacaggaccagcatcaccagtgcgaccgcgaggaccagggggcccaatggggccagggagaccgttgagtccatctttgccaggagcaccagcagagccagggggacctcggggaccagcaggaccagaggctccagagggaccttgttcaccaggagagccaggagggccagggggaccctggaggccagagaagccacggtgaccctttatgcctctgtcgccctgttcgcctgtctcacccttgtcaccacgggggccttggggtccggcggggccacgggcgccaacagggccgacaggaccggcgggaccagcaggaccagtctcaccacgatcaccactcttgccagcagggccaacggggccaggggcaccaggagcaccaggagcaccagggggtccagcggggccggtctcaccacggtcacccttggcgccaggagaaccgtctcgtccaggggaaccttcggcaccaggagccccctcacgtccagattcaccagggggtccagccaatccaggggggcccatgggaccagggggaccacgttcaccacttgctccagagggaccttgtttgccaggttcaccagaggggccaggaagaccagggaagcctctctctcctctctgaccaggcaggccgaccacaccacgctgtccagcaataccttgaggcccgggagtaccaggagcaccagcaggaccatcagcaccaggggatcctttctcgccagcagggccagggggaccagggggaccaacttcaccaggacgtccagcagggccagtctcaccacggggacctttgccgccttctttgccagcaggaccaggagggccagggggtccagcatttccagaggggccaggaggaccgactcggccagcagcaccagggaaaccagtagcaccagggggaccagcgctgccgcgagcacctttggccctcgtgccgaattcggcgcgccgtcgacttcatactctctcaagac

SEQ ID NO: 122628 - DNA, 1642 bp, Homo Sapiens
ccaggggatcttttctcgccagcagggccagggggaccagggggaccaacttcaccaggacgtccagcagggccagtctcaccacggggacctttgccgccttctttgccagcaggaccaggagggccagggggtccagcatttccagaggggccaggaggaccgactcggccagcagcaccagggaaaccagtagcaccagggggaccagcgctgccgcgagcacctttggctccaggagcaccaacattaccaatggggccagggggtccagcgggtccggcagggccagggggaccagcatcgcctttagcaccagcatcaccaggttcgcctttagcaccaggttggccgtcagcaccaggggggccagcaaagccagcagggccggggggaccaggctcaccacggtctccgggggcaccacgagctccagtgggaccagcagggccgctgggaccactttcacccttgtcaccaggggcaccagcagggccaggaggaccaatggggccggtcagaccacggacgccatctttgccaggagagccatcagcacctttgggaccagcatcacctctgtcacccttaggccctggaagaccagctgcaccacgttcaccaggcattccctgaaggccaggggcgccctggctaccgggagctccaggggcaccagcatcacccttagcaccatcgttgccgggagcaccgttggcccctcggggaccagcaggaccagggggaccttgcacaccacgctcgccagggaaacctctctcgcctcttgctccagaggggccaggggcgccaaggtctccaggaacaccctgttcaccaggtttgcctgcttcacctggaggaccagcaggaccagggagaccctggaatccgggggagccagcagggccttgttcacctctctcgccagcgggaccagcagggccagggggtccctgagctccagcctctccatctttgccagcaggaccgacagcgccagggggtccgggaacacctcgctctccagccttgccgggctctccagcagcacctttaggtccagggaatcccatcacaccagcctgaccacgggcaccaggtgggcctgggggtccggggcgaccatcttgaccggcgggaccaggggggccagttttgccatcaggaccagggctgccagggcttccagtcagacccttggcaccaggcagaccagcttcaccgggacgaccagcttcaccaggagatcctttggggccagcagggccaggagaaccacgttcaccagcgggacccttgggaccagcaacaccatctgcgccagggaaaccacggctaccaggtccaccacgctcgccagggggtccgggcaggccagtgggtccgggttcacctcgagctcctcgctttccttcctctccagcagggccagggggtccttgaacaccaacagggccaggctctcccttagcaccagtgtctcctttgctgccaggagcaccaggttcaccgctgttacccttgggaccaggagggccgccggggccctggggtccagaggggcctcgggcaccagggaagccaggagcaccagcaataccaggagcaccattggcacctttagcaccaggctgtccat

SEQ ID NO: 122629 - DNA, 2053 bp, Homo Sapiens
ttttaatatgatattttattatgggtgtctgtaaggaaaaaaaagatcaacaaccacatacaagcttacaaagttaaatttcaacacattctctatgctagtgtgacaaaagcagccccataatttggtttttattgttgacctttacaggatgaaggaggagaatcccctgtggcatgccaatgaatctttctgatgggagacatgtacagattttgtgcatttatgttctgaatgcaagtcaacaattctgatctagagtttaaaagtgaaagtacattagcaccataacatgcgtctttaaagccttcccaaatattagtaatcttgaccagcaatgacaagaaaaaagaggagcacctttacaagcagttgatatccaatattaaaataattgtggctttaaaaatatttctttaaattcttgcattacacttttctttttaaaccaatcttccaggagattaatcaatgaaatttataagttttatcaacgtataaaatttttttcatcttctgggactcatagaatacaatctgtgtttctgaccagttgaggtagttaaaatagggagggcttttctaatttcgtatttgactatttcagaaagaaaggttatcttttactggtgagcacagtcattgctctgcagatgggctaggattcaaagaatataacacagtgttgttatcataaagagtgttgaagtttatttattatagcaccattgagacattttgaaattggaattggtaaaaaaaatgggactaaagcatttgaattgtatttggtggaacagcaaaaaaagagaagtatcatttttctttgtcaaattatactgtttccaaacattttggaaataaataactggaattttgtcggtcacttgcactggttgacaagattagaacaagaggaacacatatggagttaaattttttttgttgggatttcagatagagtttggtttataaaaagcaaacagggccaacgtccacaccaaattcttgatcaggaccaccaatgtcatagggtgcaatatctacaataggtagtctcacagccttgcgtgttcgatattcaaagactgttttgctccattccccagtgtgtttcgtgcaaccatcctccagaactgtgtaggtgaatttgctatttccttcagccttgaattcaccttcatttgaccccatcagcttcagggccttctttacatttccactggcctgatccatgtatgcaatgctatttttgcagtgatatgtgatgttctgggaagctcggctggagagaagtcgaaggaatgccagctgcacatcaaggacatcttcaggaagttcaggattgccgtagctaaactgaaaaccaccatccatggactctccaaaccaaacgtgtttcttctcagcactagaatctgtccaccagtgtttccgtggaacattcaaaggattggcacttatgcatgtttccccagtttccatattacagaataccttgatagcatccaatttgcatccttggttagggtcaacccagtattctccactcttgagttcaggatggcagaatttcaggtctctgcagtttctagcggggtttttacgagaaccatcaggactaatgaggctttctatttgtccattaacagacttgagtgaagtcataatctcatcggtgttgattttgaaatccattggttcatctccataatacggggcaaaaccgccagctttttcacctccaatcccagcaatggcagcggctccaacaccaccacagcaaggaccaggggcaccaggaggtccaggagggcctggttgccctgtgtggccacatctctcaaaagcccctcacagccccaggcaccaaaagacagaaaggtccccaccaggaaggccgagaggtcggtcagctgcattgaggtgaccccagtggacaggagttggcaccaaatggtagtgagagccctatcctcccaggagtccaagccagagcaccagggcttggcagagcctgagaacgaccagctcccggaggaggggatcctct

SEQ ID NO: 122630 - DNA, 797 bp, Homo Sapiens
aggggcaccaggagcaccaggagcaccagggggtccagcggggccggtctcaccacggtcacccttggcgccaggagcaccgtctcgtccaggggaaccttcggcaccaggagccccctcacgtccagattcaccagggggtccagccaatccaggggggcccatgggaccagggggaccacgttcaccacttgctccagagggaccttgtttgccaggttcaccagaggggccaggaagaccagggaagcctctctctcctctctgaccaggcaggccgaccacaccacgctgtccagcaataccttgaggcccgggagtaccaggagcaccagcaggaccatcagcaccaggggatcctttctcgccagcagggccagggggaccagggggaccaacttcaccaggacgtccagcagggccagtctcaccacggggacctttgccgccttctttgccagcaggaccaggagggccagggggtccagcatttccagaggggccaggaggaccgactcggccagcagcaccagggaaaccagtagcaccagggggaccagcgctgccgcgagcacctttggctccaggagcaccaacattaccaatggggccagggggtccagcgggtccggcagggccagggggaccagcatcgcctttagcaccagcatcaccaggttcgcctttagcaccaggttggccgtcagcaccaggggggccagcaaagccagcagggccggggggaccaggccctcgtgccgaattcgccacccaggcctcgctacctaggaccgtaa

SEQ ID NO: 122631 - DNA, 1113 bp, Homo Sapiens
ggccactggcaaatacttttattttccaattgataagagagcctccttcatcttcttggtcatagttgggatgaggtgcatgtggtcatccacacacttggtcacacaactgtccagctgctgcttcacctgaagctccttactcccagcatctattgaatctttggctttgtcgttgcaatgcatggtgcaccgggccaggcggtcctggaacttctccagctcactggtgaccaaagcctgggcttgagccagaggcacatggcagcgctcgatgcactggtgcacctgcttcatggaggcctggctgtcctcacaacagctggcgctgcaccggaacatgaggccctggggaggaaagggcagagaggttaggtaggaaagtctctggggacagagatgactatggagcactacaggagttagaaggccacgtggatatttgcacctctctctccactttctgctttcaccttccctgagaatagacaccaggaccttaaaaccaccactggggaaaattatcctcaatgtctagtgtagtgtttcatggtgtccttgctgctagctcatcggcacctgttgcaccgatggttgggtgaacagaggttcgcccgagtgggtgagggtagggtggtctgacgaagccaaattctgaaaaccaggagcctcttccatggggttcagaggtcagcaacctagcaatacaaattccaccagagggcagccgacccactaatcaatgactcaaggggcactatctgggaaacgcatactccgtgagagaagcaggaccgaaacacacagaggcattgcggggctcagagaagaacagtgtagaaacccgcgctgtgtgaagcgaggttgggcgcaagagaagcaggcatgacctggccaacggggaggccggaagtcctcgcctttctggtctttcacgttggcagcgcctctgctgggcctcgggccgctcacctgcatcttccggatgttctctctttccagactcttcaccatggactccaccgcctcctgcacccggagctgctgcagctcagccatggcgaccccgcgctgccccgcggcgctccgcgccggcgcccatatggaatcccc

SEQ ID NO: 122632 - DNA, 649 bp, Homo Sapiens
ggtaaggttgaatgcacttttggtttttggtcatgttcggttggtcaaagataaaaactaagtttgagagatgaatgcaaaggaaaaaaatattttccaaagtccatgtgaaattgtctcccattttttggcttttgggggggttcagtttgggttgcttgtctgtttccgggttggggggaaagttggttgggtgggagggagccaggttgggatggagggagtttacaggaagcagacagggccaacgtcgaagccgaattcctggtctggggcaccaacgtccaagggggccacatcgatgatgggcaggcgggaggtcttggtggttttgtattcaatcactgtcttgccccaggctccggtgtgactcgtgcagccatcgacagtgacgctgtaggtgaagcggctgttgccctcggcgcggatctcgatctcgttggagccctggaggagcaggccttcttgaggttgcagtctgctggtcatgtaggccacctgttctgcatggtagtgatttcgggaggctcggtgacatcagccagaagtcagctgatgcacatgacggtcgagcctgccgcatatcgaactgatcatcgtcatgttgcgaacaacagccctgtcttgggtctccgagtccattcttggg

SEQ ID NO: 122633 - DNA, 673 bp, Homo Sapiens
  misc_feature (528)..(528): n is a, c, g, or t
attgaagcgtaaatattaaccagatcaccccattgactgagtgcaggaacagaccccagaaacatctttatcccagtatcccgggttcccgagagacccccggatgccactggatgatggggccattggaagaaattgttagtcattcaggagtgtggcatgcccctggcagcgagtcccagagccagggtggacctgttctctagcagtacccacggggcaaaagggtggcggttgtttggtactcctccgggagctggtcgttctcaggctctgccaagccctggtgctctggcttggactcctgggaggatagggctctcactaccatttggtgccaactcctgtcccctggggtcacctcaatgcagctgaccgacctctcggccttcctggtggggacctttctgtcttttggtgcctggggctgtgaggggcttttgagagatgtggccacacagggatccgtgtagcctctgtcccccgaggtgggatcccctgagtgatcttggctgccttttccggtcncagggcctgagatcaccgtggatctccggacatccaagagtgacgacaagttcacagtggcgaggtggctttttagctgctgccggaccctctggcctctctcggggagcattttgaggctcctccagagtttctggcgggtctc

SEQ ID NO: 122634 - DNA, 1806 bp, Homo Sapiens
tttttggggagaaaattaaaccttatttatttttaaagtcaaaccactaggaaaatatatcacagcctggaaacagcaaacggacaggctatattataatttcaagtaataagttggtgaaaattcaacgaagttgctatcaaaacaataaggtgccatgctggggcaggaacactgccagctgcacaagccccaggcaaaaatggtatttggtaatgggggctgtctctcctttgctctaagggagtcagctcatcctagcccaagttgcttactttttctcccttgaatttcctgttgccaggggtttgtctcaattgggctctgttaattcagggggctaagtaggcaatgctaggtgtaggctttcattccatatgttctaataaaaccaggttttcccaaatccagtacttcatttactctgttgtaatcaagtagccaactgctcctcttttactgttcattcctagatactagtatatatcacaatcaaaacccccttctcttcaaggggaaagtgttactgcaagattgtcctgtcattttgttacacacagcctcaggggccatcagccagtaattctgcttcccataattagtgtgtcatcacctctcatgtttctgcacagtctccaggctgaaagatgcagcatgtaataattttaagaaatgtacatccacatcttgatgaccagaaatggggatccacaaggaacatttcaaagttcttatccaaactagtctacctcccagttccacatcttaaaatcaacttgtatgcccttgtataaattaccccaaatcaagaaaacaaagacccagaaaactttctttcccttctaagttagtgacctcattgattttgtttcgcagcttatgtaagatggtggggtgacacttttggtaaacaggatgttggcaacaaagagaaaatatctctcctcagactccaccaactctaacgtgccagcctgttagtacctgtgtagtaagcagagtctggtaccttggagggctctggcttgttacaggggagagccttactgccaggacaagcactggccacaggaaataataagctctaaaactctcctgtaatatctctgactcgatttagcaccacttttttccatttcattttttagggactgaaacataaaataaccagtgtccagaggcaagtgacatatgccttacgcttgtggccatccttcatttcttcattcgtaaactttgcttaaaagactaaaattcccaattccttataaaaaatatattcttgccctcagccctgatggccactggcaaatacttttattttccaattgataagagagcctccttcatcttcttggtcatagttgggatgaggtgcatgtggtcatccacacacttggtcacacaactgtccagctgctgcttcacctgaagctccttactcccagcatctattgaatctttggctttgtcattgcaatgcatggtgcaccgggccaggcggtcctggaacttctccagctcactggtgaccaaagcctgggcttgagccagaggcacatggcagcgctcgatgcactggtgcacctgcttcatggaggcctggctgtcctcacaacagctggcgctgcaccggaacatgagaccctgcatcttccggatgttctctctttccagactcttcaccatggactccaccgcctcctgcacccggagctgctgcagctcagccatggcgaccccgcgctgccccgcggcgctccgcgccggcgcccatatggaatcggcgtacgggcccgccccccc

SEQ ID NO: 122635 - DNA, 1201 bp, Homo Sapiens
  misc_feature (84)..(84): n is a, c, g, or t
  misc_feature (129)..(129): n is a, c, g, or t
gacgtggactgggtctggtacatatacagagacagaagacagagcacaggaagcagcacaccagtcaccagatgccacgtcacnttgcaccttggaccagagaccagcagtccagacctccaggggtcntgcactccaggagggcctccttcactttctcacccggagcccctctttctcctttaccaccaggttcaccattctgtccaggagcaccagggaaaccagcaggtcctggagggccagtttcacctctctcaccagggctaccacgaggtccagctatacctggaagtccgggggcaccaccttcacccttatctccaggctggccagctgggccaggaggaccaataggaccagtaggaccccttgggccatttttccctgggacaccatcagcacctggaccgcctggttcacccttgtcaccctttggaccaggacttccaagacctcctctttctccaggcattccttgcagaccaggagtaccagcagcaccaggtggcccaggaggaccagcagcaccctttcctccttcgggaccagggggaccagctccacctctaagtcctggggcccctgccaatccaggaggtccacgttcaccaggggcaccagcatcacccttgcctcctggagctccaggtgcaccggcatcaccctttggacctggttccccaggttttccattttctcctggaggaccacctgtaccaggcaagccttgtaatccttgtggaccagggggtcctgtgtctcctttgtcaccaccaggcccagtaggccctgggggtccctgaggtccagtttcaccattctttccaggaggaccctgagggccaggtcctccagggccacctcgttctccattcttaccaggagcaccatcatttcctttaggaccggggaagcccatgacaccaggctgacctcggggaccagatggcccaggaggacctggtcgaccactttctccttgacttccgggaggccctggtttcccatcacttcctggtcctcctggacttccgggcatgcccctcattcctggacctccagggacgccatctctgccaggttctccagcagctcctctgggccctgcagggcctggagcaccacgctctccagcaggacccttttctcccctcgtgccgaattcggcgcgccgtcgacttcatactctctccccctt

SEQ ID NO: 122636 - DNA, 233 bp, Homo Sapiens
cgtgagccttctcttgaggtggctggggcaggaagctgaagtcgaaaccagcgctgggagtaccagggcttccaagacctcctctttctccaggcattccttgcagaccaggagtaccagcagcaccaggtggcccaggaggaccagcagcaccctttcctccttcgggaccagggggaccagctccacctctaagtcctggggcccctgccaatccaggaggtccacgttca

SEQ ID NO: 122637 - DNA, 412 bp, Homo Sapiens
agtatctagaggatcgccagggacctggaggcagagaagcacggtgaccctttatgcctctgtcgccctgttcgcctgtctcacccttgtaccacgggggccttggggtccggcggggccacgggcgccaacagggccgacaggaccggcgggaccagcaggaccagtctcaccacgatcaccactcttgccagcatggccaacggggccaggggcaccacggagcaccatggagcaccaggtgggtccagcggggccgggtctcaccacgggtcaccctttggcgccagggagaacgcgtctcggtccagggggaaacccttcgggcaccaaggaaccccccttcacggtccaggattccacccgaggcgggtcccagccaaatccccaggggggggcccatggggaccca

SEQ ID NO: 122638 - DNA, 283 bp, Homo Sapiens
catagtgattgcaaaatataatgcaattttcaacaattaaaattatgaaaatatacaaaattgatgggcaacacaactaggcatttgtacattttccattatgtggagaacactacaagtttctctaccttttatctacatcagataaatgatttaaaccaaatgtttgctttggagagtcttaacttaggatctcagtagtataaaaagcaataatttttcagtctgtaaacagtagtcgtgatttttctcctttccttttttaaatatcagtttaccacac

SEQ ID NO: 122639 - DNA, 296 bp, Homo Sapiens
tataaatctatagttttattaagacaaaaactgacaatgtagtatgaagtttacatttaaacaaagtttacacagaaatctaacacatgcctaaaagaattttacaacgtagctctagatgcaagtctagacaatatcaagaactgatggttctcatgactcaagacagagcattttgggtatgttacttattaggatttcttaaaaaattgttttgtgtgtggtgtgtgtgtgttttaaagtgaaccactgcccaatttgaaagtttaatcttctcctgagaccaaggcttttga

SEQ ID NO: 122640 - DNA, 967 bp, Homo Sapiens
  misc_feature (227)..(245): n is a, c, g, or t
ttttcagggattataaatctatagttttattaagacaaaaactgacaatgtagtatgaagtttacatttaaacaaagtttacacagaaatctaacacatgcctaaaagaattttacaacgtagctctagatgcaagtctagacaatatcaagaactgatggttctcatgactcaagacagagcattttgggtatgttacttattaggatttcttaaaaaattgtttnnnnnnnnnnnnnnnnnnntttaaagtgaaccactgcccaatatgaaagtttaatcttctcctgagaccaaggcttttgaaatcactaaactcttggatcaattcagtgaaacttgtgctgtcagtgactgaaccctgccaacaatggtttcagtgttcaaagctcaaagtaaacggctccaagagttttccccactaagagcatgggcccttgtctttccctactgtcttacctcctctaccaccctcttcctcttcctaacacctcagccagtggcttggatgaacaagctgatatttataacttcgttactggaaaagaaagggtcttctaatttcgggaattagcacctctaaggcagaatgatctgcttgtactgtatactctccaataaaagaccttccctcctcgtcaatttccatctccaaaatggcaactttggtaacttatgaacaggcttagtcctttgtgggaacagcaataagtttaggcagggaacaccttggcttataggtttcagactttcacagcttttaaacagtctctcacagtccttatttatggtgccaatgacatttttttaaaggtaaaatattctggacatagaagcaaatcattagttgtctgttcttttccattgcttcaccatttcccctatcaggccccaaatgttaatcaaaatgatgctacccatctccctcgtgccgaattcacacacccaggcctcgctacctagccca

SEQ ID NO: 122641 - DNA, 1252 bp, Homo Sapiens
ttttgaggctaatggttacatcttaatttattttatttctttacaaattaaagatgcattgaaaaataaaccaatgaagagaaatgagaggtccagagcaggggcatcccaggtggggagcaggcaagcctggccaccatcaagcctagcccttgtcctgcccccaagccagttggggttggaagataactgtcagccactcagtcaataccaaagcccaagcggtgtcccagcaggagagaacggcgctccagctgcctctgcctctctccccaacaaccccgggcctggagaagcagtgtttctcgtgggagctcagagtgggatgtgaactggctctgtgaggtattgcaagttgatgaccaggctccctaggctccctacagaaccatccagtgttggggcctctccagctggaaaggaagctggtacctctaccagatcttaatatattttgcaactcagttctccggtcacctctgacagtgtgcctctctatccacggagtgatcatcaatcattgcaggagagagcgagcgagcagtgaaagcagagaaacttgactgctaacctccaggcccaagaaggactgaccacttttctctccaccacctatgggctataccccagctcttgtgcacctatatgttttatccctaatataggaagttgtggatgacactgagccccctgtagtaaccttaggatccccactctttcctgcctgcccctctcctcttgggagactggtccaaagggacacataatattgccagggtctgggtgcctccaaacccccaataccgaatcatatacagtgaactgagaagctacattcattatgacaggattagcaggaaaaagagggtagaatgagggaacaggggcaccttccatcagcaggacatgacagagtggcaggatacttgagcccagaaagaaggtgtctccttatatctccccctccccccagagagactgaggtcagcttacataagatatgttactgtcccaatttctctgacatcctggggtgctttctggaagctagcctgggccctatgccatttacccacttgctttagctcagtagctgccgaatctccttgtgcatatgacagagaaagtccacataagatgctcccccactcagactcttgtcttccaccaggaagtgcttgaacagcatctccatcttgtcttcctgcggacgcgtgggtcgacgatatcgggagaattccggaccggtcca

SEQ ID NO: 122642 - DNA, 1798 bp, Homo Sapiens
ctcagtagctgccgaatcttatgtgcatatgacagagaaagtccacataagatgctcccccactctagactcttgtcttccaccagcgaagtgcttgaacagcatctccatcttgtcttcctgtttcaccacggtaagcttcatgtaccgggatctctgtgcccgtaagctatcaatgaggcctcgaaccttcttggacagtggattatccagaactggcagaacactcaaaccactggtgatctgactgaaggaggagacgctgaaaaggctctggacaacaccctgttggacgcttgctcccacccagaggaagaggttgagcccattctccagtaaatatatatccccattgcttagacgctcttcagaggctcgaactgctggtggttcggtagtactctcaacgggagactttgtcaaaggtaagagccgagggtagaagaagacattggtctcagtcacatccatggaggtaactagctgtcggacataggcacggtcatcagtagtgacttcagctccaggctgcaggacatcactcttcaacacacagttcaggtaaactgggagtagcttcatgcactcaggaaggatcaactgtcctgcagaggaggggctagcacagttctttctgtaacaggccaggatctgggcacactgggtgatgagcgtgtcacgaacagccttcacagggctattcaggactccccgatatgcaaacttggccatgtagttgatgagcgtgtcagtctcacagtttcgatatagatcagccagctgggtgcagcagttcagggccagattatggatgcggagccgacgctgccctgcacagctggtgtaaagcagggcacactgcaggagagctccgctctcttcattgagccgatcgtcatgcttgaactccacagtcactgttttgtccccatctagcccagccagctccacatctgtcgtgttgctcatgtagaaagctccaaagaaatctacagcacggataccagtgcttgtccggacccgcatcacagcatcaaagccaacaaccttctggacatcacgacgcaggtcactcaggaaccgctcctggtcgttctccacctgaaaggaagcatatttgtagacagagccaccagtgagctggggcacaacagagagcgtggccacatccacatactggttagggaagagaaagagatctacacagcagccttgggccacacactctttggccagggtctgataggcacctgtctgaggctggaacagagtcttctccttgtctgtattgatcagcttcctgtcatctctgttcttcagtttccctggggcctctgcaatgggcagggatgtatggaatagaaagagcttccctgcacactcagcagccttcagagcctccattccagcctggataactggtacaaatactgtctctgtttcccttgtgtctgcaaacatttctggaatctgatccaataagctaggtagaaagtctaacagtgacttgagctcctcacagaggagcctaacaagaccagtcctgatggcattgtaggagacgtcaatcatgaagataaaggcaggagggctggggaacttattgttcttgcagtaatctacagtggccaagaattcataagagcccagggatagctcagggcggtcataagcatccacacgtttgccggtatgatccaggtgctgaaaatactgggggggaacatcattgatacagctgcaaaaaccctcgtgccgcctcgtgccgaattcggcgcgccgtcgacttcatactctc

SEQ ID NO: 122643 - DNA, 377 bp, Homo Sapiens
gaagagagaaatgagccaatcccgtgccatgtctattcttttagtgctctctacccattcttcaccgtcttctataccaagcggatgaaacacttcctgcccagcccagctcgacgctgccctgcacagctggtgtaaagcagggcacaatgcaggagagctccgctctcttcattgaaccgatcgtcatgcttgaactccacagtcactgttttgtccccatctagccacgcacgaggttctacactacgtctcgtacgttgtcatatagacgagccagcaaacaaatgtacatgcactgcagagtcagacgtctagacgcagaccccgcaggcacagtacgcatagtgaggagagacggaggaagaggaacgagc

SEQ ID NO: 122644 - DNA, 2039 bp, Homo Sapiens
gtttgaggcaactttaattaaagcaagctacaagtaacgtagatatgcccttttcattttcttttaatatccagagctttcagtgttgtcatactttaattcaaaagtcaacataaaagtttaatacatatagtaagctgaaaagtgttagtgaaatgagctgagctttgcttttccaaacatgtttccaaaagtttattttaaaacacacacatagtgtcagatacaaacgccttttaaccactgtggtggggaagagtaaactgattgcttccaatgatcatctcttccctctgcgtccactgttctcagagtctcagggagtatgagaggatgtgtctcttcctttacttccctgtttgttgtaatgagtccttcgatgagagtaattacgtgaccgaattttccataactatttgttgattattaaagttttgcagtggctggttttcctattggtgtcttacaaccaagcatttcttctaatttggttgtggcaggttcattcacattaaatatacagttattatttatcttcttcttctccactactccgagcctcacacaggctgctaaggcgtttttctgcacatcagaagataatacatcataacattgagaggtaccttgatcgagaagctgacttgtgaattttctgactgcagccaagtactgttcctcactgaagtggtcctcttcttcactcaaaaggtacttgcaaattatctgatagctttccacaaaaggtttaaagagtcctactaaaaattctaacacagtatttcctttctctgtaactaggatgtctttcgtagtcacttgtatggcttcacttttacaaagcaggtaacagccttcttcaaagtcctttagtgtgtttcctggaaggaagatgaactcatctgcaaaaacatcacgtaggaagcgaaagcaactgtagacatcctctttcctgaaccctggtgtcatctgcaatgctactgctactaaggatgggcgcacaaaaatgttgagcagctggttcctataagctgagcacatgaggagagtgatgtgctggagcataagcccatcgaccacttccgagtctccggagtccactttcagaatcacctggtctttgacaaggctggcaatgttggaatgcagaagaatgctggccgggacaacttcttcagcaggtttattatcaggccaaatgagaaaccctccaaatgcctgggttaagccttttagccataaagtcttttccaccagagcatcaaagtccatggatggccggttctgaagcagaacagcaactattagggtccaggggctcaaaaccatgttttcaatttgcagaagctccattttgtaggcaacttcagtgacaaaggcatgcatgtcctcagactgtttctgaggaatgtatcttggaaccaagttatatgagctccgactcatcctcccagctgccaaagatcgaagtgacacaggatctccaaagtacacatggatgcttccaaaattttcagagagaatctttctggctttcagcaacccagttgtagattcttttggtttaggaacccctagaagctcatacacataaagagtttcttccaagatcttatcataactgatactaattgggacaaggtaggtatcaaaaacttctcttttaaaaaatggctccatcacaatattcagaagaccaaatttaggagtcaatgtcttggcagagcggcttcttgtcccttcgaggaaaaattcaacaggagcataaccattccgtaacatagtttttacatattcagagaatacagcccagtagagtttattgccaccaaaggtacgccgcatgaaaaaggcacccgacattcgtagcagctcaccaaccattttcattcccaggaagtccattcctgctgctataactggcacaggcaaatcataattgtatagaagaaaagacaacatgaggaagtcaatgtaacttcgatgactcctcgtgccgaattcgccacccaggcctcgctaccataggcccgttatag

SEQ ID NO: 122645 - DNA, 1302 bp, Homo Sapiens
  misc_feature (217)..(217): n is a, c, g, or t
ccttccagggacaaaaggccatggcatgttcctccagactgttttctgaggaaatgtatcttggaaccccagtttatatgagctccggaatcatcctccccagctgccaaagatggaagtgaacacaggatctccaaagtaacccatggatgcttccaaaattttcagagagaatctttctggttttcagcaaccccagttgtagattctttgggtntaggaacccctagaagctcatacacataaagagtttcttccaagatcttatcataactgatactaattgggacaaggtaggtatcaaaaacttctcttttaaaaaatggctccatcacaatattcagaagacccgtaacatagtttttacatattcagagaatccagcccagtagagtttattgcccccaaaggtacgcccgcatgaaaaaggcacccgacattcgtagcagctcaccaaccatttcattcccaggaagtccattcctgctgctataactggcacaggcaaatcataattgtatagaagaaaagacaacatgaggaagtcaatgtaacttcgatgactaggcagcagaacaacaggatgctcctggatggctctttgtagtttctgaataccttcttcatttacacacaccttcgagaaaatttgtttaaatactttgctcagggtgaaggcacaaaaccgaatggctccaagacgcagtttgtgactcatttcatctaagatctcactcacttcctctcggaggacatccacagattgaagggattccttggaaagctgtttaatgacataatgaatctcctcagaattgagaacactacatttaatatcaattggtttacatggagtaattcccttatagacaagaggtgtgtagcatttcattgcaaatttcaagtcactgacatgcctcctctcttctaaaatatcttcaaactcatcccactttttgagctccttcgagtagaggagcacgacagcgctgggactggttgggccaacggagaaataagagttagatgaactggaagactccatggtgcggctgccttcccgggcggggtctgggattctttgctaaaccgtggtggtgctcctgctgggggcggttctttcgctcaggacggccctacttcgcctagggcggcggcaccctctgcagccgctacacaggatcccgggcgccgcccgagcgcgtgggtcgacgatatcccgggaattccgaccggtaccagcctgctttttttaacacgtggttatagtcactagtgaggggggtggtgtggggggatgcc

SEQ ID NO: 122646 - DNA, 672 bp, Homo Sapiens
acagtataacagactatacattttctgattatagtaacagaaaaatgtgacatgccaacattaagaacaggtttcttaagaactaaataaaaattatcaatgaaaaacactatatgcatattgagcacccccagtattagtcatttttaacaagaacaatttgtagggtttaagatgtctatagttggataaatttttccaagaaaaagatatgtgacaaaaatagtgttatagacttatttctgccaaaatgtcttctagcatattgttttaattttaataacctaatttttaaaaaaatcaagaaataaagaatttagccagtgaaaatagcactagaggtttacacatattttccctctcatgttttagtattaagttttagtaccttctcacatcttgaaaagtgcaactttgaatttgttgggttcacatgtatcacacttctcatgttgctgccaagtatatatggatacagtgatatgtctaaagtcatattctacaaagtaaatattttcattttgaatcacttattttttctaatttatgttatattaacatagaaaatttaaaattatgaagttgaaaacaactcataaagttgtctcttttctctgtattcccaggaagaaatgactagcacagaatttagaaagaatgattataatacat

SEQ ID NO: 122647 - DNA, 2824 bp, Homo Sapiens
agaattcggcacgaggtgaaagacacacaaacatactcccagaccttgttttgaccaatttttaaatattgctttagggagattttatttgaaaacataaatttcaaaaagaaagcacatttaaaacatcaggttttggtgatcagggtaggtaaagtatttttattataaatttcaagatctaaaaaataatttattacatttactaagataaatctaagatgacctttttaaaccaagccacgtgtgccctgcatagtgacgtcgtggccctcgggcatggaaagacacgggtctgcccttcctttagggctggaaagacacgggtctacccttcctttagggctggaaagacacgggtctacccttcctttagggctgggatcagccagaggaaagaaaattatgccgatgctcaactagcatatactgattaggactattttggtttattaccctggcattgaagaattcaggtgaagatgccaccactcttgaactctgaaagccaaactagaatctgcagagcagcctcagtcttaaaattcaagcttctttttcctactttttatttcagtgatatttaggacactctctatttcataagaattatgatctaactggctctataagcccaagaataaaaatccttaccccctagcaagagacccatagaactcatcagtagtaagactaaggtcccatattggaaaaaatatactagcccaaggttatagacagggaccatccagcaatagagatgttgctggcaagtaaccatgggtggtgggtgaccactagggaaaagggttgaagagacctcagaaggtcatccgggttatcctcctgccttgacacaagacacatgtgtctctctagccagagttacttgcagttgcactcacaagtggggaccccaggtctccttcatgtgattttctctgtgtacatatttcgaagattcccaaaggcagcatttttacaaggtggagctgcaggaagcttcggggacttgacagactgagtccagagcaagccctcgcccgtgggatcttagcaggaacctgggggtgaagaggaacagtgcagtccctgagaggcagctgagagtacgggcgagcaccctcacactccaggatgagggcggggggcaaaaaaagagtgggtgcagagcctgctcatcgagaaagatgaaattctaaggggattaagagctaagaagtcagtagctgaggagcccacagctaagttctctcagctgggaatttctatcccaattcttcctaagtaaaccctctctcgctaaagcagtgggtctcaataggggatgttcacacgggacatttggcaatgtctagagacattttcgtttgtcatctctgggagggggtgccactggcatctagtgggtggagcccaccacacacaggacagccccaacacagagaatggtcagaacagcactagtgccaaggctgagaaacccggtcctggagggggtgctttacccctaagattctcaatttagcatgagcggaggcccttgggatttacagtcagatgaatgtgaatgccccacctcaagccctaacatgcctaacatgccactgccatgttgagcagaagtccccaattatcccagagtgttccacaaatgtccagacagctgctggaggttcaaatttccagccaatacaactccaaccttacatccttcggtctttcttcttcggaaaagcctcctatttctttctcagagccagggctacccccgatggccactggccaggatggcaacagcagcagcccctccaaacagcagtatagacttgccctcagacagcggcatgggcttcatctcaccggcgggggacagtctagacttgccctcagacggcggcacgggcttcttctcgctggcaggggacagctcttccacaaggctctcttcccttgcgtttatctccttctcactcagcagcgtttctgtgggttccagtgcggggaccacctcctccacttcagtaggttcagttgttgctgctttcacctcttcttcatcaagttctacaaacagagatgtagcagggctggatttctcaactgtgatcacttctgtgtcaggttcccttgtccccagcagggaggtggcagtgatatgtggaagcaagggagctggggcttcaggaagtgcctcttgcagctcccgcgctggcaagaccacagaagccacagcagcctcttccatgccctcgggcacctcttctttctccacgtgcacaatgtcagaattagaggagttgttctcactcttctctccagctccgttgctgtctaagcttttcacttcttcaggatccattgcaatctgctgccaggactcagggcctagtgacactggcaggctttctgtgtgccaactctggctagccgacagtgacacaggtaagctctcagactgccaggaagtggtcacagttggagactctgggggactgacttgtccagagttgtcgctgggcaggatgtaaatgtcattgctatcttctgcagtgattccagggtattcctcctcctctgactcaagactaaacacagtgccccagccaccttgctgaatgatgtactctgccgaatagtcctccaggtatgtcacgccaaactgcagcagtgcgctcaaaggttcttgaccacgtcttgtcaattcccaaagcatttgtcgtagcaaaaccagaggcaccaaaattggctcaggagcatttgcaatgctttatggagaggctctttcagttcctgggacactttttctccaagacctcgtgcc

SEQ ID NO: 122648 - DNA, 1247 bp, Homo Sapiens
  misc_feature (135)..(242): n is a, c, g, or t
  misc_feature (624)..(682): n is a, c, g, or t
atcgttgtgtgcctgccgcggaaacggcccttggccacacacctgccccccggccaatgttttcccgcctggcccctgatactggatttccggccacatgccaccaagccagtaaatttgtgaattttttgcacnnnnnnnnnnnnnnnnnnnnnnnnnnnnnnnnnnnnnnnnnnnnnnnnnnnnnnnnnnnnnnnnnnnnnnnnnnnnnnnnnnnnnnnnnnnnnnnnnnnnnnnnnnnntgcacccagcccctatatatatattttttaaattgatcatgatagtaggctataactcaagtttcaatgccacgatgtcgtgctttctgatgaaacagaattaaattagtaattgaaaacaaaatttttaaacctgtaagtatttagaaattaaaaaatacatttctaagtaattcaagggtcaaagaacatataaggaaaatttataaacaactgaaccaactgaataataataataattacatatcaaaaagtacgggatagagcacggcacagtggtgggcacctatagtcccagcctgtgctcttggctattcaggacctgaggcaggatcacttgagcccaggagtttgagaccgaagcctgccatgatagtgccannnnnnnnnnnnnnnnnnnnnnnnnnnnnnnnnnnnnnnnnnnnnnnnnnnnnnnnnnnacaacaaacctaattttttttcaagaaaatatttttaatatataacagctcatacccagccaccttgctgaatgatgtactctgccgaatagtcctccaggtatgtcacgccaaactgcagcagtgcgctcaaaggttcttgaccacgtcttgtcaattccaaaagcatttgtcgtagcaaaaccagaggcaccaaaatcttattccagccgctggcatgaactgtggtctccagtgtacattcccgaaatgcctgatatgtcactggctggctcaggagcatttgcaatgctttatggagaggctctttcagttcctgggacactttttctccaagatgggccaagcagtcttccattgagctttctggattggcagggctgaacactggagaagtgtgacggtcaaagcctgtgctggtgaaggcttcagaaatttctttgtccagagattttagctcttcttcaatttcagttttaacttttaataaaatttcttgatccagagattgtgaagctatatctagttgaaccccttggggtgaggaaagatgttgctcttgcag

SEQ ID NO: 122649 - DNA, 739 bp, Homo Sapiens
  misc_feature (722)..(722): n is a, c, g, or t
caattatgtattttgaaaagtatttacttagtttaaataaattaattgcaaataaaaattaagctacaatatatagcctgaataaaaatgactagaacaaatacaacacaggacttgctttcttgcattagtcacaaagcatgtgacaatctagaaaacttcaaaatcaattacatttctttgaaaaaggggtaacagcagttactgatacatcacaactaataaacttataatacaagtttcctgacatgcatttcctgagtgaacccaaatgatcattttttaaaacaaggaagtttcgacagttgaagtaaaataaaataattcatggcttctaagcaacaagttttgttttttaaaaaccaaaagaaaattcagaacagttttgtaataggataaattaaaggtatgctaccacatataaaactttgctacagtcagttaagtattatacaacttttcaaactaaaggaaaacaaatcaaaatattaaaagaagatactgtctaatctaaaagtgtactggtttctacaagtgtcaaaaaaagatttgatgtagtgcaactgtctatacttgtggtgcctttgaaaaaagggtgggaaggaggggagagaagaaacttttcttgcttctggaagcacaagacatattggaattagagaataacagaccatgcagtgcgtcactccacgctgcagtcattggtgctcatctgccaccanacatttccttaagtctc

SEQ ID NO: 122650 - DNA, 1019 bp, Homo Sapiens
  misc_feature (49)..(49): n is a, c, g, or t
  misc_feature (191)..(191): n is a, c, g, or t
  misc_feature (219)..(219): n is a, c, g, or t
  misc_feature (456)..(470): n is a, c, g, or t
gatccatcattcaggttgcagaccatagttccacgccttgacgagcacngatgactgacgtggagacatatgacttgtcaacgtttaccaagcgtatgtaccacgatcttgaatgcactggagctctgtccggttccttgtggtctattgggtctgtcctcatgtactccgttagatgtatagtatttatncctggagctgtgccttataatgatatcntaaatttcctccattgggcagtgtggccaaattaaaacaaacaaaaccgcaactcctccacagaaacacaaacacagttattccatgaagtttagtatttggttgacatagtgctcttcaaattcatcccattaccctaaaagtaataactttgatgcttgctttaactttagtcccatctctgccactttgatgctatttgggttatgatggggcaagatggcagaggtattgggnnnnnnnnnnnnnnnccattcctctctacttctgtttcctagctttttctttctggagtttaagtacagtgatggttggcttgagtacctttttaaatctagcccagtataaacattagcctgcttaatatttagacatttataggtagaattctgagcactcaactcatgtttggcattttaaagtaaaaacaagtgtgacttcgaggaccaaagaaattgtcagctatacatttatctttatgaactcatttatattcctttttaatgactcgttgttctaacatttcctagaagtgttcttataaaggtctaatgtatccacaggctgttgtcttattagtaaatgcaaagtaatgactttgtctgttttactctagtctttagtacttcaaaattaccttttcatatccatgatcttgagtccatttgggggatttttaagaatttgatgtatttcaatacactgttcaaaattaaattgtttaattttatgtatgagtatgtatgttcctgaagttggtcctatttaaattattaaactattgtaactttgttcttgtg

SEQ ID NO: 122651 - DNA, 1178 bp, Homo Sapiens
  misc_feature (1102)..(1136): n is a, c, g, or t
ataggtacaaattatatacatttatttttaataattttaaataacactcttgtataaattctttcatatattcaaatcatacacaaatttagaaatgcatgatgaagcctagtacagcatatgtatgagacacattttttaagtttgtgttagaattttagtgacataaatacaagtttaatgtttcagaaacattccctaattgctcggcctataatttaatgtattatagagtgcttatgcctagcattacaacttgactttaaatcatttagcttttggactaacttagatctgaagccctgggcttactttctagggctgctgctgcagcaacaagtaacaattcctacccacatagcccaaaatataggaaccagggatgttcattataagtggtgttatgttcaccaagcatcctaaaaagtgtaggaccaaggtgaatgatctaataaccccattccaatcaaagctgtcaagaggaagtattgttgctttagttttctactcccaaaacagcacttaaagggttaaatatcctgatggtactcagctgaccaaaataaactagtaggtcagtgagtattgctttaatggtcaatttacctgggaatattggcgctagagaacagtgatataatttgaggtgtctacaaatgttgtctaaaaaacctctctcctctcatcccatgtttcctctgttctctactcttaaaatctaggtatcactgggaagagtaacgcactaggcccacaggaccttagtattaatataaatgagctttagttttcaaatgtcatttttttctctataactggagaaattccattaataaaagaaccctaggggatagagggtagagggagcgagaggggagtaagggaggacacggacatacttaacactacctagggcacctaaccatcagaaatgcataggcgcttaccaaaatgaattaatgaagataaaagcatcgcttaatggcagtatctgtaatttccaaataagattcacatcagtgctatcttatttaaaaataaacagatttcccccggccgtaatggccgaattcccgggcatatgtccggtaccgtcgactgnnnnnnnnnnnnnnnnnnnnnnnnnnnnnnnnnnncggccgcttcctcgctcacatgactcgctgcgctcgtcggtt

SEQ ID NO: 122652 - DNA, 1034 bp, Homo Sapiens
  misc_feature (179)..(187): n is a, c, g, or t
  misc_feature (195)..(207): n is a, c, g, or t
  misc_feature (293)..(340): n is a, c, g, or t
  misc_feature (368)..(381): n is a, c, g, or t
  misc_feature (395)..(397): n is a, c, g, or t
  misc_feature (400)..(523): n is a, c, g, or t
  misc_feature (525)..(526): n is a, c, g, or t
cgcatccctgaggccccgcggaagcataaaaccaccactcggagtgcagggggaaatataagctcccggccccctttgaagaaaacacccccccacgaatataaacaccctccccgagagaaacccccccctcttggggggggattgtttctctcaaaaaaacccctccttggggtgtnnnnnnnnngggggggnnnnnnnnnnnnngtggggtgggggaaaccccccaacccctctttgtgtgttttaaccccggggggtttttccttgtgggggaacaaaactttaggggnnnnnnnnnnnnnnnnnnnnnnnnnnnnnnnnnnnnnnnnnnnnnnnnaaagaattgtttttaaaaaaaattttcnnnnnnnnnnnnnncggccccaaaaatnnnttnnnnnnnnnnnnnnnnnnnnnnnnnnnnnnnnnnnnnnnnnnnnnnnnnnnnnnnnnnnnnnnnnnnnnnnnnnnnnnnnnnnnnnnnnnnnnnnnnnnnnnnnnnnnnnnnnnnnnnnnnnnntnntatcagtagaaacttatttttattatccaatccttttgataagaaatgccactagtgttatgtacaaacttgatcttctttgaaatgtgttgtccactgcttttctgtttctgtcacagtagctataaacagctgtttaaggatatccttatctaaatttctgccaatgaggaccaatcaatttgttctctcagtgtcatccttccagctcactggagtctcctccagatcatagagctcatggacaccctggacaatcacttgttgtgatttgtctttgattgacaccaatcccttcagccttatgacctccatgcagtgattgtccttgtttctcacattcttttcccacaggagattctgatcaaggtgaggttgtgttcctggcacatgctgaagttttttctgcaaactaaaaacaactgattagaaattcagagattaatacacttctgatttacctttatacgttatttagtgacacaaggataatgaagtgacctcgtgc

SEQ ID NO: 122653 - DNA, 711 bp, Homo Sapiens
agcttgttaggacttttgttcttcttcaattttagaaaagtggttaatccaaggaccaatgtgactttgatgtactgacctggaaagttaaagatggaatcactcaattactattctttttgtaaatttttaaacaccataaagcatttaatgaactggaattgataggtgaactgtgtcattttaataagcataatgtaatcacgtcatattttgttttgtttgcaggcagaaatttagataaggatatccttaaacagctgtttatagctactgtgacagaaacagaaaagcagtggacaacacatttcaaagaagatcaagtttgtacataacactagaggcatttcttatcaaaaggattggataataaaaataagtttctactgggtatatttcaagcatttatttattactttagttacgaattccaatatactttaaaatggtatttgttttacagcatacataaaatgtagcaaatcagtactgtaaaacatttaacattcatacaattatatataatatccttttttttaaagaatggtatttcacaaaaatatcttttgaaattggctttggagtttacatatactgaacatgaaagtttataataatgatgatacaactttcaacattgtcattttttcttagaacttcagctgattgcagagatataatgattacattgttattaaatttttttaacac

SEQ ID NO: 122654 - DNA, 1409 bp, Homo Sapiens
  misc_feature (516)..(545): n is a, c, g, or t
  misc_feature (1332)..(1366): n is a, c, g, or t
acataataatactttattaaaattaaaagcagaggaaactttatctgaccaagtatctttttatagctttatgaaatttttaaaaaccaacatacaaaataatgataaaatttattaactatagtagtttaatataatagctaaagggacactgatattaaacaccatataattctattttacattaggatgcaaggttttaaattccttttttcttattttatcaaaagtgaaggaaaatccttaatagattacattttggttgttcaagaaagtctgttataattttatccttgccaaaacatttgacacaaagtcaaatacctaagggagtaaatgatgccgaagagatttaattcactagaatacacaaaattaacaatacaagtagtcatttttataattcattcaacaaatatttgagtgctactatgtgttgggtaactcttctagggtctatggtagactagtgatcactgtccttggaaacttaactactagaacataatgtaaggnnnnnnnnnnnnnnnnnnnnnnnnnnnnnnataaggttgaacacttagaagtatgaccaatgacagattaaattcagaataatcattttttacatatgagactttcatgcactagagattaaataagccctgacatcaaaagcaataaaaactcaataaaaggaccaaaacattagagcagatagaaaagacagcaagaaacactttaagaaaatgcttcctaataagtttattttctatttgtttgaaaatacaatgaagcaaactgtgtaaattcagttaaattactcaagaaaattaaagctggaaatataatcaataaacatttctagtaaaccatgtacacagtaaacacattcctcacttcactgaacagcagaggcaaccgtttctaagttccagccactcttcatagagctctccaccttggctgacagctaaggatttctccagcgcacttccttccccagattcatttaaaatgaccgctactcttttactatgttgctctgtcaaaatatagttcagaagtgttgtcttcccagcacctaaatacccggtgataattgtgactgggatcttggcgccgaggccagacttttcctcctcctcgctttgcgtcgtctcaatgggaaccaattcaggacaatcctcctccgcaggatcctcttcctcatccacagatccaacagccggtaacattccggcctacagcacgtccctacctcagctgaaccgctgggaccaacacgccgtaccgcagccccccggccgtaatggccgaattcccgggcatatgtccggtaccgtcgactgnnnnnnnnnnnnnnnnnnnnnnnnnnnnnnnnnnncgccgcttcctcgctcacagacctcgctgcgctcgtcgttcgg

SEQ ID NO: 122655 - DNA, 903 bp, Homo Sapiens
  misc_feature (791)..(825): n is a, c, g, or t
  misc_feature (868)..(868): n is a, c, g, or t
gaataactccataaagggcaaacaatagagcagatagaaagacagcaagaacactttaagaaaatgcttcctaataagtttattttctatttgtttgaaaatacaatgaagcaaaactgtgtaaattcagttaaattactcaagaaaattaaagctggaaatataatcaataaacatttctagtaaaccatgtacacagtaaacacattcctcacttcactgaacagcagaggcaaccgtttctaagttccagccactcttcatagagctctccaccttggctgacagctaaggatttctccagcgcacttccttccccaaattcatttaaaaatgaccgctactcttttactatgttgctctgtcaaaatatagttcagaagtgttgtcttcccagcaccagtgagcaatacgggaaaggcccgagcggcacgtttgaaatacattgttttggacaagaaatttgttcatcttctcagcagagcagcctctgaataactaaatacccggtgataattgtgactgggatcttggcgccgaggccagacttttcctcctcctcgctttgcgtcgtctcaatgggaaccaattcaggacaatcttcctccgcaggatcctcttcctcatccacagatccaacagccggtaacattccggcctacagcacgtccctacctcagctgaaccgctgggaccaacacgccgtaccgcagccgcgcacgcccagcacgccactcccccccggccgtaatggccgaattcccgggcatatgtccggtaccgtcgactgnnnnnnnnnnnnnnnnnnnnnnnnnnnnnnnnnnncggccgcttcctcgctcactacttcgctgcgctcgtcgttcgntgaacgagtagcgccctatagtgattatagacttt

SEQ ID NO: 122656 - DNA, 2160 bp, Homo Sapiens
  misc_feature (2083)..(2117): n is a, c, g, or t
cctttgcagaagaatttcaattaattatgtagaccactcccaaaaaaagtacactacaactccccattcctttagtgtgggctgtgcatagtgatttccttccaaagagcacagtatgaaatgggggaaaagagtaactttacaatggagaaacctgacaaacactccttcagccaggtgatcaggtcgtcaacatcaacatcaataacagtcataaccttttatttcatgtcataaaatggtgacacttacttgtgttaaaaaaatttaataacaatgtaatcattatatctctgcaatcagctgaagttctaagaaaaaatgacaatgttgaaagttgtatcatcattattataaactttcatgttcagtatatgtaaactccaaagccaatttcaaaagatatttttgtgaaataccattctttaaaaaaaaggatattatatataattgtatgaatgttaaatgttttacagtactgatttgctacattttatgtatgctgtaaaacaaataccattttaaagtatattggaattcgtaactaaagtaataaataaatgcttgaaatatacccagtagaaacttatttttattatccaatccttttgataagaaatgcctctagtgttatgtacaaacttgatcttctttgaaatgtgttgtccactgcttttctgtttctgtcacagtagctataaacagctgtttaaggatatccttatctaaatttctgccaatgaggaccaatcgatttgttctctcagtgtcatccttccagctcactggagtctcctccagatcatagagctcatggacaccctggacaatcacttgttgtgatttgtctttgattgacaccaatcccttcagccttatgacctccatgcagtgattgtccttgtttctcacattcttttcccacaggagattctgaataaacatattaagatgttcttcctttgcatttcctggtacttcaaatgtgattgtaacaatactctgatcaaggtgaggttgtgttcctggcacatgctgaagttttttctgcaaacttattccagagagactatcaaaggcatgaagatctaatacattagagagatcaactcttgatctttgtgtttctaagatttgtcctagtccatttatggatctaattgtcgctcttaatttctttacatcttcttctggaaccaagtctgttttattaatgagaatggtatctgccaaagcaacttgcctagtagcttcattgataaggccatcaggtttctcttctgttaaatgtgctttgggccctatccatatgctcagattgggaacgggtcagtgggtgggatgatttcattctcttctgcctttagtgttatttcacttgttaatccaatatttttgaaatccacaatagttatgataccattgcaaggtaaatatcactccctaattcagcatccacccaaacatagaaccacttgcaacccagggtctgctaatccagtggtctctaacagtatgtcatcaaatttccccttcttttgcatcaaattctcaatagctctaaggccattgtccttcactgaacagcagagggcaaccgtttgtaagttccagccactcttcatagagctctccaccttggctgacaggtaaggatttctccagcgcacttccttccccagattcatttaaaatggccgctactcttttactatgttgctctgtcaaaatatagttcagaagtgttgtcttcccagcacctaaatacccggtgataattgtgactgggatcttggcgccgaggccagacttttcctcctcctcgctttgcgtcgtctcaatgggaaccaattcaggacaatcctcctccgcaggatcctcttcctcatccacagatccaacagccggtaacattccggcctacagcacgtccctacctcagctgaaccgctgggaccaacacgccgtaccgcagccgcgcacgcccagcacgccactcccggcctggccggggcctgacgtcatcacatcccccggccgtaatggccgaattcccgggcatatgtccggtaccgtcgactgnnnnnnnnnnnnnnnnnnnnnnnnnnnnnnnnnnncggccgcttcctcgctcactacttcgctgcgctcgtcgttcgc

SEQ ID NO: 122657 - DNA, 947 bp, Homo Sapiens
agactatcaaaggcatgaagatctaatacattagagagatcaactactgaagaattcacggaagattttagtcacttgctcactcatccacttgaagtaagaaaaatcaatcactgcatgtttattgttctggatctttgtgtttctaagatttgtcctagtccatttatggatctaattgtcgttcttaatttctttacatcttcttctggaaccaggtctgttttattaatgagaatggcatctgccaaagcaacttgcctagtagcttcattgataaggccatcaggtttctcttctgttaaatgttttaatccatattttgaatccacaatagttatgataccatcaagataaatatcactccctaattcagcatcaacccaaaacatagaagccactgcaccagggtctgctaatccagtggtctctaacagtatgtaatcaaatttccccttcttttgcatcaaattctcaatagctctaaggccactgtccttcactgaacagcagaggcaaccgtttctaagttccagccactcttcatagagctctccaccttggctgacagctaaggatttctccagcgcacttccttccccaaattcatttaaaatgaccgctactcttttactatgttgctctgtcaaaatatagttcagaagtgttgtcttcccagcacctaaatacccggtgataattgtgactgggatcttggcgccgaggccagacttttcctcctcctcgctttgcgtcgtctcaatgggaaccaattcaggacaatcctcctccgcaggatcctcctcctcatccgcagatccaacagccggtaacattccggcctacagcacgtccctacctcagctgaaccgctgggaccaacacgccgtaccgccccccggccgtaatggccgaattcccgggcatatgtccggtaccgtcgactg

SEQ ID NO: 122658 - DNA, 1264 bp, Homo Sapiens
tttgcccagggaagggcccatcggaatttgtttttctcaggggtcatcctttccaggtcccactggagtctccctccaagatcatagaggctcatgggccaccctgggacaaccacctggtgggaattggtcttgatggacaccaatcccttcagccttatgaccttcatgcagtgattgtcttgtttcctcacattcttttcccacaggagattttggataaaacatattaagatgtttttccttttgcttttcctggtacttccaaatgtgattgtaccaatcttctgatcaaggtgaggttgtgttcttggcacatgctgaagttttttctgcaaacttattccagagagactatcaaaggcatgaagatttaatacattagagagatcaactcttgatgtttgtgtttctaagatttgtcctagtccatttatggatctaattgtcgttcttaatttctttacatcttcttctggaaccaggtctgttttattaatgagaatggcatctgccaaagcaacttgcctagtagcttcattgataaggccatcaggtttctcttctgttaaatgttttaatccatattttgaatccactatagttatgataccatcaaggtaaatatcactccctaattcagcatcaacccaaaacatagaagccactgcacctgggtctgctaatccagtggtctctaacagtatgtaatcaaatttccccttcttttgcatcaaattctcaatagctctaaggccattgtccttcactgaacagcagaggcaaccgtttctaagttccagccactcttcatagagctctccaccttggctgacagctaaggatttctccagcgcacttccttccccaaattcatttaaaatgaccgctactcttttactatgttgctctgtcaaaatatagttcagaagtgttgtcttcccagcaccagtgagcaatacgggaaaggcccgagcggcacgtttgaaatacattgttttggacaagaaatttgttcatcttctcagcagagcagcctctgaataactaaatacccggtgagtaattgtgactgggatcttggcgccgaggccagcgttttcctcctcctcgctttgcgtcgtctccatgggaaccaattcaggacaatcctcctccgcaggatcctcctcctcatccgcagatccaacagccggtaacattccggcctacagcacgtccctacctcagctgaaccgctgggaccaacacgccgtaccgcccc

SEQ ID NO: 122659 - DNA, 827 bp, Homo Sapiens
  misc_feature (682)..(682): n is a, c, g, or t
  misc_feature (696)..(696): n is a, c, g, or t
  misc_feature (814)..(814): n is a, c, g, or t
ggggggagtggcgtgctgggcgtgcgcggctgcggtacggcgtgttggtcccagcggttcagctgaggtagggacgtgctgtaggccggaatgttaccggctgttggatctgtggatgaggaagaggatcctgcggaggaggattgtcctgaattggttcccattgagacgacgcaacgcgaggaggaggaaaagtctggcctcggcgccaagatcccagtcacaattatccccgggtatttaggtgctgggaagacaacacttctgaactatatttctgacagagcaacatagtaaaagagtagcggtcattttaaatgaatctggggaaggaagtgcgctggagaaatcctttagctgtcagcccaggtggggagctctatgaagagtcggctggaacttagaaacggttgcctctgctgttcagtgaaggacaatggccttagagctattgagaatttgatgcaaaagaaggggaaatttgatgacatactgttagagaccactggattagcagaccctggtatcataactattgtggattcaaaatatggattaaaagtgaaataccactaaaggcagaagagaatgaaatcatcccacccactgacccgttcccaatctgagcatatggatagggcccaaagcacatttaacagaagagaaacctgatggccttatncatgaagctactangcaagttgctttggcagatatcattctcattaataaaacagactttggtcccagaagaagatgtaaaagaaattaagaacgacacttagatccataaatggacttaggacaatcttanaaacaccgagatc

SEQ ID NO: 122660 - DNA, 659 bp, Homo Sapiens
tttaaatacaagtggatttttagagtttattaagcaggggagtggaggggagatgtggcacaaatagaagtatgtaacattcaaacaacagcatctaggatttttgaaaaaactttcggttacagttacacaaagggtcacttcctccccagcgacacatgggcctctcaaaggagaggagggagtaagtcccacggtagggccagtggttgctccctgggttttggaatcatttctgcggagctttcaaggccagaccctgggcttagggtcgagacttcatagcagtgacagccagacccagcaagatggctgcgaccgtgaaaccctgggcggcgatccgggtgcgcatcatgagctgagagcgctggctgttgccccggtggaaggagtagaggccgtaggtgagggcggccgccgtggccaggcaacctatgggtaccaccgggttctcgcgggtcttgcgaacgaacttttccttgaaactctctggattcctgtaaacagtggggctcagcctcaatgactggaggcttcgatggttcaaaggggacctccggaatcacagggccgggagtcgccatgtccgggccacagcagcaggagaaaatcgggactccgacctcagcctcccggtgaaggtcatgaaaggggcgggg

SEQ ID NO: 122661 - DNA, 2654 bp, Homo Sapiens
  misc_feature (15)..(15): n is a, c, g, or t
ttttttccaagctgnatataaggaatttattgtgtaaaaaagaaacatctagagaatgccacagacaggcctagtatggctacagtaccgtatataaaagacaattgctcacaatgatagcactgaagcactgagagatatcaaagtactttctgaatcgaatcaaatgatacttagtgtagttttaatatcctcatatatatcaaagttttactactctgataattttgtaaaccaggtaaccagaacatccagtcatacagcttttggtgatatataacttggcaataacccagtctggtgatacataaaactactcactgtactcatctggtatatacccgcacgaacattttgaaattccaatttcttggtcaagtgatatattgcttgaattcattaaatatatttagatttctgtattatacaaagttaaatgtacaactaaattagtatatgaaaagtgctcactacgtttttacgggaaataatcctgacaaaaatgtttaatgaatgtactctatactaattctgcctttttatacttaattctaaatttctcccctctaatttacaacaaattttgtgatttttataagaatctatgcctccccaattctcagattcttctcttttctcctttatttctttgcttaaattcagtataagctttcttggtattttaggcttcatgcacattcttattcctaaacaccagcagttcttcagagacctaaaatccagtataggaataactgtgttagttcttgaaaaagcattaaagacatttttccctgaaacatacagaacatgtcatgccaaatctcttgtttacataataaactggtaataccggtgaattgcacatacagattttatctccaagatagaataacttaaatattaaaacgtacctttaactgactttgtaacagacagcaatattcaatacaaaaatcacaaaacccactaactttaaacgctgcatagtacagcatacaaactcatctcccctatgacctactgaaactatgacaactttttaagctactctagcatttaaaccttaactagaaatttatacgaaacacgattttatgttcaaatatggaaataagtaacataattccaaaacccaaaagcatcccagcattctgtaaaaagaaatacccccagcggctacatccatggtcactagcatcattgtgcagcatttcaggtaccatatcaaccagagcaacatacatgaataagccagcagtaagtgcaaatatccacatagaaacattttcagcataatgaccaatgaaaattcctgttgccattccaagatacgccagcatggctgacaatgcattataaaggacagcctgcttaacggtcatgccagcctttagtagaacagcaaagtcacctaattcatgaggcaactcatgacagaacacagcaacagaagtacttaaaccacttgataagccttcagtaaaagcagcaccaattgctaggccatcgctgaaattgtgcaggccatcacccattatcaccatccaggccagagtggcgacgccggcatctttcagctcctcccgagagtagcgctggctgtgactgtgaggatggtggttttggtggtggtgatgatggagaatatgatggtagtcatgatggtggtgaatgagatcgtctgactggccgagtgtatcgtggaaatgtgaatggcatttattcttgcaccctctggggtacatattcattgtagacttcctgtggatgagcatgagctatcatgacctcttcttcttccaagactgcaggctgctgagaatcaaagtgggagggctcttgtgagtctgctcgtaaatagccttcagttcgatcatctgtatctactttctcctcatttgttgaaagttgagattcatacttggacaactgcttcttaatctccacatcatcatcattttcaggtttcttctgattctttttcttcttatctttaaattgtttgatcaatgtgaggacatgttcaacaagaaacatgaaatacaggcctcctagagctgttagacccttccacgtggaatcaaaataggcactttcttctatgttttgagaagacagatgactgaaaagtggtcctcttttcatttccattgctggttcttcatggctatgactatggtggtgacttgcatgagaatgtggaagaaggtgtaaaaaagcatcaccactcaaagtcccaacggccagtgccacaaggaaactcaggagaaatttgaaaaacacccgattcatgagaggcactaagataacccccagcagagacaggaaactgatgatggaaatggctataaaaccaccaacccaggctatttgtaatgaataggtctttggagggatttcagccttcttttcacttgtatgaatcagacaagatctagcatcaatttggttgatgatggctggacagagatagttgaactctgttgcattcagcggaacctggatgcccatgccatgagatgtcagtagctttgatgcattgaaacactcctgaggattttcatttgtgtttctggaatacataaagcctttttcggggctcactcacagattcatttgttttcctaccagccaggcggctcacccgggtc

SEQ ID NO: 122662 - DNA, 1729 bp, Homo Sapiens
  misc_feature (111)..(167): n is a, c, g, or t
  misc_feature (1457)..(1497): n is a, c, g, or t
gtttacaaatggcccatggcactacaattaaaataaaaaatatcaaaaggtcacaggatcttaggtaagtttactgacaatttcaaaaatattcaaaagaaaatttcaaannnnnnnnnnnnnnnnnnnnnnnnnnnnnnnnnnnnnnnnnnnnnnnnnnnnnnnnnacaagggttaatttttcccccctcttgggtatagtaaatcaatattcagattttatttcaactattagacatagtcataaatatatcatctacctgttgtgaacctgacagtcaagtcagtcagtagtatattatcctacaaacataaatggatccaaatcgttttggtatttatagccatgatgatttaagtagtcaaaacgcaaaacttgtggttgccccccaaatcacccaaaagcatattatacagtgtcagaaactgtttgcatcagttttagaagctcatctgtgtagttcaggtatctgaaactaaaaaaggggggattctttcatattttgataaaaatgtagtcaaatatttcataacattaatatttattgctttatatgaatactgtattgaaagcccaagcattcagtttacacacagaaattatacaattatataccgcttcacaaaggcagtgaacacattacattctacaaaatctactttacagaaatttaaaaactttaaatatcaaaaggtacagctgaagaaacaggtataaatttggcagccagtaattttgacagggaagttacagcttgcatgactttaaatatgtaaatttgaaaatactgaatttcgagtaatcattgtgctttgtgttgatctgaaaaatataacactggctgtcgaagaagcatgttcaaaaatatttaattcacttcaaaatgtcatacaaattatggtggtttctatgcacccctaaagcttcagtcatttagctcaggtacatactaaagtaatatattaattcttccagtacagtggtgtttcataccattgacatttgcataccctagaataatttagaaagacatgtgtaatattcacaatgttcagaaaagcaagcaaaaggtcaaggaacctgcttggttcttctgagatggtctcatatcagcttcataaacattcattctacaaaatagtaagctaacatttgaacacaatttccaagataaagcatattttctcataaataatgaagtctttttctcaggcacctcagaagtatacaaaagaatttgagtttgaacagatctcttggaatgtgtttaacctggtatttcaacagacttaagatttccagggtttcacaagggccagattttatttcaattactcagaagagaaagaaaatgtcttctgaaagaggtgaactcaatcattaccaatagaaaaagtatccactgtattcatctcttatagaaacagaaaaatataacatttccccccttagaatnnnnnnnnnnnnnnnnnnnnnnnnnnnnnnnnnnnnnnnnngacttaaagttccattgtacgtagccaaacaataaaatctggaaaccagcatgaaaccctataattcacatgttaaaatgttgaaactatgaccaaaatatgaaaactgctagagctatcagaaagagacaagacaaaaagcttcttgatgggataaactaaatgtgataatctcaaaaaacttttcaaaattgtaattaccttccagtttaaaaacttcaatcctaaatta

SEQ ID NO: 122663 - DNA, 748 bp, Homo Sapiens
  misc_feature (444)..(453): n is a, c, g, or t
  misc_feature (668)..(676): n is a, c, g, or t
ttaaacatatgatcattttaattacagatgattgaaatacagtgcaacagatgagacagatacaatactgtaccagtttttaaaaacctgaaccataacggcttcgcattctagtacacttacttacttaaaacaaaaattgcttagataacaaaactatacttcaagttgttttagaaacagttctgcgctaggaacatacaaaggaaaatgacccgttgtgcttctttaaaatcgaatgagagtctcctctagggtcctgctgacagagcccccccagcctccgccaggtgaggtgcacagggcccactccaggcaccagctccccccaacttggcttctctggtttgtcgaaggcatcatccagtccacactatgtttaacagtcctagtcagccaggggattacatatttctgggaagaaaatggcaaatgtccccattnnnnnnnnnntcagtatatcaataatccagtatatccattcataaataagctttcagatatgttaggaacataaaagctattgttgaacacgacttagcaacaaatcccacatatgataaaaaatggagaattgattttaggttatcaaattaccttgaataaatctctctggtatcttcttatagaaggataattttccgtaagaatcaggaggttcccagttnnnnnnnnntccattctttctctctctatgaaaaaacccttaacatattttcaaaaataataaggtcaatctgtaggccgc

SEQ ID NO: 122664 - DNA, 1590 bp, Homo Sapiens
  misc_feature (1375)..(1456): n is a, c, g, or t
agctttctggagacaagttacattctcttactgtagagtttatcagcgttttttcactgctggggttgtgatagaagccatgtcagcaccacacactgcagctctccaaagagtgtgtccaccactccactgtgctcagggaaggcagacctctcctctctctttccaatccctaaagggaattaggagtagtctgaagccttgggaagatgtcattcccgccctgtatggctggtttaagccatggacatgaccagcttttggctgtgaagacctgagcagggttttgccaacagcttgttctagagaaggtttccctttttctgggacattgttggtctcatgttatgcctgtgaaggatttgtccagccttcatgttactctacacaacaacttatctcctgtgtattgccctggttcatgtgatgataatggccttatgataaagccgcctttagtcttccatgttctgatcactgtgtggggtggttcaagagcagagttaagatctaccaaactgaaggggtctccagattatcttggaggggacaggaggatggcagagaaacaactgtcaatccagatttgacctcatttgcattgccaccaaggcctcctaggaaaaattgtaggaatttatgggtataatattgtggtctgaatggcgtgaatttttatcccgaggagggggcagttgtgacaacctccagtgcatgtgggaacagcatgaattgggtcccttattcccagggggtgccgcatattccccaatactgtaaagcagatgctgtttagcacctgccaaggagccatatgccctgaagttcagcattaggcaggtatctcttaactgtaagacataccaggcccagctgggaccataatttgtacagaaacactggatgtgattaatagggagtaggcgagattatagcaaaccagcagaaatggaactctgctaaatgtgcatccgtgaatgctcccttgaatgtggctgtgcaggattcagggtttgcagaaattctcaggacctcagacctctgtcctatgactaatgttactggcagagcaaataatctaaaggttttggttttgtggattaccatctccgtgctgtgcatctgaaggccagtgctgtgctggcaggaaaatagggactgagaaaaagcagatcctatactatagggactgtagtatctatgacgtagccagccattctttgctcccaaggcaagaagaaagagatgacagagtcaatatagggttgccaaatcggattttctaaaatgagtaggaagttggatttttatgtgcaacagtttcttttaatgctttgttgatatgtgattgtcatgcaataattattcatatttnnnnnnnnnnnnnnnnnnnnnnnnnnnnnnnnnnnnnnnnnnnnnnnnnnnnnnnnnnnnnnnnnnnnnnnnnnnnnnnnnngctacctcagtgccccctttacattccctcccttgccttcccttaggaaaccgttgatttaccattttttactttagatttgtttgccttttctagaattaacacaattggaatcataaagtatttatactctc

SEQ ID NO: 122665 - DNA, 461 bp, Homo Sapiens
  misc_feature (114)..(218): n is a, c, g, or t
ttttttttgagagtataaatactttatgattccaattgtgttaattctagaaaaggcaaacaaatctaaagtaaaaaatgtaaatcaacggtttcctagggaaggcaaggaggnnnnnnnnnnnnnnnnnnnnnnnnnnnnnnnnnnnnnnnnnnnnnnnnnnnnnnnnnnnnnnnnnnnnnnnnnnnnnnnnnnnnnnnnnnnnnnnnnnnnnnnnnaaatatgaataattattgcatgacaatcacatatcaacaaagcattaaaagaaactgttgcacataaaaatccaacttcctactcattttagaaaatccgatttggcaaccctatattgactctgtcatctctttcttcttgccttgggagcaaagaatggctggctacgtcatagatactacagtccctatagtataggatctgctttttctcagtccctattttcctgccagcacagcact

SEQ ID NO: 122666 - DNA, 783 bp, Homo Sapiens
  misc_feature (653)..(653): n is a, c, g, or t
ggagggagcagagcgcacaaacatttatttacaaaagtcccagttacatatgatacaggctttttacacacagtagttgaaacggaattattttatctatttttactaccagaaggtaaagaaaaagtttaatgaactaatcgtttcttgtttttatacaaagtgacagatcatgcacatttttttcagtttttaaatattttgctaagtgcaaatactagattcctctctccagttttaaggcaagtaagagggggctgtggctggggagcctcacgccctgcggcaagccctgcagggcagagagagggagccagctgcctcagggttgcctgttgtctgacctgctctctgggcactggcacggccccttgctggctggtctgaagacccccagtgcttctctccccaatgctgtcactggtccaggcaggagcccgaggttcaggccctgcctctggacagaggggcctggagaaccagggtgggtgctcacggcagccctgtggtcccccgtgcctggctcggggaggatcctcaggaatcagggaccctccaaggaaagaggccgccgctccttccccaccagcccagtgtggccagaacagctggaactcctctcaaatgacccacccctgggggtttggccttangagaaacatcactctgggctccccctcccctgccagggttgaggccagcacctgtctagggctgtttctgcagctgctgcctgctccctttgtcttgcctggggctcttgctggagcacgtgcctagggt

SEQ ID NO: 122667 - DNA, 894 bp, Homo Sapiens
  misc_feature (694)..(694): n is a, c, g, or t
  misc_feature (699)..(699): n is a, c, g, or t
  misc_feature (782)..(782): n is a, c, g, or t
  misc_feature (854)..(854): n is a, c, g, or t
catctaaatgatcagtttattgaattttagtaatgtaagttgagatcatgaaacatacaatctaattcaaaagaagaatcataggtaccaattcaacaccattagcactactttcacaatagtgacaccccacttataacactcttttttgggtctctgactgtgaacaagattgtggaaggttggttgaggttaggcctaggcattacggttaagaaataacagatgctaattagttagtggggaagtgaagctcatgtttaggccttttcataatgtctttatgctaaataaattaaatgaagtaaacagccatggctattgaactacagaatacataaaaatacattctgtgattcacctataaacaaaagagtaaagcagaatgtgtcaaattttccatagcaggtaaagcatagaaaaaaaatctagctgatatagttgttatgtttcaacaacataaaatgaaatgtttctaggatagaagaaattggtaccattaacatttggatggttatggtaccataacattttgatataatatgcaaaatgctgcttccccaactatgaccgccattataacttttaatggaattataggctccaaatactttcttctgcaagttacccaccctttcatatgtttttaaaatgaaacactagactgattaatcagttctttttcttaatttanaaganaaaagctttgagaaaggcaacccccttctccatggtgaagactacatgcttgcatgtgaggactcaagcccagtggtctggcnttgatctgctttcaactccacttgtgttgctcagagtgactttgcaggcacgctcatagcctcagatggctnaaatgtatgatgctatgctagagaaattcatctactctct

SEQ ID NO: 122668 - DNA, 1012 bp, Homo Sapiens
  misc_feature (992)..(992): n is a, c, g, or t
tttttcttcttaaatcaaattctatttgtgaattcagcaaaataatttctataaaataaaacagcaaaatatttaaatagaatagggtgggctgtatctgtttgcaggggtatttggtttttagacaggttccaaaaaattacacacattcaagttaccaattctcttttaaatacagtatgaactgaggatttccttatttttaatcaaatgtttattctgaaattgtaatatctcaattatatcaaccagtagtttcttttttaatgagaccctgctttgaacgttaaacgttttggaataatggaaaaggagctaggacaattcttgctttcaagtaaaattgtgactgagcagaaaatcagccagctatcttggtgcagagaggtactccaagtaccgtggggttctgatgacttccacgtcactgggatccaacagaaggaaagttttagaagattcacctaataaactctaccaaagaaacaaaacaagcacaccaaatacagtcttatattatgctccagcatcttggcatagcaaatttttgcatatttgttttaaatctttaaaaattcccattactgatacgtaagtgttctttattccacccagagattgaactgtcaaacattatatataaggaacatatgtgcaactgaaaatagactgtcacatttctccccttgttttatattttaatattctaggtgtaagaagtaaaagctctgagtaatacagctgtcacttctcggacaactgctgtcattatggtaactttttcctcattggctacactaacttggtgtgaagccatgctaaatgttacagcataactatagcttcaaagtgattaacctaatatcagaataaaaaggcaatgaaaaaaatctagaaacagtgttacatcaccaattttccacatcaaccaaataatttaaaggttaccagccttacagttgctcatagcaaaattgactccagtggcaaanaattaacatgaaacctattg

SEQ ID NO: 122669 - DNA, 641 bp, Homo Sapiens
tgcataaagttactttatttttaagtatacatataattttgaaaaatataaatgctaaaatatctcatcttcttcatctcttaattccataaaagtcacaatagaaagcttcataaaactgtaaaatactatgttataggaattttaggatttatattggaaaaagttattagtaatatattgaaatgttttctgttctttatcattttgttccaccatgttgatctacttcatttaaaataaaaagatgcatcatttctctctccaaagttaataaagacttaagagaataaaaataagaatatctgaaagtgcgtattgattctgaaaagtaatgcgtacgaatatgtaccagccatgaaaatggctaaaaagaggcaactattcactcttttcacattgtaggactgggacaaagttacttctggctctaaaagtttcactggatgactttagccctgagttgcaatgtttgcctaggaaacagaattcttgctttttatacgtacccatagagcacaatgaaatgagccaggaaattggacatatctaaatctctggtcaaaacacatcttgactggttggcgtattatacaacttttttaaaatttcaggctgcattgagctcaatgaatcatctg

SEQ ID NO: 122670 - DNA, 1183 bp, Homo Sapiens
  misc_feature (128)..(128): n is a, c, g, or t
  misc_feature (134)..(225): n is a, c, g, or t
  misc_feature (686)..(712): n is a, c, g, or t
ggggggaatcccagccctagtcatggcccgggtttcctagggaaccgctatggccctgttccctttccttctgggcccgcgcgcccaacgaaaggttttgaaaacttttcgaggggccgaggcggccngacaannnnnnnnnnnnnnnnnnnnnnnnnnnnnnnnnnnnnnnnnnnnnnnnnnnnnnnnnnnnnnnnnnnnnnnnnnnnnnnnnnnnnnnnnnnngaaacaattcttaatcatttattttcaacacgtgtactataaagaacctaagaaatcagacaattttaataacccataaacatgttgaatccatttgcagatttaaattttgtaaaaatagctgtcactgcctccatatatcaagtgtactatgtttataatcacatttatgctaccgatactcctcagaaaaaaacagattctgcttggttctagcttcagtattatgaactccaataatgctttgaggacctccaaaggaaaaaaacagattctactaggttctagctgaaatattatcaactccaaattgaagctgaagtattatcaactccaaataatgcttcgaggacctccaaaaaaaagagattccgcttggttgtagctgaagtattatcaactccaaataatgcctggaggacctccacaggcaaaccactaatccccttggccattcattnnnnnnnnnnnnnnnnnnnnnnnnnnnttttgaagcaacaatgtaccattagtaaagttgctgtgcagaattacctcagtcctattctaagcttacagttcagttgattttattgtcttcacctaagtatatacaattcacatatgggagaaaaacactaaatcaagatggttattttcactgttttgcttaagattcatatttaaatattaacctcgtgccgaattcctggcctcgagggccacattcctatagtgagtcgtattaattcgtatcatgtcacactggttcctgtgtgaattgttaccgctcacagtcacacacatacgagcggagcataagtgtaagcctgaggctatgagtggtactcacataatgcgtgcgccatgccgtttcatccggaactgcggcagtgatatgatcgtactccgggaagggtttggatggcgcttcgtctctcatgactggccgactcggtcggactatatcatcagggaa

SEQ ID NO: 122671 - DNA, 2611 bp, Homo Sapiens
  misc_feature (158)..(158): n is a, c, g, or t
  misc_feature (451)..(459): n is a, c, g, or t
  misc_feature (597)..(649): n is a, c, g, or t
  misc_feature (1683)..(1691): n is a, c, g, or t
  misc_feature (1967)..(2469): n is a, c, g, or t
ttcgtaatatttataaacaccgtggtgtgcccccacatttattctgggtcctcaactatgtttttttgttgtgtacctcctcccttggtttttcctctcactctctatttgggggcgacaaagaatatttttgttctaggcgcgttcaaaaggcggcnggtgcctaatagggttgtgtctgaatatttacccgccttgggcggcataattcacagggtctccaatttaaatgggcggctttcggggagaggggcttttccacagttttggggccggaaaatttttttaaatggaattttccccccccgtttcttccgatagagtttgtccggcgccgggggggctaattttgttatcgaggccccgcttgggcttccttttgatagagcccgtaaatggcctcacaacttccctttggagttgttcagaacccttggttgccctcgggccnnnnnnnnnggtgaggatcccagccctaatcatggcccgggtttccttgggaacagctatggccctgttccccttccttctggggccgcgcccccaacgaaaggttttgaaaacttttcgaggggcgaggggggcgccaaggtttcnnnnnnnnnnnnnnnnnnnnnnnnnnnnnnnnnnnnnnnnnnnnnnnnnnnnnaattctctttcttcttggtagggaaaaaaaggtttattttcaaggatttgtgcagacaatggtgaataaaaaattgtatttcaactataaaaaggagctgacttcattccaccctggcctacagggtttatggtgatgccagtttgaatctgaggcaatactgctatccccattcctccacctgtaaaagattcccccagaggaataacattctataacttttagtcaaaaatatgtaagacacatcaaacaaagtaatgagttaaacaagtttctgcttatctgcttagggaaagtcaagaaatgaaacaaatgtatatttgtttctggctgtaaattacctttaccttgtgcactttttggtacattctggtatgaaaacctctcaaaatgtaacaacacaagagtttgggtcaagacgacccacccaggaggctgtaaaaactggtttgaactagaactgtggaatggaactagtttaaaatatgaagcagctctaaacaccaagcttagagacatttgccctattagaaaacaaaaatcattaaagctacaaaataacaagtgcaaacatgctgaacctgtttccagggagtgacattcccttctgccaacaggtcccaaactcacacccacaaggtgtaactctctttcctgttccactagatttcctttctctcatctcaaaggtcctcagaaatgacaatggaaaacgtatgaattgttgaaatttaccctgtggaccaattcctgaagagataacagccacaactctgagatgattagacatgcagtgtttacttgatgactttctgtatttctagaaaccctcaaagcattaaactgcctatttcaaaatctaaacttcctagcagcttttattatttggggtaagcagacagaagacaatttactgccacacaggaatcaaccacagctaacttgtccaccattaagttttacggtaatggacaattcaactggaagacccatgtctatgcttgcttataataatttaattttagacctactcnnnnnnnnnaaatagagaagttctagacatccaacagctgatccttccatagatataagcagggaatggagaagtcttcctgccaaatgctgagccatctaaaatggtctgctcaggagttactaactccatggcaaagtacttcagtatcaattgcaaagttctgttttcttctacttcaggaaacaacctcatttgatttgtggaccctatgaactgtccaaacacactgatgaatatcagcaacttctctcatttgaatatctccctcgtgccgaattcttnnnnnnnnnnnnnnnnnnnnnnnnnnnnnnnnnnnnnnnnnnnnnnnnnnnnnnnnnnnnnnnnnnnnnnnnnnnnnnnnnnnnnnnnnnnnnnnnnnnnnnnnnnnnnnnnnnnnnnnnnnnnnnnnnnnnnnnnnnnnnnnnnnnnnnnnnnnnnnnnnnnnnnnnnnnnnnnnnnnnnnnnnnnnnnnnnnnnnnnnnnnnnnnnnnnnnnnnnnnnnnnnnnnnnnnnnnnnnnnnnnnnnnnnnnnnnnnnnnnnnnnnnnnnnnnnnnnnnnnnnnnnnnnnnnnnnnnnnnnnnnnnnnnnnnnnnnnnnnnnnnnnnnnnnnnnnnnnnnnnnnnnnnnnnnnnnnnnnnnnnnnnnnnnnnnnnnnnnnnnnnnnnnnnnnnnnnnnnnnnnnnnnnnnnnnnnnnnnnnnnnnnnnnnnnnnnnnnnnnnnnnnnnnnnnnnnnnnnnnnnnnnnnnnnnnnnnnnnnnnnnnnnnnnnnnnnnnnnnnnnnnaaagtggggaaaccgacaggacaataaagatcaaggggttcccctggggagtcctctctggctttcctgttccgaactggcgctaacgggaactgtcggccttctcctccgggaaaggggggtttccaaatgactgtggggg

SEQ ID NO: 122672 - DNA, 908 bp, Homo Sapiens
ggaattcccgggatatcgtcgacccacgcgtccgaattctttggctttagaaatttatctttcatgtacccatccgggaacataaaagagaggcatagtgctcattgcaaaaagagaacagatgaagtagctgtgttatgtgctggtatcttgagagttttgccaagaaaatctgggcctacataaaatttgagaattatctgtgtgatgagaccagaaagcagtggcttagacaagaaaaaatctttctgttcaccagtatcctcaaatggagacttcacttgatcagatggtatatgaaaaatgaatcaactattgctatttcgtaaaacctttttatattttctaaatttacttagtgctaaatactgttactcagttttaaatgccacgactaggggaaaaagaaactattgaagaaataattgtttagtatatttgcagttggggtagaagaaagaaatctagtatattgattcatatactagtaaattcatctagtataagaacttgtgatgttagattgaagttttgtcatcttataaaagacaacaaacttattttctgtttaagtctgagtgttatggcaatttttagttgattacttatttttcttagccaaattttaattttcttcatattgcattgctctttagttgtctctggaaattctatttactttaaggacatgagaaattccaatcgagagaagttgctggatattcatcagtgtgtacggacagttcatagggtccacaaatcaaatgaggttgtttcctgaagtagaagaaaacagaactttgctcttgatactgaagtactttgccatggagttagtaactcctgagcagaccattttagatggctcagcatttggcaggaagacttctccattccctgcttatatc

SEQ ID NO: 122673 - DNA, 1125 bp, Homo Sapiens
  misc_feature (59)..(59): n is a, c, g, or t
  misc_feature (129)..(129): n is a, c, g, or t
  misc_feature (683)..(694): n is a, c, g, or t
actgtctgggaccatacaaaattaaccaaccaatttttgggaggtcttcgtattggctntggaacaggtaaaagttatgggactgaagtggactggatggactctacttcagaggaagttgctctctgngagaagatggtaaactcccccaatacttggattgaagcaacactgcctctcagaatgcttttgattgccaagatttccaaatgagcccaaattccactggctcctccactgaaaactactaaaccggtggaatctgatcttgaaaatctgagtaggtggacaaatatcctcactttctatctattgcacctaaggaatactacacagcatgtaaaagtcaatctgcatgtgcttctttgattacaaggcccaagggatttaaatataacaaaatgtgtaatttgtgactctaatattaaataagatatttgaacaagctaggaaaattgaatttctgctgctgcttcaaagaaaaagctgccccagagcattaaacatggggtattgttaagaagcaaaatgttcttgtttgccatcatgtgtttcacaccacaattctgtgccacagttaagagggtctggtacccttgcaggacctttgtaggttgtgggaaaaagtcgcagaaagatactcaaagtggagcagggaatggagacagacatcagtgatgatnnnnnnnnnnnntggaccttaagaaactatttactctgtaatctctaataaaatatggaattccatattagggcaatgagactgaaactactggtgtttttctgccttgagaaaacaaacagttaaaacaagcctcaaatgtattttagtgccacccactggccataggtacaattcagttgttggcttgttttgacttaattctaaaataggtctcaagcctgtatttttatgagtttatttttttaaaaccctgcatatatatgattgtttttcttataactttactatatgaaagcagcataagagtagtcacaaacatgttttgcaacaaagttttaattagaatgtaagttgctcagttatactgttcttcttatgtatgtaaaattttcgtattttgtaaaaacccttagaataaattatcatttgatttaaattgt

SEQ ID NO: 122674 - DNA, 680 bp, Homo Sapiens
ttttttttatagcacaatggttttattgacggcagaagaaaaattcttcctttcacttgtaaaaggtatttgcttaatttaactcagtatttttttccattctttgtgtgagttgactgttttttccaccctaaaatctgttttttctttcttcaaataataatatccaccacagctacttattctgaagagaaagtggaaggtctgtcaacaggtttccaccagggtgtttcagtcactggctcgtttcttcacaaagagtctacttttcctattagttccgagcccggggtggttggtaaaactgttgggttggccgagtggatcgtcttggctggccatcacctcccctacggaactccagagtttgatcgtaggtgccttcttcctcccaaagtcacataggtagtaagtggcagagccaggactcgaacccaggtcttctgactcctcctgtgcatttccagctcccctggagctcagagatcccttttcaccaaatcctttcaggataaagcacagtgtctgaaaatgttttccagcccatgcctctgtttgaatgggcttgatattgctcagtagcacctcttcatagtttccgtagtcaatgaatttaacaactgctgtcatacccgaagaatggagggcttcaacttctgcccggtaaaacttgttgtctt

SEQ ID NO: 122675 - DNA, 1064 bp, Homo Sapiens
  misc_feature (750)..(750): n is a, c, g, or t
  misc_feature (955)..(989): n is a, c, g, or t
ttttttttatagcacaatggttttattgacggcagaagaaaaattcttcctttcacttgtaaaaggtatttgcttaatttaactcagtatttttttccattctttgtgtgagttgactgttttttccaccctaaaatctgttttttctttcttcaaataataatatccaccacagctacttattctgaagagaaagtggaaggtctgtcaacaggtttccaccagggtgtttcagtcactggctcgtttcttcacaaagagtctacttttcctattagttccgagcccggggtggttggtaaaactgttgggttggccgagtggatcgtcttggctggccatcacctcccctacggaactccagagtttgatcgtaggtgccttcttcctcccatgcctctgtttgaatgggcttgatattgctcagtagcacctcttcatagtttccgtagtcaatgaatttaacaactgctgtcatacccgaagaatggagggcttcaacttctgcccggtaaaacttgttgtcttcccaataaagtgcaaaacattcatctccaggtttccacatttttgcatactccataggaatagatgattctagtattttttctggcttaattggcccagatcttcgtttgggcccactattgtaaaatattttatcatcacagggtacagctgtgacaggtcctgctggcttaataggtcctattcgtcttcctttcagtggcatttctacttctccatttnggaacaccaatgaaactattacttcgaactggattctgataatcagtatttacattaaaatgtttttcaatttttataccactgaaagcttcattatttattgtttgtgatttcctgtcataaaaataatcaggaatagatgtttggctttctccccggccgtaatggccgaattcccgggcatatgtccggtaccgtcgactgnnnnnnnnnnnnnnnnnnnnnnnnnnnnnnnnnnncgccgcttcctcgctcactgaccttcgctgcgctcgtcgttcgctgcgcggagtagcgccctatggacatcagtc

SEQ ID NO: 122676 - DNA, 653 bp, Homo Sapiens
  misc_feature (71)..(82): n is a, c, g, or t
  misc_feature (391)..(403): n is a, c, g, or t
aaatgtttgcatattcatttattcatgcaaatattaacatgaatgaatgagttaatgaatgaatgggtgannnnnnnnnnnnacacagaaggatcatcttctaataaaaacagactattcccttactttaagttgtatccaataattttataacagctttgtttcagagtctgtagactatatatattcgtcctggtattcccaaggctcatttcttcctgttagaaaaagtagtccaattgaagctgcaaatcatgcagcaaacagtagaaacagcctcctggtgttaccaattccccgagtgtcatatttcaagtattctcttctctgtaaggcagggtctgcaggagtgtttcctgctccaaggttagtggggtgggattcgctttgnnnnnnnnnnnnnctctccaacctggactgctcagctgcagtgtgtgcacaggccacattagtgggcagagccaggagctgaggcgtccactcccagggaacaactaagaggcttcacctgaggattggtggttatacttgccccactagcagctacattaagaaaactgattaagaagggagagaagagacatccgctgtctcagactgaatcatgaggcaattcccaggacccaatccccagaattctagggactccttaa

SEQ ID NO: 122677 - DNA, 2322 bp, Homo Sapiens
  misc_feature (42)..(56): n is a, c, g, or t
  misc_feature (729)..(742): n is a, c, g, or t
ctgtgctttcctgggcatgggaggagctacaaactttacttnnnnnnnnnnnnnnntcacacagtttttcaacaggaagagtgaagtagaagaacagatcatttaattatacaaacaaaatcgctttcctttgctccagcgagtccaggcaacctttcaagttcatttgctgcctgaaagaaaggtttttagtatcagaaagaacctcgctgtcctccaatatccacagggaaaacaagatcagaaacaaaagtccaccatggaagaaatcccagagcgatccaatttggaaagaatttaattaacaaaataaaacggagggaaaatggtccaggtggggccctagggagatcggacttctgtcccagctgaagtctgcccagcacacctggtgggcagcccctgggcctgtcactgcagaactggccttgacaagcagacccactgtgcgcgacgccacggtttccttacgcactcggcattatgtacagatatgaaaaaacccaacggcaggtggctggaaagtggcttctagctcccctatgctggcttggcacgttcatgcatgcaaagcgaggaggttttgcgggcttcaccaaacagttaattttggcaaaaagagaaaacaaacaaacaaaaagctaaaattcataagcaggatttaaaagcccctgaagtgaaaatgatgtatttcctcagcgttatggagttagactaccactacaatcnnnnnnnnnnnnnnaataaagtctctgccatcctctcccccgactcaggtcaaagttcatagcagcaatgcacaaagtcctctgtgaagccagtgttctctgctccccgggtcagaggtcacaggtcaagttcagtcagtccgaagaatcatgggcgggtgctcgctgtcctcatccaggcgcagggcgctggcctcgtcctccaggcaggcgccacccacagcacccaggtcgtctgtgtaggcttttcctgcagctgcgccgtatgtctgagtgactaaggggcagtcgtgagaggcagagtccaagatctcattggtcgtttccagactgccgtccagccggtgctgcttcatcagggcacactcgccgccctcctgggggtccaggttgtacatgtacaggtacccgtcggcggcacccaccaacaaccgcgggatcttctgaattgtggctagcgagcagatgtttttgtggccgcagaatggcaggcggaccgtggcgaaggctctgccctggttgaacatttctgtcacttgggaaggcaggtagctggtggaggccatgagcactttcccgaagtacccggtccaggtggtgggctcctctgggggtttttctttcacagtctcgagtttgaagatgtgcacggtctcagtgttgctggaggcggagaggaacatgccgtccatgctgaaggccagggagcagatgctcacgcacctctttactcctctccgaaactcaaagagtttttgtccttctggaatggaaaataccctaatcacggtccccttctccgaagccgtggcaagtttagttccacttgcgtcaaaggccagtgccgctaaaggactgtcgtgagccggaatcatgtttgcagctctcaaattaatggtatcgaagacctgcacctctccgatggtcgcgctccctgggtacgccaagtagcagttgtcgttgttgattgacagcgcacacaggcctgcagggtttggaggcgtctccctgatcgtatgcagcaccttcatgtcccgaatgttgtggatgtacagggactcctccaggcatactatcagcctctgcctgttgagcttcacagccagaatcgtgttggagtagctgtagttgcagatctcagttcccttcttaaagtggcaaacctttagcttccttggtgctttaaggctcacgatggccactaggctgctggagaacaatctctctacaatgcacacatcttccgtatcggtgcattcatagatctgttccagcttatccacagaagaaagggagaaaaatttataaccggacttactaccaacagctagggaccagacaacagcgcgacggccaagaccagctgctcttgatgcccctttcacttctgtgttgtcctggttgaagttggcgaagagcagctggccggcgccggcctccccgctctggctcgccaggttcatggctgggcgcgcggcgagtgggcccggccggggagggcgcgcgcgcgagggcgggtcaggctgcactcagggtcggcgccgggccccgctccggacgcgtgggtcgacgatatcccgggaattccggaccc

SEQ ID NO: 122678 - DNA, 1468 bp, Homo Sapiens
  misc_feature (337)..(370): n is a, c, g, or t
  misc_feature (452)..(464): n is a, c, g, or t
  misc_feature (1185)..(1185): n is a, c, g, or t
  misc_feature (1226)..(1226): n is a, c, g, or t
  misc_feature (1257)..(1257): n is a, c, g, or t
  misc_feature (1307)..(1307): n is a, c, g, or t
  misc_feature (1312)..(1312): n is a, c, g, or t
  misc_feature (1319)..(1319): n is a, c, g, or t
  misc_feature (1377)..(1377): n is a, c, g, or t
ttttccaatttggaaagaatttaattaacaaaataaaacggagggaaaatggtccaggtggggccctagggagatcggacttctgtcccagctgaagtctgcccagcacacctggtgggcagcccctgggcctgtcactgcagaactggccttgacaagcagacccactgtgcgcgacgccacggtttccttacgcactcggcattatgtacagatatgaaaaaacccaacggcaggtggctggaaagtggcttctagctcccctatgctggcttggcacgttcatgcatgcaaagcgaggaggttttgcgggcttcaccaaacagttaattttggnnnnnnnnnnnnnnnnnnnnnnnnnnnnnnnnnnttcataagcaggatttaaaagccactgaagtgaaaatgatgtatttcctcagcgttatggagttagactaccactacaatcnnnnnnnnnnnnnaataaagtctctgccatcctctcccccgactcaggtcaaagttcatagcagcaatgcacaaagtcctctgtgaagccagtgttctctgctccccgggtcagaggtcacaggtcaagttcagtcagtccgaagaatcatgggcgggtgctcgctgtcctcatccaggcgcagggcgctggcctcgtcctccaggcaggcgccacccacagcacccaggtcgtctgtgtaggcaagtctcgttggggatgaaggcacgtaagtaccttttcctgcagctgcgccgtatgtctgagtgactaaggggcagtcgtgagaggcagagtccaagatctcattggtcgtttccagactgccgtccagccggtgctgcttcatcagggcacactcgccgccctcctgggggtccaggttgtacatgtacaggtacccgtcggcggcacccaccaacaaccgcgggatcttctgaattgtggctagcgagcagatgtttttgtggccgcagaatggcaggcggaccgtggcgaaggctctgccctggttgaacatttctgtcacttgggaaggcaggtagctggtggaggccatgagcactttcccgaagtacccggtccaggtggtgggctcctctgggggtttttctttcacagtctcgagtttgaagatgtgcacggtctcagtgttgctggaggcggagaggaacatgcgtccatgctgaaggcanggagcagatgtcacgcacctcttactccctctcgaactcanagagttttgtcctttctggatggaaataccntatcacggtccccttctcgaggcgtggcagtttagttcacttgcgtcaanggcantgcgctnaggatgtcctgagcggatcatgttgcagtctcaattatggaccaaaactgactctccnatgtccgctctgggtacgcatacaattgcctttttatgaacgcaacagctgagggttgggggtcccttattgtggagactcagtccgagtt

SEQ ID NO: 122679 - DNA, 842 bp, Homo Sapiens
ttcctctggaaatggaaatacctaatcacggtccccttctccgaaccgtggcaagtttagttccacttgcgtcaaaaggccagtgccgctaaaaggactgtcgtgagctggaatcatgtttgcaagctctcaaattaatggtatcgaagacctgcacctctccgatggtcgcgctccctgggtacgccaagtagcagttgtcgttgttgattgacagcgcacacaggcctgcagggtttggaggcgtctccctgatcgtatgcagcaccttcatgtcccgaatgttgtggatgtacagggactcctccaggcatactatcagcctctgcctgttgagcttcacagccagaatcgtgttggagtagctgtagttgcagatctcagttcccttcttaaagtggcaaacctttagcttccttggtgctttaaggctcacgatggccactaggctgctggagaacaatctctctacaatgcacacatcttccgtatcggtgcattcatagatctgttccagcttatccacagaagaaagggagaaaaatttataaccggacttactaccaacagctagggacgtgttgtcctggttgaagttggcgaagagcagctggccggcgccggcctccccgctctggctcgccaggttcatggctgggcgcgcggcgagtgggcccggccggggagggcgcgcgcgcgagggcgggtcaggctgcactcagggtcggcgccgggccccgctcgccgcctcggtcgccgccactcgccacctgggatcaaccgccgcctcatcccgtccaccgcgtcttgttttattgctccagccagtccctcgtgccgaa

SEQ ID NO: 122680 - DNA, 906 bp, Homo Sapiens
aactcaaaagagtttttgtcccttctgggaatggaaaatacccctaattcacggtccctttcttccgaaggcgtggcaagtttagttcccacttgcgtcaaaaggccagtgccgctaaaggactgtcgtgagccgggaatcatgtttgcagctctcaaattaatggtatcgaagacctgcacctctccgatggtcgcgctccctgggtacgccaagtagcagttgtcgttgttgattgacagcgcacacaggcctgcagggtttggaggcgtctccctgatcgtatgcagcaccttcatgtcccgaatgttgtggatgtacagggactcctccaggcatactatcagcctctgcctgttgagcttcacagccagaatcgtgttggagtagctgtagttgcagatctcagttcccttcttaaagtggcaaacctttagcttccttggtgctttaaggctcacgatggccactaggctgctggagaacaatctctctacaatgcacacatcttccgtatcggtgcattcatagatctgttccagcttatccacagaagaaagggagaaaaatttataaccggacttactaccaacagctagggaccagacaacagcgcgacggccaagaccagctgctcttgatgcccctttcacttctgtgttgtcctggttgaagttggcgaagagcagctggccggcgccggcctccccgctctggctcgccaggttcatggctgggcgcgcggcgagtgggcccggccggggagggcgcgcgcgcgagggcgggtcaggctgcactcagggtcggcgccgggccccgctcgccgcctcggtcgccgccactcgccaccctgggatcaaccgccgcctcatccctcgtgccgaattcgccacccaggcctcgcta

SEQ ID NO: 122681 - DNA, 1354 bp, Homo Sapiens
  misc_feature (134)..(164): n is a, c, g, or t
  misc_feature (648)..(669): n is a, c, g, or t
  misc_feature (823)..(838): n is a, c, g, or t
tgcccctaagcctttttaaaattcgggactcccctttatttggggggccccccttttgtacaaaaggaaagctggggtacggcgtaagctttgggcccccctcgagggggatttctctagagccgggccgcccnnnnnnnnnnnnnnnnnnnnnnnnnnnnnnngggtttctaatccaaacgcacttctctttattcaaaccagggtcaaactggtcaatgggaaacgccctgaagccacgtgcctggggagaaaggcttcctactcggttcggttcagcgctgcgtgggatccacgcggctggctgtgcgcaacccccacagttcacctcagacactaccaagcaggtcagtcgacaaaagcaaggaattaaacaaaaaacagaaatacactcagtagatttcttctagaagctcccagagtttctggaccaccaagtcccaacccccaaagccaggagcgaggggactaacagcgcaccccctccaccagtgccgacggaaaccccgttttaaattaaaaaataagccagtatacatcgtagaaaatttctcttaaaaatctcacaatttgtaaatgtatattttttctttaacataaaagtttacaatataccgtaaaacaaaaggctcaggaaaataatttccnnnnnnnnnnnnnnnnnnnnnncctgaagttttgaattaaagctgaagacattttttttaaaccctgttgttgaaccagtgacttttttttattgtgctgatgggttagagaaagaaatatttaaaaacctcagtccagacgacacccacagccgctccaaaagcctcgcgccctnnnnnnnnnnnnnnnngcaaggttgagtcgccactttgccgccaagtttgtgattgtcacgagttcacaagtttggaatcctgggtctgggccgtgcagacgtcgcggcgccgcgggctagcgtcggtaggggtggaacccttgcacgttgtggttctgccctcgtccaaagccgctgccgccggcgggggggccccccgaccctggcacggagggacccccgtaggaaggaggctgctggctggggtctgagaagccctgtccgaagccactcaagtcctgcccgtaacctgcatactgaccataggggaagtctggctgagctgtcgggggcttgctcatgtccggggcagcctgagacggaggcggtgggaaagccacaggtgctgccccgggagtggctggtggaggaggacccccggaggggcaaactgatctggcggtggaggtggaggcccgtagccaaaactgaactgtggcggggcaccgtatccctgagggaagcctggggagggggaaagctccaggaggg

SEQ ID NO: 122682 - DNA, 688 bp, Homo Sapiens
  misc_feature (367)..(549): n is a, c, g, or t
  misc_feature (553)..(570): n is a, c, g, or t
  misc_feature (663)..(663): n is a, c, g, or t
gtagcatggtgatattgcactatgcttaaccgcatccctggtctctactcactcaatgccagtagccttcttcctgcctgttgtgacatcaaaaatgtcatacattgccaaatgtccccaagaaagagtggggctgagggaggacaaaatcctacccacagtttaaaaccaccgccttatctcatcctcacagtaactaaccacagtaaccccaggtggtaagtactgttaatgccccatattgcaagtgaggagaccaacagaacagagtttgggtgacattcctgagaacacacagctccgagattcacgcccaggcactgtgactccagagctcacctgcccattatgcaagaacatctgatcnnnnnnnnnnnnnnnnnnnnnnnnnnnnnnnnnnnnnnnnnnnnnnnnnnnnnnnnnnnnnnnnnnnnnnnnnnnnnnnnnnnnnnnnnnnnnnnnnnnnnnnnnnnnnnnnnnnnnnnnnnnnnnnnnnnnnnnnnnnnnnnnnnnnnnnnnnnnnnnnnnnnnnnnnnnnnnnnnnnnnnnttcnnnnnnnnnnnnnnnnnngtagcatggtgatattgcactatgcttaaccgcatccctggtctctactcactcaatgccagtagccttcttcctggctgttgtgacatcaanaatgtcatacattgccaaatgtccc

SEQ ID NO: 122683 - DNA, 2332 bp, Homo Sapiens
  misc_feature (869)..(878): n is a, c, g, or t
  misc_feature (2149)..(2195): n is a, c, g, or t
cccccctggggatggctacacgtttggacagtcgactgtatgcactttggaaccggactgcaggagactgcctacttgattcagttctacaagctacctggggcatctatgacaaggactcagtgcttcggaaagccctgcatgacagcctgcatgactgttcacattggttttacacacgctggaaagattgggaatcatggtattctcagagctttggtttacatttttccttgagagaagaacagtggcaagaagactgggcatttatactctctcttgctagtcagcctggagcaagcttggagcagacgcacatttttgtactggcacatattcttagacgaccaattatagtttatggagtaaaatattacaagagtttgcggggagaaactttaggatatactcggtttcaaggtgtttatctgcctttgttgtgggaacagagtttttgttggaaaagtccgattgctctgggttatacgaggggccacttctctgctttggttgccatggaaaatgatggctatggcaaccgaggtgctggtgctaatctcaataccgatgatgatgtcaccatcacatttttgcctctggttgacagtgaaaggaagctactccatgtgcacttcctttctgctcaggagctaggtaatgaggaacagcaagaaaaactgctcagggagtggctggactgctgtgtgacggaggggggagttctggttgccatgcagaagagttctcggcggcgaaatcaccccctggtcactcagatggtagaaaaatggcttgaccgctaccgacagatccggccgtgtacatccctgtctgatggagaggaagatgaggatgatgaagatgaatgnnnnnnnnnntcaaacagcagaagaccaaggcatcagatctgtaatgaccctaaagttagtgtggtgctccaagcagagtcgacatcatggaatgaaccaaatctggcaggatctgctcggggaagtgttttcctggaccacacacaccttatggagataatgcctctgctgcgtgaggagacagagaactttagttggactacagtttgtaaaaaaaactaattttattaagacagaactttttttccttccaaattgtaaatctgtctataaatgtaacgcatgtggttgtgtaagacattgtttaataggaaaagttgtaccagcatcttcatattattgagaaaattttttccagcatgggcacttagaaaaagcacatggcaaatggctctttgttcctttcagatattatttcagtagaacctggcattctcctttcaccttaaaagatccatctaagtctcagatctggaaacgttttgtaccgattatccacagcaaaacaaaaataagcttttattttattaacaatttcgttcctcttgtgcccaatcaaatcttttaggaacaaactgcaagaaaagctaagaatgttttagagtgaactaaatacagacattgcttacttgttttgaagagggttttggttttggttattgtgtcttttaagttttctgatatgccccctttcaatatttagatatttatttgttgggaagaataccttaaaatgagggttcttattccagattctgggcagtggtctgtgagtagtttttttcctggatgaaaagggagcaagcccacttgtcactaaatgaattgtgtgaaatgtgctcacttggactccatcaacaatgtgctgctcccagattgccatgccagagggtcttcggattcttccttctatcacctctgctctaagcaaatcttgttagaagggcatgcctttgcttaggcagattgggaataccaattcactacagaataaagattttaaaaatgcaataaggtggcaaatgcattgtatgaagaatttctcagtgtttagtctgagaatttttgcatgttggttaattgtggccattctttaatttaaagttaaaactataatcttaggtagaacaacttttttataagaagtattatttgaccacttcaggtatacattcaatactgggtaaaaatttcagacctatctcaggaacacagaaatatttggtgtcctgataagcactttctagactattgatgtggccaggaatttggaaagacgnnnnnnnnnnnnnnnnnnnnnnnnnnnnnnnnnnnnnnnnnnnnnnngttttttccttccctgtgatgaaaaaggctgtgaaaaccttaaagtatttgcttgcttcttgttttgtttagttgataatgaaatgtgtacaacctcaaatttgctgccagaatactaaaaatagaaaaatacccac

SEQ ID NO: 122684 - DNA, 400 bp, Homo Sapiens
  misc_feature (236)..(262): n is a, c, g, or t
cagtgtttagtctgagaatttttgcatgttggttaattgtggccattctttaatttaaagttaaaactataatcttaggtagaaaaacttttttataagaagtattatttgaccacttcaggtatacattcaatactgggtaaaaatttcagacctatctcaggaacacagaaatatttggtgtcctgataagcactttctagactattgatgtggccaggaatttggaaagacgnnnnnnnnnnnnnnnnnnnnnnnnnnngttttttccttccctgtgatgaaaaaggctgtgaaaaccttaaagtatttgcttgcttcttgttttgtttagttgataatgaaatgtgtacaacctcaaatttgctgccagaatactaaaaatagaaaaatacccaca

SEQ ID NO: 122685 - DNA, 417 bp, Homo Sapiens
ttttttacgtgttcaaagtattttaatgtccaaaatgaactgtttttcctccagtttccatagaaaatataactgacataaaaagtatcccaccactacaaggaaataatccagcaaatgcactcctgggttgaaacagggcagaatgccagctcaccaatgtgaacagtcatgcaggctgtcatgcagggctttccgaagcactgagtccttgtcatagatgccccaggtagcttgtagaactgaatcaagtaggcagtctcctgcagtccggttccaaagtgcatacagtcgactgtccaaacgtgtagccaattccaaggaccagttaataattggagattcttcttctaattctttttgaacgtctctatcaagcacctcatcaaataatttttcttggactgttgggggcaa

SEQ ID NO: 122686 - DNA, 1016 bp, Homo Sapiens
cctgccgttgactctttccaagcaacttgcaccttttcttctctctaccatatgctccattcttactctttttatcctctgaagagtcacgactatctcctttccctgttgacttctcagcataatcagataattcatccttctttttagaagttgttatctcttatttttttacattttcttttctccatcagttgttccattcttaatttgttttatgcccttaggaaaatgacaaatttcttctcgctacaggtaacttttcagtgccatcagatgaagattcatactgttgttccattttaattactttatttcttaaagttctgaaggtttctttttttcttcagttccctttttgctctgctttttatcatcttcagaagtttcatcgctctggtctttctttaggaatttctctgcaatatcagataagccatcctgtacttttttacatgttttggttttgagagtgcttgctcttttctttagtttcagcaacttttctaacttccaaagaagtaaagctctgctctttcccagaaagtttatcgacaccatcagtggaagcgcttgcttgctgcttcttaggaagtcgatctcttaattccatgatggtcgtgtctttatcaactgtgcgttctgctgaagagaaagtctctctctcttgttttctttcagcatcatcagatgatccttcttgtgaggtcttcaaatttttgtgcccttgattatccattccttttttgctgtgtttctcatcttcagaagagtcaaaatcttttgtatttggaattctttttttggtggttctggcagcaccaattttactcatgctctttatctctttttctaattctgagtcataattagaagactcagactgggtttgtcgtttctttttagaaattatagagctcttagctgatttgccctttttagtatcaaaatctgagccagatgtagaactttttcgtttcctttttcctttatcatctttccccgccttcagcccc

SEQ ID NO: 122687 - DNA, 768 bp, Homo Sapiens
  misc_feature (631)..(644): n is a, c, g, or t
ggaatagaaacagtttcaaccagattgtcctattccccctgttccattcccctcttcttccttctatctccttccccggcaaaaaccaaacaaactggcagacaggccagggatgtatgttgcttgcttgagagggtttcttttacttcaaaatctttcttcagggagcaagacatgaactgactaattggtatccactacttgtacagcttacataaatgagttgatgatatttaaccagtttttataaacttcatttaggtctctaaacacagactttttaaattgcaactgtaaatatgaaatggtcatcacatctgaccttggtcagtggggaggggaactggtatcctgccaagcctggttgtaatttgtaaccattttctatttgtgcaaactctgtaaatatgtgtttaaacaaatgtaatattttgtacaagatacactggagaacaaagggaactcaagattcttccagccacatgtcacctgtaggtagaagtaaactctgcagtgcagcttctgctcttggcccctctggccagggcccctgtggcttcctgcacactggacaggtgactgtatggtagagactgtgatctgggaactttttgctgtacaaatctgtttnnnnnnnnnnnnnngtaactcattgaattaacttgcagtggtgtgtttgattcttttttagactggcttcagcattgtgcagtttaaaaataagtaagtaacttacataaatcttcaattgtatgaactgcaaaaaaa

SEQ ID NO: 122688 - DNA, 1624 bp, Homo Sapiens
  misc_feature (96)..(97): n is a, c, g, or t
  misc_feature (167)..(167): n is a, c, g, or t
  misc_feature (172)..(172): n is a, c, g, or t
  misc_feature (174)..(205): n is a, c, g, or t
  misc_feature (208)..(285): n is a, c, g, or t
  misc_feature (427)..(427): n is a, c, g, or t
  misc_feature (1271)..(1290): n is a, c, g, or t
aaattcccaaaccccccctttgtttttttgggccccggggttttctctttgggagaaaccaagagttttgggcccccgggttccccctttcccttnngggggggccgcgggcgccacaacgaaaaggtttttagaaaaattttttggaagggcgcgagccgggcccncccangnnnnnnnnnnnnnnnnnnnnnnnnnnnnnnnnggnnnnnnnnnnnnnnnnnnnnnnnnnnnnnnnnnnnnnnnnnnnnnnnnnnnnnnnnnnnnnnnnnnnnnnnnnnnnnntttttggagttccagtgggcttttattgagataaattaacaaaaaccaagattttaccatatttttggaaccttataaactcagcagactccggtccatatatgcgtacatacaacataacacatcccaacaaaaacagagncccccccgccccactggaacatctgccaattaagagaaagccaattttcccttcccccaatgtttctgaaattttgagttcccactgttcacttctcagtggaactggtcccttgtggctagggacattggaattctctaccatttttactgaacaaaaaataattttttttcctgtttcaaaaaagggaatagtgactttgttttctccaggctccccttcccccacaaccaatgtaaaatacagcagcctgtatcttaataacccagccctaccccctcccttacccagcattgtctactggagaatttaaatacacttctgttggaatctgtcagctgtggatgggcagagtccaggtgccaggctagctccctctgacctcatgaactgtgacaacctttggacacttaactctttaccccaaagatgagtttttagatcagaaaggagagcagattttctttgggagttttaaaaaactatctttagatttagagatacaaagtacaactacaatctcacagaagtccactaaagttcaccaaaaagctgacttacttcagctctcatgaggccaataattttgataaaggtatctggcaggaaaatgattccacaataacaaatttaaagatacctagaacattgaaaaaaatagcaaattaaaataaatggcttaatttccaagaacttatttcatttttttgttactcatctagaaggtcaggagtgtggctaaaggcagtttctgatgaggttatgagcttccaaagtgtttctaaatccttagtgcagacaccctcccttttggggcaaagtaccctccctcccacccctattnnnnnnnnnnnnnnnnnnnnttaaaccacgtcatcagaatgagatgttttgattccaacaatttatactcaaggctttgtgctgagttgtcgtttgaaccaagcatgatgttatcaagcacaaagcacgtggcaaaggaaagatgctcccatctcattctgaaaacaaatactgataaccaagcccaccctccaaccctttggggccaacccattttatgctgctgggaccaacttcaaacaatttagaggtatatttaggtttccctctctcttacttctgtgaaagatcattttagaataaatgtattccattcctatgggagaggcaaaacagtatttatccccatcagaa

SEQ ID NO: 122689 - DNA, 721 bp, Homo Sapiens
  misc_feature (706)..(706): n is a, c, g, or t
agtaattctatatgttttattttttgtatttaaggcattattctgagaagaggtctgtaggcttcaccacactgccaatgggggtccatggcatacacagggaaaaaccattaagaactcagtaaatttcagaatcccaaacctgtcatttggcagagataccaccagggggcggaacaacaaaaggaatgtgagctccaggctgcaaagtccaaaagggagaaggtattctacaggcgcttcatccaaatctgtgactaagtgccaaaaaagaaggagccttagagagcaagccccctaggatattgtcatctggggaaactgaggcaggtaggggcagagcctgagtgaggaaaacccaggtcacttagcgcccagtcctttcccactgcaccgcactggaccgccagctgctctcttaggacctagctgatgaagcggaacgtggaaccacttctgtcctcgactttaccccacttcccactctagatggtagagaagaccgtggatcacctggggacagaggtgaaaggcctgctgggcctgctggaggagctggcctggaacctgcccccgggacccttcagccccgctcccgaccttctcggaggtgagcagtgcatgtggcagaggacagcctctgggcggctgtcatctggcgctgggcaggcgagacagggacggctgctccactgcacaggtgtancctggctggcaggga

SEQ ID NO: 122690 - DNA, 707 bp, Homo Sapiens
aaaaacaacaacaaaccactttaatggacacataaaatccctgggggtctcattgcaatgcaaatttggattaaacagtctgggtgggtcctgagaccctgatccccttgcttttcacctatggccacattttgagaagcaaggccactcaaagggcccccatctgtgtgaatcaacccctgctccatctgcccctataaatgacaggagtgggggtgtccccaggtctgagcctggagggggttgcaggcttcctccaggcatggaagtggagtgagaggaggctgtagttaaacgggttactctgtcagcagacacagaggagaccagaatagcttttatttcacatgaagctaaggaaggaagtcgagaggacagggctggttctgtgggcgctgcctggcaggtgcaccacctccaactgctgggctccagctccagggctcagaagccatctccgagaaggtcgggagcggggctgaagggtcccgggggcaggttccaggccagctcctccagcaggcccagcaggcctttcacctctgtccccaggtgatccacggtcttctctaccatctcctccatgacatctagacggcgttgcacagccatgtgtctgtcacacgctgtgctctgagctgagtctcctcgcggagggctgaagggttcggcagcggccaaagagcccgcggcgcggagcagggcca

SEQ ID NO: 122691 - DNA, 1369 bp, Homo Sapiens
  misc_feature (44)..(44): n is a, c, g, or t
  misc_feature (65)..(67): n is a, c, g, or t
ttaacttctttctcccgcccccggccatagatgcctccgagggnttttttcttctttttcccttnnnttggggatgcagcactttctttattgcccatccagggaacagccaagccagctccatctgcattctggctgcagcgtgtacattaggggactcaggggccacagtgtgggaccgtgcacactggcaaggcactggcggatgctggcaggccagtggacatggatagatgagaatgacaactcacagatgtcctagcttctgctggcccagctgccagccactggccatcacccttttgcccagcatgtgtgcattgtcacccaaaacatcttgaaacttgccattagtgaggcattcaacaaagaagtaagctaagtgagtaggaaacagtgtttcctggaatataccgcactctgcctgaaataggaaaactatgtttgccgggaagcagcagcagcaggaaagaagttataccaaaaacgacttgtacaccacagacattataaccctttcctcaaagaaacagtcatgttctgttgggtattatggacaggtctctggaaatttatctaataaagaccaacaaacttccccagcagtgcctctgagtaccgtgtgaattctggtgtcttgtggaagtcagggtgccttctttgcatccaaagctttgagggagctgggaagctttggttccattttaggagggctgtgtgatggtgacaaaggtgttctggtcatttctgctctgttctccgttctgtgaagtgaggtggatgtaatgtgctgtgggatggggtgctccatatgtgtgtgtagcctttactttccaacttagttttttgcatctctcttgtaccgatgagccatacctctcagccttcatttggtcccaggcctgaccctttgctttcatcgtcagcttttctgtcctgctcgggcaggattaactctgttcttgccgcggatgtcaccatcactctggagtccagcccagtgcccacaggcccgatcagttcaccctcttccttctcttcaggggagaaactttctcgggcatcaaaaaacgtgattgtttcttcttgaagtttttgttcttccagctctgccccatcttcggtgcttttgcttttcttggtaggagatgaggagaaccctaatttgggaaatcggaaccagcctgccttctcctgtttttttaggcagttctgcctctggtcgtgcctcaggctgtgtttgaatgggagcagatctctggacgtcatttttggaatcaacacctgtctcatcaacagaagaggaaaacccaatgtttggaagccaaaaccagagcagaccagattttttactttctggtttgtcccc

SEQ ID NO: 122692 - DNA, 1763 bp, Homo Sapiens
tgcacagtatttcttaatgtaaaattgtgtgatgcttatatcattaaaatcaacttatttattttatcttttggctttcaggtggaattttagaaaatacctggcaagtgaatagttctgaaagtgcttcctcttaagttctttggtataatttggtcattttgatagtaatcaacccattaagtaggtactttaacaccctcatatcaattaaaatggaatgtggagtacagatatttagaaaaccatgactgaggaataaattatatttttgacctcatggaaaacagaactctaaaattttacttatgtttctgtggcaaagatagccatactgcctatgaagacatctctaactttatattaaagaaatgttctataaaacatctctttctgattattagaagtaactgttctatatacttttttaaagtagaagaggcaagtttcaacttgaaaaaagaataattttgaatttcataaaattatactctttcatgccttctgattcagtaattgtcaacatctagaatttaatgtcagtttgcagactgttaaggattattcttctatttcaggaacagctaattttcctcttgaagcattttctctatttccttatcccagttttcatctcgtttttcagattctgtcaccacttcatattcttgaagttcctgctgcagttctttttcccaatctgcagaatcctcttccagtacggctgtctcctcttgctttttgtcaagcactagttgctccatttctttccttagatcttcctgatttaggttacaggcatcgaaggcatcactgacaaactcagaaacacctgggctagtagaaatttcttcctcatcctcttgagttttaagctgagatttgattacaacgggtggcgttttgggccgtactgcctctgccagcggcaaatcttgctctctgccattgctcttctcctcccttccctgcggcctgctgttgggcagccagggccgtgagctgggctgactgcttaatcagggagacgcggtaaaagtagttcctccagaacacttcttccttcacaagtttaggaacgagggcaaatctcatcttgcttagcagctcatcctcctggagcatgaccagggccacggggtacatctgatcaaagtcgaaattaaattgcacgccagccggagggtcacgaaggaaattcctcttgtcagctgataaggccaaaatttgttgttgaattgtttcttcatcgttagtgtcaacccatgggggcacagctgcttctgacttctttgtatgttgctcttcaacaaattttttctgttccttctgaaaatctcctataattgtcttgtcaatgatgccatctatttttccttcttctacggatttctttattgtttgtgctgtttcagcaactgattcagttatcttttttgtggcagcagatgcaaagttaaataaatagttgccgaagtctttggcctggtggaggagctcctggtctcccgcttgctgcagctcctcctccgcagactcagccaccgtctcggacggctgctcgggtggagcatctccattgggctgcccaccgcctgccaccggctgctgcaagcccaaccaactgctcaagccccggaacatcccgctcgcgggccgccgccgcggtcccgatccccagagaccgcagcgagcactggttgcctttgcctcgtgccgaattcgccacccaggcctcgctaccttaaggaccgttatagtta

SEQ ID NO: 122693 - DNA, 1721 bp, Homo Sapiens
  misc_feature (1339)..(1359): n is a, c, g, or t
tttttggtttgttttctttcatttaattgcctcatatttaaaaaccatgggtccactgttaaaaccacatgtgtatgtgcagctttacattttattttacgtgaagcatgtgattaggaaaactcattttcttttcaagcctcaggacctacctgaagagaatttttcttgtagctcaagttgtgcatgaattactgaatattttactgtgcttttcttcatgaagggtacatgctttgtactcttcactgaaagctgaaaacatttcttgttaccctcttttgtgcctttttattttgccaaccgtgtttatagaaaggacattactaatgacattttgcagattaaaaacattcatttgaacacagtagtcccctagaaaaacaactctacaaaaattttgcagccttattcattataattttaataaaattaacacaaaatcagtcaagaaggaaacatgtatattagtgaagtgtttttggagactgtttgaatgtgaccaaatgtggttctagttgacttcttttcactttggcttatatcaactcttgagagttaatgtgatcatgatattgcaaacaactataaatggtctctaggccttactttgtgattatacgttatctctggctagaaaaaaataatggtagtaaagaaactgacaaactgaaaataagaaaacaaaaatcaaatgcctataataccataatgccagtttggtatagagtccaactttaaaacatgaattgctcgacagagttctattcagtaggtgtttctttgtattgtcttttgtgaatttattatgaaaatgctgcgttgtgttgaatgaaaaagacccaaattactgcttatgaagaaataaagccagcattgatcacttaatcctgtttctcatgtccagccagaaaaaagaacttcagtgaaggtaagataaataaatacatacacatatgtttttttggtagataagtgctaattacatatatgtaatgctttattaaatttctgaaatatttggtaactaaaattttctttttggaaattaataaatccagatacatattaatgttgatatgagtaaaaacaaataggaagaaattgaaatttcttttcatcaacatgtagagctgctattttactatttggagaatatgatgtgaaaattggacctcaaagggtttccttgtgttttcattgtaaaataccatcatcagtgagagtcttgagttcactaacattgtcaccttctggagagagagttaatggggggcattgaggatgatatttttttacatgtgtttggtttctgattcaagtgacacgcacaaactgnnnnnnnnnnnnnnnnnnnnngcaacaataactttcagggcacctattgctctaaatgcataatataacttgctgccagaaccagatgtgtttaaaaaagaaaataaaaccgccttctttctgtagccattaaagcaaactttactgttctaacaaatttgtattttattttgcattgccacacatctgcttatttaaaaactacatccctttggtagtaatgtttcaggacaagtaggtattacagcttgatgtttgtgtgttctaattctaagagttctttattccagatcatatagagtagttaagacaactgtaacagcattttttgaaatacattgtaaaataataaaaggtaacataattaaaatcgagtggatatt

SEQ ID NO: 122694 - DNA, 998 bp, Homo Sapiens
tctattttgaaattctagttacctaaatatacagtagttggataaatagctaatcgatttacacatacatctaaactgtaactctctatagtatgaactgttcccccaacttccctgcacagtacaattgaagagtagtagtacaacaatttgaacaatcaccagttgtacaattttaatgttatattaatatatgtagactaaaagttcttaagcaaattattatttccagtcttattcattgatctacaacttccattaattgaaattatagagaagtcttcactgttttaattaaagattttgtccaggcatgagaatatcactaatttttattgtgactttaagtctgtaacatttactgcagtaaagagtcaattacagtttcaggctttgcagaacgctttcttctccctgtctttggccttgctttcccctttgaagttcgtggtctttctagtttcatcaaagactgacgcagactctcctcagtataggcaagatacacgtgagaaaggtccacctcaaagggatctttctcctttttatcaggtactggggtttgcttcctcatgttatttcctgtataagcaacacattttagctgccattctcctatgtcttcattccaatggacatagttttcaatcatttcctgataatcccgaggtataaagttatcaataataagcatctgaagtcgaagctcccggctaagttgccgaatgttctccagtaggccttcaatttccctctgatgttcttgttggagatcagccatctctgactttgcagccatcagcatagtccaaactttctttaacttcttggtctttccctgtgcttcctcttgcaaactggtatatttttcttcaatatccaagcgttcttgctctttttcctcaagttctctgcgaagttgctctgctcttttcctcctttcttccagttccatgttagattcttcaggaagtttctcttgttcctcagctttgggc

SEQ ID NO: 122695 - DNA, 2496 bp, Homo Sapiens
  misc_feature (1898)..(1911): n is a, c, g, or t
ccctgtggaagtgcttttattagcagtaaggctgatcgtacaaaaaattctcagagcttcataggacaaggtagtacaagtatggatgatacaggactgaggaacgggggacggctcaaaagaaatcaacatcgtctggggcatccaggtcccgatattccacaatggcccttgggtctccacgaaccatcctgttgcgaggtttcccaggataacctccctggcctcggaaggcatcatagttccctcgaccagcaccatacggggcatgggcccccgaacgtggatgatcccacagcgattgggcatctcgtcctcgttggggtactcacaggtgttgtaataatccaaggaatgcacgatgcgcaggtaaaggaggagcttgtccaagaccttaatcaacttctcatcccgctccacgttgatctctgccgggttcccttccttaggaggctcctcaggaggagcgcccccgctgctccccagcagctcctcctcctcggcgcttacttcctcgatcaggtagtcggtgatattcttcaagatcgggttttgcgagggcaggctcgtgggcaggggaggcgttcctggttctgaggcccaaagctgtgtcctgtcatccagcgtgtggatcagcttggccgccagcttgatgtcgttgcgcacaatctgcttgtgctgggtgatgccgttgatgttgcgaacgcgccgggtcaggtccctgttcacaccagggctcagctcacactcccggagacggatgttctgcaggttccaacagatctctttaatgttaacactgcggtcgaaggtcacccagccacgacggaaaaacctcctctctggctggggctctgagagcgccacccgcataaagcctgggtaccttttacaaagggagatgatctcggcccgggagatgttgggcgcgatgttgcgcatgaagagggagcaggtcttatgcagcggccgcggcttgcactccagccccgcggcgtccttgggcttctcccattcttcttccttgggcttctccttctccttgagcgcttcttcggcctcctccttctcctcctcagcctggccgctctctgactccgactcagactctgacacgctgccctcgtcaaagctgtcgtcaccactgtgcttccggttccgcttcttgctactctttttggcttccttctcggagtcttctttcttctcttccttgtccccatcaccctccgacttctttgttttgtcatcattagaactgtcattctcagcctgcttgccgtcttccttcttctcatccttgtcgttggttttgcgctccccgtcccctaggcctgctccagcccgtccttcttctttcttgctgggctccccaggctttcctgcctgctcctcctcctcctcctgctccaggatgcggagatcattctccgtgcctccttccatcttaatcacggctgcatccagcatcttgacaatggcatcagctttgtctatgtccaggagaaggttatcaaaccagccagtctccatgagggacaggaagaccctcagtcggttttgcagggccccccgggcctcctgccgacgcttccccacctcatctgggtggtacttagaccgaaaccactcctcatctttgtgcgccaggaagaaatcctgcatctgttgcctccggaaatccagcttgtagtcattatagcgcttgacggcctccgtctcatccaccgagtcatccagggagaggagaaactccttgaaggtcttcatcacgggcggcggcacacccaggtcaatctctgcaatgctgcccagcctggcctggataggcaggacatggtgctgcatgatgtggacgtcagggtggccccagggctgaggggggccataagttgggnnnnnnnnnnnnnnagcatagggcatctcatagccactgtggtatgggtcagagctgtgctcatcccagtctctcctcatgcgcttctgtggcgggctgagttcgtggcgaggtggcgagaagcgctctcgccgattccggtcatagtcccgatattcaccccgactacggcgctcacggccacggtcccactctctgtcattccaatcgtcccctcgacgtctttcatctctctcgcgggaacggtcgtagtcgctgcgctctcttctgaacttgtccctgcgccttcgatcgtactcgtcatcactgtcacccatggcacggtctgagggggccttggtgcggccgcggccgttggactcgcgctcggacgggctagatttcagggcgacctgggtcgcgggcgcgcgacgaggacttcgaggagggcgagacggagacggagctcttgagtagagggccgaagagaggcgaacaaaagtgggacaaccggggatgggcagtagcgcgcgcagcccgccctcgtgccgaattcgccacccaggcctcgctacttaggaatgtgtggtgacgtggtatacctcccctccacccaataa

SEQ ID NO: 122696 - DNA, 737 bp, Homo Sapiens
  misc_feature (690)..(690): n is a, c, g, or t
ccctgtggaagtgcttttattagcagtaaggctgatcgtacaaaaaattctcagagcttcataggacaaggtagtacaagtatggatgatacaggactgaggaacgggggacggctcaaaagaaatcaacatcgtctggggcatccaggtcccgatattccacaatggcccttgggtctccacgaaccatcctgtgaggtgagaggtacaggatgagagctgagggctcccaaaagggagtctgcaggcggcaacaaagcttgggcgtctgccctcctcacctgttgcgaggtttcccaggataacctccctggcctcggaaggcatcatagttccctcgaccagcaccatacggggcatgggggtatggagggcctcctgtggggactgcagggcggacagcaccagctatgacagagatcagtgttgagttgcaaaactatgtcctcaattccatcctctgttttcttctcccaaagccacacactcaccaagccccttcatctccctcctgtacttacctccatagcccaagatcgggggccggggctgaccatagggcatcaggccctggggagtctggtgtgggtaggggagtcctggggtcaaacctggggggagtacaacacggacagggacatgaattactgcgggggcggggagggggatacgggtacaattgacttctanggctatggcctgaggatggggcagaacttctcggggtgacgcgttaa

SEQ ID NO: 122697 - DNA, 1030 bp, Homo Sapiens
cgaaggattatgtatgtgaaaataagggaggtattccgattggtgttatagaggtggtgggttttggtttccctgtggaagtgcttttattagcagtaaggctgatcgtacaaaaaattctcagagcttcataggacaaggtagtacaagtatggatgatacaggactgaggaacgggggacggctcaaaagaaatcaacatcgtctggggcatccaggtcccgatattccacaatggcccttgggtctccacgaaccatcctgttgcgaggtttcccaggataacctccctggcctcggaaggcatcatagttccctcgaccagcaccatacggggcatgggggtatggagggcctcctgtggggactgcagggcggacagcaccagctccatagcccaagatcgggggccggggctgaccatagggcatcaggccctggggagtctggtgtgggtaggggagtcctggggtcaaacctggggggagtatctgggcggggccaggtggctgggctggcttgatctcaggcagagctgggcgcttagcatcagtgaggaagttgttaaaaaacgcgacttcctttttcacttcctcaattttctctgcatgcttgttgaagatatgtttgcgcacaaactcaggacccttgaatttcttgccactgagaggacacagccacttatccttgcccagttcctgcgtgttggaggtgacgaacttctccacttcctgctctgggtctttgcgccccatcttctgggcctcttcctctgagagtgactcccgcacactcagcaacggcgtgagcttctcctcaaaagtcttctgccactccagcacttccccgtgactgatgcggttgggtggcatgggcccccgaacgtggatgatcccacagcgattgggcatctcgtcctcgttggggtactcacaggtgttgtaataatccaaggaatgcacgatgcgcaggtaaaggaggagcttgtcctcgtgccgaattcgaacccagccccgtactagccgaagtt

SEQ ID NO: 122698 - DNA, 927 bp, Homo Sapiens
tttttgaacagcaaaactgagtatgtttactttacacaaagtacaatccagtatatgcagaaaggtactcagcatcacactcgtgatcaatatcctcttatttccatttggtatgtcactgaaaacctggcacaccacttagctaaaaatcacataaaagaacccctagagaaatcaaactgatgttttttttcccccaaacaatagatttcctcttcattagtcaaatctgatagtgatattcattaataaggaaaactaaagttttcaagcatcaactctgaatggcagagaccctaatctgactgttattagccaccaagaactcagaagagcaaagaactcaagaagaggcaagcaagagcactatggaaattatattcttttctgtgaaattcagtcccacagctatttgagcaagggcccaagacgatggagaggcggcaaagctgctgggagggcctgttcgcaggcaggaatgcactggctgtgcctcgccccgccatgtccttccacaggtgggctcttcactggcttcacttcagcttgatcctctggtctccccacagcttcctgggagactttgggttgtaatctttacagttccaagaatcaattttggttgaacgcaagggtaacatccccatccaaaacagaaatgttctcatggtatgaaggccattctgtagagtgcacgtatatatgtttatatttatataggctcctatgcgagacagtttccttcctcttagcaagagaatactgcatccagcaacactgctttggctagctcttttttctgtatggcctcatgtgtgtggcaattgaagcagctatttctcccttcctctttttctggccaaaataatctagaaactcaccatctggtccaatcaagtacattattattgtgtgatccactatgta

SEQ ID NO: 122699 - DNA, 1055 bp, Homo Sapiens
gagacgagtctcgacgcagcagctgtcagctccattttgttgttggtgcgcgacgcagtcagctgcgtgattcccgtgattgcgttacaagctttgtctccttcgacttggagtctttgtccaggacgatgagacactcaaagagaacttactgtcctgattgggatgacaaggattgggattatggaaaatggaggagcagcagcagtcataaaagaaggaagagatcacatagcagtgcccaggagaacaagcgctgcaaatacaatcactctaaaatgtgtgatagccattatttggaaagcaggtctataaatgagaaagattatcatagtcgacgctacattgatgagtacagaaatgactacactcaaggatgtgaacctggacatcgccaaagagaccatgaaagccggtatcagaaccatagtagcaagtcttctggtagaagtggaagaagtagttataaaagcaaacacaggattcaccacagtacttcacatcgtcgttcacatgggaagagtcaccgaaggaaaagaaccaggagtgtagaggatgatgaggagggtcacctgatctgtcagagtggagacgtactaagtgcaagatatgaaattgttgatactttaggtgaaggagcttttggaaaagttgtggagtgcatcgatcataaagcgggaggtagacatgtagcagtaaaaatagttaaaaatgtggatagatactgtgaagctgctcgctcagaaatacaagttctggaacatctgaatacaacagaccccaacagtactttccgctgtgtccagatgttggaatggtttgagcatcatggtcacatttgcattgtttttgaactattgggacttagtacttacgacttcattaaagaaaatggttttctaccatttcgactggatcatatcagaaagatggcatatcagatatgcaagtctgtgaattttttgcacagtaataagttgactcacacagacttaaagcctgagaacatcttatttgtgcagtctgactacacagaggcgtataatcccaacata

SEQ ID NO: 122700 - DNA, 1220 bp, Homo Sapiens
  misc_feature (1107)..(1141): n is a, c, g, or t
ttttttttcataagcacaaaaaatttattctgaataaatcactttacaattactgaaaaagatgttcattaccttagctatgtacttaatgaaccaaattacccaaacaaaataaacatggcaatataaaaatgttaagaatttacaaagctgtacaaaataacttaaaatttaaaaattagactgatacagtctgtaagatctcttcgagagagctgtccaattacagatctatatacttttcttcagaaggtcaaagaaaggatgctttaaggcttctctgagagtaattcttttggctggatcatactccaacattttctgaatgaggtcaaagagacgctcatgttcaacatcttgagaaagcataaattccttcagaggtttacagcgtcttgaaacatatctgccggcagaactgtgttcatcccagtctaatcgatcgtggtgaaaatatttacgtttcctggttttctgtatcatatgttttggtagaggtccaagaatcctttccatcattgctaaatgctccttactatcgtgtgttggaaatacggtaaacccaagatagtattcaataagaatgcatcctatgctccagacatcacatggttgggaccaccctagggctaaaataacttcaggtgctctataatgtcttgtagataccaatgtactgtgatgttcgtcatcatatgttgcactaccaaagtctacaactttaatatctggatttattaaggtgcgttcatcacgttttattttgggattatacgcctctgtgtagtcagactgcacaaataagatgttttcaggctttaagtctgtgtgagtcaacttattactgtgcaaaaaattcacagacttgcatatctgatatgccatctttctgatatgatccagtcgaaatggtagaaaaccattttctttaatgaagtcgtaagtactaagtcccaatagttcaaaaacaatgcaaatgtgaccatgatgctcaaaccattccaacatctggacacagcggaaagtactgttggggtctgttgtattcagatgttccccggccgtaatggccgaattcccgggcatatgtccggtaccgtcgactgnnnnnnnnnnnnnnnnnnnnnnnnnnnnnnnnnnncggccgcttcctcgctcactgtctcgctgcgctcgtcgttcgctgcaaccgagctagcgccctatagtgattatcactt

SEQ ID NO: 122701 - DNA, 1116 bp, Homo Sapiens
  misc_feature (738)..(765): n is a, c, g, or t
gtgatctaattttacttaacttttattgaatggttcaatgatgttgtataattagctcctccaaagtaacactagaaaagcatcctattacacaagtttataaaccttaagtgtgttctagactagaagtcatttgatgatagggagatgggtcaatcaagaaagcattatatacacagaatacaaataaaagtttattgtacaaaattaaggccttcgtatttcatagttcaccaaggctaaagaaacactggataatttaagtccttcacaaaaatttcacttttactcctcctcatctctaactattaaaatgacccagccaaatgttatcaaaacaaacactgtaaataacaccaagtcttttaaagacgactatcccaaatgttatttcttggcataggtgatcttcatagcatgggacggtgtgatcttaaatccctgtaaagcatccctggcagctccagcctgcccatcattttcaaattcaacaaaagcaatgtcatgcctccctggtaccagacgtacttccttgaagccagggaactgattaaacagcatggataacatcatctcattagtctcttctggtaagttattaaggaataaaatatagtttggagggtaatcagggacctgaggatttggtgttgaatttccttgggtattagctgaatttggagttccctggccaggctttttgtttgtggttgttgcagtctgttccacagtttaggnnnnnnnnnnnnnnnnnnnnnnnnnnnngtcagcaaaagttccacgcatttttgatattatatccgaatctgtttttgcatactgtattcgcattggtttaccataaaatggaaatccttgtagctgtctcaaggcatttgtggatgagcccagttccttaaatatgacaaaggcctgccccctcatcttcatggtctttaaagccacaatgtccaccacatgaccaaactgagaaaacagggcatatagggatctcttcaattcttcctttttaattttgtcattcatattgttgatataaattgtatgatttggtctgatatccatgtttgtgttaaattcttcagggagaccagtaaaaaatctaaggcctacgcc

SEQ ID NO: 122702 - DNA, 1013 bp, Homo Sapiens
acaaataaaagtttatggtacaaaattaaggccttcgtatttcatagttcaccaaggctaaagaaacacgggataatttaagtccttcacaaaaatttcacttttactcctcctcatctctaactattaaaatgacccagccaaatgttatccaaaacaaacactgtaaataacaccaagtcttttaaagacgactatcccaaatgttatattcttggcataggtgatcttcatagcagtgggacggtgtgatcttaaatcccgtgtaaagcatcccgttggcagctccagcctgcccatcattttcaaattcaacaaaagcaatgtcatgcctccctggtaccagacgtacttccttgaagccagggaactgattaaacagcatggataacatcatctcattagtctcttctggtaagttattaaggaataaaatatagtttggagggtaatcagggacctgaggatttggtgttgaatttccttgggtattagctgaatttggagttccctggccaggctttttgtttgtggttgttgcagtctgttccacagtttggcttttttcttctctttttgctttctctttgtcagcaaaagttccacgcatttttgatattatatccgaatctgtttttgcatactgtattcgcattggtttaccataaaatggaaatccttgtagctgtctcaaggcatttgtggatgagcccagttccttaaatatgacaaaggcctgccccctcatcttcatggtctttaaagccacaatgtccaccacatgaccaaactgagaaaacagggcatatagggatctcttcaattcttcctttttaattttgtcattcatattgttgatataaattgtatgatttggtctgatatccatgtttgtgttaaattcttcaggagacagtaaaaaatctaaggcctacgccgactactgtaagaaccaaaagcagccccggccgtaatggccgaattcccgggcatatgtccggtaccgtcgactg

SEQ ID NO: 122703 - DNA, 1033 bp, Homo Sapiens
  misc_feature (925)..(959): n is a, c, g, or t
agcgggtagaccccagtcttaaccctccccaattattcctgcaaggtattctaatacatgcccgtgtgatttaaaaccctgtaagcaccctgccactccacctgccaacgatttcaagtcgacagaaagcattgtcatccctcccggtaccagacgtacttcctgaaccaggaactgattaacaacatggataacatcatctcatttagtctcttctggtaagttattaaggaataaaaatatattttggaggtaatcaggacctgaggaatttgctgttgaatttccttgggtattagctgaatttgggagttccctggccaggcttttttgtttgtgtttgttgcagtctgttccacaagttttggctttgtttctgtgttctgttgttcttttctttgtcagcaaaagttccacgcatttttgatattatatccgaatctgtttttgcatactgtattcgcattggtttaccataaaatggaaatccttgtagctgtctcaaggcatttgtggatgagcccagttccttaaatatgacaaaggcctgccccctcatcttcatggtctttaaagccacaatgtccaccacatgaccaaactgagaaaacagggcatatagggatctcttcaattcttcctttttaattttgtcattcatattgttgatataaattgtatgatttggtctgatatccatgtttgtgttaaattcttcaggagacagtaaaaaatcccagcttcgcgcttcgtccgctcccagctgcaacaggggagaaaagggccgaggagccaggaaaaccgaaacagcgaggtagaaggcgcacgaacccacctaaggcctacgccgactactgtaagaaccaaaagcagccccggccgtaatggccgaattcccgggcatatgtccggtaccgtcgactgnnnnnnnnnnnnnnnnnnnnnnnnnnnnnnnnnnncgccgcttcctcgctcactactcgctgcgctcgtcgttcgatatagcccgagtagcccctatatattcagtttg

SEQ ID NO: 122704 - DNA, 977 bp, Homo Sapiens
  misc_feature (813)..(813): n is a, c, g, or t
  misc_feature (821)..(821): n is a, c, g, or t
  misc_feature (939)..(939): n is a, c, g, or t
atttatatatatttattcagtaaacacaattgtttcatgtaccagatttttaatgcatttgaatctttattctacaacacaagcaacataaatacaatatcttttaaaatattttctctttagaattttcatttccacctcagataaaatgtacacaaaatacacttgcaagcttgcttacagagacctgttaaacaaagaacagacagattctataaaatcagttatatcaacatataaaggagtgtgattttcagtttgtttttttaagtaaatatgaccaaactgactaaataagaaggcaaaacaaaaaattatgcttccttgacaaggcctttggagtaaacaaaatgcttcaaggctcctggtgaatggggttgcaaggatgaattttgcattttataggtaaaatggtatactgactcaaatcattatggctataacaagcttcatttatttataatcttcaatgaaaataagttgattctttggcataatactataaggaataaaaggacccataccacccactggctttatctagagtgggagatagtagtaggggaactgtttataatgtaatttgtctaagtttattcctcttagaaaagcgggaaaagcatattgaataatagtctcttagcatgattagggcaataaacatcttattcttatctgtcccatccccacaacacaacactaagaaacaaaatacttttccctctaggcacctcctcctgccccatcatggcacacctggatatctatcacatgtttcactgaagtgaaccaacttatcaaagcatcctcgtngcgattcntggctcggaggcaattcctataggagtcgtataattcgtatctgtcaagctgttctgtgtgaatgtatcgtcacatcacacacatagagcggagataagtgtagctgggggctatgangagcaccacatatgcgtggctactgcgcttcatcggaa

SEQ ID NO: 122705 - DNA, 706 bp, Homo Sapiens
gttgattctttggcataatactataaggaataaaaggacccaattaccacccacggctttatctagagtgggagatagtagtaggggaactgtttataatgtaatttgtctaagtttattcctcttagaaaagcgggaaaagcatattgaataatagtctcttagcatgattagggcaataaacatcttattcttatctgtcccatccccacaacacaacactaagaaacaaaaataacttttccctctaggcacctcctcctgccccatcatgccacacctggatattctatcacattgtttcaactgaagtgaaacccaacttatcaaaagcattcatctttgttcagctttgcctattttgtgggaaatcaatttttattagagagaagcactcccaataagaaccagatgaaagaaatgtaggacaaagcagcttgcacataatcccgaggtagccagggatgctcactggggctggcagtgtccgggcccgagcctccctaactttaagaaaaaacataatcttttacacattggttcaaaagattggcttttggattccctcctctcctttttggcactggttggtaaaacaaaaataaattactcttagagattgacttttgaaatttaattttaaaatcagtgttactaaaagaactaaatgcacacataatttccaaaaattatgggaaactaaagt

SEQ ID NO: 122706 - DNA, 925 bp, Homo Sapiens
agtaactataagcgggcttttggtagcgaggccctgggtggcgaattcggcacgaggggttatgtggctggaccgcgcggatggctcagggttcttggacattggcgctacgaccttaggcgccctagctttaccaggacttggagtggcgataagggcccaatggcagaaacagtgtctacccaggtgggacagagggcgggctgagggcttcgcatcagcaaaacggtgacgctggtggcgacgcgaaggttgagctgtcccccgggcccccgaagccggctggccgggaagtggagccggccccagtaggcggggagcatccctcggctgcagccccaggcccgggcaagcataagaagcggcggggcgcaaccagggagcgtgtcgtgccgccccgaagaagcggcggaccggggtgagcttcggagatgagcactttgcagaaaccagttattacttcgagggcggcctgcgtaaggtgcggccctattactttgacttccggacctactgcaaaggtcgctgggtgggccacagcttgctgcacgtcttcagtaccgagttccgagctcagcccctggcttactatgaggccgcggtccgggcgggccgcctgcaactcaacgagaagccggtgcaggacctcaacatcgtgctcaaggaccatgatttcttgcggaacacagtgcacaggcatgagccaccagtcacagcagagcccattcgcctgctagctgagaacgaagatgtggtggttgtagacaagccttcctccattcccgttcaccccctgtggccgttccgacacaacacagttatcttcatcctaggcaaggagcaccaactcaggagctaacccctgatcggtgacggcttactcagggtgcttatgttgccagaaggtgcgctctgagagatccga

SEQ ID NO: 122707 - DNA, 1298 bp, Homo Sapiens
cagaggttgttttaatacattaatctctttcctttgagaaaaatctttatcttgatgtctataatcgaaaccaatcacttcttctcatgggtcaggggtcctatggtctcctgaactttaatgtggctgtgaatcacctgggaatgttaaaatacggaacaggattcagaaactctgggttgcgtgcccagcaagctctcagcttgtggcagtactaccgtctgatggaccacactgagcaacaggactctaaggaaggtttccaaatgaaataacctcaaccagatgtttattttcaaaatatacggcctacaccaagtttataaagggagataatatccagacctcaacaagatatctgctccccttctcatttttgtgatttttcccatctggttgcaaactcaacgtaataccttaataaagagcaattttcaagaatatcttttttgtgctgaccatttattgggacttgactgaccagggcttgtaagaatggacacaaaacttcaagtctttcgtaatgaaaggattgattcaaaataaatattctaaaaattatgtcaaacactaatgaataagtgacatttacaaatagtttataagagaatcatttgggtgaacaattttcatttcacaaaataaatagctcatatccaaaaaagacacctctccttaagcagggaaaaaaaagcccaacaaaaataaagtcatgcccgtggcacagccctaatgttagttttagggaggaaaacaccaacactgagacatacaaaagtatttgaggagaattacatgttattaaatttgtcctagaacctgggggagagttcagggaaagagaacagctggtatatttaagaaagatttaaatagaaaacattacacatgagagcaaaatagtccatttctcttaagaaaaccaataaacactcacaaactttcatttttaggttttcagcaatgtttttttcacattagtccaactgccaccccaaaatccaaccagccagcatgacaattaaggtgacaacaggtccagttggccatactccctgtgcacccttggatgcttttcaagccaatgagggtaacatttgtggtggcaggagccagagtcaagggagaatcacttctcttcactcaggaggaaacctccctcttgagcatcttcggaatttttcatgggaaggcgtctcagtgttggtgtgcacgcttcagccccataactgtgaaggtggcagctgtcagtttctcataaacaaggaacatgagagcagcagtgaggactgtctgca

SEQ ID NO: 122708 - DNA, 1989 bp, Homo Sapiens
ttttttcccttgtgtccaggtttattttacattctcttccagaggggatgtggggctgggggagagccagcaggcaggcgggcagcacacagcagtctccctggggaatatttgagccaggctagtggtgcctggccccacagtgcggggtgatatgccagggccagggccaggacttggcagcccctgggaagaggaggccttggggccagagctcttgccaggcctagatcgctaagaaggtgctgcgtctgtcccccgccttgctccgcccccccacacccagctggaggccagaaggcaaagagggcagccagcaagctggggtgctgggaggaaccccagcaggcgggggcggcctttggtctctacgaggctaggaagctggttctggttagaggaaccccgtgggggcaaagcggagagctggtccctgttagaggaaacgctggagcaggatgggggtgggggacttggggtctggtctcaataaggcctggaaatggtctccgcttcaaagcagacctctgtatttggggagtggggtggggaggaaatgaaagggctgtgggaggaatgcctgtgagtcgtgggtgggaatcagtccagggggcttcgaggggggtccgagggaaaggctgcgggggtcgtctgcagatgctgggagctcaggtcctggggaaggaggatgtgggcgggggtcctctccctcccacgagtgccaccgctccccaccccatcctggctggctccaagttgccatggagaccactcacaccggggcaacgtaatttccagggaacgttccgaatttctgggtcctccgggagacacccacaaaccagccatcgtcacactgctgcatgacatccaccctgtccccctcgcgcagctccagctcgtcttcgttctggggcctgtactggtacatcgcccggtacggggtccagtgtatctgagaggtgttaggagaggaggtccccaggtccaggggatggctgggacctcgagagtgggacagagctggaccaggggtgccaagattctgggtctggggtctaggctcctgggtggggaaggagaagccagtgcgacggggggaggtctgtccccccaagtcggtggggtcagctgggctgcgcagggctgagggggagctggggtgacgggctgagcgggcggcagcggtcaggcggggagacgtggggagctgggggccgtcgtcacagagccggagccggggttcacgagacacctgcacgtagctggcagggaatatgccttggcgccccgtgcccgtgatgcgtccctcgtaccagttctcgttcaccttgcggatcaggcagatgtgctctcccttgcggaaggacagctccacctccaggtcccccttgaaggtgtactgggccacagcctctccatactccagcacctggtaggtcgggggcttgatgggcttagggatctcatctgcgggcagcacctccacataattagcagggaagatgcccaggcggccgtggtgctctccctccagccagttcttgtccacctccttgtggatgtagacaatgtcacccttctgcagagtcagctccttgggggactgcgcctggaagtcaaacttgagcctggcggcctttctcttcttctcttccctcctggctgggctgccccctccgttagaggcactagggtctcgggttgaggaagggtagacaaagtccctccgacctaggaaggggcttcctccatcagccattttgtggggactcagggaccgggcggaacccaggtaaggtgcatgtgggtagctggagctccaggctgaggccgggccggccgggggccgctgctccggggcccgtcggggcgccggcgagctctgcgcggggaaacggcgcaatcagggcccgcgaccccggacccagcggcagccgagccgccgcctccggaaaagatcccaaaattccggaccgtacccacctt

SEQ ID NO: 122709 - DNA, 611 bp, Homo Sapiens
gtgtgagccaccgtgcccggcccattctaagggttttctttgaagacaggtcaaatgctgttagtaagtttcaggagattgttaattcctcagttataccagattttataaaatatttgagaatagatggctaacaagaggttagaaatacttttccttaattttaatccacagtatgttacatgcattctaccactacattttggtgctatttaaggtgtgcgattttctataggtgacttttgcaattcagggaagatttgggcatattaaatgaaagaatatctaattgggggaggtgtgaagggaaagaaattcttttcaaaagctgaccacaaagagtagttaaaagtttttgtcactatcttcacaagtgtgtaaagcacagatttcaacagagtgcttggcatattgtagggtgctcaatggtggtttttattattattactcagattccacagtggcaagaaacatcattctacataatggaaaacatttacatcaaatcgcacttactttaatgcgaacttggagataatttatggtattgtattgtaaaccattactgaaaactttttcacagttgagtgaaattaaaatcactatatctc

SEQ ID NO: 122710 - DNA, 653 bp, Homo Sapiens
gacatggtatgtttttattgtttaggggggggagtttgcaatagaaaaaaataacttttttatttacaaaaaaatccaaatattggatgctgtaaacaaaattcacaatctgttccctctagcactgattcaaacatgtcagttttttagtccattttccatcaactccttttctgcctgtgacgcagcctatagtcaaaatattccaaaagagtgacccaaggtgcagcttgctgcaacagaacacctcaaagcaggcatgattgtagagaggttggagggagagacagccagcaggcagagcctcctccgttctgcaaggctttgcagcaagtctcgttaacttgacatcttccaactttgtactttaccatttgctttgttagaaagccattattttaacaaaatataacatagagattctttcttagcactgaaaatgctatgctaaaagaaattttaaagaaagattatattcaaatagatgctatatatgaaattactttttttggctttttggtttcacctaacacacttcatcttcaacaacaacaaaaaagcttatttttgaactgacagctttcaacataatacatttcatttacaaaatagttcacaatatttatttaacaagcgttgcattgaaaacaact

SEQ ID NO: 122711 - DNA, 1430 bp, Homo Sapiens
  misc_feature (592)..(592): n is a, c, g, or t
aaacgtcgctccattttaataccgtctttagtatcatacacatgtgttcagtagtgagccacccaaagcctcctgccacaggagcagtagtcgaagcacagaggggaccccgctctgctgcctccccatgcagtccagtgatgaggtggatggagtcctccccacagtcacaccccaagcttcctcttctggtggaaataggcatcaaaccttgcttgggcgtagtccatgtacccaaattcaatagatgaaatcttggcttgtacaatggaccacagtccccagaggaaatgagatgcaagggcaaacctattaacttcaagcaacatttcttcttttataatggatttttcttcagtactgaggttttcaaagtcattttggaatgcaggcaagtaactggaaataaaatggagctgttgtttcttggtgggatacttccggatgtttgctctgaaaaaagggtatttttcatagctataatcatacatccactcacagaagtgatttccaatgtcgaatcccctgtaattgtaactgctgtattcgaaatcaatgagcatcagtttctgtttttcagaattctctcggncttccagcaacaagatattaccttcttgacagtcattatgacaaaatacaactggagatggagtagattcaagcaatgatctcaggttttccagttcccagggcagattgtaactgagcaatttgtggagctttttaattctggattcctcagtaaatttaattctcagcacttcctttagatacttttccattgtgccaaaaagccattttggttccttattgaatggcattttcataccatgaaatgtagccattttctcggcgatttctgcagaaatatctggcaaacttaattcttcagtatctaatcgccggctcgggatgaactgctccagtcggccttggggaaagatgccatagagttttggcccaagtgacctctctgcgagaatggcaaacataacgctctccagaaccatggcctcagccccttgaaattcattttctttctgagcttgttcggatccctctttattacaggacctcatctgcaaaatcgctccatacagccgcaggagcactttccgaggctcatcaccaagggtggctgtggtgtcaggtagggagcactggaacagcatgttgctaaggccgcctctgatgacactgatgtggaactcgtcctcgcggaggccccgccaggcgccgggcaggaactccttgcaccacagataggccctgcgccgcgtccggggctccggctgctcgtctgcgggcggctgcggcggcgggggctggggcagcgggcagcccgagcggcgagggctccgcctcgcccccggtgcagaatttggttttcatgcccgacaggcggccgaggaggcgcgggcggccgc

SEQ ID NO: 122712 - DNA, 183 bp, Homo Sapiens
ggctgatggccgcccagctgcttggactcgaggtcgctgtcggcgtcgcgctgctgccccacgccgggcgccggggccgcgctgccgctaccgcagctcagcagcagcccgagcggcgagggctccgcctcgcccccggtgcagaatttggttttattgcccgacaggcggccgaggaggcgc

SEQ ID NO: 122713 - DNA, 1700 bp, Homo Sapiens
  misc_feature (76)..(110): n is a, c, g, or t
  misc_feature (1205)..(1218): n is a, c, g, or t
atatagatcactatagggcgctagctctgtcgcagcgaacgacgagcgcagcgagtagtgagcgaggaagcggcgnnnnnnnnnnnnnnnnnnnnnnnnnnnnnnnnnnncagtcgacggtaccggacatatgcccgggaattcggccattacggccgggggtcggattttagaggaaggcgctcggttacattggagaactggagtggtctggagttccacggtgtagtggaccagaggccacctctcctgggcttctcagtgtctcgccggcggggttcggcctgagctggattgacatagcccttggcggatttaaacaacctaaacattaagcagtacagctgcctcaaacctttgggattttcagaatgactgacactgccgaagctgttccaaagtttgaagagatgtttgctagtagattcacagaaaatgacaaggagtatcaggaatacctgaaacgccctcctgagtctcctccaattgttgaggaatggaatagcagagctggtgggaaccaaagaaacagaggcaatcggttgcaagacaacagacagttcagaggcagggacaacagatgggggtggccaagtgacaatcgatccaatcagtggcatggacgatcctggggtaacaactacccgcaacacagacaagaaccttactatccccagcaatatggacattatggttacaaccagcggcctccttacggttactactgatagaaatgttggcagcttttagtaaaagcatttactctgttaccatgagaaaagtttgggtgtcttctgttggtcatagttttacatctgattttacagaatggattattgattttttggaagttgagactttaaaaaaaatagatcttacttgcgaaatgcgatggttgctgggaatacctgaaactgtggattatattgcttgacttctacctcagaatcttctttgtttcatgacttaatagtgctttaagtttggtatattatttgacctctaggaattctttgttttacacaggaataaaaattttaaaatagaaaatgcttttactttgtaaggtaagagagtatccatatgcttagatgtgctcgtttctaaaattctagaggttgatataatcagctcatgaatgcacagctatgctttttgtgatagattgtacataacatcagcagttgaaaggtaaaacaattgcnnnnnnnnnnnnnngcatttgttaagtgactatggtactttgtgattccttaatctatagatgagtcagctccacacttgagtctctttttagagggaaatcagtaataaagctgtaaaataaggaaggaatcattgtcagtttgtgtcttgatctggtggtggttgggataagggtacacatcattttatacaaacactaaagctttttgctaacaacatagcaggtcaaaattcacacataagaaagtttaactctgtactgttcacactttttaatcctgtaaataatgctgcattttgatggttcttacttttttggtatttaatgtgggctgattttacaatgttatattcacttccagatgcatacctctgctgctttctctcctataaatagtgatgctataaacttcctttcacagagatcattctatttcaaatcactttaatgattattacaatgatttcattcaaataaaaattttaaaatattt

SEQ ID NO: 122714 - DNA, 421 bp, Homo Sapiens
tttcggcacgaggctgcgctccgcagcgggctgaggcacttcgggcaacacccaatactcgggcgtccgctcggcttctttgcgccgagatgcctaagaaggctggtgcgacgaccaagggtaaaagccagagcaaggaaccagagagaccacttcctcccttaggtcctgtggcagttgatcctaaaggatgcgtcaccatagccatccatgcaaaacctggctccaaacaaaatgctgtaacagctctgctattccattcctcaacaattggaggagactcaggagggcgtttcaggtattcctgatactccttgttattttctgtgaatctactagcaaacatctcttcaaactttggaacagcttcggcagtgtcagtcattctgaaaatctgtacaattttaaagacatttccatt

SEQ ID NO: 122715 - DNA, 1292 bp, Homo Sapiens
  misc_feature (1173)..(1207): n is a, c, g, or t
  misc_feature (1211)..(1252): n is a, c, g, or t
gctgcttaatacattttattcaggtctgtcattgacttgctagaacattcatgggtgaggcctcatttgcaggaggagaaggtcttccagaagaagttcctgcagggcattctgtcccggcgcgcggattgctgggggggtgcgccttcctgccgcctggccacctcccgggcttcctctcctatgaggggcccggcactggcctgggaggtccactcaaaccaccaagcgaggaaagtcaggaggctgcttttccttattcctgccgcttcctgcatatgcttgcaaacatttcaaggtctttggcaaaattttcacactgtcggaaagtcagctccgaaatggccgcaatggtctgtttgctgacttgcatttctttgtccaatgccactttctcggcaagacaccccacagtatagtgaactgctgcctttagcctcgtgttcttgcaactttttctgaaggtttgaacttctcaaaagacaaggggcagggtagacagctgctgcagtgtaactttgtagagaggaaactcccgcgtctggagctcattcccgcgtttcttcagtccgtcctcttttaaggtcgccacctccgggtcttgcttttaagcctcttcacggcaacgttctcagcctctgacgccccatatgcccggcgctgatgaaaggaacgaatgggatgcccgcagctaccctgacaagtgattattcttatgacgattttgcagagaagaaaattgcgtctgggccgagtcgatacgatcacaagttggcggggcagagattcgaacccacatctaaggacgagctctgggcctgactggtccgcaccgcgtccctgcatcagtaacgaggggtcgacgcctccagggccagcgttccatgagtctccgggcccgaatccgccccaccgcgtacgggcgtcacctggaatgtctaatgccgacgttgtaccctcacgaaaaccccatctgagaaggggaaaccgaggattcatcgcaaggccagaaggtggcctctcgtccgccggaccccggcgccccgcacgctcccctagaaccgcttcctccccagccagcgcaggccagggtccagccgcgttgccgcggaaaccgcgtcccccggccgtaatggccgaattcccgggcatatgtccggtaccgtcgactgnnnnnnnnnnnnnnnnnnnnnnnnnnnnnnnnnnncggnnnnnnnnnnnnnnnnnnnnnnnnnnnnnnnnnnnnnnnnnnacaacggagctagcgccctatagtgatctatacgtcttgg

SEQ ID NO: 122716 - DNA, 1365 bp, Homo Sapiens
  misc_feature (297)..(314): n is a, c, g, or t
  misc_feature (781)..(819): n is a, c, g, or t
  misc_feature (1004)..(1004): n is a, c, g, or t
  misc_feature (1166)..(1167): n is a, c, g, or t
  misc_feature (1187)..(1187): n is a, c, g, or t
tttttttgctaaataaatatagctttattcatctttcagagattgccatttagcctagaaaattacatcaaaagatgaactgatttttgcttgaaaaagtcaaccatgtttaattgctcacacaattttaattacaacagatgtaatttctaatatataccattcgatcacacaccatttttatgttctggagtgagacctgggagtattttgcttaagactttctcattctctaaaactagctttggcagttaacaatgtggagaattcagcacaaaaagcaccctagcccagccnnnnnnnnnnnnnnnnnnaaatctctatttaacccttcaaagtttcctttgcagccatatgcatttctaggtggctctacctgtagaaggctgcactttccaagcggcgagggactttaattctcactttccaccactccagcctctgctggctgccttgaatttttgcttccatcctctgacttctttttcttctgtgcttttcgttctaggttaatctgagcaatctcttcacttttgtctgtgatgtattttagcagtgaattactcctcctggctaagagcttcacatcttcagtgttaattgtggttcttttcgcatgtcttgcaaacatttcaaggtctttggcaaaattttcacactgtcggaaagtcagctccgaaatggccgcaatggtctgtttgctgaactgcatctctttgtccaatgcaacttcctcgcaaagacaacccacagtatagtgaactgctgcctttagcctcgnnnnnnnnnnnnnnnnnnnnnnnnnnnnnnnnnnnnnnngacaaggggcagggtagacagctgctgcagtgtaactttgtagagaggaaactcccgcgtctggagctcattcccgcgtttcttcagtccgtcctctttaaggtcgccactccgggtcttgcttttaagcctcttcacggcaacgttctcagcctctgacgccccatatgcccggcgctgatganaggaacgaatgggatgcccgcagctaccctgacaagtgattattcttatgacgattttgcagagaaggaaattgcgtctgggccgagtcgatacgatcacaagttggcggggcagagattcgaacccacatcttaggacgagctctgggcctgactggtccnngcaccgcgtccctgcatcangtaacgagggggtcgacgcctccaggggcagcgttccagagctccgggccgaaccgcccaccgcgtacgggcgtcacctggaatgtctaatgccgacgttgtaccctcacgaaaaccccatctgttggtaagagaatcgctgctgctcctcggtctccgcctcctcctccatcactgc

SEQ ID NO: 122717 - DNA, 421 bp, Homo Sapiens
  misc_feature (374)..(374): n is a, c, g, or t
tttttgctgcttaatacattttattcaggtctgtcattacacttgcgtgacgattcatgggtgaggttttatttgcaggaggagaaggtcttccagaagaagttcctgcagggcattctgtcccggcgcgcggattgctgggggggtgcgccttcctgccgcctggccacctcccgagcttcctctcctatgaggggcccggcactggcctgggaggtccactcaaaccaccaagcgaggaaagtcaggaggctgcttttccttattcctgccgcttcctgcatatgctcgctgtctcggccggtggggccaccctccaggggcagggcagcggtggccgtggccccggagagcagcagcagcaggaggccggnggacaatggcatcttgtgggctgactggagcttctctcccaccctgc

SEQ ID NO: 122718 - DNA, 748 bp, Homo Sapiens
  misc_feature (109)..(109): n is a, c, g, or t
aggaaagtcaggaggctgcttttccttattcctgccgcttcctgcatatgcagtgaattactcctcctggctaagagcttcacatcttcagtgttaattgtggttcttntcgcatgtcttgcaaacatttcaaggtctttggcaaaattttcgtgttcttgcaacttttctgaaggtttgaacttctcaaaagacaaggggcagggtagacagctgctgcagtgtaactttgtagagaggaaactcccgcgtctggagctcattcccgcgtttcttcagtccgtcctctttaaggtcgccactccgggtcttgcttttaagcctcttcacggcaacgttctcagcctctgacgccccatatgcccggcgctgatgaaaggaacgaatgggatgcccgcagctaccctgacaagtgattattcttatgacgattttgcagagaagaaaattgcgtctgggccgagtcgatacgatcacaagttggcggggcagagattcgaacccacatctaaggacgagctctgggcctgactggtccgcaccgcgtccctgcatcagtaacgaggggtcgacgcctccagggccagcgttccagagctccggcccgaaccgcccaccgcgtacgggcgtcacctggaatgtctaatgccgacgttgtaccctcacgaaaaccccatctgagaaggggaaaccgaggattcatcgcaaggccagaaggtgcctctcgtcgccggaccccggcgcccgc

SEQ ID NO: 122719 - DNA, 1326 bp, Homo Sapiens
  misc_feature (742)..(742): n is a, c, g, or t
  misc_feature (773)..(773): n is a, c, g, or t
tttgcacttgatccatttttatttcaaaatgtctacaaagttttaattctccattatacaggtaatttttcaaaatctagacattattcaaatgtaagccaaagtccttacacaaatagaatacactcaaagatcaaaaatatacatatctttcagcaaactttgttacataaataagaaaaatatatacagctggtgttttcaaagtacaattatcttaacactgcaaacatgtatagaaggaactaaaataaaaagaaacactacagcaaaggttaaaggaacaacaaattcattttacaacatcatcaattataaagatacatatatcaaatcttaggggaatatatacttcacactgggatcttaacttttacttcactttgtttatttttttagaatactctctggataggtgaaaatctatccatgacacctattacgaaagttacatgtgaagaattcaataatctaggtctttgtactctgggatagatgtaaaaagaattctttaaaagttaaatttgtataagcctatgttaacaatttccaagtaaactgttctattggaaattaaatatttcaaagtagaaaatgttaggaaaaacttcactcaaaaaattttaacacagtaagcaataaagaaaaattatgccaatgtttccttagataaaggcaactcagctaggtttatgttttaccccagaaattctccttccttttcttaggtcgtgccagagtntgaaaagcccggagactagaagatgcagagngagcagaaatatcagacaatctgtcctcatcttcatcattaaaggcttcatgttgaggtaactgcaaattgttcatccttgcttttcccacattgtgctgaaactctggatctctaagagagccctgaattcgtcgagagggatgccagtaggatggaacatgtggtggagaaggcaactgtccagggggatttgttgggtattttggaatttttgaaactggaagagttgcctcagcaaatttgtggatattgtcttcagaatcttcccgcaaaggcagaggatcaactgtttttataccagcagctggagaagtcagtagggatacagcacgactttctttcttagtaaaatcattctttgaagtttctaaacaatcctgagaggtcattcttttcctctgttctggggctggaggcttcatcttagatggagacactaaaacagcaccaccaacagctggagtagtgagatcatgatgagtcctctggattccaccaagttctctcagcttgggagtaggaagccggcctccgtttactgaggaggccgc

SEQ ID NO: 122720 - DNA, 2581 bp, Homo Sapiens
  misc_feature (62)..(75): n is a, c, g, or t
  misc_feature (1019)..(1096): n is a, c, g, or t
ttttttttacagtaagaaaagaactttattgtttattaatgtttctgtgtaaaacttaagcnnnnnnnnnnnnnnaaagaaacaccaccaaaaggggattagcttagtccatcccttcctcagtcatctgcttcccaccttcctccaaatgttatcccagaacattctggaggcagggagaaggggaggcagctaatcagagtctgagagcacgatgatctcttctggatcgcattgtgtggccacacttgtcttgcaagtaccaggccgaggaggctgtgaatggggggtttgggacagccgggctggagaagggatgcagagggagctggtcaccaggccatggctgggagagtccaccctcgtggaggaatcagcaactggggccaaggaagccaagggggaaggtgggctgggcagggtacatatctttttcccattcttctcatgcactgacctttgcctttccacatagctgtttcctaatggccctgatcctgtttgcttcttctccttccgagattttttgcaggggggaccagaatctccccagttgtgaggagagacgcctccattgaaggaagtagaagagaccatgcctgctccattctctaagacagtggtgaagggctcctctgattgcttcctggaagaggaaatgtccgtctccacagaggaaggggtatccaggggcaaagcttcaatctctagctcaaagagctgagacacagggctttcttcctccagggtcagctcctcaggctgttctccattgctttcagcatctatgctggagggggccaggggttcttctgacagtaacgatggtgacactatgcgtcctttgttttgctgctcccctgaagatctgctgatctgtttgccaggttccaggttcttttcattggagatctgtagtgaggacatggggctcttgtctccatctttacctgctgctgcttcttcctcttcgtcctcctcttcatcatcctcctgaccctcctgcatctgttccagannnnnnnnnnnnnnnnnnnnnnnnnnnnnnnnnnnnnnnnnnnnnnnnnnnnnnnnnnnnnnnnnnnnnnnnnnnnnntcgtcttcgtcatctgtctcagctctggaggcagaagggcgcccctgggatgccattccagtagggccctcaccagaatccaaggaggcttcgggggtgtctgcagagtgggaagaggtgccttggagccgagctcttctcttttttctctcgccctcctcacttttgtcttgcaacattgcatatttggagatgacctcatccagccgactcatggccaaactccggttttcccgaaggcgccgggccaacacaggatctgatagtgcagggtcaacgcctggcctatagtcatctgtgaggtggcagccaaagttgtagatgagatcgaggtgacgtcgctcctgtaacctgatgcccacatctcggaaggcatcctgagccatgagctggagctgctgtcgggggaggccaaggctgtgtcgggcagctgccttctctacagcccgaagcacatccccatagtcagggaaggtatcaggccctggcttgttgatgagccgctcaatgcgcctgttaacctctgggtagcgggtgccacggtaggggatgcgctgctctatgacacggccggtcagtgaagagcagtctttcagctcacatagtcgcccaaagaggcggatcagcttacgcttcaaccgtgcctcctgcaggtatgcggagtctgggtcatccaattctgagagatccaactccttttcctgcagccgccggatctctgccacatagagcgccagcagctgctccaaacgctggatctgccgccgggaaccacgggtccttggagactgagaggcagtgttttcagcatttgtggggtccaaggagaggtgtgtgggagggttattcccagagggctcattggaggtggtggcggcaggggccaagttcagcttctttttggctgagtgggccttgagaacagtgcagagctcattgatgtagacatagagcttggctggccggctccgggcccgagacaggaccctagagaggatgttgcagaactccgccgaggccaaaaacagagagtgggcacgttgctgccggttatagaggaatgggaccacctcagggtggtctgctgtctgcatcttacaaagttcaaggaactcttcgaacagcttctcattctccagcttgtagcatttcttgccgcccgaactactgcttcctctggccccatgaggctcagaggagctaggggcttctgccccaggtgaggccgcattggggagtgggtgggagggccctggctgagcagctgcttcatcttcgtcatcatcatccagcacgatgatgctgttagcggtggccataggggatcaaatcccccggagggaggaagtggtggggatttcagaattcctcagaaaccgtctctcgaggcgaccctcgccgcaattctcagaacctcgcatggttccctccgccttccttccccctcgtgccgattaacaccaagcctcgtacctagctatgttt

SEQ ID NO: 122721 - DNA, 504 bp, Homo Sapiens
  misc_feature (57)..(72): n is a, c, g, or t
tttacagtaagaaaagaactttattgtttattaatgtttctgtgtaaaacttaagcnnnnnnnnnnnnnnnnaaagaaacaccaccaaaaggggattagcttagtccatcccttcctcagtcatctgcttcccaccttcctccaaatgttatcccagaacattctggaggcagggagaaggggaggcagctaatcagagtctgagagcacgatgatctcttctggatcgcattgtgtggccacacttgtcttgcaagtaccaggccgaggaggctgtgaatggggggtttgggacagccgggctggagaagggatgcagagggagctggtcaccaggccatggctgggaagagtccaccctcgtggaggaatcagcaactggggccaaggaagccaagggggaaggtgggctgggcagggtacatatctttttcccattttctcatgcactgacctttgcctttacacatagcctgtttctaatggcaccgatactgtttgctt

SEQ ID NO: 122722 - DNA, 632 bp, Homo Sapiens
  misc_feature (54)..(67): n is a, c, g, or t
  misc_feature (183)..(255): n is a, c, g, or t
acagtaagaaaagaactttattgtttattaatgtttctgtgtaaaacttaagcnnnnnnnnnnnnnnaaagaaacaccaccaaaaggggattagcttagtccatctttacctgctgctgcttcttcctcttcgtcctcctcttcatcatcctcctgaccctcctgcatctgttccagatcctnnnnnnnnnnnnnnnnnnnnnnnnnnnnnnnnnnnnnnnnnnnnnnnnnnnnnnnnnnnnnnnnnnnnnnnnnatcgtcttcgtcatctgtctcagctctggaggcagaagggcacccctgggatgccattccactagggccctcaccaaaatccaaggaggcttcgggggtgtctgcagagtgggaagaggtgccttggagccgagctcttctcttttttctctcgccctcctcacttttgtcttgcaacattgcgtatttggggatgacctcatccagccgactcatggccaaactccggttttcccgaaggcgccgggccaacacaggatctgatagtgcagggtcaacgcctcagaaaccgtctctcgaggcgaccctcgccgcaattctcagaacctcgcatggttccctccgccttccttcccactcccaccgcaggccccccc

SEQ ID NO: 122723 - DNA, 798 bp, Homo Sapiens
tgccagccccccggaattttttgccccccattagaaggcccaaccaagttggttccaaaccgcgggatttggccccccggggaacccacgggttccttggaagactgagaggccagtttttccgccatttggggggtccaaagagaaggtttgtgggaggggtatttcccagaggggtccattggaggtggtgccggcaggggcccaagtcaaggttctttttgggctgagggggccctggagaacagtgcagagttcattgatgtagacatagagcttggctggccggctccgggcccgagacaggaccctagagaggatgttgcagaactccgccgaggccaaaaacagagagtgggcacgttgctgccggttatagaggaatgggaccacctcagggtggtctgctgtctgcatcttacaaagttcaaggaactcttcgaacagcttctcattctccagcttgtagcatttcttgccgcccgaactactgcttcctctggccccatgaggctcagaggagctaggggcttctgccccaggtgaggccgcattggggagtgggtgggagggccctggctgagcagctgcttcatcttcgtcatcatcatccagcacgatgatgctgttagcggtggccataggggatcaaatcccccggagggaggaagtggtggggatttcagaattcctgctcagaaaccgtctctcgaggcgaccctcgccgcaattctcagaacctcgcatggttccctccgccttccttcccactcccaccgcaggccccaccctcgtgcc

SEQ ID NO: 122724 - DNA, 962 bp, Homo Sapiens
  misc_feature (752)..(802): n is a, c, g, or t
tgtccatttttgtgcctggcccttgcacccacgagattatgggtttacaccgttcgaagagaccggggctttcccagacaggcgtgaggcacctcggggaacacacgggccaagaaccagggaagtgcctgccaggaacaatcgttcccatcttgcagcactgaccttgccttgcacatagctgtttcctaatggccctgatcctgtttgcttcttctctgtccgagattttttgcaggggggaccaagaatctcccccagttgtgaggagagacgcctccattgaaggaagtagaagagaccatgcctgctccattctctaagacagtggtgaagggctcctctgattgcttcctggaagaggaaatgtccgtctccacagaggaaggggtatccaggggcaaagcttcaatctctagctcaaagagctgagacacagggctttcttcctccagggtcagctcctcaggctgttctccattgctttcagcatctatgctggagggggccaggggttcttctgacagtaacgatggtgacactatgcgtcctttgttttgctgctcccctgaagatctgctgatctgtttgccaggttccaggttcttttcattggagatctgtagtgaggacatggggctcttgtctccatctttacctgctgctgcttcttcctcttcgtcctcctcttcatcatcctcctgaccctcctgcatctgttccagatcctcctcctcttcagaatctgtggnnnnnnnnnnnnnnnnnnnnnnnnnnnnnnnnnnnnnnnnnnnnnnnnnnncatcgtcttcgtcatctgtctcagctctggaggcagaagggcacccctggatgccattccactagggccctcaccaaatccaaggaggcttcgggggtgtctgcagagtgggaagaggtgccttgagccagctcttctcttttttctctcgcctcgtgca

SEQ ID NO: 122725 - DNA, 488 bp, Homo Sapiens
  misc_feature (59)..(72): n is a, c, g, or t
tttttacagtaagaaaagaactttattgtttattaatgtttctgtgtaaaacttaagcnnnnnnnnnnnnnnaaagaaacaccaccaaaaggggattagcttagtccatcccttcctcagtcatctgcttcccaccttcctccaaatgttatcccagaacattctggaggcagggagaaggggaggcagctaatcagagtctgagagcacgatgatctcttctggatcgcattgtgtggccacacttgtctgcagggaagtgagagacaaagagtcaaagagatcttgcaagtaccaggccgaggaggctgtgaatggggggtttgggacagccgggctggagaagggatgcagagggagctggtcaccaggccatggctgggagagtccaccctcgtggaggaatcagcaactggggccaaggaagccaagggggaaggtgggctgggcagggtacatatctttttcccattcttctcatgcactga

SEQ ID NO: 122726 - DNA, 2165 bp, Homo Sapiens
  misc_feature (341)..(394): n is a, c, g, or t
  misc_feature (508)..(520): n is a, c, g, or t
ttttcagttttcagactgcagcaaatcttttattacaaataattaaatctctccataatgtctcaaacagtatcaaacaccatttcatatctctaacacagagcagagtcggcattcagtataagaaccaagtgaaaagtgttaaatttcaagcatctgatcacatcacatggtgaccaggtaaagcttagatgtcattttcccacattatccaactgtgcatctcaaacatatcctcatctcagtaaagacaaaagtttctatttcatattgttaagtgcaggaagttgagagagataaaaatccagtgaaaacacatcaatctcaattcaactcagttnnnnnnnnnnnnnnnnnnnnnnnnnnnnnnnnnnnnnnnnnnnnnnnnnnnnnnagtccatggggttaagaatcaaaactgaccagggctggcaactatagatggcatgttgtagctctggaaagtatctgtcacatgatattttaaaataaagtggcttttgtggannnnnnnnnnnnnggtattgtaaacatgtactgtttaatattacccgaatttaatttaaaacatgtttgcaaacaaaacaaaattaaaagcctttaaggcaaacctccccctaaggaaaaaagtcatttgttataaaattgtgaggacacccaagcaagaccccacttaagattcgtcagcatgaacttgagagcttttgtccactgctcctcagagttaaactgggttttgatggaataggagccgccactgcctcctgtgtcttcaatcttgcctttctccacatccatcctgtagggaagacaaaaacgtgtctcgcctttctcaacctcttctttgaactgctgcacacagtccaggaaagccaccattgcatggtcaaacttgttgtcccagaaaaaccgcaaccccccagaacagtataacggcagctccttagatttgtctgtcagagactccagatatgaatggtttccgtaaggaacaagtcggtatctctgaaatttcagacccatcttattggccagagcatggagcagcaacacagtctggccccaagcagcattaatctcattccattccacgggaacactgggcaggcgacccagcctgaagttattgattgtgccaaactgtccactgtgccagatgtggaaggttgcattaaagacgttggttttcttcagcttatccagctgcgtctgggcataacgcatctggttttcaacactcttcagctcatcatccagctccagctgctgtcgtttaaattcactgtatttctctctgatactgagcttcctcctgatccagtctctcagcctcagccttggaccttctcgagattttctgccactatcttgcggttcttttccacgtcttccagctcctggatcagcctctcctcctctagtgccagctcctttagctccatctgtaactgttcactgtcatcctcattcatttgctctaagatctccaaacagcgtttgtagttctgacactcattttcagtgacgttgagctgagtgtccagctggtctaaaagagtatctgtgcattcctcacagagtgggtgatccacatctgtctggcccgacatgatgtcaaaaaggtccccagtgaccttcagtcttcggctgaggttctccatggtgccgccatcagatgcctccccaatcagagtgaagctgttggcactttctgtggacatcatcctggctggggggatgaatctgcgagagacaccatcctggcgaggagtttcaataaatggctcctctcctgagttagtctcttcctcctgggtctctcctggtttcgcctgggctgtggtaagtaatggagctgtgagttcctggatggtgacacggtccaggatcttgaaactcgtgtccagtttcaggggctggctgcagcgctggcacacgaagctcacctgcatggtgctgttgttggacgtcttagacccttccatccctcgggagcccggagcccgtcacccaagtccggtctaccgcggaggcactgtggcctcgggtcggccccggagcgaggcctccagaactaccatcgctctgtcttcagcgacttcccggtagccgccccccggccgtaatggccgaattcccgggcatatgtccggtaccgtcgactg

SEQ ID NO: 122727 - DNA, 520 bp, Homo Sapiens
atggtacattttcattgatagtgaaacagttctaagtgcattgttacttgcccaagcttattgtagttgttcaaatctatggaagatagagtccagctacaatacaagtttccagtgggatacagacagaacatgacttgagagattgataggattgggaacaatctctggaagcctttcttggtgccagatccatagccagttttctcttcttgggcaggagctgccgttatactgttctggggggttgcggtttttctgggacaacaagtttgaccatgcaatggtggctttcctggactgtgtgcagcagttcaaagaagaggttgagaaaggcgagacacgtttttgtcttccctacaggatggatgtggagaaaggcaagattgaagacacaggaggcagtggcggctcctattccatcaaaacccagtttaactctgaggagcagtggacaaaagctctcaagttcatgctgacgaatcttaagtggggtcttgcttgggtgtcctcacaattt

SEQ ID NO: 122728 - DNA, 829 bp, Homo Sapiens
  misc_feature (47)..(66): n is a, c, g, or t
  misc_feature (78)..(298): n is a, c, g, or t
  misc_feature (688)..(736): n is a, c, g, or t
actgtaatagaattttattgaaaaaaataacacgtacttactgaagnnnnnnnnnnnnnnnnnnnngaaaccaagtcnnnnnnnnnnnnnnnnnnnnnnnnnnnnnnnnnnnnnnnnnnnnnnnnnnnnnnnnnnnnnnnnnnnnnnnnnnnnnnnnnnnnnnnnnnnnnnnnnnnnnnnnnnnnnnnnnnnnnnnnnnnnnnnnnnnnnnnnnnnnnnnnnnnnnnnnnnnnnnnnnnnnnnnnnnnnnnnnnnnnnnnnnnnnnnnnnnnnnnnnnnnnnnnnnnnnnnnnnnnnngttcccaaaatgttgggattacaggtgtgagccactgcaccaggcaaactgcgatcttttagtggtgcctcttctctcttttgacttaaggatgttgtcccttaaggaaacctggaggctactactgtgatacactacttgagagatggattgttgcgctttcttctacagtctttacaaggagtagattataaagacagaagatgttaaccattgcattaatgtttggaagctgacagtcttctagatttctgctagcaaactgatatgaggtagagtcctgaaagatctttcagcaatttcattctcttgggataagtgagtcactttcagaacagtgtgtgttgtagaattttttggttgtggctgctctactcagattgcatagannnnnnnnnnnnnnnnnnnnnnnnnnnnnnnnnnnnnnnnnnnnnnnnngaaacatcttcatagtgtatcatcctgaaaactgaatagtcactttgagggtattgctttttctttccaggtcagttagcaactaaaaggccc

SEQ ID NO: 122729 - DNA, 1183 bp, Homo Sapiens
  misc_feature (1047)..(1081): n is a, c, g, or t
  misc_feature (1084)..(1115): n is a, c, g, or t
  misc_feature (1129)..(1129): n is a, c, g, or t
ctgtttgtttgttttggtcagattttttgaaacatcttcatagtgtatcatcctgaaaactgaatagtcactttgaggttattgctttttctttccaggtcagttagccaactaaaaaggccccgaaaaaactggcttcatggtccatgtctatcaagtgctcatttgttacagaaacaaaaattctgtcattttccttaagctcaaatattcccccttgatagatggaatagagtccatattctgcatctttagaccaacaactatttctagcacttttcatcaacaatatagggtcaggataacttgtgtatttgtaaatatattggaccatttgtttgtcgttctttgtgttttcttttatttcctcctgaaatcgaaagtatgtttgggaatagatgtagtaaaaccctttttcatggatgaccagttcaccattcctcaagtgcaagttgctcaggaatgaatgcccactccttgatgattcccaggagtttattttgcggcccagagccttttcattcttggagtttggagaagacaatgtgttgcttcttcctctggtcccagttatgtgagctgctactctctgaggacctctttctctcactaggggagaaatattttgttgcttttcttgaactgtagaaatggtttcctcagaggttctcaaaatcatctttctaacgagctgacggagttgccacttgacttgccagcaggggctgttcatactctcttcgtcattggggtcccaataactgtcatcttcttttaagaaacaagcaatgccacttttggagtacttgtcctgcatctgcttcagctcgttggtaaagtacacgtaagttacagccacacagagagactgcaggagcactgtgaagatcacgatcagcacgcaggtctgtcccaggctgggtcccccctggacctccatcatagccatgatcctgtcagagtctgactgctgtaagtcagccaggcagccggtcccccggccgtaatggccgaattcccgggcatatgtccggtaccgtcgactgnnnnnnnnnnnnnnnnnnnnnnnnnnnnnnnnnnncgnnnnnnnnnnnnnnnnnnnnnnnnnnnnnnnnttcagttttcgggnctaaaataaagaagggcggcttagccgtccccttattagtgacttctatacagg

SEQ ID NO: 122730 - DNA, 781 bp, Homo Sapiens
gttctttgtgttttctgtttatttcctcctgaaatcgaaagtatgtttgggaatagatgtagtaaaaccctttttcatggatgaccagttcaccattcctcaagtgcaagttgctcaggaatgaatgcccactccttgatgattcccaggagtttattttgcggcccagagccttttcattcttggagtttggagaagacaatgtgttgcttcttcctctggtcccagttatgtgagctgctactctctgaggacctctttctctcactaggggagaaatattttgttgcttttcttgaactgtagaaatggtttcctcagaggttctcaaaatcatctttctaacgagctgacggagttgccacttgacttgccagcaggggctgttcatactctcttcgtcattggggtcccaataactgtcatcttcttttaagaaacaagcaatgccacttttggagtacttgtcctgcatctgcttcagctcgttggtaaagtacacgtaagttacagccacacagagagactgcaggagcactgtgaagatcacgatcagcacgcaggtctgtcccaggctgggtcccccctggacctccatcatagccatgatcctgtcagagtctgactgctgtaagtcagccaggcagccggtcactgaagcccttccttctctattcttttatagtcagtgaggaaatgaaagcgaatgagttgtttttctgggttctgtccccggccgtaatggccgaattcccgggcatatgtccggtaccgtcgactg

SEQ ID NO: 122731 - DNA, 998 bp, Homo Sapiens
  misc_feature (704)..(704): n is a, c, g, or t
  misc_feature (733)..(733): n is a, c, g, or t
  misc_feature (749)..(749): n is a, c, g, or t
  misc_feature (773)..(773): n is a, c, g, or t
  misc_feature (779)..(779): n is a, c, g, or t
  misc_feature (832)..(832): n is a, c, g, or t
  misc_feature (970)..(970): n is a, c, g, or t
ttttttttgaatacaaatctttattattttgaaaaccacagcaaaggcacttcagaatctccaggtacccagtctcagttgccgttcagtggggacaagagtggtgctgagggcatggtcacacccttctgtgctgcatgcagaggggtgcaaggccagggcagctgacctggtcagccaccaggggagcccacgcctcttataacacagtgtccttgggtcaggaatttgtagtttattttgttattaagatggcgagagaatttttcgtccatttagagcctaacatttttagatgaatgttaatggcatctcggttgggatggattcgtgttcgtttctcagctgctgaaggatgtgtgttctaaaacaaaagggctcccagccagctctccggctgcatgatagagaagtgttttgtaagacgcttgttaaaaacccatattccctggcccctcttgtggagaccctgtttcagtagatgggaatggggctggggtctgtataacctgtgcccaggagactctgtgaccagcttgggaagctcctgcagggaggaaggaatgatccacaagtccccaagcccttcatgctgaggcatctgtctggctggagaacactaaggttggcattgtgctcacactgggaaatgacctggaggaagttgggaagaggagtccaggccggttccaccctctgggtcnagaaaccggctggaaagcactggaaatangggaatagaaactganaggctgggaccccctcacacccanctgcgntcatggcgaggttgagtgaggatcctggagctctggctcatggtcttgctccntgtctctgtgctcagggtcctgccacaagtcacaggcgtctgtatcgcgctgttctctgtggcagagccaaactgaaagggtgctgtctgctcgcatgcggtggtatatacaaagtgcctgctgactgccggctcagngtcacgcaggttgcacactcctcggttt

SEQ ID NO: 122732 - DNA, 2005 bp, Homo Sapiens
gagttgaatacaaatctttattattttgaaaaccacagcaaaggcacttcagaatctccaggtacccagtctcagttgccgttcagtggggacaagagtggtgctgagggcatggtcacacccttctgtgctgcatgcagaggggtgcaaggccagggcagctgacctggtcagccaccaggggagcccacgcctcttataacacagtgtccttgggtcaggaatttgtagtttattttgttattaagatggcgagagaatttttcgtccatttagagcctaacatttttagatgaatgttaatggcatctcggttgggatggattcgtgttcatttctcagctgctgaaggatgtgtgttctaaaacaaaagggctcccagccagctctccggctgtgtgctggagaagtgttttgtcagacttgggaagctcctgcagggaggaaggaatgatccacaagtccccaagcccttcatgctgaggcatctgtgtggtctgtataacctgtgctcaggttggctttgtgctcagcttgggaaatgacctgcgtgcatggccgaggttgaggaatgatccacgaagtcctccatgcccttcatgctgaggcatctgtctggctggagaaacactaagggttggcattgtgctcacactgggaaatgacctggaggaagttgggaagaggagtccaggccggttccaccctctgggtcagaaacccggctggaaagcactggaaatagggaaatagaagaccgaaaggctgggacccccctcacacccaacctgcgtccatggccgaggttgagtgaggagtcctggagactctggcttcatggtctttgctcttgttcttctgtgcctcaggggtcgctgcccaccaggctcagcagggcgttcttgtagtcaccgctggtgtcttccatgatcatgctgctgagggtcttgccgtacatcttcttgaagtgacatttgataagatttaagtcaatctcgctccttgaaacgatgtttcttatcagggtcccatcacgcgtccctgctcccttcatggcatagtagagtctctctgcaaagtagctgtggaggttttgggtgcatttcaccacagtgagcatggcctcctccagtgagccatgggtctcactcttgatgctgtcctcaatgctcttgttggcaattttctcatactcttcaaacactctcagcaggtgagtggcactgcgcgtgcacaggatggtgatgaatttcatctcatcagtcccacgaatcttctcgcctgccgcatacagatcctgtgcgtcttggagggccagtgcctgggtccacaaagctgctcacatcatccctgctgccctgcaggaggcacaccaggatcctctccaggtagccacttgtgtctgcttggatgtcctcctccaggctggacccatagtcttcctcatacgccttcattatctcccgcagctggttcttggtccgagaggccaggatctcaatgatgacaccctccttggttcctaagcccttcatggcgtcatgcagctccttggcttcgtatctgtatggcggatacataagggccacaatgagcctctcaaacttgccactgagctcagacttcaaggtctcagtgaggtccttgccgaactgagccttgaaggacttggcgatctgctgccgctgcgtgttgcttctcttggtgagcacatcgatgatagcctgctcgttggtcccgatccccttcatggctttgtagagggtctctgcatcagggtctgggttgaagtgggagctgctcttcactgtgacaccctcctgttcaatccaggatttccaccaggccatctctttcacctcgggggcacctttcccagggagatgaagagacacaggttggcctctgctgggactccacacgtctggctcctgcagctgaggagtgagcaggccgctcacttgggtgtgggggtgcaagcccgcccagggcagcgccacacctg

SEQ ID NO: 122733 - DNA, 1710 bp, Homo Sapiens
  misc_feature (1500)..(1518): n is a, c, g, or t
caatggctccaaatccactcttgattatttaaggtcattctgtcaataacaaaggaaaaaactctatgcatttaataggattttaaatggtttgcaatttaagaatggttttatttgtgctagtctttagtaatcttcatagccacatttttacttcatcaacaatcatctcagacacactttctaacaagactgacttaaaatattacgacaggaaactatgccttcaggagcatgtttattgtgtttgagatgatacatcaggtgctctctgagctacaaagggtaaaaggaaatcctctcattacaaactgacaaaggtaaaaggtaaaacatttttcacaacagcatgaaccacatactcagaaatagatctgggtttaatacaaatgacataattcctagccatctacagctacttttataacttcatacagataatgaattaggctaaaatgcactataatatttggtagacttcaggaccagtatccttagtacatcacaaaatacattttgatatcccaaagaagcaagacttgcaagtaggcgttttaaacataactaatctacagctacaaagttctactcttgatagcatttacctttttggggagtctcccaggctccaaaggataaaagcagagtagaatcagtataacatatacacagaagtccgtattgtaaaggctataaagatttgcagcacagtgagaagatgccttctgctccttcacactgcatacaaattatgtgaattatgttgcgtatctcttggtccactgtctggctatcctgtcgtgttctgctctgttggtcaaatactgagtggctatgcttccaaccagaggatccgcagggttgcagtctgtcaaaagggaacaaatagacagcaaaacctttgaaatagtcaaagcgggactccagttgtctttaaggatgtccagacagatgactccctgactgttgatgttgcagtgatagattctggtgcggaaagtaacctttggtggcttaaatggataatctgatgaaaatgtgatatccagaaaaaacacaccaccttcatatacagaacccggtggaccaagtatagttgatctccattcataaatgttatctcctttaggcccagcactgcaattaggaggaggatcaagggttatttcagctagctccttctgaattcttttagcactagtggataacttagcagtggttttgctagagagtttggtgtttttcttctgctgggtggcagaaggttttctttcctcttgttcttcaggctctggagcggctgggtctcgctggtccgcatctgaactgccactgctggtgctggggctctcatcatcggacctttgcctatcactggacatcttggtgaagttatctcttggaaaactcggccgcccgcccggcccgctcgcgcgccgctacggtgtgggggagggagagagaaaaaaacccttccttaaggaaatggaggcagctgtnnnnnnnnnnnnnnnnnnnagggaaaaaaagaagccgaggaggctctggccggggagtgtggaacattgaaagtcggagggggttgtgcagtgccgggctccggccggagggtggcgccgcccagcgcctctcggaaaaaagcgggggtgggagctcggctgggcgagggcgcgagctcccggcgaggcggagggacgcgggagacccccg

SEQ ID NO: 122734 - DNA, 357 bp, Homo Sapiens
  misc_feature (277)..(286): n is a, c, g, or t
gttttggagactacacttttattaatgcagcctaaaattaagtttataagcagcaacattaaactattagctgtttgaatacatagctaaaatgtactccctcctcccctaacataaacatgtagccaactcttctcccctcagcctgtacttttccagttgatttttgtttagcctaattgtaggtttcacatttctgcttttttcttttactcatatgaaaacctctggccctttcatcgtggggcatgaaccggccaagacacctgataatagnnnnnnnnnntcatagacaaacatgtagcaaccatcagaccatggtgaatgtaaagaatagaccctcatgaggctgggcgc

SEQ ID NO: 122735 - DNA, 989 bp, Homo Sapiens
acatatattatttaatagtcagtgggtagcatcttttattagcccaattttacaatgggaaaaaatagggatcttgctccccagacgttagccctcatcactcagctagaaagtggcagaacctggagttgagccctgtttttaggccctacaaccagcatttggagactcggtacctttcatgttgaaaaatccccagtggcccattaagtggcagctcatataaggaccaccttccctgccccaaaaatcaagctctagtcagatgattgcaggctgatcaaagcccagaagactgtctgggagctgcagtatccatgacaaagggcaaagtcatgcctgtgaggatccctgcactatgggaatctgctgagtgggtcttccccttcctccagccttccagaggtggggaaaatcctgaaaaattctggtttccttggccaaagggcatacaggtgatgacacctagccctgactaaaccaaagtgctgttagggatctttcttgtgacctctccacaaggttcagatttaggctcaacacctgggtgcagcaggagctttgggaaccgcctcaacctcttatccacctgagttcagcacatagcacaagatgctccagtgcttgtgaaggaaacccagacggggatcatgcttgcagttttgggctggggctactatgctacccaagatgagggaactggagtctagatgacactatcttaagcctcagaggactacttttctcaactctatacttctcccatgcagtcaaatttctgcttaaaacacttctcagctccttctccagagggcaaaagtccttaaccagcctgcagtcttcatctagccactccctcttcatttttcattccaagcaattcctcccagttcctactcagagccttcattatatgctagcctctctgcctgggatgctcttccctttaccctgcctgtttgtcatctactcacccttcaggtctcagc

SEQ ID NO: 122736 - DNA, 988 bp, Homo Sapiens
aaaggatctgggtccagcttgctaatgacaaagttcatttgtggtcaggtgtggtctggcctcccatggtggggccaatcagccttgctgcggataagagtgggtggggatatctgtgtcagcatattcatcatccaggtgtaccacataggccatgcggcccggcaggaacaactcattccgctcatatgctttgctcttaaaaagcattcggtaaacattgcggcccagacgtgttttaaattcaattttattttcaggatcctcatctttcttggtttctttctggggcttttccatcagttcctcttcctctttctctttgctggcaatctcagctcgtaccttttgaagcagagcaaaatccaagcctttcaccaaatgggtgtgttccatgtcaccacccaagaatttggactcctggatcaactgtcttctcttctctgcagctgatttgtccgcctcagcagtggggccaacagccctatagttagctgtggtgctgataagctcggtttcttcataatctttgttcactccatctctccgttccttggcacgatcccggtacttctctgctagctctctctctctcgcaatttcttgttggcgtagcttggcataataacttttctttttcctccttcgtgcagctgggtcttcatcctcattgtactcccttggcatctcatggtgacgtgacttagaaggtggtgcagaggtaggtgcagccctgggggtcatgagaagtttcctgaagtcttcattggtgagttttgattggtggaaggagtgaggatcatccacatcgtggccatcgggggccaaagggttggagaacggctcactatctcgctccggcattttgttatcgttctttcgctgtcaccaacaatcgagtctccaacagcaacaccgcagcgacaagctctttcccccccggccgtaatggccgaattcccgggcatatgtccggtaccgtcgactg

SEQ ID NO: 122737 - DNA, 1928 bp, Homo Sapiens
  misc_feature (689)..(763): n is a, c, g, or t
  misc_feature (1547)..(1561): n is a, c, g, or t
ttttagcaagttaaccaattttaatggaaccaagtaattacacaataaaattttatattcatccacaaaaaaacatcttgcaacctttggaaattgtagaaagaaaacagtggggagcatatccttgtggagcatctctggttgtaactagtgattagtattttggtcttttgacttcaaccccatcagcttccatcttcttcctcttctcaatgattgcactaatcttcttccactggcgatcaagctctgctttgtcattggtttccttgaagcgcctggttttccgcccttcagacattttgataccatactggaatgcagccttgggcaaagcttctttgttgttcatatactcgctgtattcttcctgggtatcaaagtcccaacggcctaagggccccttcttgttaccctggtccattttgctataatccacctcctcatcactatccacagccatgtcatccatcgtggctgggtagcactctgcataactgttggacatgccaaagaaatctcccagctgctttttgtcttctggcttcttcagcgattctgtgccttcccagccagcagacccagcaaacttttcattgatggacttgatcaactccttggtagacccaggtcctttgtcaacgtccatgggctcatcatctacttttggcttctcaaagtagctgtgnnnnnnnnnnnnnnnnnnnnnnnnnnnnnnnnnnnnnnnnnnnnnnnnnnnnnnnnnnnnnnnnnnnnnnnnnnngtcacggtctctgtctctttcccgatcacgctcccgttcccgatatctctcccgctccttgtcccgaggtgtcttggttgtggagggtacgtaatccccaatgtcttcaaaagtattcatgtcagcctcaggaggtttcttctcttccagcttccctttatccttcttcttaagcttcttgttacgggttccctgcctcaggtatgaaaggatctgggtcagcttgctaatgacaatgtcatttgtggtcagtgtggtctgggcctccatggtggggcaatcagccttgctgcggataagagtggtggggatatctgtgtcagcatactcatcatccaggtctaccacataggccatgcggcccggcaggaacaactcattccgctcatatgctttgctcttaaaaagcattcggtaaacattgcggcccagacgtgttttaaattcaattttattttcaggatcctcatctttcttggtttctttctggggcttttccatcagttcctcttcctctttctctttgctggcaatctcagctcgtaccttttgaagcagagcaaaatccaagcctttcaccaaatgggtgtgttccatgtcaccacccaagaatttggactcctggatcaactgtcttctcttctctgcagctgatttgtccgcctcagcagtggggccaacagccctatagttagctgtggtgctgataagctcggtttcttcataatctttgttcactccatctctccgttccttggcacgatcccggtacttctctgctagnnnnnnnnnnnnnnnaatttcttgttggcgtagcttggcataataacttttctttttcctccttcgtgcagctgggtcttcatcctcattgtactcccttggcatctcatggtgacgtgacttagaaggtggtgcagaggtaggtgcagccctgggggtcatgagaagtttcctgaagtcttcattggtgagttttgattggtggaaggagtgaggatcatccacatcgtggccatcgggggccaaagggttggagaacggctcactatctcgctccggcattttgttatcgttctttcgctgtcaccaacaatcgagtctccaacagcaacaccgcagcgaccctcgtgccgaattcgccacccaggcctcgctaccttgg

SEQ ID NO: 122738 - DNA, 953 bp, Homo Sapiens
  misc_feature (597)..(611): n is a, c, g, or t
cttttgctataattccacttcttcatcattatccacagccatgtcatccatcgtgggtgggtagcactctgcataactgttgaacatgccaaagaaatctcccagctgcttttgtctctggcttctttcagcgattctgtgccttcccagccagcagacccagcaactttttcattgatggacttgatcaactccttggtagaccccagcttcccctttatccttcttcttaagcttcttgttacgggttccctgcctcaggtatgaaaggatcctcatctttccttggtttctttctgggggcttttcccatcagttcctcttcctcttttctctttgctggcaatctcagctcgtaccttttgaagcagagcaaaatccaagcctttcaccaaatgggtgtgttccatgtcaccacccaagaatttggactcctggatcaactgtcttctcttctctgcagctgatttgtccgcctcagcagtggggccaacagccctatagttagctgtggtgctgataagctcggtttcttcataatctttgttcactccatctctccgttccttggcacgatcccggtacttctctgctagnnnnnnnnnnnnnnnaatttcttgttggcgtagcttggcataataacttttctttttcctccttcgtgcagctgggtcttcatcctcattgtactcccttggcatctcatggtgacgtgacttagaaggtggtgcagaggtaggtgcagccctgggggtcatgagaagtttcctgaagtcttcattggtgagttttgattggtggaaggagtgaggatcatccacatcgtggccatcgggggccaaagggttggagaacggctcactatctcgctccggcattttgttatcgttctttcgctgtcaccaacaatcgagtctccaacagcaacaccgcagcgacaagctccctcgtcg

SEQ ID NO: 122739 - DNA, 1657 bp, Homo Sapiens
  misc_feature (225)..(519): n is a, c, g, or t
tagggctaggtacgaggcctggtggcgaatcggccgaggaattcttaggcacttgcaagggcttgggggagggggaggcagttgtgatgacctcagaaatactcacttttcattaatgctaaatatgttagaaagaaatgatagcattcagcattttattcttcttaatctattaagctgtgtaactccctgccccaaaccactgaaaagaaaagtaaccttcannnnnnnnnnnnnnnnnnnnnnnnnnnnnnnnnnnnnnnnnnnnnnnnnnnnnnnnnnnnnnnnnnnnnnnnnnnnnnnnnnnnnnnnnnnnnnnnnnnnnnnnnnnnnnnnnnnnnnnnnnnnnnnnnnnnnnnnnnnnnnnnnnnnnnnnnnnnnnnnnnnnnnnnnnnnnnnnnnnnnnnnnnnnnnnnnnnnnnnnnnnnnnnnnnnnnnnnnnnnnnnnnnnnnnnnnnnnnnnnnnnnnnnnnnnnnnnnnnnnnnnnnnnnnnnnnnnnnnnnnnnnnnnnnnnnnnngtaaccttcagagattcttagaagagttgctcattcacacccacgcccttgcccaaggctggcccacttagagcgaaacttaacttttgtctggatgggaagagaagtaagtctaccccgaggttgccatgttgaagagtgagaggtccaagtgattctgtgcattgaaaccaagacaccccacccagaacacttcttccctccctcagcccaaaccaaaggctggggttctcatctccaagtggctgttctccaactttcccaagccgcttgcattccccagactggactactgtggcggttaggttagatttgaagacggggcccaggctgggtatgaacgggtgcagccctcttctcctcttcccccccacatctctcatgagagaggtagtggcatttccttctcagggagcttcaatgggaaaggtctcgaaagcttcaggaggagcagaataccaacgcagggggatggctgtaacgatctcaccgtctcctaacctcagtcccttttttgagagtgaatggtggagggtgggaagggacccagatttgtagatctctttgtctgggggaggggaaggatgtggtttgcagagcggaagcagagtttggaaacgcatgagagcagagcttcgtgtgttcccaccctcagtgaggaggtgtgagtgggtgagcatgtgggagttgggtgttcccaccctccattgaggaggtgtgaagtgggggtgcatataagaggcagtgcctgctgtgggggtcacaactggttggcatgccagcgccaaagggacctgtctttaggggtcatttcagcagtcctcccatcacagatgacagtccagcctagaaggggctccgctgcggccagggcaggccctcagactgtgggctcctggcctggttcccgtgcccacagattggttcccattgcttgctggtgggtgcctggtcgtgttgcccggggttagtcaggttgcccgagtcgagagggtttcgtgccagcgcgttgcaggggggcctctcggacgaccctcaggtgctcgcgtccactgcggggttccccgcgcgcggggccaggcacgcgaggcgctctcctcggggcgctgcatagacgccgcggctcaatagcggttcg

SEQ ID NO: 122740 - DNA, 1034 bp, Homo Sapiens
  misc_feature (127)..(127): n is a, c, g, or t
  misc_feature (316)..(328): n is a, c, g, or t
  misc_feature (527)..(655): n is a, c, g, or t
  misc_feature (688)..(774): n is a, c, g, or t
  misc_feature (805)..(940): n is a, c, g, or t
cttcagcccgccgctgcactgtggaacccctctctggactggccaaggccaaagcgggctccctccgcttgtggggaggtgtggagggagagctcgcgggccagtgagggcttggcgggccccgacntaggagtggccggctggtgccgccggccccaggcagtgaggggcttagcaccccggccagcagctgtggagggtgtgccgggtcccccagcactgccagctcacccgggctgtgcttgaattctcgctgggcctcagctgcctccccgtggagcagggcgtgggacttgcaacccgccatgcctgagtnnnnnnnnnnnnntgccctgctccctcatggccagagcctcccggacgggcgccgccccctgctttgcaaccagtcccattgaccgcccaagggctgaggagtgcgggggcatggtgtgggactagcaggcagctccacccatggccccagcatgggatccagtaggcaaagccagctggactcctgagtcgggtggggacttggagaactnnnnnnnnnnnnnnnnnnnnnnnnnnnnnnnnnnnnnnnnnnnnnnnnnnnnnnnnnnnnnnnnnnnnnnnnnnnnnnnnnnnnnnnnnnnnnnnnnnnnnnnnnnnnnnnnnnnnnnnnnnnnnnnnngtctagctaatccagtggggacttggagaactnnnnnnnnnnnnnnnnnnnnnnnnnnnnnnnnnnnnnnnnnnnnnnnnnnnnnnnnnnnnnnnnnnnnnnnnnnnnnnnnnnnnnnngtctagctaaatctagggacttggagaactnnnnnnnnnnnnnnnnnnnnnnnnnnnnnnnnnnnnnnnnnnnnnnnnnnnnnnnnnnnnnnnnnnnnnnnnnnnnnnnnnnnnnnnnnnnnnnnnnnnnnnnnnnnnnnnnnnnnnnnnnnnnnnnnnnnnnnnnaaaatggaccaatcagcaggatgtggttggggtcagataagggaataaacgcaggctgcctgagccagcagtgcaacccgttcgggtcaccttc

SEQ ID NO: 122741 - DNA, 2005 bp, Homo Sapiens
  misc_feature (59)..(82): n is a, c, g, or t
  misc_feature (143)..(155): n is a, c, g, or t
  misc_feature (418)..(427): n is a, c, g, or t
gtggcaagctaaaataaccctcaacaaagggaaaaaaccttgcggccgcctgctcaggnnnnnnnnnnnnnnnnnnnnnnnnggcttaaaagtcctttatttagttcctaccctcttcatctgcatagtaaatcatagggttnnnnnnnnnnnnnaccacgaatagcagttaatcatggctattctccaaaaagctaggtgcaaattaactttatggctccagtctatctaatctgaatgaataaacaacctaaaggtttggggtaaaccacagcacagaagaagcaccagatctaggctccaggctggtctctgccattgctaacagggacaccaattccacagaatcatcagattttaaatggctgtttttgtatgtaccagataaaactagtgcaattttattgctgctagtacnnnnnnnnnnaaattttgggatatacattttcaattggctactgtaacaaactaaagggaatttacaatacactgtcgtaccgttcataaacttcaaaatgagagtagtgccatggaagaaaagagatccagttttaataccactttatggccaataatcagtatttattgtttctcatttgtcaggcaccattctaagctcttttaaaatattcagtcttaacaatcctataggccgttatctccgttttacaaaataaagattgaaataatttatccaaggttgcagagtcactgctgcaatcaggacttcaatgttctgctgcactgtcttcatcactgctttactgcctctcagatcagatgcacgccactacctagcacacaagaggatgtgtgaacacctcctactcattcaacctgaccttgtccttggctcttctccctcggtcttaagattcctccttcacccctccctccatttgcagatctccagggttaattaaacctttctacctctacccaaacccttgtttcctctgaactggttccagcctttaaaatgccctattccccacatgttaaaaacttaagtgctcattgtgttgcctgttctttaaccttttatgtcatggtaccctgatcaaggcggggcaatctcgtccaacacagcttcttcaacttgccgcagcttattccaaactgcctctgctgccacttgagctcactctcacgtgtcctttccaactgcatacagcagtctacaccacaaactcatgtttgatttcatacaatcccgtggctttcttgttctgcccctttgggcttaaccatacgctcctccactacgttagtataaacccctgttcccaggcctccattaactttcacactcaggctgattacacacatatatttaacagtacagttttacacagaatgctaagagcacttttcttcatattttacagaagggcttgaaacatacagactattcgtaatcatacaatagcacatccaaatctaactcctaaatagatgatgcattataatttgtttagaatttaaaggcttaatggcaataatcaggggaggaagaagagtatgtttattttacataactgacggaaaaataaattcaacaaatagtaaatagaatttaatatggtctcatgcgccctgaaggaggtggtgcccgatttggaggggtaattgctatgtccaagtaatctcctatctggaacttctgcgactgcagggtcatggaatcatcagtcccctttctgccagacatggtgctggcaatctccttaactctgtaagaaagaaaatcaacgatagccaggtcttttaacatctgtaaaaacgattgcaaaattgaagtgagtgcccttctttctagcttctgggtagacttcttttactaagcttgtcagttctttcaaagttgcatccatccaagtgtagatctgcaactcgctggacggtacattttccccgggagaactcgtccatttcgtggtgggcggccgttatttgtggtgaagacccgtagcaccagtgggcatgttttctcgcggtcgatcgg

SEQ ID NO: 122742 - DNA, 1050 bp, Homo Sapiens
  misc_feature (939)..(973): n is a, c, g, or t
ctggctttcttgttctggcccctttgggcttacccatacgctcctccactacttagtataaaccctgttcccaggcctccagtaactgtcaacactcaggctgattacacacatatatttaacagtacagttttacacagaatgctaagagcacttttcttcatattttacagaagggcttgaaacatacagactattcgtaatcatacaatagcacatccaaatctaactcctaaatagatgatgcattataatttgtttagaatttaaaggcttaatggcaataatcaggggaggaagaagagtatgtttattttacataactgacggaaaaataaattcaacaaatagtaaatagaatttaatatggtctcatgcgccctgaaggaggtggtgcccgatttggaggggtaattgctatgtccaagtaatctcctatctggaacttctgcgactgcagggtcatggaatcatcagtcccctttctgccagacatggtgctgccaatctccttaactcgatagccaggtcttttaacatctgtaaaaacgattgcaaaattgaagtgagtgcccttctttctagcttctgggtagacttcttttactaagcttgtcagttctttcaaagttgcatccatccaagtgtagatctgcaactcgctggacggtacatttccccgggagaactcgtccattcggtggtggcggccgttattggtggtgaagacccgtagcaacagtgggcatgtcttctcgcggtcgatcggtttctctggctccttcttaatttcctcctgggtaacgcgcgactccaccgccatcttcctcctacggcctgcgagacgctcgccctgacctccgacccctgcagcgagcatgagcactccccggccgtaatggccgaattcccgggcatatgtccggtaccgtcgactgnnnnnnnnnnnnnnnnnnnnnnnnnnnnnnnnnnncggccgcttcctcgctcaatactcgctgcgctcgtcgttcggctctacgcgggcgccctatatgagtctagtacagt

SEQ ID NO: 122743 - DNA, 741 bp, Homo Sapiens
  misc_feature (159)..(167): n is a, c, g, or t
  misc_feature (728)..(728): n is a, c, g, or t
ctcatacacaatttattttatataacttacttggtgttttcttttattgaatcatacaaattcaaatggggattcctgaataaatctttagttaatttacctttggcagaaacaacagattccaaaacaattagtagcatctcatttatttgtagcttnnnnnnnnnttctgtagcgtatttttccaaaaacatagtcttaaacaaatgtgctttaaaagctaactggtaatgatctgattaatatcatagcttatttaagagagctattaaaggacagactagacatgtatttttaaaaaaacaatttttggtcatgtgaatgattcatgttcagatttcaaaaataggaaacatcctaaagtgcatcattttatttataatctcactccttgaaattatagcaatctgcaatgtaaacagtagagcaaagaattccaaactatatttttatgtacatttaaacctgtaggattatgtaccgtctttgtgtatggattaaaaccagggcacttccaacacatagctcaagcttccatacgattaagagcaaacttaaaggcattctttttccccatccttaacattcagctgacagaagagagctgctacctcacttcagcaatggaaaatgttgctgtaaatctcattggaccagccagtttctcacgaccctttacaactgaaaacgggtcagtatagttttacattctttttcttttccttagnactgtgccctttc

SEQ ID NO: 122744 - DNA, 1078 bp, Homo Sapiens
tttaacaattacagaagggagggagatttaatgttgtccatagaaagacattaaatgtcagactgacaatttagttatggttacaaaccggaaaaccatgccatttggagtaatggaatttgaagttactagaaaacgacaacagatttttgatacagaatgacaaggcttatctataacacgtcaacgttttcgacgactctgaaatttataaatagctggggagttcaccgtttctttcttcaccttcactttctgagttttatccataagatctttgcgtgtttgaattttctgagcaataacgaacaatttcttctctcgttcaatccgctgtgtcaggcagttatactgcttttgcctttctttagctattcgcttaagtccagtctgattggtaactcctttcactttttctttctgcaaggtctctatcctgggcctattaaagactctgtcgactagctccggggctgtttgcaggtgagttgcgacatcaaactgttcaacttcctttttggtgtcaaaaaagaacacatgcttgttctgttgcttcccctggaaatccagcagatggagctctgattttagtctttcgattttcttagcttctgcaaccctcttcatttctatatatttgacgtcctgagttctcatcagctttagttgttctggggttacttcttccttagtctccttaataatatgtactccatcctggagtttaacccgagtcattttgtagtagaattcatctggatttttttcaagagccttcttccgaagagctttgaggtattcttgttttttacggtagtcatctgcacgaagtttgtaatctttctttttctccagcaggcccagatgttttcgaaagccaggctggcttcgctctctgtgttcccgctgccgggacttagccgccttccgaaaagccgccgccatgtctgtacagccttggaaaagatcagtggagaacgccggatccgcactgcctctgccgccaagtccactgattcctaccggaccccggccgtaatggccgaattcccgggcatatgtccggtaccgtcgactg

SEQ ID NO: 122745 - DNA, 692 bp, Homo Sapiens
  misc_feature (169)..(206): n is a, c, g, or t
ttaacatttggaagttctcccctggaggaagaggggctagtcagaaggaacagaactggctcctatgcaggcggcaagtcaggtacaaacagctgagcaatctgggctgggattttatcacacagcatttttaattgataaaatttccttctctcttcttttgttctgnnnnnnnnnnnnnnnnnnnnnnnnnnnnnnnnnnnnnnagaaaaaggggtgggggagaagaaataaaatcagagaaaaatgcccaaaaacattttccacaatatctaaaaacagagaaccatagttcttgtcaagacaatatgaattctggatgagttattttttccagttttcaacaccaataaagatttttgcaaaagccaccacatcagaacactcatcttccagatcaaataaccttccccttttgccttcacttgtcatttttcataaaaggataaaaggatgtattctgttcttgcaaacaataagtgctaacaacaagagagctcttctgacgcttgtatggtggtaaggagttttcacaaatatccaagttttagcacagttagaaggactaaaatttgtttctctcaatataaatactactggaatccacaaactgatttttgagaaattctgcaaaaatcttttcttctttccttttcccttctgttaaaactcaatgtccctcgtgccgattc

SEQ ID NO: 122746 - DNA, 2966 bp, Homo Sapiens
  misc_feature (432)..(489): n is a, c, g, or t
  misc_feature (501)..(514): n is a, c, g, or t
  misc_feature (753)..(761): n is a, c, g, or t
  misc_feature (1097)..(1110): n is a, c, g, or t
  misc_feature (2005)..(2020): n is a, c, g, or t
  misc_feature (2806)..(2806): n is a, c, g, or t
  misc_feature (2812)..(2812): n is a, c, g, or t
  misc_feature (2841)..(2841): n is a, c, g, or t
  misc_feature (2859)..(2859): n is a, c, g, or t
  misc_feature (2866)..(2866): n is a, c, g, or t
  misc_feature (2870)..(2870): n is a, c, g, or t
  misc_feature (2876)..(2876): n is a, c, g, or t
  misc_feature (2881)..(2881): n is a, c, g, or t
  misc_feature (2898)..(2898): n is a, c, g, or t
  misc_feature (2909)..(2909): n is a, c, g, or t
  misc_feature (2911)..(2911): n is a, c, g, or t
  misc_feature (2914)..(2914): n is a, c, g, or t
  misc_feature (2925)..(2925): n is a, c, g, or t
  misc_feature (2928)..(2928): n is a, c, g, or t
  misc_feature (2944)..(2944): n is a, c, g, or t
  misc_feature (2951)..(2951): n is a, c, g, or t
gctgggtgttccccggggggtcctttggcgctctgcgcagtgtaggccttctttgggccctgttgtgcgctccctttccgttgcttccggttgagtctgttgagcccggagcttgtggtaccctcgctcggctacggttcttctttgtgggccagagtctggatccgggcagcgtttccagtcttctgtccgttgtgttggctctaatccacctctcccagccagggagagccacagcataagggactctgttcaacccgcgaagtcagttttccagtggagagccaaagccccacccagacataaacatgcatggaccaaggttagtgcccaaacaggacagacttgcacagaacaagagggcacagtgggatccatcggcgattacaggagcttccagcactaacagaggagccttatcccaccttcatnnnnnnnnnnnnnnnnnnnnnnnnnnnnnnnnnnnnnnnnnnnnnnnnnnnnnnnnnncatacgacacannnnnnnnnnnnnngcagccacactcaaaatctgctaaactcctacaacctcccccagcaggtcatttgacaattctgcatcttccgctctctggtgctggggctctggtcagaggcgagccaatgtcttatcattagagagatgtgggattaggtaaggggcagagtcatggcactgctcacacaccttcccgaaactggggtctattcagttttttgacaagatcaaaagcaattcttaactggtcattannnnnnnnnaaggtaattagaacactattgtttatacaatattgaaaaaatacaattttttattgtttgaactcaaatcaccacccagcactttaagcctaccctaaatagcacctacaataaatgtcatagcacaagcaaactgcaaagtcagcaggtaagcaagttagacagtgccagcagagagaccctccctcccccaaagcaatgagaagacagcgtgctaggtaagagtgaagtacaccattacatgttaaatagttaatactacccttccagcaagccacagatgctagatggataactcagtacggttaactaaccacagccctacatcactgcacnnnnnnnnnnnnnnaaagaaaaccttttgcttcatgcccgtaattaacataaagtaagtaaattctttgtctttttatttaggaaaataatcatgctaaaagcaagttgtactttatatagattttcaaacaaaagattgattgtgctttttgaataaaaaagatagggtatcttccaacctcactgacttaaaccttgtggaatacagcacttctaaactaaaaacacacgtcaaaaagaaaaattaaataatcccagtgggatgctcaaaaatcgtctttagaaggttttaggattggctaattctgctattatcttattggctgcggcaaaaaaagaacacagagctgctgtctaaaatttctccaaactcccctccgagttcagcaggcaacactcagatttgaaagaaactctgcagcaacctggacatatggttagctgagtcgacatttgattagcaggcattttaaactgatttcctcttaacatacgcaggagagaaaacattttcttcctgcagggcatgttctactacatcatatttctgaatcccttcttcctattcggtcactctctgaaaaaagctggtttgtttttcccatgtagaatcactctgggtacaagaacctttatttgttccaattattatttgttttaaatttagaacctgtgttgggtctaaaatacccatttcccactcccacaagcagatgatgaccaggctgctgccaagagcagcagaaaaagggaaaaccaaaccagaacatgaaggcaagtacccagggctttgcagtcaccacgtgggtcgtcttctcaagtctaatggtccatgagcggcttgtccaaggaggcggccgcctcttggtaggtgaagatgaaatctgcaacctgttctaagcacaatnnnnnnnnnnnnnnnncaaaaaaataacccccccagaaacacaaccctcatatttaaagctcttaagttcagggtagcggtctcaaactgccaaacactaggatgaggatgtgactctgcatgtgttttggatgagaggaagcatcgtcccagtcacttttctcctcctgtgctgtcctttcaaaaacaggtctggatttcacgctctaccccaagaaaaagaactggttcagaaaacacttccccaagtttctccaacagaacactgtggctgcagggcctggtagtgtgaagggcagcaactgacatataaaaatgtacttaaaatcagagtcaaaaaatggttttaagttttaatactcttaattagctccctgctttatactgtaactccacagaagacatagggccacctaggattcacaggaaggagcagctctgattcttacatggctggctccgatgcccccacagcaggcctcttcctccccaagtttttcctctccatttcaaaaaagcactattttatcttcacatccaagagctggttggtttggtttgtttctttggaaaccaataaaagaagcaattttttcctgttctttttactcacatctacctatcagagtggctatttccttcgacagttcagtagcacacaggctgacttggccacatggactcatgaatgcatgcattcagaccgcatattgctaccaaatggaatgtgggaatatgctatgcacctcaggttgagaaatgaccaagaaatcaagattctaaggggtgatatatattattnatatancattgcaataatccataaaaccctggttnagtattaaaaaaattggnttggttnaatnatgatnttaanggccggctcccaatggnttgggaaatananggnctttctgaaangcngggggctttttcctantaaaaantcccaaatccctggg

SEQ ID NO: 122747 - DNA, 2072 bp, Homo Sapiens
  misc_feature (1719)..(1783): n is a, c, g, or t
  misc_feature (2021)..(2029): n is a, c, g, or t
tttcaaggtatatacacgtttatttaaaaaagtttacagttttcattatacacaactattaagaggttatagtcagaggaggcatgtgtcctgttgacagacgtgcctactagatcatcacaatgcaaggagaaaggtggaagggaggagacagggcgaggaaaaataagcgataaaaagcttcagatttcagttaggggctggcagtcccttttatcttttcaagtatcacacaatatgtaccaaatacaatctgtaaataatggccatttcttcccaagcccacagccaagatgagtgttaggctaaattcagagccctggctcttcctcagatgagtggaaaacctgcgcatgacagggccggctcccccttctcaaagggcttcctcccactcatcccatccctaacagaatcgccgaggtgttcacgggccagagaaagcacaaacatggattcagaagtccaaagaaatgcagttcgttgcgcccaatcagagatagatgatttcattcaacaaggctggaagcccagttgggaagtcgataaaaaatcttgctaacttttttaaatggcttttacttttctaagtcactgaaacaaggaagggccacatgccatttaaaatcaaacactagttcccagagacttggtgtccagaaacttgacccacagaggctagcggaggatctgtctttcatgattctcagccatcccaacgggaggcctaacataaagcatgtgccaggccaatgccaactaggacttcagggggcctttggagggaaaaattcctttgagaggagacattcctcaggagcttagatcagccagctggcagtcagaacagcttttgaagtggatgagaaatgttaggtactggagagatgatatggcaactcctgataatgacctcactaggataaaatgctggttgaaactgcacagtaacctcaaggagggtgatgaaattgacgacaaagccaaatgtcagtgtctaagatggctaccactgaccctgtgcccaaaagccccccggtgctggggcttccagagggagcccaagggtggtggattcaatgttgccaggttgcaaccatcttgcttgttggtgtttggcaagagcttgagctcagttatgtgaacaggggcaaagaatggcttgtgctggtaaaactcaagggaggatccaaaaactatgggcactaaaaaggggagggaaaccgccagaagtggctctgacctgctgccgctgccaccacctctaaagccaagaatgtagagcctctgcccagggatctggatgctctcctgagtgttggaagggcagcctggaaaggcatttggtggtgaaacaccgctgctccagacttacgctaccatctattgttgggggcccagagtccttggattcactgccaggccttcttccagatctttctgtacctgtgtgtttgggctcctactcccacctctcccaggcgcagggagaggacaaaaagcataagggactctgttcaacccagcaaaagtcagtttcccagtggagaggcaaagccccacccagaacataaacatgcatgggaccaaggttagtgcccagacaggacagacttgcacagaacaagagggcacagtgggatccatgcggcaattacaggagcttccagcactaacagaggagccttatcccaccttcatcacacagacttagatggnnnnnnnnnnnnnnnnnnnnnnnnnnnnnnnnnnnnnnnnnnnnnnnnnnnnnnnnnnnnnnnnngcagccacactcaaatctgctaaactcctacaacctcccccagcaggtcatttgacaattctgcatcttccgctctctggtgctggggctctggtcagaggcgagccaatgtcttatcattagagagatgtgggattaggtaaggggcagagtcatggcactgctcacacaccttcccgaaactggggtctattcagttttttgacaagatcaaaagcaattcttaactggtcattannnnnnnnnaagcggacgcgtgggtcgacgatatcccgggaattccggaccc

SEQ ID NO: 122748 - DNA, 606 bp, Homo Sapiens
  misc_feature (152)..(193): n is a, c, g, or t
cagggtccatgtgcactttattcactcgtgtcgtcgcctctcgggtccatgcgtcggggcgagcgtctcagccgggcgggaccgcaaaggccccgggaccacccgactgaggacgccgcccaggcctcggcagggctggggcttttgttttnnnnnnnnnnnnnnnnnnnnnnnnnnnnnnnnnnnnnnnnnnctggggagaaattaagttttacaacaattggaactcaaaattccaaaatggaaaatgtacaaactcggtcccccagcagctctggccccgagaacggacagtcccgggcccggcgccttcccgctcgctcgtctcctgcaggtctgggatggggatggggtagagcttggtttttggtcagaagccaagaaaaaagatcggagaagaaaagaaggaatgacctcaacttgctctgcacggaggacggggacggctcagagataaatagcatttaggttaaaactatgtcattagcaaatttagttcttatatctttccctctatttatatctctatacacggtgggctgcgatgcaggatagattctggatttacagttacacgaagaaaaaaatactctcgcccctccccca

SEQ ID NO: 122749 - DNA, 799 bp, Homo Sapiens
tcagagctaatcatgttcaggggagcgtgtacctaccaacaaatttcctggttggtatgcaaatggtattttctttttattgttgttaattgggactttctgttaatgaaaagcactattcccaagattaatagtgttctatgcacaatgaagcacctaaaaacactgcttgatattataaatttaaaacacaagtgaaagtttagccatggttttgtgcggcatcatagttatgtcaataaagtttatttaggtcatagaatatcctaaagtatcacatagttaaatttttcagtcagtgaagaccgggagggaatgtcagtgaattggcttgaatgttctgtggcaatccacaggtctagccaaatattgaaataggagtttagggtataatttgccttgtgatgtttggcagtcactgtttatactttaaaggttatattttaagctatttgagattgcttttgggaagatcactagatttatggaggaattagtcacaaatgacttgtagaaaatactgtcatatagttcatttcatcattttctgttgcaggaagccactccaccacagaatgctaatatgccagtggtacccagtacctcttgtatataggttattgcaaatattgttctgaaatgcttaacttcagaattacattttttaaagtaaataattgttttaaatctattttgtaaagatataaagtacaatagaatttctggagtacagattaaactatttgcactaacacacgtgacgtgcatgatttaataaaataactttactctccctaaa

SEQ ID NO: 122750 - DNA, 2645 bp, Homo Sapiens
ctgtttgtctttctgctttcgcggtggttctttgtttcgtgtttttcctattcgtttttaggctttaaagtgaatcgtttttatttaaaacagggatccatcagaggtggtgaactatcaaggtcaaggttctagagcatggcacagatgaaaggtaatactcaccagcacctcacatgggactcagtgacaatgtcagcaacacaccatggaaggagaacaaacccgatgtaaaaggcacctagctggggagaagctgtggtgttcactgcctctctagcaggtttgcttttgtgcactgtggctaagtctggatgaataatattgggaagggaataatcggaagcgaggctcctatgcaggcagctaccctctcctgattggtgtatactcgccatgtggtaggaggtcttacaggagactgaggttaccaaacaggaatacaacacctctctcccttttctgctctagaaggaaggggaacccttcccccagtatcaatttcagcagcggcttctaaaggctgttaaaaagcatcctaacttaaaaacaaataacaacagtaaccaaataaaagacagaaaagtggcctgaacttaaatcaatcaatggaaaggtagattcataaaaataaaataaaaactggtgaccagtccattaaccatggggttaatgcctcgtctgaaggaagatgtttacgctgcatccacgatccagcaggcgcggagctgctcttggcaactgtgaatgaatagctaccgtttcccttcaacacaccgcgctgccaccggtgaccgcatgtcaagtgctgaagttagaagagaccccacgttggcaaaggccccccaggcgatgatctgcctgacgcggccaggtctgtgggaaacaagacttacgatctcaaataatgacccccaagtgccctcgcctcttcctgcttgccctgtgcgcctcgacctcctcacggggagttccaaatgagttccatttccctctcagttctaggcactctggaacatctttgattaaccagggtttttcatttctttccaacgccattggtgacttttgacttggaatgccgattccttctcctggaagaatggctttcgttgttgcctgcatgcttgggtgggctgtcttcagaaccttttgtccctttcctgtgatgccaggagatctctggactgtaggtgccatcttcacactccgagtaggtcttttctcggtgaccatagtgttctgcataccaaatcatgccgtacagacagaggaaagtggtgaaagccacgcaaagaagccaaagcacaacatagagtatttgggtcttagagaagagatcttgtccaaattttatgcaaacaatggcctccaggaaaccaatgaccccaaacacccagcattgtgttcctacgcgcttgcactgtgtgtcggtgaggtaagcgtagtactgtctcactgtgggagctgtgatgccaccaataaagagaattctaccccaacttaatggatgactggcttggaacacaaagatatgcttcaagaagaaggtattcaactcagtcagctgccagatgatcatgaaaaggtacactccagctactctctgaaaagaagatttggggtcaaaccatcgaacataggtccagctagcaggagtgaactgcagaacagctctcttgatcttcccggtggtggtatgaatgtccttgaagcttgcccagtggtaagtcctcatctctaaaaaccggcaaacgaccatgcccagccaaatgccaccgccattgcacaacaggatgtccagaatgacttgatcccaccagcactcggcaaaattggggaggagatgcatgaagaagagctcagtcagctcccaggtaatactgattgtccagcagagaccgtaactacggatcagcaaggccttcatggcccagccccagaaatgtccaaatgcaaaaatatcaaagtggctgataatcctctcccaggtgatcacatggcagttcacagcatactccatgacatctgcttcccttgtggcgtatcgaagatttggatctagccaatacattagagatttaacctgctcgaaattcaggaagagtaggaataccaggaacaggaagtagagcacactgagtccaaaaaccattcgccataaggctggatgaggtcgagtgaacggaccattggggaaagctaacacactgatgataagaaagaagaaaataacagagaggatgcctctccagatgttgtcttctggaacagagtcatccctggtaaaggcgaagtacatgaggctgacgatggtgaagctgagcagggtgatggtatgcggccggtagaagaagtcaatggtgatgtcctccacttgctgctcgttgatcatccggaaatgcattttgtagttcacatcatccttgcttagggtccggctccccacgcaggacgccatggcccgcctccccgtcctgccgcggtggcggcggccccagcccgagaaggccgggaccccgggggtgactagccacagtaggctaatagccggacggcacccacgcgtccgactagttctagatcgcgagcggcacgcgtggtcgacgatatcccgggattccggaccgtaccagccttgcttt

SEQ ID NO: 122751 - DNA, 674 bp, Homo Sapiens
atgtttgttaaaatacatttttattaaatgttagaataaatttatacacaattcacaaattctttacaaagaattgccaatctttttccaattttgtagtagtctctacacattcagaaattctgctgttaaacaggatttataaaatatttctttcagaaagcatcacaatgctaattttaggcaaataatgttttaaaactgaagtctttgcatggaggtgagctcaaacacccttattctttattgcagtgatgaaataatgagaaaaataaacattaaactgacttactaagaaaacaatgaataagtaattctgtaaacttctcaaattctcctaaaattttttattactttcagaagcaatactattgcaaggtatcaacaaccacactatgtacccaaataaaatgaatgtcagaaataaaaatactgtcacaaagaagcaccccttattggaagatgtattgaagaagtcttattacactgaaattttatggcacagatcataaactcagagtctcttcacacataataacaattcatccattttgaaatgagtaacttctcctttgtagtgttgctagtataaaaaaaggtacaagttcaaaatatgctggcaacatacaaaagtggccaatagttttggtctttgagagtaaccctgcagttta

SEQ ID NO: 122752 - DNA, 2751 bp, Homo Sapiens
  misc_feature (1960)..(1990): n is a, c, g, or t
  misc_feature (2568)..(2577): n is a, c, g, or t
ttgaagggaatcagaatctgtttttatatccctagagttataaacatttgtatcaaaatatttacaattatagtatatgaaataatctattaacgaagaagcccaatacagtactagaacaatccaccagagtaatgcaaattacatgagacataaatgtcacagaaaaaaagtaaaagataagggaatacatggtttactccagtcatagttcaacttcttaacaaaatgtgagtattccctttggatatgtctgaaatgtaagtatgttttttgcactaagacagccttctataatcatgtgataatgaaatcataatgacaaagttcatcttcccacagtttttgctggccaatctctctaacctcagcctaggtaatttggtggcttgccctcaacatttccttaactagaataaacatagagaaatagaattagtaataatccttttacataaataccaaaaatcatggcataacaactccccaaaaaggaaaggtataaaagaaatggatgaggagaaagctaataaagaaaagtaggcaagatgtctcagattctccctggggtagatcttctcagggcgataaagaaaacgtcttcccaaaaaacccctttagacagaatctgagatggcttaaaatagctgctccagggcaaagcaatgcctgcttaaccaggaataacatactacttctaagtcctgtatagaggtgctcctgcggcagcagacagctcgtctaccatctgactaggtaccacaagagtttttgcttttttattttaaagaaaagatctgcccatcacctatatttttatttatctcatgggattttcgtattttcctgggaatgcaggcactctgttcttatcatggctgaaatacggtaggcttaatacttcacaattatatagcacctttcacccaagggcctgttgtttggttttggtttatgtgtgttttaatcagcttccagaattgccatgcctcacctgtgaagtgggataggcagggtccccaagaggtgatcactccaggtggtgtctaagccagagctaccactgagcctaggagccctgatcctcaatattgataattagacaaaacttcctcaaaaatgttagaggaagagtaataggattgtgctacaatgagccatgtccatctctctcctgttgtatacttaaaagaaacactgactgcattgaggggaatcctaaaaacataaccctaacatggcactgttgcaagactgccccttggatcccatagtttgtgtggtacttttaccaccgaattgttcactagtgactttagagaaactccagaagagctgccttggctttcagcaagaggcctagcaaagaccatggcatgaggtctcccatgagggacagccgtgtgtgaggtctcgactgggctctgaccatcccccaggttttccattgtgaaaaggtctccttcttggtttagctaacccaccagcatgaccttacaaactctctttcctcctcccattttgtcactgaattccacagagctaaatatctgttccaaagagggacaatggctcacaggccaaagccccccagtaggcacttcagactggaatgtgatgttttgctttgggtcagaagggcaggatggcttccaggcttagcgtattcagcacaaagacagtatctgctcttgccagaacttgtaccgctattttaactcagtgcagtaggtctgtggacctcagtgcatgacccagaagtggggctggtgttgtggcagctgatggggccccagacagtgtgtgtcactaagaacagctggaggccaagtctggtggctgcagggaggctctctggaccccatcaagggagcatcaaagtactagccaactactttctccccagggcaggggcttggcagtagagaatcccctcagtaatggtttgggatttgacctnnnnnnnnnnnnnnnnnnnnnnnnnnnnnnnatctcggtttttcctgtacagcaacctccacttccctcccagattcaacggcttcctcctccccaccccccagatccccatgaactcgtccggccttatttctttctcaggaccagatagagaacgccgatgatgaagctgaagcagaagcagatccagcccaggatgtaggaatagccgtggtgatactgcgttccatcacgattcgcataatgactagtgtagatggacacccccacaagaatgcacagccagcacaccagtgtggtggcccctgagaggaagaaccggtttcccttctccatggtgaagagctggaacacgaagaccaggagggcaatgacacagaagatgatagagagaatcatgaaggcctgcactgtcttgagggcatcttcactggcatatgacaggctgtcactgcagctaatgttggtacagtttttccaaagacctactgatgcatctaccgtattggaaaccaaccagacattggcaatggtgctaacaaatagcataataacagtagcgatgtggaccacaaagataccagccagcaataccaacatgttggctcnnnnnnnnnnggtaacttgtgagcaaagagagttctgaagggtcccagcgacagaggcgctctgagtggcaggtgctggcagcagccctggtccgctcttctggaagtatgtgaccgcactgaggggaaggacctgcctcccgaggttataagtttcctctgctgcgctactggggtgagtaat

SEQ ID NO: 122753 - DNA, 877 bp, Homo Sapiens
tgaccaggttgggcccaggcgtgtgtggtggacgccgtggcgcgtcaggggtggtccggcccggcggctagcgcgtgcctgagatgtggctagggagtgtccagggacaggggccagcccgtgcccaggcccagccagtgggtcggtgttacaccggtgcccgagtgctcttcggtgggctgcgcatcctggtgaaggagtataagagagtacttaagttgtaaaccagaagtggtagtagcggaagcaaaaccaggccagggataaagcaaatggtcagagatgaaacgtgtagaacgcaggttagtcgagtccagccaccaggccaatgtgaagtccgcgagcctgatctatccaggcgagcggaggtaacaggtttcaaggtcgctgaagcaagtcgggaagtcaaacggaggaggtgaaagacatctggccagttgcccgatgtcatttgccaaggtgtgtggtgtttcctgccatgaaacaggatcctatcccagtgatttccccagactccgtcctcaaaatacacttttctgaactttctagaaaaagttgtctctgtatccactttgagccaaaagtttcaaggacttggttcttagaggatcatagaaaaatagcgaaggaagaaaagaaaaagcaaaactaagatgaggtcagaagaagcagagccgtggaaaggaaggagaagttttgctgagagtccccacagcgttgggagctgtcctacctgaagggtcccagcgacagaggcgctctgagtggcaggtgctggcagcagcccgtggtccgctcttctggaagtatgtgaccgcactccccggccgtaatggccgaattcccgggcatatgtccggtaccgtcgactgataag

SEQ ID NO: 122754 - DNA, 743 bp, Homo Sapiens
  misc_feature (333)..(361): n is a, c, g, or t
gcaagatagcattctgctttgatgagaaaactgagctaatctgagtgaaacaaaaacagtaaatagactagaagccagactggtattttgcatcgtgtatgcttgtttgaaaatctttgcttctgaagtaaatatttggcaaccacagtgattagcagttaaagtaatttcaacaaaataataagtcattgaaaatggactgtttgtctgaaagagcagtacctatattataaagattgaatttcgtggctcattacaaccattttcaaaatttaactgctactatcttcttataaattaagagaatttcatttgttccatagtgcgatgacnnnnnnnnnnnnnnnnnnnnnnnnnnnnnccctcatgcctaaatttagaatattgtattgtgtagcaatccaaaacattcaaaacaaattaaatagtttaacttatgtgacaggcagataagcatttcaaaagcataatgaagtccaattatgtagtgcataatgtagacaggagaagaatctaacattatgcagacattttctaaataaaagctccctgtaggacagctatatataaacatgggtaaggtaagcgcagactagttctgtggaaccttttgaaatcaagagtctaaaacacaatacatttttcaggtaggcaccaagttatcctaaaaaattttcatgtcggttattctgacattgttttttcatcagatactcacatcaacaacacatgtgatttccagg

SEQ ID NO: 122755 - DNA, 1203 bp, Homo Sapiens
  misc_feature (73)..(147): n is a, c, g, or t
tggggccccgcgcgccccaaaggaaatggtttagaaaaagttttttgaagggcccgaggcgggccgaccatgnnnnnnnnnnnnnnnnnnnnnnnnnnnnnnnnnnnnnnnnnnnnnnnnnnnnnnnnnnnnnnnnnnnnnnnnnnncagggggacagaaatgtttatttttcattaatcttttgaatacaatcatcataattttacaggtttagtttagttgcgaacttcactaataacatttccaagagttcacaatttcaaggctaagcttctgattaaagtatcatggttacaaatgtaatataaatggagtttttaaaaaaggctaaaagcactctagcctcttaaaaaatatatataaatggaaaatggccaggcattaaacttagtaacattaagtacactttagtactacagcagtcaaagagatctccactagagatcagaaagaagcaccactattttcttctatgacgtgtatgtgttggtcatgagcatgctagtatgaataaggcaatgtgttaagcactggcatacaaatgcagctaaaggtgctgaaggaaggcagtggggtggtgcaggcacacagcagggagctcttccccgtgacacgttagtcatcttctccacagagcagcagaagagctttcttatagtccccagatgtatctccctgaaaccaaatgtattccattaacctccatgactcacagaagccatagaaaattttaaaactaaataactggcaacaaattttattcataagactcttctcccaagtgggtaatctctgtgactttcacatcaggaatgttatgcagggagtttcctaccaatgtaacctcagacactcagtattccctctggtaacacaaagaaccaggcaactttaacaactatagtcaaatcaagccttctagacagaatagtttctatcacttggtatatatcagctaacacgggcagtgctggggctgcagggctgtcatggctctccctccgagacagaagggcagaacatgctttgcatctgcttgtctcacatgcagacatgcatgataaattaatgtttcaagctaaaagtgcatgggtaaactctctagtgtcctttgggccagccaaaccacaaacatgctaaactaaaagcttctgctcaattgaaatcttgctttgcacatggtccacattaacctttactgg

SEQ ID NO: 122756 - DNA, 1014 bp, Homo Sapiens
acaagtcaccaacccaccaggggtttaattctctgaatcaaaagatcagttcagagaggagccctgctttgtcctcatgcaggggtgaagatgtgcagagcaccctgggaatgtccaagcccagaagagccaggggccagtccctgagcaagtggagaattgggtcctggagtctcaggctgcctcctcctcttcactctcctcctcactctcatgatactgtctgcggtttgtgttaacaaacaggtcagaatcatcttctgagctggactcctctcctgataactgtggctcagctgggagttctggttgagtttgtctgttcctgttgttgtgtttctcagccacttcagagaaggcctcaggccaaaacccctccttctgcagagagcgcacgtggtccttgcagagcacaaacgagatttcagccttcaccttttctccctcttcaatggggtcaacaatgagaaagtcccctctcttgatccagatgttcttgcggtatttggagggcatgctcaccaggaagcgctgcccttgggctgtctccacctcatgcagattgttccctggggtcctgagtaccctgacaatctgctgctggtcggagggcactatgtgctcccctagcacctccttcaccacatgcttcctcttggtggcctgagacatgctgaagtcgtcccacactggttaggaacgaagagactgtcaactcctcctcctgagttccttggatggcaggctcagaacccaggactgttctgaagatggggaggggccttttaacttagtctctggccctcggctcccaggaacgctgccggagcaacaccgccgtctaggctggacgctgagagaggatcgtccacgactcacttcaaggctgaaccaagaaaacacagtaaaggaacttgccggcgccgcgacggtagcgtcagttagaaatcagtctccagtgttcccagttcccaccagcctcgtgccgattcgacaccagcctcgcactagcta

SEQ ID NO: 122757 - DNA, 1283 bp, Homo Sapiens
  misc_feature (1073)..(1073): n is a, c, g, or t
  misc_feature (1075)..(1075): n is a, c, g, or t
  misc_feature (1102)..(1102): n is a, c, g, or t
  misc_feature (1108)..(1108): n is a, c, g, or t
  misc_feature (1112)..(1112): n is a, c, g, or t
  misc_feature (1115)..(1115): n is a, c, g, or t
  misc_feature (1126)..(1128): n is a, c, g, or t
  misc_feature (1135)..(1135): n is a, c, g, or t
  misc_feature (1147)..(1147): n is a, c, g, or t
  misc_feature (1159)..(1159): n is a, c, g, or t
  misc_feature (1175)..(1176): n is a, c, g, or t
  misc_feature (1184)..(1184): n is a, c, g, or t
  misc_feature (1197)..(1197): n is a, c, g, or t
  misc_feature (1238)..(1238): n is a, c, g, or t
  misc_feature (1259)..(1259): n is a, c, g, or t
cctaaaataaacatggggcaaaataacccaggggaccccttcgttctttcctatatttaggaaaaatcatgttctatgaaggaaattcagtctatggtttgcatttcttactgcccaaaaagcccaactgtaaattcagttctcaactaacaccactgtcaattattagcttaaaaagagagaacattgttaaattaatttaataataaatctaaacacacatgtacacataattcagggggacagaaatgtttatttttcattaatcttttgaatacaatcatcataattttacaggtttagtttagttgcgaacttcactaataacatttccaagagttcacaatttcaaggctaagcttctgattaaagtatcatggttacaaatgtaatataaatggagtttttaaaaaaggctaaaagcactctagcctcttaaaaaatatatataaatggaaaatggccaggcattaaacttagtaacattaagtacactttagtactacagcagtcaaagagatctccactagagatcagaaagaagcaccactattttcttctatgacgtgtatgtgttggtcatgagcatgctagtatgaataaggcaatgtgttaagcactggcatacaaatgcagctaaaggtgctgaaggaaggcagtggggtggtgcaggcacacagcagggagctcttccccgtgacacgttagtcatcttctccacagagcagcagaagagctttcttatagtccccagatgtatctcccttaatcatggaataaagagaggtggcaaaattcttcctaaactccttcctgatgttaaacagatcaatctcactcctggaaaccatgactctgatgagggtatgatcatctgtcccagctcccttcatagcataatagagggtctctgcaaggtaggcaggtatacttcgaatagatttcacaacagcaaggagtagttgctctaaattgccagaagtctcgcggtcaatggtttcctcaatttgaaatcctgatatagtcatgtactttgtcaacacctttctcaaatgagacacacttcgtgtccnanagatgggctcccgtgcgatttcttggnctcgangggncanatcccctatannngagtccntataaattcgtnatcatgtcatanctgttcctggtgtgannatgtatcngctcacattccancacacatacgagcgggagcaaaaatgtaaagctggggtgcntatgatggagctatcaaatanttgcgtgcgccactgccgcttcag

SEQ ID NO: 122758 - DNA, 950 bp, Homo Sapiens
  misc_feature (12)..(12): n is a, c, g, or t
  misc_feature (891)..(903): n is a, c, g, or t
taaattgccagnaagtctcgcggtcaaagggtttcctcaatttgaaattcctgaaatagtcaaggtacttgtcaaaacacttttttcaaaatgagacacacttcgtgtcccaaagatgggtgataaaccttgttcttcatctgtccccccatttaagttcttccagcctgaaataaagccctgagcatcttgttcaacttgagcttcatcaattccagcatcagggtctctgttagcctgaaggagaaccaccaacatccgctggtagtaccctgaagtgtcccccaccacgtcatcttccaggcttgagccatattcttcttcataaacttgtttgatggctctcagttcttcaggtgtccttgaagcaataatttctgtcagtactttttcatttgttccagctcccttcaaggcatgtttcagttcataagcatcataaagccgagagggtttcatcagagccacaattaatttttcaaattttccagttagttctgatttcaggtcatccagaagatccctgccaaacagagtcttaaaagctgcagagatttcctggcgctgagcattacttcgggatgtcaacagagtcaggatgctctcctcatctgtgcccaagcctttcatagccttccgaagagtttctgcatcagcccgctcatcaaatccagggaagtcagtcacagtgcctctgagaacctgtgccatggcgactactcaggtcaggggaaggtgaagcaggaccagactgtgggacccaagtgccccgaaaccccgggagagcggcggagagccgggcgacggtacgcggggcgacgccgagatgcagacgctgaaggatccggcagctgcacctagactgatccaagcaacggaaacgccagcggnnnnnnnnnnnnnggccgtaatggccgaattcccgggcatatgtccggtaccgtcgactg

SEQ ID NO: 122759 - DNA, 625 bp, Homo Sapiens
  misc_feature (322)..(322): n is a, c, g, or t
cttcacccatccccagcccaggctcccccactggcttctcccccattgggctctgccacgaagtctcggtgcttttgggagttgtcatcttgatcaggcttaattatttttaagaggagtttcttcctgcaggacctggattttgatcttgccccagaggaaaaacgatcctgcctaacaggtggcgcaagcggggcagtggaaagatgcccagagtccgtagccagggctgcgcggaagctatcactccctctgtgaccttggctgaaccaagacgacactgcctgcctggaacggccacttggcgtggaaagctaaccanagggtctctctcaagccactagaactttcttccacttccgcttccgggtcgcttcaagagccgcctttaaaaaagaaacattccacgttgggcacttctagccagttagagctatagagttgaggcgccccggacctcgacggcgtccttagtaggcgctcctttccggtccttcgcgggaagcgctgccttctaaggtctcgcttctcgcgcagttctgagggagataggcctccagggagaggacttcctcggcacgaggcctcgtgccgaattcacacacccagtcctcgtacctagccc

SEQ ID NO: 122760 - DNA, 626 bp, Homo Sapiens
caaggtgtttggcttgtagctcgctgtccgacagaggaagccactgactttattgatctaaaaaactttacaaggacagtgactgttctgccaaaaaaggagccaaatggtatcaaacggattgaaagtgagggtgggggtgagggatggggccgggaatccattcaggaaagctggtaactgtcaccagggaactggcaagggaaaaaggacgggggaggcatgcaagagcgagaatccaaaaaaaagttgaaatggttaggggagaaaactcccaaaagaccccggagtacgtcggaggtgagtacgacaatagcaatcttttccttcgtagaggacaggggaggagtccctactcggctgcaaactctggatgagggctggggattgagagcttcccagagagcatcacaagaaggcgtcgcaccactctcgaaggcatccgaagcagtcccgggactgcttggcgttggcgccacaagtgtctttcagccattcccggaagaggtcttcatctttctttagcaccagaaactggccaaggacaacataggcccgcaacttcagttcccgtaacggttcctcccgccacccggccgctcctgcggatacctcaagccactccc

SEQ ID NO: 122761 - DNA, 884 bp, Homo Sapiens
caacaggcagggagtagttgctctaaatgcccagaagtctcggcggtccaaggtttccttcatttggaaatcctgaatatagtcatgtacttgtccaaaacacctttctcaaatgagacacacttggtgttccaaaagatggtgaataaacttttcttcatctgtccccccatttaggttctccagcctgaaataaagcctgagcatctttttcaacttggagcttcatcaattccagcatcagggtctctgttagccctgaagggagaaccaccaacatccgctggtagtaccctgaagtgtcccccaccacgtcatcttccaggcttgagccatattcttcttcataaacttgtttgatggctctcagttcttcaggtgtccttgaagcaataatttctgtcagtactttttcatttgttccagctcccttcaaggcatgtttcagttcataagcatcataaagccgagagggtttcatcagagccacaattaatttttcaaattttccagttagttctgatttcaggtcatccagaagatccctgccaaacagagtcttaaaagctgcagagatttcctggcgctgagcattacttcgggatgtcaacagagtcaggatgctctcctcatctgtgcccaagcctttcatagccttccgaagagtttctgcatcagcccgctcatcaaatccagggaagtcagtcacagtgcctctgagaacctgtgccatggcgactactcaggtcaggggaaggtgaagcaggaccagactgtgggacccaagtgccccgaaaccccgggagagcggcggagagccgggcgacggtacgcggggcgacgccgagatgcagacgctgaaggatccggcagctgcacctccc

SEQ ID NO: 122762 - DNA, 1892 bp, Homo Sapiens
  misc_feature (49)..(49): n is a, c, g, or t
  misc_feature (109)..(109): n is a, c, g, or t
  misc_feature (117)..(117): n is a, c, g, or t
  misc_feature (122)..(122): n is a, c, g, or t
  misc_feature (149)..(149): n is a, c, g, or t
  misc_feature (1522)..(1522): n is a, c, g, or t
aaaagggccacctgggactttttaattgatttctaaaaaaaaccttttnccaaggggccaggtgacctggttttgcccaaaaaaaaggagcccaaaatgggtatccaancgggattnaaaantgagggtggggggtgagggaatggggnccggggaatccatttcaggaaaggttggtaactgtccaccaggggaactggcaagggaaaaaggacgggggaggcatgcaagagcgagaatccaaaaaaaagttgaaatggttaggggagaaaactcccaaaagaccccggagtacgtcggaggtgagtacgacaatagcaatcttttccttcgtagaggacaggggaggagtccctactcggctgcaaactctggatgagggctggggattgagagcttcccagagagcatcacaagaaggcgtcgcaccactctcgaaggcatccgaagcagtcccgggactgcttggcgttggcgccacaagtgtctttcagccattcccggaagaggtcttcatctttctttagcaccagaaactggccaaggacaacataggccttgtcaaaacccctttcctccagcttcttgcccaggacttcaccaatcccagccaggctccccactggcttctcccccatgggctctgccacgaagtctcggtgcttttgggaggttgtcatcttgatcaggcttaatctcaagccactagaactttcttccacttccgcttccgggtcgcttcaagagccgcctttaaaaaagaaacattccacgttgggcacttctagccagttagagctatagagttgaggcgccccggacctcgacggcgtccttagtaggcgctcctttccggtccttcgcgggaagcgctgccttctaaggtctcgcttctcgcgccgttctgagggagataggcctccagggagaggacttcctttctctgctgcccggacccggaactcaaggacttaggcttgacggacctggcgtggggaagagttagaagacggacaagggaggggacgggaggcctccgagacagcgccggaagtacggttttcggagggatcagactcagactcacgtcgcactcctcgcagttggactggtgggaactgggaacactggagacctgatttctaactgacgctaccgtcgcggccgccgtgtgggacgacttcagcatgtctcaggccaccaagaggaagcatgtggtgaaggaggtgctaggggagcacatagtgccctccgaccagcagcagattgtcagggtactcaggaccccagggaacaatctgcatgaggtggagacagcccaagggcagcgcttcctggtgagcatgccctccaaataccgcaagaacatctggatcatgagaggggactttctcattgttgaccccattgaagagggagaaaaggtgaaggctgaaatctcgtttgtgctctgcaaggaccacgtgcgctctctgcagaaggaggggttttggcctgaggccttctctgaagtggctgaganacacaacaacaggaacagacaaactcaaccagaactcccagctgagccacagttatcaggagaggagtccagctcagaagatgattctgacctgtttgttaacaccaacccgcagacagtatcattgaaagtgaggaggacagtgcaaaggaggaggccagcctgagactcccggaccccaattctccactttgctcaggggactggccccctggcttctttctgggcttgggaactttccagggcggctctggcacatccttcacccctgcatgtaggaccaaagccagggcctccctctctggaactggatctttttggattccagaagaaattaaacccccctgggtggggtctgggggaacttggg

SEQ ID NO: 122763 - DNA, 1029 bp, Homo Sapiens
gagtgcactgtactatgaacagtgggttacaaaagcaggctggtacggtccggaattcccgggatatcgtcgaccacgcgtcggcagaaactcttcggaaggctatgaaaggcttgggcacagatgaggagagcatcctgactctgttgacatcccgaagtaatgctcagcgccaggaaatctctgcagcttttaagactctgttggcagggatcttctggatgacctgaaatcagaactaactggaaaatttgaaaaattaattgtggctctgatgaaaccctctcggctttatgatgcttatgaactgaaacatgccttgaagggagctggaacaaatgaaaaagtactgacagaaattattgcttcaaggacacctgaagaactgagagccatcaaacaagtttatgaagaagaatatggctcaagcctggaagatgacgtggtgggggacacttcagggtactaccagcggatgttggtggttctccttcaggctaacagagaccctgatgctggaattgatgaagctcaagttgaacaagatgctcaggctttatttcaggctggagaacttaaatgggggacagatgaagaaaagtttatcaccatctttggaacacgaagtgtgtctcatttgagaaaggtgtttgacaagtacatgactatatcaggatttcaaattgaggaaaccattgaccgcgagacttctggcaatttagagcaactactccttgctgttgtgaaatctattcgaagtatacctgcctaccttgcagagaccctctattatgctatgaagggagctgggacagatgatcataccctcatcagagtcatggtttccaggagtgagattgatctgtttaacatcaggaaggagtttaggaagaattttgccacctctctttattccatgattaagggagatacatctggggactataagaaagctcttctgctgctctgtggagaagatgactaacgtgtcacggggaagagtccctgctgtgtgcctgcacaccccac

SEQ ID NO: 122764 - DNA, 808 bp, Homo Sapiens
tgtggtttgtgttgttgcggtgttatttgtgagttgtgtttcttaatgaaagccactgactttattgatctaaaaaactttacaaggacagtgactgttctgccaaaaaaggagccaaatggtatcaaacggattgaaagtgagggtgggggtgagggatggggccgggaatccattcaggaaagctggtaactgtcaccagggaactggcaagggaaaaaggacgggggaggcatgcaagagcgagaatccaaaaaaaagttgaaatggttaggggagaaaactcccaaaagaccccggagtacgtcggaggtgagtacgacaatagcaatcttttccttcgtagaggacaggggaggagtccctactcggctgcaaactctggatgagggctggggattgagagcttcccagagagcatcacaagaaggcgtcgcaccactctcgaaggcatccgaagcagtcccgggactgcttggcgttggcgccacaagtgtctttcagccattcccggaagaggtcttcatctttctttagcaccagaaactggccaaggacaacataggccttgtcaaaacccctttcctccagcttcttgcccaggacttcaccaatcccagccaggctccccactggcttctcccccatgggctctgccacgaagtctcggtgcttttgggaggttgtcatcttgatcaggcttaatccgcaacttcagttcccgtaacggttcctcccgccacccggccgctcctgcggatacctcaagccactagaactttcttccacttccgcttccgggtccccc

SEQ ID NO: 122765 - DNA, 807 bp, Homo Sapiens
  misc_feature (35)..(35): n is a, c, g, or t
  misc_feature (115)..(123): n is a, c, g, or t
cgggtggcggtggcggtatgggttcgtgtaaaagntggggaagagccccgctgaatctttaatggatgtaaaagaaaaacctttaccaagggaccagggggtctttttctggccnnnnnnnnnggaaggccaaatggtaatcaaaacgggattggaaaagtgaggggtgggggttgaggggattggggcccgggaatcccattcagggaaaggctggtaactgtcgccaggggaactggcaaggagaaaaaggacgggggaggcatgcaagagcgagaatccaaaaaaaagttgaaatggttaggggagaaaactcccaaaagaccccggagtacgtcggaggtgagtacgacaatagcaatcttttccttcgtagaggacaggggaggagtccctactcggctgcaaactctggatgagggctggggattgagagcttcccagagagcatcacaagaaggcgtcgcaccactctcgaaggcatccgaagcagtcccgggactgcttggcgttggcgccacaagtgtctttcagccattcccggaagaggtcttcatctttctttagcaccagaaactggccaaggacaacataggccttgtcaaaacccctttcctccagcttcttgcccaggacttcaccaatcccagccaggctccccactggcttctcccccatgggctctgccacgaagtctcggtgcttttgggaggttgtcatcttgatcaggcttaatccgcaacttcagttcccgtaacggttcctcccgccacccggccgctcctgcggatacctcaagccactccc

SEQ ID NO: 122766 - DNA, 545 bp, Homo Sapiens
ctgatgtaaacagatcaatctcactcctggaaaccatgactctgatgaagctatgatcatctgtcccagctcccttcatagcataatagagggtctctgcaaggtaggcaggtatacttcgaatagatttcacaacagcaaggagtagttgctctaaattgccagaagtctcgcggtcaatggtttcctcaatttgaaatcctgatatagtcatgtacttgtcaaacacctttctcaaatgagacacacttcgtgttccaaagatggtgataaacttttcttcatctgtcccccatttaagttctccagcctgaaataaagcctgagcatcttgttcaacttgagcttcatcaattccagcatcagggtctctgttagcctatgagaggtaatatgtcacattactgaactatagagcattttcattcaaaaggaaaaatggttccacctgatggttattcaataacactctttctctaggaataatatgcttttattaagatcaatcctgcactatttcacgttatcatcacccagccctgtcc

SEQ ID NO: 122767 - DNA, 1008 bp, Homo Sapiens
  misc_feature (533)..(549): n is a, c, g, or t
  misc_feature (558)..(572): n is a, c, g, or t
  misc_feature (976)..(976): n is a, c, g, or t
cttctttttcttctttttcttctgggacggtgactcagaataaaaagaagaaaaagaagaagacagcagagcagactgtatgacgagcaccagcaccaggcacagggatttcctagccgagcagtggccatccccatgcctctgacctccaccgacctctgcccaccatgggttggaactaaactgttaccttccctcgctccacagaagaagacagccagcttcaggggtccctgtgctggccaagccagtgagcctgcggggaggctggtccaaggagaaagtggacgagctcccatgacctcaccccactcccccaacacaggacgcttcatatagatgtgtacagtatatgtatttttttaagtgacctcctctccttccacagaccccacatgcccaaaggcctcgggacttcccaccaccttgctccacagatccagctaggcctgacctgtgcctcatcccgtgccgctcggtctctggctgatcccgaggctttgtcttcctctcgtcagttcttttggttgtgnnnnnnnnnnnnnnnnnaataactcnnnnnnnnnnnnnnngacttggaggaagggtgcaagctcccagtgcatctggggcacatgtttcttggaagggactgtctcgccgacactcgggattccctcttgcctgcatgttgaggctatgggtgaccgtggttagtgggacaggcagtgagcagtgaagtgcctgagtgccgaattggtggggaaggcttcctggatgaggtggcatctaaactaaaggatggaactaaaggatggtcatggttgatttcctgttgccagagtaagtcatgtaaatacccaaagacaagaaatggaaggggctgagaatcctcgagttaggcctcgagctaggggcaggctccctggaggtgcctggtgaacagctgtggcaggcacagcaggtctaggaaaatcggaagtgagttgcccctcanatcgagctcaccatggttctgtggtggtgagg

SEQ ID NO: 122768 - DNA, 594 bp, Homo Sapiens
  misc_feature (367)..(393): n is a, c, g, or t
  misc_feature (426)..(494): n is a, c, g, or t
caaggtggtgggaagtcccgaggcctttgggcatgtggggtctgtggaaggagaggaggtcacttaaaaaaatacatatactgtacacatctatatgaagcgtcctgtgttgggggagtggggtgaggtcatgggagctggtccactttctccttggaccagcctccccgcaggctcactggcttggccagcacagggacccctgaagctggctgtcttcttctgtggagcgagggaaggtaacagtttagttccaacccatggtgggcagaggtcggtggaggtcagaggcatggggatggccactgctcggctaggaaatccctgtgcctggtgctggtgcccgtcatacagtctgctctgctgnnnnnnnnnnnnnnnnnnnnnnnnnnngggacggtgactcagaatctttggttgaggccnnnnnnnnnnnnnnnnnnnnnnnnnnnnnnnnnnnnnnnnnnnnnnnnnnnnnnnnnnnnnnnnnnnnncttcttgctctttgggttgctttgatctccaccttcaaccgtccccatccccttctgtcgtcttctcgcagccgtatagtagtagtagtaggcggccgct

SEQ ID NO: 122769 - DNA, 765 bp, Homo Sapiens
  misc_feature (128)..(154): n is a, c, g, or t
  misc_feature (186)..(253): n is a, c, g, or t
gtaacagtttagttccaacccatggtgggcagaggtcggtggaggtcagaggcatggggatggccactgctcggctaggaaatccctgtgcctggtgctggtgctcgtcatacagtctgctctgctgnnnnnnnnnnnnnnnnnnnnnnnnnnngggacggtgactcagaatctttggttgaggcnnnnnnnnnnnnnnnnnnnnnnnnnnnnnnnnnnnnnnnnnnnnnnnnnnnnnnnnnnnnnnnnnnnnccttcttgctctttgggttgctttgatctccaccttcaaccgtccccatccccttctgaagctcctcttctggctcgtccttggccccttgggagccaagagaccccttccctttcttctccttgacatcaccacttgctttgtctctctttgctttccccttggaagtcgtggaggtcttttctggggaaacagaggcctccccaccttccccggcccccagcttcttcttcttcttgctcctgggggtcctggcagctggctggtctcccgatagcttccgcttgcggctctcccagcccttcctgctgctctcccttggggtgccaccaccttctttctttcctgttccagcagctcagtcaggaccttcaccactgaggcctgcacctgggcctcattcaggggccaggttggcccaggaggcactgggtgatgtgctttcagcgccagggttgagccttggggtcccagccccttcttggcttcggaacttcttggggtgtgcttga

SEQ ID NO: 122770 - DNA, 731 bp, Homo Sapiens
tttaccactgagcccgacctattatgcttttaatacccacaggtgcatctggttttcctcctttgactctgtgtatatcacgcctatggcttcattcttccattcattctgtgcccaccagacatctccactcctctttcctgggtggcctgacctcttggcatcccctctcccagccaatatttgttccctctgtgattcaaatgaagaggactgggccagatgagtctttcctgagctgtagtttcctggtgtatgtatcgtggtcccgccctgatgctgagtgtgctctcccttctcttctgctgcaggtcactggtgcagtcacgacagtaggtgtggcagcaggcctgctggctgccgcaagccttgtggggatcctgctggccagaagcaagcgggaaaggcaataaatccaagaaattgtcccaacaaccaccaattcttacggaggaatattatttagccagcaggagtggagtttggtttactgattttactgttttgtgttcatgaatctttattttaatggagttaaaagcacaggaaaatgtatttggaaatgcagcttagtatgaattctattaaagacacaattgggctctgctatggactgaatgcttgtgtttctctcacactccaaattcatatgttgaactctaacccacctgtgggatggtattggaggtggggtcactgggaggtaattaggttgtgagggtagagcctct

SEQ ID NO: 122771 - DNA, 701 bp, Homo Sapiens
cagaaagtccaaaataaagtgactttattatatacatattcatattcctcctctattatgcaaataggtgaagtatgtgtatgggtgtgtgtattggcaaaagactagaattttaaaaaaccaggattttaaaaaaagcacatctatgactgaattatttatagttgcaaatggcttcataataccaacctagtattattactgcaggcactggccctggcttagaaatgttatttcatttagaaatgtttctatttgttgtaacactagccactgtgatggggtttgacccgtgtctttgtccataaaacaaccctataagatatgtaaacatgaattcaattttctttaagtgaaagaaagcaaaaatatggttgtcagaacaagaactgctttctgtgggatattctagttaaatgaaagctattcaacttgaatcaattgctgtatccattctccaatacacagcagatttatatttcagaaggtttttgacagagaacaaaatgttactgaaatatctcttccattccttttgtcctacataacattccatgggctgaactcccaacgaggggcatatatttgtcagcttctgtttgcacttgttctattgtagtttgtctttgttgcaattttccattttgaccctttcctgacaaaacattaatatatacattttggttgtgttacgacttgtt

SEQ ID NO: 122772 - DNA, 585 bp, Homo Sapiens
  misc_feature (228)..(276): n is a, c, g, or t
  misc_feature (464)..(464): n is a, c, g, or t
  misc_feature (502)..(526): n is a, c, g, or t
tttggatttcaaccaggtattttattggtctggcaactgcaaaatatacaaatttctgaaaggcatctcctgtttgaaagctagcatagctttatatcccaggtcattaattcagacaaatacacagaacacagagaagtcataagtcacacataggaggctcccaaaccaattaacaatgaaacccaatctctacagctttctattgtttaggctccttatacatannnnnnnnnnnnnnnnnnnnnnnnnnnnnnnnnnnnnnnnnnnnnnnnnttcaagtattacaaagaaaaatatcattggtgtggttccaaacagtttttcttctctctcaaaatgaagagctttgcccgtggtctcaggacagaataaggaggggggaaactcacccaaaaacaaataggcaaagttaaaaatattggtccccgttattttgtggggtggagagttggaggaatcantagacgccaaaagttcatgactgtagctcaaacccaannnnnnnnnnnnnnnnnnnnnnnnngtccaatgtcccctcaaaaggcaggtcactggcttgcaaagtaggcagtgtcctcgtgc

SEQ ID NO: 122773 - DNA, 961 bp, Homo Sapiens
  misc_feature (678)..(696): n is a, c, g, or t
gatttagacacctgaaactgggcgtggagagaagagccgttgctgtttgttttttgggaagagcttttaaagaattcatgtttttttcctggttggaattgagtaggaactgaggctgtgcttcaggtatggtacaatcaagtgggggattttcatgctgaaccattcaagccctccccgcccgttgcacccactttggctggcgtctgctggagaggatgtctctgtccgcattcccgtgcagctccaggctcgcgcagttttctctctctccctggatgttgagtctcatcagaatatgtgggtagggggtggacgtgcacgggtgcatgattgtgcttaacttggttgtatttttcgatttgacatggaaggcctgttgctttgctcttgagaatagtttctcgtgtccccctcgcaggcctcattctttgaacatcaactctgaagtttgatacagataggggcttgatagctgtggtcccctctcccctctgactacctaaaatcaatacctaaatacagaagccttggtctaacacgggacttttagtttgcgaagggcctagatagggagagaggtaaccatgaatctggacaggggagggagatactatagaaaggagaacactgcctactttgcaagccagtgacctgccttttgaggggacattggannnnnnnnnnnnnnnnnnnttgggtttgagctacagtcatgaacttttggcgtctactgattcctccaactctccaccccacaaaataacggggaccaatatttttaactttgcctatttgtttttgggtgagtttcccccctccttattctgtcctgagaccacgggcaaagctcttcattttgagagagaagaaaaactgtttggaaccacaccaatgatatttttctttgtaatacctgaaatttatttttttattattttgatagcagatgtgctattta

SEQ ID NO: 122774 - DNA, 795 bp, Homo Sapiens
  misc_feature (137)..(137): n is a, c, g, or t
  misc_feature (195)..(195): n is a, c, g, or t
  misc_feature (202)..(203): n is a, c, g, or t
  misc_feature (206)..(213): n is a, c, g, or t
  misc_feature (713)..(731): n is a, c, g, or t
ggggggaatccaagccctggtcaggcccaggttttcctgggaaacagctaagcccccgtttccctttcccccgggggccccggccccaaacgaaggttttagaaagcttttggggggccggggccggccaccaaagntttttttctcgtcccgtgtgtttttttccccccgccgggttgttttgcggttcgtttncttcccnntcnnnnnnnnggtatttcaaccaggtattttattggtctggcaactgcaaaatatacaaatttctgaaaggcatctcctgtttgaaagctagcatagctttatatcccaggtcattaattcagacaaatacacagaacacagagaagtcataagtcacacataggaggctcccaaaccaattaacaatgaaacccaatctctacagctttctattgtttaggctccttatacatattaaataaataaatagcacatctgctatcaaaataataaaaaaataaatttcaagtattacaaagaaaaatatcattggtgtggttccaaacagtttttcttctctctcaaaatgaagagctttgcccgtggtctcaggacagaataaggaggggggaaactcacccaagaacaaataggcaaagttaacaatattggtccccgttattttgtggggtggagagttggaggaatcagtagacgccaaaagttcatgactgtagctcaaacccaannnnnnnnnnnnnnnnnnntccaatgtcccctcaaaaggcaggtcactggcttgcaaagtaggcagtgttctcctttctatcc

SEQ ID NO: 122775 - DNA, 1046 bp, Homo Sapiens
  misc_feature (146)..(152): n is a, c, g, or t
  misc_feature (155)..(155): n is a, c, g, or t
  misc_feature (158)..(160): n is a, c, g, or t
  misc_feature (163)..(163): n is a, c, g, or t
  misc_feature (165)..(167): n is a, c, g, or t
  misc_feature (171)..(173): n is a, c, g, or t
  misc_feature (178)..(179): n is a, c, g, or t
  misc_feature (181)..(232): n is a, c, g, or t
  misc_feature (458)..(505): n is a, c, g, or t
  misc_feature (731)..(748): n is a, c, g, or t
  misc_feature (759)..(759): n is a, c, g, or t
ggggagaattccaaccctttatttctttccccggggtttcctttgggaacaaggttttgcccactgttccctttccctttgggggccgcgcccccaaaagaaatgtttagaaaagttttttaggggccgagggcggccgccaaggnnnnnnnttnttnnnttntnnntttnnncaatnntnnnnnnnnnnnnnnnnnnnnnnnnnnnnnnnnnnnnnnnnnnnnnnnnnnnngtatttcaaccaggtattttattggtctggcaactgcaaaatatacaaatttctgaaaggcatctcctgtttgaaagctagcatagctttatatcccaggtcattaattcagacaaatacacagaacacagagaagtcataagtcacacataggaggctcccaaaccaattaacaatgaaacccaatctctacagctttctattgtttaggctccttatacatatnnnnnnnnnnnnnnnnnnnnnnnnnnnnnnnnnnnnnnnnnnnnnnnnttcaagtattacaaagaaaaatatcattggtgtggttccaaacagtttttcttctctctcaaaatgaagagctttgcccgtggtctcaggacagaataaggaggggggaaactcacccaaaaacaaataggcaaagttaaaaatattggtccccgttattttgtggggtggagagttggaggaatcagtagacgccaaaagttcatgactgtagctcaaacccaannnnnnnnnnnnnnnnnngtccaatgtcncctcacaaggcaggtcactggcttgcaaagtacgcagtgttctcctttctatagtatctccctccctgtccagattcatgttacctctctccctatctaagcccttcgcaaacttaaagtccgtgttagacaaggcttctgtatttaggtattgattttaggtagtcagagggagaggggacacatgtatcaggccctatcgggatcaacttcagagttgatgttcaaaaattggggctgcgagggtgacacgagaaattattctcaggagcacagcacaggctttc

SEQ ID NO: 122776 - DNA, 930 bp, Homo Sapiens
  misc_feature (51)..(60): n is a, c, g, or t
  misc_feature (111)..(129): n is a, c, g, or t
  misc_feature (831)..(831): n is a, c, g, or t
  misc_feature (840)..(840): n is a, c, g, or t
  misc_feature (852)..(852): n is a, c, g, or t
cccgggtttttttgggaaaaggttttgcccctttttctttccttttggggnnnnnnnnnnaaaaaaaagttttaaaaaattttttgggggccggggggcccccaaagggannnnnnnnnnnnnnnnnnnctgtcaaaaagtttttttattttcagggagagggcaggggaggggctcagtctttcttggcagcagcttttcttcatgtcgtccagttcgtaaataaactgtttattttttatagaaagccacaacagaaaatgattagtatataactaactatgtaagaacacttacatccatacaatcaacagatgcttcaaatgcatattttaaaaatagttttgagtgttaattatgggagggccttgatgggatcattttgtgaacagttcgcttttataacaaactcaagaggcagcttgccagcgagctcttttagacataagcatttttatcaaactgttttgaagggtttgttgttttaaaatcttctccaccatgatactttgtccgagaagacatgacagatgtggccccgttgtatgtgtatctgtggtgttttgttgttgtcagatattgaaaagcaaaatatgacaccaccaattatgcacagtgaggctcctgcctatccaataaacagagcggctcctaattcatacttttgctcatcaaagagaggatcaaagaattccgttgtgattttgtttgcatatagggaacatccagtcattgagcacagccctgacagtatgaatacaatcccagccaaacaagcaattttagctttggctttatcggagcctccgactttggtacacttcattccanagagcgcanatatggaaccanagaagcccaggctgacagcagcgatcataagtcctctacatgcctgtatataaccgtccagcgccagcatggagggga

SEQ ID NO: 122777 - DNA, 2359 bp, Homo Sapiens
  misc_feature (441)..(472): n is a, c, g, or t
cttctgctgggtagggcgactggcggggtgtggaggggtgtggggaggggtgttgttattgacagacccctgtaaatgttgcagaacaaatgccgcggagcccaattcgtccagcccccgagccatataggcgtcgttgggggtgagacccagtgaagagccggcagaaggtttggatgtccgctgcggactcttaatattttccgggggggaggggccgccaacaagggcagcccgcgcagaaagtaggggtccccttccccaaggttccccgggccggtttgcccgccccacggggttaaacggcgggcccggtgccctgctttttatattcggctccccctatatgggggcccccttgtgaccaaaaactcggggttaccgccgtaacttggggcccccccgggggataaacttttagagggcgcggccgccccctcnnnnnnnnnnnnnnnnnnnnnnnnnnnnnnnngggggtaggctctttattagacggttattgctgtactacagggtcagagtgcagtgtaagcagtgtcagaggcccgcgttcagcccaagaatgtggattttctctccctattgatcacagtgggtgggtttcttcagaaaagccccagaggcagggaccagtgagctccaaggttagaagtggaactggaaggcttcagtcacatgctgcttccacgcttccaggctgggcagcaaggaggagatgcccatgacgtgccaggtctccccatctgacaccagtgaagtctggtaggacagcagccgcacgcctgcctctgccaggaggccaatcatggtaggcagcattgcagggtcagaggtctgagtccggaataggagcaggggcaggtccctgcggagaggcacttctggcctgaagacagctccattgagcccctgcagtacaggtgtagtgccttggaccaagcccacagcctggtaaggggcgcctgccagggccacggccaggaggcattccccgaagccttgctcccctggtgcagcagggctgtgggaggtggtgacattgaggccagcctctttcaccagcagcttagcgttcaccaagttcacatccgcctgcttggaagcctctttcaggaggccgacaatgactgcggggcttaggcagttcccagcattcttcagggatgttccctgtgttatcacctggatggtccctttgggggaccccagcccaggctcgcatcagtgtccccagagcttctgccagaccaatccaaggcttggtgtgtggagagaaggcactggtaagggcctgggcattcacaacccccgtgagagatttccccttcaccatgtccacgaactgaacagcaatttcctccccacagcggctctgagcctccttggtgctggcacccaggtggggacagctgatgacattctcatggtccaccaaggcccggtcccgtggcggctcttccgtaaacacgtccagtgcagccccggcacactggccagactgcagggcccggagcagggcgccttcgtccacgatccctccacgggcacagttcaccacacgcacccccttcttgcactgggcaaaggtgttgtcattcagcaagcctgtcgtggagggcaggagaggagtgtgcacagtgatgaaatcacagagaggccagatctcctccaggggcagctgctgaacaccaaaggaggccgagacctctggggaaatgatggggtcataccctatagtcttcatcccaaaggactgcatccgggtagctacctctctcccaatcctgcccaggccaagaattcccagggtctttccattcagctctgttcccatgaacttcttccgctcccatttgccgtccttcatcgaagccgtcgcctggggaatctgcctggccaggcacatgatcattccacaagtgagttctgcggcactgaggctgttcccattgggggtgttcataaccaagatgcccttccttgttgcggcctccagatccacattgtccacacctgtgccagccctgcccaccacctggagtttctcagctgcgttgatgacatcagcggtcaccttggtggcagagcgaacaataaggccttcacagtcctgcagctccgctatcagctcctctttgctaaggttctgcttttccaccacctgcagccctccatcttgcaagatcttccggcagcaagggtccaggctgtcactgatgagcactttccgcagatttgcaaagccattgctggagttggcctcggaatcggccgctgtgagtagaagtacctaagccaagaagctgcggttcggcccctcgtgccgaattcaacacccaggcctcgtacctagcgatcg

SEQ ID NO: 122778 - DNA, 1110 bp, Homo Sapiens
ccaggcatttttccttcccccaccagggggtcttttgaaccttcccttgggtggctggcaccccagggtggggaccaggctgatgaccattctccatggtcccacccaggggccccggtccccgtggccggctctttccgtaaaccacgtcccagtgcagccccgggcacactggccagactgcagggccccggagcagggcgccttcgtccacgatccctccacgggcacagttcaccacacgcacccccttcttgcactgggcaaaggtgttgtcattcagcaagcctgtcgtggagggcaggagaggagtgtgcacagtgatgaaatcacagagaggccagatctcctccaggggcagctgctgaacaccaaaggaggccgagacctctggggaaatgatggggtcataccctatagtcttcatcccaaaggactgcatccgggtagctacctctctcccaatcctgcccaggccaagaattcccagggtctttccattcagctctgttcccatgaacttcttccgctcccatttgccgtccttcatcgaagccgtcgcctggggaatctgcctggccaggcacatgatcattccacaagtgagttctgcggcactgaggctgttcccattgggggtgttcataaccaagatgcccttccttgttgcggcctccagatccacattgtccacacctgtgccagccctgcccaccacctggagtttctcagctgcgttgatgacatcagcggtcaccttggtggcagagcgaacaataaggccttcacagtcctgcagctccgctatcagctcctctttgctaaggttctgcttttccaccacctgcagccctccatcttgcaagatcttccggcagcaagggtccaggctgtcactgatgagcactttccgcagatttgcaaaagccattgctggagttggcctcggaatcggccgctgtgagtagaagtacctaagccaagaagctgcggttcggcctggcgcgctagagtaactgggcagtattctccagctcccgctccccagtcatctcctcctcctcccctcgtgccgaattcgccacccagcatcgtacctagccagttatt

SEQ ID NO: 122779 - DNA, 631 bp, Homo Sapiens
  misc_feature (12)..(12): n is a, c, g, or t
  misc_feature (23)..(23): n is a, c, g, or t
agctcaggagtntgatgccagcntaggcaagatggcaagatcctgtcttaacaaaaacaaaaacaaaacgagattggggaggtgggtgcccagtccccgtttcccctttggtttcatttgaggtccctgtactgtctctccccagaaggccttcaaggttaacacacaacaatgccctgccccttgattactggcctgggcttacaaaggcgaatactcagacagaatcaggaggcactcagcttaatgaaggggcagggatctgcagccagcagattgcctggcctatattcctctccctcggactctttctgaattgtctttagggtgtggtttgctgcccagtgacaacatacattcctttatatcctggaatgttacatagtctctcttagtgtctggcatacagttctacagtagttctagcatttacatcacttcagaacttactaataacataaggacaggagaagcagcaacgtaacaggatgtgcccaatctctcagaagcttctctacaagcactgcatccagaccagctttccgtaagttctgaaacctggcctggcaagacctgcctgatgttccgccaggtaaggagcctcctcagtgcagaggacagtggctctcaa

SEQ ID NO: 122780 - DNA, 1623 bp, Homo Sapiens
  misc_feature (110)..(110): n is a, c, g, or t
  misc_feature (525)..(583): n is a, c, g, or t
tacttggtctacgatgtcgttgctcactctgttattctatgtatctctgatctatatctctgttctagcttcgtgtgctttcgttttgtctgcgtacgtgtgtatgactntgttaaatgagcagacgccgggaaaaaagtatcacaaatcactcccgtggccaaatttttttcccccaccgacattatttgcctcgtgtgggtcaccaccttagtacatcgctcatggttttgaattgttcgccctcagggccgcttatacatctctcgtttggggaggtggtggttcccgacagcctgtcccagcccaccccggagggtggggttcttttcccaaagtggcttcctcgggccaacgtgtgtcccgcaccagggccgttgtttaaagtccctccggccgtgctgcctgcctttttattatcgcctctcctatggggccgccctgtttaccacaaaacgggggttcgggcatcatatcttgtggggcccctccggggggtaatttttttgtcgcgccgcccccccnnnnnnnnnnnnnnnnnnnnnnnnnnnnnnnnnnnnnnnnnnnnnnnnnnnnnnnnnnnaggagcagcggcccatgcatggaatttattgtgtgctactgtttataaaatactcgaatagtcctgcacatgcataatatttccaacttagacaggagaccatacagggtgcactttctggcaaacaaaacaatagatggttccgctgcctggagctctgagttgtattccagggcatgagggaagcaggccaccaaagtaaagggaaataccaaactacagtggcaatcaatacaggtcaataattgtgaaaaattagcacatggttccatttagtttaaccaagcagttcagtaactatcaaaagaaaggtttcaacatgcagtcttgacttttatgcttccactaacatctgaatgattgaacagaaccattgcttctaggctgcattgcttaatcaaaaacacttccagaacattttaaaatttcctttgcattaaaacataaaaatgatagaaagccagcagcaaatcaccctggtggctctctaagcaacttgagtactcacaataaactaaaatttctcataacatctaggtaacctatacatgtcgtacctgtacatcataggtctatatattaaatatttgcaaaatgaaaacatgcatacacagaatacgtcaagttttacagacatgatttgaattaaaatttactttgacaatgtacaaacttcttttaaagtaccttaaatgagtaattctgtaattcttcataattttgaaatttagaggttttcttcttaaatctctggggtgtaagtcttaaaagatctgggcaaaaaagactctgaattagtttttggagtttgtgttcaagtaagagagcctgcctggaaataggatgtgcattcataattaagaaataccaagactgtgttacagaattagccacatttaggaactatagacctgaggtcaacattttgtgtaagtgccagctgcgtttctcggcattttgctcacagttcaaggtacagctggtagcctcagagggtgtgttaagaccgtgctaaggcatgctttaaggacgtgtcgtgg

SEQ ID NO: 122781 - DNA, 1388 bp, Homo Sapiens
  misc_feature (1272)..(1306): n is a, c, g, or t
agagaattaacttttttttaataaactttatttttagagcagttttaagttcatagcaaaattgattagaaggtacagagatgtcccatacacctcctactcccacacatgcacagccttccccattatcaatagcccccaacagagggatacatttgttaacaactgacgaacctacatatcattatcacccaaagtccacagtttatattattccttctggagaattttcaaatacagaaattcctctaccaggaataaactagcaatttcctctcggctttctataaatttaattattatttcagaaattagcctatctttacaggagaaaatgttataaaccatgaaaagactatcaaatacacaaggaagtgaattttatatcaaaaatgtaccatctcctaaacaactacctgcattcccttcttgttggtaagttataattgtgatagttctgatcatctgtttaattaatttgctaatgaagcctctcacattctttacaactagaaaaattcagttttcaaaaattaaggctctggtatattacatatatcagcttcactcaactcttttatttagtccaaaagaaaaagaagaaaatgtcatttaaaaaataacatactcagctgcttgtttgtagtgcttcaaatctttctttaaatttttgttctcattttccaaaagcataatctgggtgtagacatctggaacattcccaacagttctaagttcagtcactcctttctgtattaactcataccattcagactgaaagcaatcaagagttctggtcattcccattttgatcaagaaattgcagagaaagtcttctattacttcaggtactgcatgctttgaaggaagaactgttttccgttccaaaatttcagtatctgtagcctgttcttgggccatctgaattgcttttgccagatcttcttcaccttctgggatgctaaaattgtcatctggtatctcttcatattcatagtcatcttcagatgcttcagttatggtgacctgttccaggtagtaggcgccctcagccgccaccgcgtccgccgtgtccctcgcgtccccggctgccgtcaaacccatgcccaacgcctcttccaggaccctcacggcggagctgggcatccctcgctgagcagccatctctggcgcttcgggcccccacccccagcaggcccacagccgtccctaagggcaacccccggccgtaatggccgaattcccgggcatatgtccggtcccgtcgactgnnnnnnnnnnnnnnnnnnnnnnnnnnnnnnnnnnncgccggcttcctcgctcactacgtcgctgcgctcgtcgttcggctgcggcggagctaggcgccctatagtgattatacagtt

SEQ ID NO: 122782 - DNA, 594 bp, Homo Sapiens
tttcttaatctttttattaaaattttaatttgtgaaatagccaccacttactcacttttaaatatctctagaatattaatcactgataaggttgagaaatcaccaaactatattaaatgagagcttcatcacattttacatttacctttaatttgaggaccatggtaactatgtcctctttgcagtttcttcaatgtttcttgaagtccagaaatctgcccaactactttgtctctttccaaggaggtcagcattttctccttcagtaaagtgtggtgtttctcatgtaacacccttatagtcggttcataagatgcataatgtaacttcaaccctttgaggtcattaattaatttgtttttttcctggactattcgcttatgatgcattcgatgaaaatcacgttctttctgaattttcagcaaatcttctctagctttgtcagctgcttgtttgtagtgcttcaaatctttctttaaatttttgttctcattttccaaaagcataatctgggtgtagacatctggaacattcccaacagttctaagttcagtcactcctttctgtattaactcataccattcagactgaaag

SEQ ID NO: 122783 - DNA, 711 bp, Homo Sapiens
agagaaaataaatttgacaatttattcaaacattgttacataagaagttttaagaaactgtaaataattcttaatactctcattttgattttccgacttctcaagactattttgtacttctttcaaacacacttcctgatgttgtgctttactgttcattttgcaaacaagttgattttgctcttcatttttctttctaagctcagtttccagatctaatattttaatttgtaaagcactctctctagatgacattttctctatttcttcagcaaccttttgtcttccttcttctaaagcagcttccagttgtctggccaatgctgtatactctgcagatttctctttaaacttaagattgctgtgcttaagacattcttcttggtttgccagcttcttctcaagctctttattttctgcgtccatctgttctaatttttgttgaaggttttcacacttcagctgaataagacagttttcctcttccagagaaagctttgtcagaagattgtgatttccatcaacctggccctgaagctccctaatggtgtgttcctggtctgcacacttccccttgcagcactgcagactctcctgacactcgtgaagcctccgttccgccgccgtcaaggaatcgcagacacgctctaactccttcagatgagactccatctggcctctcatcttctctacatttttatcctcgtgccg

SEQ ID NO: 122784 - DNA, 3035 bp, Homo Sapiens
  misc_feature (1982)..(2053): n is a, c, g, or t
  misc_feature (2420)..(2420): n is a, c, g, or t
ggagtcagaccactgtgtatattgtaaaggatatctttagaagcaatgacccaggataaaaactggtagaggtctaacaacatttatataatggttctgtgaatatgtatataagaagctcaaagcaacatctacttatatattatggtgaactaacctgctaagagattttagattacttcatttaaggaatggaagggagcatgccccaccaactctcttagccaactctcttaacttcacgcttgtcttttggctctgagccatgctacttagtatctacatgagagcaaacaaaagacacgctcaagctttgtctgctttatttcactacattaagttaagcaataaggcaaaacagtaacctgtcattcataaagatcaaggagtacctctctgtcccaaaagggaccaaaaagggtgtttcttcacaaatatgcatgacacttagctcattatgctgataagcacttcaaacaaaagaaaaggtcagtaggtgaatcaagtaacaaatccaaattaacttagcctaagtttccaaagctgtagtttcaagtgctaatgggatctaactttcctgtggtggtgcatactgactagcattaaaatttttgcacctcatctaatataaaaaaggcaacaaatacaattcctaattcaccagctgcaggtattgaatcatttctacgaacacacagaatactagcttacactaaaacctatcttgaggaaacattaaaccagtggctctattattctgcaagttagtttggcttctgaagaaaaaagtttatgatcaaagtgttttgtgtttctgtgtatgggaatgatgagacccatacttcaacattattactttggggaataaataccagctacctgccataaacgcatgacatgtgtgtagtctatgcaaacgtgtaaacatatgaagctattctctactctatgcccatttcctccactggcaaatatggagcagtgatttcacagtaggctctagcaggtagtgaaataaaaatttgagactctgtggggtcacaaaaaaatgaaactctttctatagtctgcaaatctgtaattacccatccccctgctccaactcctaagaggctaaatgttattaccataatgttagagatgagtattttccttcttacactgcatcacatatattactctgtaggactgtttcataaaattggcttgacctttgtacaattagtacaatttagtgtcttttagagtacaatttagtgtcttttaaaagcttcctaaatatttaaaacattttcaagggaagcttacaaggactatgtcccatctgtattctacattataatgttatctttaattttttaagacttaaaacaagaccaaggtaaacaaaaaatctgtattttcctcaagtctcttggccacttactaacaatacttttacagaaaacacggtgcagctggtggtctactttatcaagtttcattttagaaaacatcatagaaattaaggttagcaacccaactccaggataccaagtgaaaacagcaagtctgctgttaggccagaactgtgggctacttgctgaactattttatggtttacaatcaaaatggtcttatttgactcaccacatgacaaaagtcttaaacttagtaagggggaaagttcttaatatccagttttggattcaagagattataatagttaatttccccttcaaatcaatggaaagaatgctagttgagaatattctaaaaatctagcctttaaaatgttttctgcattccagaaatgaacctgtccactcaggttttctttgggttcttttccaggtcccaaacagaacaacttaactgagttaaagaggcagaacagggaaggggtaggaagtaagacaaataaagattgcccccctgtggcagcattaatccctgggtattgtggcaatattgaaaacgaatggaatctgctacccccttgnnnnnnnnnnnnnnnnnnnnnnnnnnnnnnnnnnnnnnnnnnnnnnnnnnnnnnnnnnnnnnnnnnnnnnnnacaactaatacgtgtcctgtattcacttagaaaaagagggcaaatgagagtgccttaacaacttcacaggtttttccaatcatcatgatactaaagataaagtgacaattcagtttttcagttatatggaaatttatggcaaaatggcagcccttatggcaatgaagggatatgttttagactgttagatgatatttaacgaaatgcagaaagcagttggtacattgtgaccaatgctggatcattaacagcaggtctccttttgggttatcatttaagtttcatctgtgacattgtgatccttagtgagatcagatcaagagacagtacagagtttctcaggtggtaaatacaatgccattccaanggaacacccatcccctttcctaggatggaattatgctgctgttactcaacgtgcagggttcagtgagggagacacagacttactggtgtcaacaggggtgagagcaagagcaacagcagctaccctgtgttcccaatgccttgcctatgctcccactttcttagcaatagaattccgtagtgcatgggtacatcgttataaacaaggcctaatgaagcagcagcttccacattttaacgcaggtttacggtgatactgtcctttgggatctgccctccagtggaaccttttaaggaagaagtgggcccaagctaagttccacatgctgggtgagccagatgacttctgttccctggtcactttcttcaatggggcgaatgggggctgccaggtttttaaaatcatgcttcatcttgaagcacacggtcacttcaccctcctcacgctgtggtgtaactttgatgaaaatacccactttgttggcctttctgaaggctataatgtcaggatcgtcctgaaagtcttgaggttctgccaactcatcgtactctgctgctgcatccttgcccggacgcgtgggtcgacgatatcccgggaattccggaccggtccagc

SEQ ID NO: 122785 - DNA, 849 bp, Homo Sapiens
  misc_feature (113)..(138): n is a, c, g, or t
  misc_feature (429)..(443): n is a, c, g, or t
tggagcgtgtaggtgttttttgttaaaggtgtttttatggtttttgggaggtaggtagggtgtgatatttgttatgtttgtgttggattggtggtgttgattggtgtgtgttnnnnnnnnnnnnnnnnnnnnnnnnnnttttaggaaaaacaaaaatttacttcaaattgtagtataggcttttcaatcacaaaaagaaagaaaagaacagtgatctgacagtggtcacatcctgtgcaaaaaacttgatacaaaaatgatagcacatggtatctgagctgcttacattacaagaaaaaggaaatacagtagctgaaatatggcactcctgggaatcaacttctaaaccaaatagaatgcctttgaaatgattaaatttatttgtgtattagtaagaaagccccaccaccataaatagtacaatatttnnnnnnnnnnnnnnntatatctatctaagatagatagtgtatttgtactgttagacttctttaagtgcagaaggtggttcaggttttgcctttttaattaaataactgaccatatgctttataaagtttcactcaatcacaaaagccaatttaaatcaaggaatatgatatcaaagttgcataatttcatttgggactgccagcaggttaaagtcttaagtctttaacattaatgttcatttttagtcaatgaatagttaaaaagttctcaaatcttcatatcctcttgaacttgcccttctaaatgatcctcagactgcaattcctagtttgcaaataaaataatgcaatatgcatcatacttcaagaaaagatgatgatgtcgaactaacatgcttctggatcttttccctgctccttt

SEQ ID NO: 122786 - DNA, 809 bp, Homo Sapiens
ttttgcaagcttaagaatgaacttattatagtatcaatgcggtgattacaaattactcaatatttcctaaagaccatgagaactccagaacccattcttacacaggccctgtggaagaatccaagcaggaataattggattatttccagccagtgactttcaggaggaccacatatcttcaatgtcttcacattgtatctgaaaaatgtatctgaagcactcaaacaccaagtctactcaaatacgcttcccaagcagcttttctgtacatctctgctgcttccagacgatcagctgctgagattatgccacgacctacaatgatgatatcggaacctcgtttgccaataacttcttgtgggctattgtactgttggccaagattatctcctcctgcttccaactgaactcctggagtcaagtgaagaaattctggtttcatgcttactcgggagccagaaataaaaccaacaacaaattcagagtgctcctcagccattctaaccgctgctctagtgtagtccccagtggccagggagccggtggagctcatttccgcaataaggaggcacccccgatgcaaaggcaggcccacttcttgcaggcctttcacaactcctgagcctggcaccacgtgagcatttactagatctgcccaggaagctattttaaagatacctccttcatactgctttttcactgtgtttcctatatctgcaacttccggtcttcaatatcaagactcatggcatttgccagagtatcactcctcatcacatcagagtaatcatcaaatatctaatgatctc

SEQ ID NO: 122787 - DNA, 930 bp, Homo Sapiens
ttttttaataaaaacaacatttttattttttctgaatccactcacatctaattgagttacatttgactgtaaaccacacacaaaaacacatatatatgccatttttaaacagaaattctattttgcaatctgaaacagcgtgacgtggggcaaaggtctaggtcggtttcatcccattttgcatgaactgactgttgaccattgaacttgccaaagtaaatttctccatttacaaattaaagcattactcttaaaaaagcaatactgagaataaaattccttctcttcacgcaatcaaaatgactaagcttttactgtcagcaaatgtacacgtgacaaaagtcaaattaagcacttaaatatctaactaacacatgtagtaacatttactgcaagaaacaaatattaaggaagcagattcctgcttctcagcagtatttattaccaagcttggatctacttctactcctcgggattcaaggttcttccggactgtggttatttcatcacttgcaagataagctgggtgctcctcattacatttcaacatcttctccaattcattcttggtttcattgtgaacacactttaaaatgtttaaaaaaggactgtgtttagatggttcataatttggtgcttgaaaaacagtctcaattttaataaatacattactattgcataaaagataacacaagcttaatcacaacaaacaagaaagaaacacaagaaagaacacagcaccccggcttatgaatatggtaaatggcctatgaacacagaagaatttgccttatgagagggtagaaaacccagggattagccctacttgttatgtatttacttttgctgaaatgttttttcctgtggaagttacagcaccaggaatcttaccatgtattttctttactttcttgaccgtagggtataatt

SEQ ID NO: 122788 - DNA, 2018 bp, Homo Sapiens
aaaatcaaaaacatcacacaatggacacttttattaacaaagtaaaggcttagtgaaaaggcagcaaatgagatagacattttaagtaaagaaagcatttctttgcttgaatgtcctttagccaattaaaaaatatttatttaaaacacatgaaaatgttgtgaaggtagtattgtaattaaattgcaataaattgaactaaatttttctttattcagctgagagggggatggtcaacattactttaattgttgaaataatttctatttaaaatagtcttatgaaagaaagcctttttctgatacctagttgaaatgtttgataatattctaaatgaaattagtcaattgattatccttaatcttcctcatcctgtgtcataatccggtggctctgtcaacaggagaaaaaccactattaacagaaagcctaacgtaagtatacaacatctaaaataaatcaatttcaaatggatatagagagtgagaaaacagcaactgaatcaaataggtaagctggtactgacttggcttccaaggcaaatttcttcgctggctatgaagggttgaaatttctttcactgaacgttacaatccaaattaacctgttttaggggttcttctgttacccatttttctttcatgtggtgaatataaactgaattatcatggtcaaatagtttctgggaatagaatactacagacacatacaatgatttagcaggctactgtgattttatatacaattgataactttaaacaattgctatataagttttatttcaaaacacctagcattgtatttctggaaaagaaactgaacattgagcaacctcagttaatccattaaacgagtgccaccacaaataagacaacaaacagagaacaagtttctcatcttcaaggactgaacctaatggccataccaattatattattccgatttgtcactttagtacaacaaaataggatgttaatccattaccactgttcttccattcgagaggcagctgatggttaaagcgcccgtaacatacatcgattatttttatcccatgactttattgtatgtttagaaaggtggaacagcagaagaaaaagaggctggacaaaagacgttgatgtttttgttcttcagatgtatgcagagctgattatgagtacgattttaatttatttctcctgatgaagagcttcaatgaaagcatcaagtttttcttgaatttctctaactttcttgaggtcttccgccagttgaacgcgtttaccagtaagcaatttaatcttcttctcaccatcttcagcaaaatcttccaatacctctttaacatttttctctaatcgcctaacttcagtatttgtaagttgttgccttaaagtatttgcggtgatagcaagcatgcgctgtatacgccaaaacaagaccacatcattgcattccaactcagaatctacaaaatgcctttggtagtaataaaaacctcttcgacaaaggttacaatggtttagagctgtttttaaaaaatgtcttctataaacttgatgccaagtatccttaatcaagcttggatctacttctactcctcgggattcaaggttcttccggactgtggttatttcatcacttgcaagataagctgggtgctcctcattacatttcaacatcttctccaattcattcttggtttcattgtgaacacactgttcttgggtccgattcttccagtataaccacctctttttccagtctggacccaccatgttttcaattgcattttcagtatccttgagacgagcctgcagagcctcttccataaaataaatagctgcatcccattgctgtttatcagatatggatcggtcttccaaagcattgtgttgaataaccctcaagctgtcctccgcaaagtcattccacttgtgtcgtttaatactttcttccttaacagcctctttaagtttatcccatatgtcatcattgctctttccctcatcgctctacccgtttgaggcacccca

SEQ ID NO: 122789 - DNA, 1677 bp, Homo Sapiens
  misc_feature (937)..(1236): n is a, c, g, or t
atgataaagacataaaatgatttatagtttggggagaatttatgatcaaaggattgtctccaatagggtatatctgaggttccataccaggagcgtcattaaaattgatgccaattttatgaaatatgttcattttgaagcagatgtgtattagtagacaagccaataatttaaacatactcaatgaaaattccatagtgcaattttatctaaggtattttatgattactctcttagagccacagttttaagcagctttttcctaaactaggctcgttattaattttcaacacttcatactatgatgaagacatcacatactttagacagccttaatagaacaaattattcaacaaagttgattatacgttctataaagtaaatcacattctctcattgagtgagctgagtctttctgagtgtggggacagagtccctgcagtcaggagctccaaggcatagaactgcctgccctgctctgtccagcaggtaatgctgcattccacaggcctcttcttcagccttgcccactcagcagagtacctcaggttgtgaccatgaacgactgatgagagtaacttctgacttgctcaggggatcctcttgccatcaattcccttcagtatgaccaaccgcagtggcttactcgcttcttgtccagaccatccaccatctgtctgccccatgatgctctcaaaccccaaagtcctaatatcccaggcctctttgtctgtgagaggaaatggttccctcactttaagttctgtaggctaatcagaaagggatctctctatagtttcaaaaagtgaaattttacttgcactacagaaataagaaacttacagatttgtccttgaagacctactaacctgcaactttagggtcctgaaagaggattagtatgtttataagtacttttattacagtattttttatnnnnnnnnnnnnnnnnnnnnnnnnnnnnnnnnnnnnnnnnnnnnnnnnnnnnnnnnnnnnnnnnnnnnnnnnnnnnnnnnnnnnnnnnnnnnnnnnnnnnnnnnnnnnnnnnnnnnnnnnnnnnnnnnnnnnnnnnnnnnnnnnnnnnnnnnnnnnnnnnnnnnnnnnnnnnnnnnnnnnnnnnnnnnnnnnnnnnnnnnnnnnnnnnnnnnnnnnnnnnnnnnnnnnnnnnnnnnnnnnnnnnnnnnnnnnnnnnnnnnnnnnnnnnnnnnnnnnnnnnnnnnnnnnnnnnnnnnnnnntaaatgccagttaggttttataagatgtagaattctataactccaacacaagaatgacaggtgatgcttgcatgactttggcaactaacttccaggaagccctaggatttacaagatgctttgagtgacattagtcacaagagattgttgcaactaaacagaacacaggatgataaagaatgaatgaggaagaatgaagaccactggtgagatggcacttctgaccaggggcctactcctggaggtcaagtccttgagtcccattggaggaggagtaacccctcccttccccacatagagttttagtgcctgaaacctcacagggaaccaagaagatctaatctcacctctctggactacagaggactgccggtagccctgggaagtaccaagctcttgaaagcttcacacagtgatggtggcagcagaggcaggaagtga

SEQ ID NO: 122790 - DNA, 697 bp, Homo Sapiens
  misc_feature (259)..(553): n is a, c, g, or t
  misc_feature (585)..(585): n is a, c, g, or t
  misc_feature (602)..(602): n is a, c, g, or t
ttcatgagaagtttgcttcaagtttaatacctttttccttttaaataacaagttagaatagctccataaatacaaaattaagcctctgatactatactcacacactcaaaggatgaacaaacttcaaaaataacatatttttctttgacaaaatcagtaaattggcaagcttgtcaaagaatcatttcagtctaacattttacttagtggataaatatttgtcaacaatctgtaaatagtataaatgcttttctcaaannnnnnnnnnnnnnnnnnnnnnnnnnnnnnnnnnnnnnnnnnnnnnnnnnnnnnnnnnnnnnnnnnnnnnnnnnnnnnnnnnnnnnnnnnnnnnnnnnnnnnnnnnnnnnnnnnnnnnnnnnnnnnnnnnnnnnnnnnnnnnnnnnnnnnnnnnnnnnnnnnnnnnnnnnnnnnnnnnnnnnnnnnnnnnnnnnnnnnnnnnnnnnnnnnnnnnnnnnnnnnnnnnnnnnnnnnnnnnnnnnnnnnnnnnnnnnnnnnnnnnnnnnnnnnnnnnnnnnnnnnnnnnnnnnnnnnngtcaatacataataaatcaatatgcatttcanagaatcatttcagtcanaatattttacttggtagacacatatttatttgtagaaaatctataaataatatttttttcacaatcacactgtttaccctcgtgccgaattcttg

SEQ ID NO: 122791 - DNA, 1042 bp, Homo Sapiens
gaaattttctaatgaattttattatcaccagcatctttaaaaattaagaggaattctctgagagtatatataaaaaagaaattaaaggcaaatattttgctgttaaggatttaaaaataaacagaaacatagagtataaaattttcatttcactgtgccctcatttaaaattataagaatataagcaaataacatccaatgtcagaagagattcagggtgaccatttgcagtatttagtggcaaattagtagcatcatgaaaaatttcaattcatttaaaaaaatagctttcatttaaataataattacgtttagctttatctctgtatataattagactttcttttggcttagacaattccattttctccaactgggagctgtgaaggatcaagtcctactttcttcattgatacggcaatatcaaataaatagtcataacactcacacatggttttggccttctcccatgtttccccccacacatatactccatgacgtctgaccagtactgcacaggagtctgggtattcattcattgcatgagccattctatctttgaggtctttctcctcaggtgtattctcaataatgggtaccactaacatatcatcatatctataataccctccggaagtacatttctttattccttttatcatctcttgatgtgtaattttaaactcccgtcctggaaagagaagggtggccatcacagcagctttagagtgggtatgaatcactgcacctgctcctctcattgtgtaagcattcatgaaaagaggagtacactggcttttttttagcttcttcgatggcgaaggtccacttatgtccttttcatttatatcacaaacaaacatgtcttcaggctgaattcgttccttttgcactcctgaaggagcaatgtagatttcatcgctgcgcgccgcatctccgggaacaacagtctccctcccgagcatcacagccagacatggcccagaccagggacccgcgcggcctccaatctccgcacggctttgcgcgcggcgcttagcct

SEQ ID NO: 122792 - DNA, 874 bp, Homo Sapiens
ccaaccgggaagctggaaaaggatcaaagttcctacttttttccatggatacggccaatatcaaataaaatagtcataaccctccaacacaagggttttggccttctccccagttttcccccccaccacatatactccatgacgtctgaccagtatggcacaggagtctggttattcattcattgcatgagccattctatctttgaggtctttctcctcagggtattctcaataatgggtaccactaacatatcatcatatctataataccctccggaagtacatttctttattccttttatcatctcttgatggtgtaattttaaactcccgtcctggaaagagaaggtgtggccatcacagcagctttagagtgggtatgaatcactgcacctgctcctctcattgtgtaagcattcatgaaaagaggagtacactggcttttttttagcttcttcgatggcgaaggtccacttatgtccttttcatttatatcataaacaaacatgtcttcaggctgaattcgttccttttgcactcctgaaggagcaatgtagatttcatcgccatgcttcaagctaattcctcctccagtcccagtgacccagcctaaatggtaaaactgtttgcaaagttctgggatcaggtatcttggatgctccttgtcctgcgcgccgcatctccgggaacaacagtctccctcccgagcatcacagccagacatggcccagaccagggacccgcgcggcctccaatctccgcacggctttgcgcgcagcgcttagcctgggatgcggcagcgaggccgcaaatgcaatcaggcccccggccgtaatggccgaattcccgggcatatgtccggtaccgtcgactg

SEQ ID NO: 122793 - DNA, 675 bp, Homo Sapiens
  misc_feature (26)..(26): n is a, c, g, or t
aggccaagaatcgggcacgagggttntgagccaattaagaaaattgccatttttaaagtgtagcatttcagggtaaagacccatgaaatggcttgatgtattctagactactgaaagaaaaccacttcaaagattttgttgaaagttttagtgttgtctgaaatgcaagagggaaggtgattggtagtgagttaaaagaaaaagagaggaaaagagagtagttttgtcttcaagtaaaatgtctggttgtgccagacatttcacaagtgtgaaaggagataggagaagctcaacttgagggcgtgtagtaagttgtagaaggctcgaggggacgtggacttatttgccttggtttgcaatacctgcaaataatgagtttgaaaagaaacaatgaaatgtgttaaaaatttgaccatattagataaattttggtggatttagtcataagatggaaaaagactggtgaatcttttattacaaaatgtttctgttaaaatgggatcatcatctttgaaaggggggaggaggagtaaaagcccgattataatggtgatcaattcaagtcagtgttgactattctgtgaaatatatttggccagtggaaatgataatcagaaaagactgtaaatagatccatccaaatgatttctctgtacaaatgaatgatactattaa

SEQ ID NO: 122794 - DNA, 1013 bp, Homo Sapiens
  misc_feature (59)..(85): n is a, c, g, or t
  misc_feature (677)..(793): n is a, c, g, or t
actttgatgccttttcaaattggcatgtctttaaagtatttttcttcctgattaaaaannnnnnnnnnnnnnnnnnnnnnnnnnnatatatatatatttttttaaatcacattaattttaccaagtgaaaccaagccatactgtttttgagccaattaagaaaattgccatttttaaagtgtagcatttcagggtaaagacccatgaaatggcttgatgtattctagactactgaaagaaaaccacttcaaagattttgttgaaagttttagtgttgtctgaaatgcaagagggaaggtgattggtagtgagttaaaagaaaaagagaggaaaagagagtagttttgtcttcaagtaaaatgtctggttgtgccagacatttcacaagtgtgaaaggagataggagaagctcaacttgagggcgtgtagtaagttgtagaaggctcgaggggacgtggacttatttgccttggtttgcaatacctgcaaataatgagtttgaaaagaaacaatgaaatgtgttaaaaatttgaccatattagataaattttggtggatttagtcataagatggaaaaagactggtgaatcttttattacaaaatgtttctgttaaaatgggatcatcatcttggaaaaggggggaggaggagtaaaagccctcgtgccgaattcctnnnnnnnnnnnnnnnnnnnnnnnnnnnnnnnnnnnnnnnnnnnnnnnnnnnnnnnnnnnnnnnnnnnnnnnnnnnnnnnnnnnnnnnnnnnnnnnnnnnnnnnnnnnnnnnnnnnnnagtgtaaagctggggtgcctatgagtgagctactcacattaatgcgttggctcatggccgcttcagtcgggaaactgcgtgcagctgcatatgatcggcacgccggggaaagcggttgcgtatggcgccttcggctctcgccacgaccctgcgccgtcgtccgtgcggagcgtacactcactcaagggtatacgtatcaagatcatggataccaggagaa

SEQ ID NO: 122795 - DNA, 732 bp, Homo Sapiens
gtaggttcacaattaaaattgtcttgaaagtatttattgtttaataattctttctcccctcagccccatccggccactctctctttctgcttttctgatcatcctaaaggctgaatacatcctcctcctgtgtggaggacacgaagcaatactaaaatcaatacactcgatcaggtcttcatcagataccacgtcactgtgggtagagtgctagttttcaacaaatgtggtgttcttagggctccacaaggtagtcctttctcaaggtcgctgggccactcatggagttgaaatgccgctgcccatctaagtacaacatggactctccatatgtttttgggaaaaccaatggcacttctttttccgacatgaacgtgaaatgaaagacattggtggttgtatgctgcttctcctgcagggaggccacttcactgtgtactctgacttgaatataattattctgagtaaagcatacctgtgaagaaagaaagagcaatgagccaacctcaacaggtttctgaaacatgatgtcatctactgctaccacaaacggtcgagaaccaccaaagctacaagcagtagcccacgcaagttcatatgccttcctcataaggaaaccaccaaagatccgattgaaaatgttccgctcctgagggtggcaatttccaaactcttcagttttgattctccatccacactgcattagagggtaaaactcgactccgaaaactt

SEQ ID NO: 122796 - DNA, 552 bp, Homo Sapiens
gtgtagtctgaatataggaattcaatcagagatgttaaaacaaagaaagatggtactctggcatgtttcaatcttattctattgcatgagtgcctgctagaaataattacaagccattcatgaaatcaaggttggttgggaatattggactcctatatactgtaaatggtatctttgcccctctgcagtcccaaactaatactagaagtaaggtgttttaatatctaaaagaatgtttccaaattagtgtggcgaagctaataatacattgtgatcatggcacatggtggtttgctgtgaatgacagctgaggggatgtcaacaagcagtattaagcaaatttgatgctggtgatagaacaagattgtaccaacaacaactgtgtcagcttacaagagagtagggcagaagcgctgggtaactgttgaaaaggagaaagaaattgtgcaaactgaaaagtctcagaagcacttagatggcttggtaagttggttagtgctgtcaaatattatcaagaccacccttgtattcaaggtaacaagatgcatagac

SEQ ID NO: 122797 - DNA, 657 bp, Homo Sapiens
  misc_feature (514)..(552): n is a, c, g, or t
cacatgaaaaaatatttattttaattcacatcaaatacatttagaataaatctaaatttttagcatcataatacttacaaacaaacacagataaactttgggtgtataagtctccattctgtcctaaaagcatgtacaaaaagctctcctgcaactattgatcatcacctcgttgccttaaatttctagattttccattttcagttcttctctttttgaagactggggccactccatctgccataactccaagagaagtgactgttttttctttaaataccactttgggttctccgccaccatcagcttctgaagttgatacatactcattttcagtgcttggaagttccaaatctacctcctcatgagactcaacctcttgtttaatttcttgccattctccatatgggtttgatttcttaagagttttcgatttttcttcatttgaacctaatgaattctgtttctgaatacttttttctttctgtgtttctgggtcacttcctccatcacnnnnnnnnnnnnnnnnnnnnnnnnnnnnnnnnnnnnnnnctgtctctgtagagaccctccttcttctgcttcctgttccccatcagaatcactatgcgaatctgatgatttggattcatctagggtgccaagtgaattttcatt

SEQ ID NO: 122798 - DNA, 1132 bp, Homo Sapiens
  misc_feature (188)..(188): n is a, c, g, or t
  misc_feature (193)..(193): n is a, c, g, or t
  misc_feature (195)..(196): n is a, c, g, or t
  misc_feature (198)..(204): n is a, c, g, or t
  misc_feature (206)..(210): n is a, c, g, or t
  misc_feature (722)..(760): n is a, c, g, or t
tggcggggcgtttcctttttttggggggaggaattcccaaggcactttgttcatggcccagggatcttcctttaggaaaaccaggcttatgacccatgttccacttaccttacgggggcccggcgcgccaaaacgaaatggttttagaaaggcttctcgaggggcggaggcgggcccgacaaggtttnttttntnntnnnnnnntnnnnntttgaaaaaatatttattttaattcacatcaaatacatttagaataaatctaaatttttagcatcataatacttacaaacaaacacagataaactttgggtgtataagtctccattctgtcctaaaagcatgtacaaaaagctctcctgcaactattgatcatcacctcgttgccttaaatttctagattttccattttcagttcttctctttttgaagactggggccactccatctgccataactccaagagaagtgactgttttttctttaaataccactttgggttctccgccaccatcagcttctgaagttgatacatactcattttcagtgcttggaagttccaaatctacctcctcatgagactcaacctcttgtttaatttcttgccattctccatatgggtttgatttcttaagagttttcgatttttcttcatttgaacctaatgaattctgtttctgaatacttttttctttctgtgtttctgggtcacttcctccatcacnnnnnnnnnnnnnnnnnnnnnnnnnnnnnnnnnnnnnnnctgtctctgtagagacccctccttcttctgcttcctgttccccatcagaatcactatgcgaatctgatgatttggattcatctagggtgccaagtgaattttcattgaccttactagaaggcagatcactagtgtgtggaatgaaatcatcaggtttctcccatctggattctcctgtttctgtattatagtaataggtaaaaccatcttcacttaaaccttctacccaaacggtcttcactgctgtcttttttaagtctccttgaaatccttcagagtttctcccacgtgagatgctcctgagataagatcataatagtaatggtaaccctcaggaggttatgccttctacccatctgccctttgaaggac

SEQ ID NO: 122799 - DNA, 1629 bp, Homo Sapiens
aattatttttcttggaagtagggaggatttgaaagcttgaaaatcaagaatcaaaagacagtgaatctagaaggcatctgggagcagaacagagattgaagacgggtgggcacaggagaaagcgccaccatcgatcccggctgctgccctggaaatgtgattttcttaatagctgagttcatggttgcttgaggtcaggcctggctattcatttccagcgatgtctgaccagagaggactcatcattgacgacctcagggtcacgggggcgacgctgacaccggaacggcagcagcagcaggacgattaagacaaggaggatggctccacagacgctcatgagcgcataggacacaatccacaaaatgggctcgctcaaagactgagcggggacacagttgctggctacatcctctgttgagaaaggcccggaaatttcagacactgcagcacctgcaatttctgcacaggggctcgctgcgaagcccaccctcttctgggctctgtcgaagatgacgtagaagccctccatcaccgtggcaccgatcaccagcgcatttgtggatggggaaatgccgaatcggtaacattcataattcaggccggcccccatcatgggctgaatgtaaagctgaggcaggattgtgatacggaatgacctgctggagttctcgtctctcaggtagatggagattttagggaagtaagaccaaggtgtttccgaattcgtccagcacgccagctgggacccagtccagaaaccatcagagaattctggaatcagagatgcgcgggccacagcttccaccaccgcatcaaacaccttctggggcaggcgcagcagcgtggtgccactgtccacgatggccttgtctgcgttatactctctgcagtccagattaaggctttggcctccaatttccaatttcagaatttctatctggtagtaccactcttccttaataggggtataccagatgtctcctttatacaaacttggttcaattccacccaagacaagactacctccgttggtcccagatccagcaacgggcaagccggctccacacatctgcatggagataaaccttggggattttgcttgtgtcaccagggagtcgaagaaggtctccagagaacttgatggcttcttcgagaggcggtcaaccaagcaacacgatgggagacaggctcttggccacttgccagccgagtgacttgttcctttgcttgccttcccttggcaagtgtggcatcagctaggccaagtattccattccatttaatcccaggcagaagaaattctctgattcaaaaatagtggcatgtttgacaagaaaagaagtattggaagcctctggggatgctgacgaggtcttccccaacgaagcccgtccagcttccttgtgtgtacttcactgtgacgatccagacccttggagcggtatgtgctagacctctctgtgtcaaagtacgtgtctatgtaggagtcggggttcctgccacggcaaagttactgcttccagtgtcacgagaatctgtagctgcgactcctggtgaggcaggacgcgggactcgattccagaggcaaggcttggacatagcggacgcgtgggtcgacgatatccc

SEQ ID NO: 122800 - DNA, 1473 bp, Homo Sapiens
tcggaaaattttcggaacacttgcaggcccttggcattttctgcacagggggttcgttgcgaagccccacccttctttttgggctctgtcgaagatgacgtagaagccctcccattcaccgttggcaccgatcaccagcgcattttgtggatgggggaaatgccgaatcgggtaacattcataattcaggccggcccccatcatgggctgaatgtaaagctgaggcaggattgtgatacggaatgacctgctggagttctcgtctctcaggtagatggagattttagggaagtaagaccaaggtgtttccgaattcgtccagcacgccagctgggacccagtccagaaaccatcagagaattctggaatcagagatgcgcgggccacagcttccaccaccgcatcaaacaccttctggggcaggcgcagcagcgtggtgccactgtccacgatggccttgtctgcgttatactctctgcagtccagattaaggctttggcctccaatttccaatttcagaatttctatctggtagtaccactcttccttaataggggtataccagatgtctcctttatacaaacttggttcaattccacccaagacaagactacctccgttggtcccagatccagcaacgggcaagccggctccacacatctgcatggagaaaacgttggggatgtttgcttgtgtcaccagggagtcgaagaaggtctccagagaacttgatggcttggcaagtgtggcataagctaggccaagtattccattccatttaatcccaggcaaaaagaaattctctgattcaaaaatagtggcaatgttgacaagaaaagaagtattgaagcctttggggatggtgacgaggtcttccccaacgaagcccgtccagcttccttgtgtgtacttcactgtgacgtcaaagcccttggagcggtatgtgctagacctctctgtgtcaaagtacgtgtctatgtaggagtgcggggttcctgccacggcaaagttactgcttccagtgtcaacgagaatctgtagcttctgcgggggggtcccgatcagcatctccaggtagtagccgcggccagagtccccctgcaggttgtctaccatggccaagaagttggcggcgcccgcgggggacgccagggcaggctccagggcgagcgccaagccgtcggcgtggcgctcggcaggggtcccgggtcccggggtgggcgcaactacgcggttcgtggccgcggccacccggaggggcagcgtgaagggcgcgggggccagctccggggcggcgcgcaggagccactgggccagcagaggcagcagcagcgcccgggccagtgcgcccatgcccacggcggggcccggggggcgcgcccagcctagccggtcccgtcccgtccggcagccgcggctcagcgactcggccggcgcgcggggctgcgggcagatcccgggaattccggaccg

SEQ ID NO: 122801 - DNA, 476 bp, Homo Sapiens
aacatatatttacatattacacctatactattacatataaaatatacaaatacacaatatgacaattggaaatacatggcgcaatagttcagagatgctcagaacacgcagtgctgctcctcagcaggtgactgtaactcagcaactcggggacccgtgagtgtcccgaggactcaccagagatgcgcgggccacagcttccaccaccgcatcaaacaccttctggggcaggcgcagcagcgtggtgccactgtccacgatggccttgtctgcgttatactctctgcagtccagattaaggctttggcctccaatttccaatttcagaatttctatctggtagtaccactcttccttaataggggtataccagatgtctcctttatacaaacttggttcaattccacccaagacaagactacctccgttggtcccagatccagcaacgggcaagccggctccacacatctgcatgg

SEQ ID NO: 122802 - DNA, 611 bp, Homo Sapiens
ggcacgaggctttatttacatgttcagagcaacattattcctaacagccaagaagtgggaacaatccaaatgtccctcaactggtgaacctagaaataaaataggtcttttccatgcaatggaatagtattcggcaataaaaaaattaagtatcaatacatactacaacagatgaacctcaagaacaccatgctaagtgcaagacgccagacacaaaatactacatgtattatgattccatttatataagatgtagaaagaaaaacttataaagacagaaaacaactcagtggtgcctaggattgggaatattaatagacatgaggaaacttcttagggtcatggaaatattctaaaactggattgtggcgatgcataacgctagaaatttactaaaagtcaatgaattataaaattacagtgtgtacattttacggcatgtaaattgtagtttgacaaagctgttaaaaataagccagttatgtgatcttgttaaaaactggaggaaaaaaatgaaacaagccaataattaagagcattaggtatagattcagagctttccaaaaagcatcttcagaaaatatcatttggtaatactcgtacctcactca

SEQ ID NO: 122803 - DNA, 728 bp, Homo Sapiens
  misc_feature (644)..(644): n is a, c, g, or t
ttttttttctcttcaaagagttttcaaacaatttatttcacaggagaggtggagaaggccaatcttcttcacacaagttttataacccattaaaacagtatctttctaatcccctcagagtggaaaacaggtaattctcaacctggagacaagctctgaagtacagagctatcacctgctgcaggaggtgtgaaggctcattcttaaagttttctcacgtttattttccattttcttagcacagaatgttctttccagcaaggtccattaagagagaccgaaatatgaatatggctgcattggattccagaggaggacttgatcaaatacacagaaatagtggcttcaatgatcaagttattttgcttctggtcaagtcggatacaagtctgagttttcttttcaaagctcccttatgctgagaggaagtaagaacagaatcagactgcagtctacaacacaagtgcctgaactccttttccaagaagagcttctgtagaattccacactgccttaagcacaacctcactctttctctcactcttgggaaagaaaaaagtgaaagatgcatccgtgtaattgacaacctgagtacgatcccaaggttgttaatatatagtttattataatcatgtgggaagtangcacacaattagaagtcttttctatacaatctaatgtcatttctgactctggtatctcataaccaaaatgaagctatttcctgt

SEQ ID NO: 122804 - DNA, 654 bp, Homo Sapiens
aaaagaaaagatatatatttgggtgatagagcattgtaatgagaatgtacatgccatggtaaactatttgtgtattcagggagttaaaggaagacaaaggtttttaaatggggaaaaaatacaattacataattgttttgaaataattatataaagagcaataacaagggtgatgccagtctgagattggacagttactgagcagatgttcttgtagaagtcatttttgtgtaagattatgatggtctttgtgtaaggtggtggtttttgtagtttttgttatcaggcacacatcatgagaacccgctctttctggcctttcccaattctatttgtcgggtttcttaacattagtgactccatctagattctgacagttttcatgagaacttgcttttcttttctctctcaagtccttattcagtattcaacacccttaacagattagtcccactgctgagtcaggcctcttgcatgaagcagcaatgagaaagacacacttggccaatgttatcctggagtaattctcaatgatgccttctctgtgtttcttcaagacaactgtccttagtgtgagaaaatgtccagatttctcatcctctggccaatggaaggttgtcactcagagcaacggcaaggagcagagtgctgtct

SEQ ID NO: 122805 - DNA, 812 bp, Homo Sapiens
  misc_feature (700)..(734): n is a, c, g, or t
tttcccaattccagtcaccatgatgcgttttccctcagatccatctggatgcttgtattgcggcctatggaaatattggcctttggacctctccatacctggaaatgacttcagtgggatatgaggtagaatgtggtggccactgcggaccataactgcgtcaaagacagcactctgctccttgccgttgctctgagtgacaaccttccattggccagaggatgagaaatctggacattttctcacactaaggacagttgtctggaactgaatatattttagcagatccaattgttttagcaagaatcctgaaatattccagaagtttagaattatgcaggaagtttggaaaatcttcaggcattggaaagtcactgaaacaggacatttctttgctggtgttggtaacgacagattgatagatacttgctcggccatcttccacattctctttgaacctccacactcctccaatatcttcagttctctcaaagcaagtgggctcaagtccctcatccacacagcacttcagagaaattaggccactgaccccagctccaatcacagctaccttctttgccatcagctcctttgtttttgccttttggcaccgtctctttgacagaatagttttctcccttggttgtgtcccggccgtaatggccgaattcccgggcatatgtccggtaccgtcgactgnnnnnnnnnnnnnnnnnnnnnnnnnnnnnnnnnnncgccgcttcctcgctcatagactcgctgcgctcgtcgttcgcaatacgcctagcgccctatagtgatcgtatacatgg

SEQ ID NO: 122806 - DNA, 624 bp, Homo Sapiens
  misc_feature (114)..(203): n is a, c, g, or t
ctctgccacaaggtaattttaaaaatgtggtttctttgtttaaacagttactaagttggttcatctttcagtaacagacctcccctcccccagctccccactcagtcttgtatnnnnnnnnnnnnnnnnnnnnnnnnnnnnnnnnnnnnnnnnnnnnnnnnnnnnnnnnnnnnnnnnnnnnnnnnnnnnnnnnnnnnnnnnnnttcttcatctagacaaactaccacctcagctggctgaggtaatcgagagtcaaaccaatccagcacctgctgggtgctaagccttgatgcctgactcaattgagggatatcagtttcccgtagctgttggtgggctgcccagtacctctccaagggttgtatatccggtgggggtggagggatcggcagaggtggtgtctcagccctttcgttcaaggagcgggttgatggtggtggtgtaggaattactgggtcttggaaactaggggcaccaggtactgcgttgtcccgaaaccactttagttgcccatgcttcaaggcatagcgtgtgtcaccaaaccactgaatgatctcaggccgaggtaaaccagtgatctgttctaacttttggtaatcctcacgccgtgcccactggcactgt

SEQ ID NO: 122807 - DNA, 577 bp, Homo Sapiens
  misc_feature (246)..(259): n is a, c, g, or t
ttttttccaataacttaatagtttattagtcagtcaacaatattacaaatatttaaaaattacttaatataaatagttggcagcaaactattccattacagagttaaattaccagtacaacagacagactggagatttagacacctggaagataacaataaaataaactaaaatatttaacgaaaaatttaagctgaaggtgtttacctagtgtccataaaagcatgggttctctttttatttagnnnnnnnnnnnnnncggctttaacaccccattaggaatataaaataaaatcaactgaaaatattaatttgcatatcaaagaaccatttataattacaatccaaacactccataaaccacttgtgcgattctatacagaaactgggaattagaaactagttgctttaatattacaaagatttcagctccaaaaataattcaacataaaataaactttagcaattagtgtcataaaattatatatttccacataaaaatacaaaataatattaatgacaagaatatgaaaaattattccaagtattttactactattaaaataaaataaaacgc

SEQ ID NO: 122808 - DNA, 625 bp, Homo Sapiens
tttgtttaagagttaagtggttttttttctttattcaagtaatcatttagactctaatacatgataatggacaaccatgtgacaaagtactgtagtgtatggtttggtgtagcctccttgcctctaggatgggattttttccaggtgattcttcaggatctgacatcgatgcccaacacaggctttccaatggcaatgcatgagttctagaggtcactgccccatctttcttcaggtgctgtgtgccattttctcccacccattttatcctccattacttataaaaaccccactctaaaattcaacctatgttataaaattaacaaaatcaggagttagtacacatttttccacaatgataaaattaagactcataatgtactatcttgtttcgtctaacttttggaggatttatataatctctaaagagtcagagtaatacataacacaaaacatgcaaagaaccttatcactgggtgtatgtaatacgctgggaattgctaaagtactcaaaagcttaattttcttggaatagcaactgtccactgaaaactatagtattcaaacaaaaggttatgtgttaatacatgaaaatacagtacctgatttggcataaattgtgaga

SEQ ID NO: 122809 - DNA, 567 bp, Homo Sapiens
agggtggcaatcacaccatggaagcccgccaaaccttcaactccctggcagccttggtgaatggtatcccattcaacagctatagggtggctgagggttgtggcaggggcctgggggactgcatcgcagtgcttcacatggcctcgtcataaagcagggcagccctgggcctggcaggtggctggcagggctgacgagaggtcctgccccccggaggactctccccagagaagccacttacagagtgtcgacggcagcatctctcactgagaggtcaccttgctccattatttgagcaatttcacctgatgttaacacgcagtcagcgccccgggagccatgcaaagcagggggaaggctttcctgaagagcctccagcttcttgtcataacaaggggccacaatgacgtggaaaatcttctctggagacaggttctgtgggagaggggcacccatatttagggctggtgaagaggtgacggcagcttacgcttggtgcccagaacaagagggatgggagaccgaatgccccctgctgctgccctccagacactgcatgctgcacac

SEQ ID NO: 122810 - DNA, 1318 bp, Homo Sapiens
ttccgcatgtcggtctgagtctggcttgcctctgccatttaagcatcctccagcacaggcgagacctccacaaagtggaatgggaacttgcccttcttaagcttcaggatcatgttctggatgtttcgaaagccataggctgcagcaaagcgtaacaccacctctccgttcttctcaagggtgacctcttggaagtctttgtttctcagggctcggtaagtgacctcctccacatcctcgttgaacagctccttggccgcatgtctgaagatgtgtgccaggtgcccgtctgagctggctccatcatggcgcgtcactttgtcctccttcaagtctccaaacagagtgtcgacggcagcatctctcactgagaggtcaccttgctccattatttgagcaatttcacctgatgttaacacgcagtcagcgccccgggagccatgcaaagcagggggaaggctttcctgaagagcctccagcttcttgtcataacaaggggccacaatgacgtggaaaatcttctctggagacaggttctgctgtctggcgaaataatccttcaccaaagagcccatgacctgctggggggacttggcggtgcagaggtgggcagtgatggggcgacccagcacccgctcggcgtatcggacccagccaggacaggcagaggtcagcatgggcagggtgcgttcctcctcactgtgctggcgatagcgacgcacgaattctttttgactctccaggatactaaaatccgcagctatcgtcgtatcaaatacatagtgcaccccaagacttttgaggaaaccacagagtcttctggatgcatcagttacactgaggttgaatttagcagcaaaataaggcaaagattgaggacacacagacactaccagcactttgtgctttgaggtatcacatttcttgttaaggttcagaacgcggaagaagtccttggcattttgctgggaaagttggactccttcctctgcagtcatacagctgtcacatgccaggcagtcgctcaaaaatatcttggcatcagccaacttgtggaattctcccttctctccattttcctgggctggactcggtgcatcggctgacacattctcttggtcatcagtttttgttttcttactacattccttgcgcgtgcagtgctcacacttcatctggagcgcggcgggcgggaggccgggcgcctcagcctcagggaagcaccgggagactgggacaccactgcccgccgcccgcggccctttgttgtcctcccccgacgcctcgtgccgattcaccacccagcctcgtacctagc

SEQ ID NO: 122811 - DNA, 794 bp, Homo Sapiens
caggcagcccctccctgtactggagaggctcttggctctggccccaagagcagctggaaggcctgggcctgacttcaccacttgatgtccaggctgtgtgtgccacgctcctggctctggtacgtggtatgcagcacctctcgggccttgggggagttgatcccctccagccactcctggtacagctcctgcacgtgtgcactggactccggacgccgcacagggatgtcagcgtaaatgccttccatctgccgcagcagggccttatccgcatgtccgtctggagtctgggcttggcctctgccatttaagcatcctccagcacaggcgaggacctccacaaagtggaatgggaacttgcccttcttaagcttcaggatcatgttctggatgtttcgaaagccataggctgcagcaaagcgtaacaccacctctccgttcttctcaagggtgacctcttggaagtctttgtttctcagggctcggtaagtgacctcctccacatcctcgttgaacagctccttggccgcatgtctgaagatgtgtgccaggtgcccgtctgagctggctccatcatgacgcgtcactttgtcctccttcaagtctccaaacagagtgtcgacggcagcatctctcactgagaggtcaccttgctccattatttgagcaatttcacctgatgttaacacgcagtcagcgccccgggagccatgcaaagcagggggaaggctttcccctcgtgccgaattcgccacccaggcctcgctaccttaggaccgtagtagtactgccgt

SEQ ID NO: 122812 - DNA, 910 bp, Homo Sapiens
acgctctctctgtggggtagcagggaactcggagaaaccaaagtaatccattgagcggttttcttaagtgtctttaatactccactcagggcagcccctccctctactgagaggctcttggctctggccccaagagcagctggaaggccctggcctgacttcaccacttgatgtccaggctgtgtgtgccacgctcctggctctggtacgtggtatgcagcacctctcgggccttgggggagttgatcccctccagccactcctggtacagctcctgcacgtgtgcactggactccggacgccgcacagggatgtcagcgtaaatgccttccatctgccgcagcagggccttatccgcatgtccgtctggagtctgggcttggcctctgccatttaagcatcctccagcacaggcgaggacctccacaaagtggaatgggaacttgcccttcttaagcttcaggatcatgttctggatgtttcgaaagccataggctgcagcaaagcgtaacaccacctctccgttcttctcaagggtgacctcttggaagtctttgtttctcagggctcggtaagtgacctcctccacatcctcgttgaacagctccttggccgcatgtctgaagatgtgtgccaggtgcccgtctgagctggctccatcatgacgcgtcactttgtcctccttcaagtctccaaacagagtgtcgacggcagcatctctcactgagaggtcaccttgctccattatttgagcaatttcacctgatgttaacacgcagtcagcgccccgggagccatgcaaagcagggggaaggctttcttgaagagcctccagcttcttgtcataacaaggggccacaatgacgtggaaaatcttcttcgtgcgaattcgccacccaggcctcgctac

SEQ ID NO: 122813 - DNA, 851 bp, Homo Sapiens
  misc_feature (589)..(589): n is a, c, g, or t
  misc_feature (684)..(684): n is a, c, g, or t
  misc_feature (796)..(805): n is a, c, g, or t
  misc_feature (811)..(811): n is a, c, g, or t
attgaccatggtgattatttttttaaaccatcgttaatatactgaagtgagctatagcacatatcatgtgcttagtttgtttatttttctccatctccccttggcttcctagagtttggacatattccaggctaaatgcttttactcaagactacagaaaggtttgaagtagtgtgtgcatggcatgcacgtatgtaagtaatctggggaagaagcaaagatctgtttcattcttagcctcaggcctcatgagggtctccacagggccggagctcaggttacaccactccttcgtccttacaggagatgtagggagaagaatctgcaggctgcttgtgggactgttcaccaagggggataccagcagcaagagagtgcacccgtttagccctggaccctgtttcttactgtgtgacttggctagagttgggagttcccccaaaataaacgtgtccccattttaccagaaccaaacctcaacacagcgaagctgtactgtctttgtgtggcaaagatgttcccttgtaggcccctttcaggtaaccgtcttcacaatgtattttcatcacagtttaaggagcatcagccngcttctcaagtgggtagggaaagcagaaaaacgtacgcaagaagacatggatccaaaatgatgatgaagcatctccccatgggaggtgatggtgnggagatgatgggctaaacaggcaacttttttcaaaacacagctatcacagaaaagaaacttgccctcatggtaaactggaattgagaaatctcagtgattctgcaatgggannnnnnnnnnacgcanaaagtatgtatactctagtattccgggggttttttaaatt

SEQ ID NO: 122814 - DNA, 1965 bp, Homo Sapiens
  misc_feature (70)..(90): n is a, c, g, or t
  misc_feature (532)..(542): n is a, c, g, or t
  misc_feature (1699)..(1781): n is a, c, g, or t
  misc_feature (1832)..(1866): n is a, c, g, or t
gacggccagtgccatgctcaaaattaaccctcactacaagggaataagcttgcggccgcggctgtaggcnnnnnnnnnnnnnnnnnnnnnatcgataatggggatagattttcatctgtttatttttagagagatcttgtacttaactcactagtctgggatgttttatttatgtcacctaatattaactattgctaaatttcactttaataaaaaagtagatacaaagactcattttacttagcaagactgcaaataaaactaagacataaattcacatgttagtattgtccaaaacaattcctccagctatcaacccacggcaatcaatccagcagtatcatttatagaatgattactaaaacaagaatcatttctcagttacaaatggggtcattaagcccttggggctctttgaaagtagaagtagtttgcctacttaatcatcagtctacacaaaggcagaaataaaaaggaatggaaatacaaacacaaaatgattggttattacctgttttataaggaaacaagnnnnnnnnnnncagtggctagaaacaacaaaaaagcagtggctggaaccctactgaatagagcttaaagaagtactggttacattcacagacacagtagccactagccaagatatagtttatctccatcaaacttaaatagataaagtcagtaagtatgaccatcttactttcactatttacgctctttaaatagtaaaggtatcggtttgaaagatacatagaaccataggaacagtgaatgatcatttataaaacagctccttttccctgaatcaatatattggctaaaattctttcagtaaccctccctttttatatgatcacagatccctccacatctattttattttagttatataaaaattattaataaactttggtttccttgcattcggtccttatattttaaaaagtgattaaaaacagtactgaatatgaatcacttctgcaaagtttaatgagtgagaaacattcaaccaaggtgatttttccttggaaaaccctacaaaaactgaattttataaacagttacttattttgatagatgttccatttataaatagcagccattacttcactgtctacaaaattgcaggctgtcacattttacatgtttagaattcaaatgttttaagattagattttctagtaagagttaaaataaaaacaaagttacacagacaggttagttgtcctatgcaaataaaacagctgattttcatgattttgctatttagacagataagagacaaccattggattgacactaatgtgtaggataacatattttttgtttaaagaggaaatgatagaaacttggggtggggcagctgcagcaggacttgactctactgaggctcttctgtgctcatgggacaagctatcgcaggatgttagtaccggagaggccctcaagttaagacctgagcaaagtgtgctattcagagaagctgagctatccctgctcccggttctactgtggtgaattggtgttttctgaggtctaggcaacaagagctcagagtagaaggagtagacattttcgggaagtgggatgctgggcatgtcatgttgctctaacaagtgattaatagcacggaaatgggaggaagatgaatgtattttaaatggatactccctatgctagtcttgggaaatgaccttcnnnnnnnnnnnnnnnnnnnnnnnnnnnnnnnnnnnnnnnnnnnnnnnnnnnnnnnnnnnnnnnnnnnnnnnnnnnnnnnnnnncccggccgtaatggccgaattcccgggcatatgtccggtaccgtcgactgnnnnnnnnnnnnnnnnnnnnnnnnnnnnnnnnnnncgccgcttcctcgctcaagactcgctgcgctcgtctttcagggctaagtaaaacaccgggaggcggcgcctaatgattgagtctagtacagttcttttt

SEQ ID NO: 122815 - DNA, 748 bp, Homo Sapiens
  misc_feature (555)..(569): n is a, c, g, or t
gggcagaaaacttggcatttttaggcgtagataccttaccttacaatgccaaaatgaatttaattccagtactcaggtttttccctttaacagactctatgtgtatcagggctttctaatgggtttttcctcttcgtttttaaaatgtgagtagcatttgaccaatttccagtgctcttagcattttacttaaagaacaaccactacaaaagaaaatctttgtaatttgattgtcttttgctttgcttcattaatgcctaagaacttaagaatactcctacctcattagctactcaagatgctgtgacgatcaaatctattctacataatgcgtttagaaacaaagacttgggtgaaaaatgaaataagtatattctgacttggctattgaggggaaaattcagtattaagtgttcctcacaggagatatgttagcagaatactataaaagtttgaaatttttaaaaagtaaaagtacttaaatttaggtatctctcctgaaattctttgcagttcattttttatggcagttaatccagtgaaacactcaaaagnnnnnnnnnnnnnnnaaaagtgtttttccagataaactgtagggtgaacattcacataatcacaaatatgtaattctgtaattgtggaatgcttgtatgctttgttttcgtacatcttccatggagatgtctgaatataatactccatctgtgaatattttaaatgttgaaataaaagtaagaaatgtgaaaaa

SEQ ID NO: 122816 - DNA, 2575 bp, Homo Sapiens
  misc_feature (41)..(41): n is a, c, g, or t
  misc_feature (208)..(208): n is a, c, g, or t
  misc_feature (216)..(216): n is a, c, g, or t
  misc_feature (220)..(221): n is a, c, g, or t
  misc_feature (225)..(225): n is a, c, g, or t
  misc_feature (228)..(228): n is a, c, g, or t
  misc_feature (230)..(234): n is a, c, g, or t
caagaaaacccttcgggtttctcccccccggggcgtttttntttatttggggggaacattcccaagccccttatttccattggcccagggatttttctttgggaaaacaagtataggcccacgtttcccctttccttcatgggcccccggccgccaaccgaagggttcttggaaagtttttcggggggcgagggcgggccgccagggntttttttntttnntctnttntnnnnnccatactcttgagcaatgctaatctgcgccccttactcccttaagtccttcttggtaaataatgttaatcttccaataggaagaagtggagtacattaccatttaagcaccatttatccagcctacttacaaataaagctatggagccaccttatacatgtgaaattccttaaaaccctggctttctattaaaatgtacttttatatatactatctatgaagaattcactaaagcatgaatcaccttataatgagaagctaaaaatgtatcaaaacgaacataagtataggtaatccacatcaaacatactacatcttccaagtctagagcatacactggtataaactgtattacaacccagattagtttgaaatcttgtttcaaaacattgctcagtattaagtctcagtagacaaataataggaccacatgagaaactgttcggcaggtggctgaggaaaccttaacttccaaaggctcaaagtggtcctccagagactgttacactcccttaggtatttatttcagggaaggacactattaagggacacttttgagtataaagacaggtgaactcacaaagtataggcagatacatgcttgattttatcttctaatctacagataatacattagaataaaaatgtaatgaattcatacacctttcaaaaggaaaaactgatgaagaagtaacaataaagttataaatgataatgatcagatgaaataatttaaatgaagcttgtctgtgtctgaaagagacagggacttggcaagtggtcaaaaggaggcacaatgtgcttttaactttgcatgaaaaataatgttcagttctatattgccaaacatcattctctttttgctatataaatcttctatttctaattattgaccaaatgctttactgaaactccgcttctggcctttgttttgggatctgttacttttgttgccacctcctgatcgctgtcctctcgggcctctactgccttcccgctgtcctctgaatcttctgtttccgtcccgctgtcccctgaagcctcgactgccttcccgctgtcccctgaagcctccatatccttcccgtggtccttccagttctggttgctctgtggccacagagagctgccagcgtcgtgaatcatgccatttctcctgtatttctgttactgatgcggtaggtacatcaaaagcaaacacccagctttcctttgagaaaaaccattcccttcactttggaatcaatctcctcgcccagctgctctttaagttcttttccaagcataactaatatttggcatttcaattgagcactgcaagatcatggtcacaaaacccacatttgagttgatcaaggagcgctggtctacggacgtggcacctgaaatatgggccagtgctgctgccagagcttccacagctcccttctcctctatcagcttctcagctgattgtttgaagtgactaatggcagtgggaggcacggaatccaaaagcctgatggcatctttgctggaagcttttattatttctgttgcagaaggaacacctattcgtttgaacttaattcccgctttttgctccacttgtactaactgatattcttccttgtgctgataaaagcagatgcacacccccgtccttccagctctgcctgtccgcccggatcgatgaatgtaggactctacatcctttggtggagagctttgtataaccaaatcaacctcagggatgtctaacccacgtgcagcaacattggttgccaccaaaactccaaaactaccatttctaaaacctttcagggtgatttccctttgcttctgtggaatgtctccatgcaaggactgagcatcctgctttatagctgaattctgggacagctcctgggcttctttcttggtttcacaaaagatgatagtgcgtccttgatgaccactatatactcggatgacatccccaataactgctgccctctgagtccagtggcacttaatagccagatgctccacagttattgccgttttctgagtctttttaccaatcaggtccacctgttcatatgtagatttcatgtatttcttggcaacattaaatacccaatgagggcaagttgcagaaaaaagcaatgtttggggattgtcttcagaatctttcttgtatgccacacttaaaatctcttccacttgatcagcaaatcccatatccaacatctggtccacttcatccaggacaacatgcttaagtttggtgagatctagtttgccattctgtatgtggtctttgatacgacctggtgttccaaccaggatatcaatcccattcctcatgcgttcaaattga

SEQ ID NO: 122817 - DNA, 1900 bp, Homo Sapiens
  misc_feature (545)..(545): n is a, c, g, or t
aaagtgaaatgagtcctttattttctctacttttggaagtttttccaggggtgggggaagaatggtgttggggatcgcggttgagagatgcccagcaactctctagaggtgcgggtgaggcgtgtgcacttccttctcctggctggggctggtgctatgttttgaagaagctcctgtggctgacattcatctagtctaggatgtcgccacattccaggttgtccagttcgctctgcatgtggtcgatgtactgattgatctccttcacgcgcttgcggttcctcatgatctcatccttgtgaatcctgtctattaaacgtgtacaccaagagttgattctggtcaccagctcatcttctcgattgtcaatcttcaggaggtggatgtcgtgcgatgccccgacagcattaacaatcgtatctttatcgacaaaaagcgcgcgcaggtcgttaggcaggtcctcgtccaggtcgccctcgacaatcttctccagggtgctgatagagatctccaggagcttctcgtggtggtgattctccaggtcncggcactgagccatcaggctttggacattttcgataaacagtcctaccatgtcaacaatgttcctgttcagacatgtttatagtctcctccagctgctccaccagctgcatctccagcgtcatgagcgcatcgaacaactcactgatgtcagcactgcattctaggatcatcttctcaatgttgggcggttccaactcctctcgaatggcacttaaactcgacaagtgcttctcctcgaatttggcaatcttgcgtttgccctgctcctggttttcctggatggcctcacggacacattcactgaaggtgtcaagctctgttttccgcttctcctgctgtttcaggccatactcaaaaatattcacgcagatgatgacaaacttgtccttgtaggtctcaaggagctcaccgacaccaggcaggtaggacagattgttgccctctgagtcctcagcgtacatgctgttcaaacagggaggagcccattcaggtgttcccacaaacgccagtgttgtgcttttctagctcctccccgctgcgcctgcttttcctcccagttgggcctgcatcaggttcttcctggtgcttcagctcgtcgatgctgtactggtgcttagcctccgcaagcttttttgtgtggtcatcaatgcgccagtagtccaggtacatgaggtcaggaaggtaggcacagatgaacatcttgtaatcctctgccttcagagatagggttcctagagaggctgagcgtccgcaggcacttgaaccgccgaaggtagatgatgttcatcatgttgtcaatccggttgttgcccagcgacaacacctgcagcttgacgagggcgtccagggagtcgatcttggagatccggttgttgaacaagctcaggtcctccaggttcaccagtgtgtccagcccctcgatggtctcaatgttgttgaaagacagatccagccagaccaggtgtgcgaggttctccaggccctcgatcttctcaatgatgttattgtccagctgcagcttcctcaagttctcaaactgccagaggttgtctatgcggaggatgttccgaaagtccagctgcagggacaggacatccttgaagaggatgccctcctgcttggccagctgcccggcctcctcctgggggcctggtccccgacggccagcttgagcatgtcatcgtccatcaccctcggctccatcgagttgcacggctggttcatcttcccccacgttttccctgatgatagtgttgttgaagaccagagaggttggagctggggaaagcagcagagttttacacaactgtcaacggagtggcctcctcacagataacagatccagaattttcac

SEQ ID NO: 122818 - DNA, 969 bp, Homo Sapiens
  misc_feature (721)..(721): n is a, c, g, or t
  misc_feature (865)..(865): n is a, c, g, or t
  misc_feature (903)..(903): n is a, c, g, or t
atgagtaggggaaatgtgaaatgagtcctttattttctctacttttggaagtttttccaggggtgggggaagaatggtgttggggatcgcggttgagagatgcccagcaactctctagaggtgcgggtgaggcgtgtgcacttccttctcctggctggggctggtgctatgttttgaagaagctcctgtggctgacattcatctagtctaggatgtcgccacattccaggttgtccagttcgctctgcatgtggtcgatgtactgattgatctccttcacgcgcttgcggttcctcatgatctcatccttgtgaatcctgtctattaaacgtgtacaccaagagttgattctggtcaccagctcatcttctcgattgtcaatcttcaggaggtggatgtcgtgcgatgccccgacagcattaacaatcgtatctttatcgacaaaaagcgcgcgcaggtcgttaggcaggtcctcgtccaggtcgccctcgacaatcttctccagggtgctgatagagatctccaggagcttctcgtggtggtgattctccaggtcccggcactgagccatcgtgcagccccgagttaagcaaaggcccgggaggagcaggcccggcgcgtgcctgatgctctcagacggcgggagacagactttaagggcccaaggcgagctcggaaattctggctggcagcaccgtccactcacaagctccgaacctgngcctcctcgactccctgcccctgccccacactcggacggacctcggccctgcatcacactctctctccctctgcatggaggctctggctctgggttactgctctcacctgtgcattggcacactgtgctctacactgtctcctnaggactgtagccaggaggcagacaaggctgctgtactnagcaacattgccagtggatgctaatccggtgaaaagggtgcatccccatttgtccaccacatcact

SEQ ID NO: 122819 - DNA, 612 bp, Homo Sapiens
caggttaaacaacagaaatttattttctcacagtgttggaggctgaaaatccaagatcaaggtatcagcagatttggtttcttcaaagacttctctccttgacttgcagatggcaccttctcactgtctttatatggcctttcctctgtgcacttgtatccctggtgtgtcttccccttcttataaggacatcaatcctattggctttagggccccacccttatgacctcacttaaccttagttacctctttaaaggccctgtttcgaaatatagccatgtaccacataacagcttttcagtcaataatggactgcatatatgttggtggtgccatacgattataatggagctaaaaattcctatcacctagtgacatcatagccatcataaggtagcacaacacgataatcatgttgtttatggtgatgctggtataaacaaacctgtgctgccagtcatataaaaatctagcacataaaatgatgtaaggtatatagtacttaataaatggctaggttactggtttatgcattactgtgctatatgttttgtcattattttagagtgtacttctacttacaaaaaagttaactgtgaaacagcataaggc

SEQ ID NO: 122820 - DNA, 1094 bp, Homo Sapiens
  misc_feature (799)..(799): n is a, c, g, or t
  misc_feature (832)..(832): n is a, c, g, or t
ttttttttccaagcaatcaaaagatgtttattttttatagaaagatctgtaaaaaaataataatttttcaaacagctttactttcatagagaaaactttctacagaagttgactaagattttaaattgtaccatcattaaataaggtgggacaccatatgaatttcattgcactggaagaaatgcaaagcattttttaatataaagtatacagagcattctagtcaactacagctgtgttacagctatgtgttcttttggatttggtccaaagaaacctgagtctgtttccagagagaatgaaaaatgttatagacacctgatcagttactcctcactgtaggatgcacaaaaatgacattccttgtagatcccactgaatccagtttcccaacacttgatactttcctttttcccttcccccaccccagttcactttgggtttcaggttcaattctcgaatcacaggcatccagattttcttcataacaaacacatcccatggtcagatgaactacccagttttccaggatgacatcacctcttctgctcccaaatttcggccatatttaggtccaaatctttaaggccttttaaggcttgaagatttccagtgtaaaaagctacatctgctgtgaccaaccccattttgaggtcctccatcatttatcacatttaagtgagataactgctttttcacgtggagtttataacttgcattaattcttaaaaataacatctgtgtttgtttcttctggaaggagatcaaatatagcttcgtgcatttttgtcatttgctntacaaatattcctgaaacaggcagaaggaacanggagccttcacttcatacttagattacagcttgtcaaataagctatccattatcgctacaagcttagctgatatttcagctatgtgatcatggtagtccttagtgatatgatcaaaatgcctaagcatgctatattgcttaggtggtagtcgagcttcaaaatgagcccggatcacaggaatgtagtgcacaattaactgcaaacatcgtgaagaaagagccaaattttttgtagttatcgtttttagtccaacaacttgca

SEQ ID NO: 122821 - DNA, 664 bp, Homo Sapiens
  misc_feature (408)..(434): n is a, c, g, or t
agaagtaaatgtattttttattaaatcagaaaaagaaagatacagtttacatgactgtcagtcaatcatatgctactttgaaatacattttaatagactcagggtcctatttactcctttgtacaggtattaaaaacaactcaggtatttgagaagtcttctgtaaatttttattaactgaggttatggggagggttttatcagagcacatcctgagaacattaggaatgacagacacacttgagataagtgtcagacggaacagatgaagcgagcccctcagccatctgagaaacattaataatgtaagatagcagagaccaaatctttgttagggatacagtattacaggataaaaatggggaccttgccgcccccttgtgttgcaaaataaccgtgcaacttccnnnnnnnnnnnnnnnnnnnnnnnnnnnaagttgtaatctttgccgttgtcactgagcctcaaaagcaattgttttcccaaatcattttaagccctccccagtcaatcttttccctctcatcaataacttacaaggaccctatttgaaaaacaatgcttattcattcctttttctataccccacacattccgttctaggaaattggcaaccaccctacagccgcggccgctccaacatcagaatggtaaccctcgtgc

SEQ ID NO: 122822 - DNA, 1126 bp, Homo Sapiens
  misc_feature (319)..(357): n is a, c, g, or t
  misc_feature (913)..(913): n is a, c, g, or t
gcttttctgttttaagatcatttattagaacacagtcattcagaagccattgagacatcaggcagcaggaaggaaggtggggtggagcaggccctgtgaaggaccaaggacaaagtaatagccacagttatgaaatttcattttattctgataaagactaatatatgcttgataacctagtgataatccataagtttggtatttcacaacattttttagaaagcacataagattaacattcaaataaggcattatagaaagttttataaagaatgaagtgtttcctataattcttttaaaaaaccttggttcatcttgnnnnnnnnnnnnnnnnnnnnnnnnnnnnnnnnnnnnnnnaataaaattttccccccaaaacacataagaaccacttactggcacttgtattttaagtacctgggaaaaaaacggaacagatttttaaaggcaataacgacttgtaagacggcttgtttcatttgatttggcacgaagtaaagtaagagtaaatatgccatggaagacataatcaagtttttcctccatctctcatatttccccacttctaccagaccacacagtacatcagcaaccatcctttagattccaatttttaaatggctgctcagacgacaccaatagagttctttctccttaaaatatggtggcagtgaatgctaacaggtatcaatttctttgatcaggaacaaagaactccttcaggaaactcactttcctggtccttgttaacctatcatgtaaattctttttattggtacacctgtttactaattatgattgattgctatttatgccaagggagcatttcccaggcatgcctcatctatttactaacaacaaagtatgcttactttatttacatagtgccacgggtttctctttttcctctcgnttttatggcgggggagatggtactatacttgttatttatatggcagatacacatttggatcacaagaaaaacagcagtagatcttacacaatttcttaactgagtcatactgaaaacatacttattacatttgttgaaattcatcacgtggggcttgtaaagattatgcaatttggcaaatcacaccccatcacagtattcaaggatactcac

SEQ ID NO: 122823 - DNA, 1606 bp, Homo Sapiens
  misc_feature (76)..(110): n is a, c, g, or t
ctgtatagctcattgggcctccgctttgtagcccgaacgaacgagcgcagcgagttgtgagcgaggaagcggccgnnnnnnnnnnnnnnnnnnnnnnnnnnnnnnnnnnncagtcgacggtaccggacatatgcccgggaattcggccattacggccgggctcattcagcgtgaggatgataaaccagagacggttatcaagagactaaaggcttatgaagaccaaacaaagccagtcctggaatattaccagaaaaaaggggtgctggaaacattctccggaacagaaaccaacaagatttggccctatgtatatgctttcctacaaactaaagttccacaaagaagccagaaagcttcagttactccatgaggagaaatgtgtgtaactattaatagtaagatgggcaaacctcctagtccttgcatttagaagctgcttttcctaagacttctagtatgtatgaattctttgaaaattatattacttttatttctactgattttattttggatactaaggatgtgccaaatgattcggatactaagatgcatcgtttgaaatcatctagtgtgttgtatgcagttatcctcaaaaaatcagcgatgtctgaacctttaaaacatctgttagagcaaaattaaaagagcatttggtagtaatctaactttttgttcagttaataagtggttgataaagtttccatatttttctggaaaagttaaaaaaagttacatgtcatttggagaaaatacgtaatcagaaatttgtgcatagattgatgccaaaaaagacatttccagcattgtggaacatggtgagacactatataaaattccagaaagaaagcaactggatttacagatttattgtgagacacaaattcactgctgcctttacactaagaaatgtatatgttaaccatatatgctgtatttattttgtcgttaagcatactttcagtttactcagaattttcaatttgctataaagatgtatcaattagcatatagaaaaatattactttaagatgacttgtttcctttgaaaatacctgtgtactgagggttatgatttgtgtcaaaaattgacataagtgcttttacaagcaccaaagttgaatgaattttcaacaaaatgtaattaaagtctatgttttcagttatgactcaggttaagaaatgtgttttaggatctacttgctggtttttctttttgatccaaatgtgtgatctgccctgataaataacaagttatagtaccatctcccccgccaataaaaaagagaagacacacagagaaacccgtggcactatgttactaacagtaaggcatacttagatgtaaggtacaatagatgaggcatgcctggggaaatggctccttggcattaattagcaatcaattatacattagtaaccagggtgtaccaataaaacgaatcttaccctgatagggttaacaagggaacagggaaagtgaatttcctgaaggcgtaccttgtgcctgatccaagacattggatacctgttagcattaatggacaacataatgcagcggagagggaatgcaatgggctcctgagcgccatcctgaactggatct

SEQ ID NO: 122824 - DNA, 394 bp, Homo Sapiens
  misc_feature (48)..(86): n is a, c, g, or t
aagtgccagtaagtggttcttatgtgttttggggggaaaattttattnnnnnnnnnnnnnnnnnnnnnnnnnnnnnnnnnnnnnnncaagatgaaccaaggttttttaaaagaattataggaaacacttcattctttataaaactttctataatgccttatttgaatgttaatcttatgtgctttctaaaaaatgttgtgaaataccaaacttatggattatcactaggttatcaagcatatattagtctttatcagaataaaatgaaatttcataactgtggctattactttgttcttggtccttcacagggcctgctccatcccaccttcctttctgctgcctgatgtctcaatggcttctgaatgactgttctaataaatgatcttaaaac

SEQ ID NO: 122825 - DNA, 1180 bp, Homo Sapiens
  misc_feature (789)..(789): n is a, c, g, or t
  misc_feature (801)..(985): n is a, c, g, or t
  misc_feature (991)..(991): n is a, c, g, or t
  misc_feature (1014)..(1014): n is a, c, g, or t
  misc_feature (1040)..(1040): n is a, c, g, or t
  misc_feature (1091)..(1091): n is a, c, g, or t
ttttttgtatttgctggccatgttttatttgtcctttttcttcaaacaggataaccaaagatacagacagtattcaataaaataaaatagatgaaacaaattctaagagactgcgatgccacatgctacgtttaacctaattttattcatgcttgccttgggatggggaatagatcattcagtaaaaacatacagtaaaaacaaaatgtcttatcatgtacaactttcaaactacaataatgatgtaccttaattacttccatgcacacaagtctaacatttgtttttttaaaaaataaacacaattaagacttctaggagcattttataataaagtaattcctaattaatttttctttgtagatagatcaagcacctccaaaatacaaattcctatacacagtgagcacgttacttaaaatgaacacttaagtaaattaagtacgtggacagccttaggataagctgacattatagatgcagctaggtaggcaacaaaccatagtgccaaatggaaaaagtatatttgcaaataaattttaaaaactaagttaattttttataattaaatacagaaaatatactgatttgctaaaataaataagatgtgatgtattaacacttcactataaagaatgcataccagaacatttataaacagtgagtgagttttattaagaatagtttactacaataaacgctggctaaatagaagtgcattttgtgaagcactatgggtggtatatgttttgccacatactcttgttaccctcgtgccgaattcttggnctcgagggccannnnnnnnnnnnnnnnnnnnnnnnnnnnnnnnnnnnnnnnnnnnnnnnnnnnnnnnnnnnnnnnnnnnnnnnnnnnnnnnnnnnnnnnnnnnnnnnnnnnnnnnnnnnnnnnnnnnnnnnnnnnnnnnnnnnnnnnnnnnnnnnnnnnnnnnnnnnnnnnnnnnnnnnnnnnnnnnnnnnnnnnnactgtncgtgcagctgcatatgaatcggncacgcgcggggagagggggttgcgtnatggcgctctcccgctctcgctcatgaccgctgcgctcgtcgttcgctgcnggagcggtatcactcctcaagggcgtatacggtatcacagatcagggatacgcaggaaacatgtgacaaagcacaaaggcaggacgtaa

SEQ ID NO: 122826 - DNA, 1081 bp, Homo Sapiens
  misc_feature (56)..(56): n is a, c, g, or t
  misc_feature (173)..(173): n is a, c, g, or t
  misc_feature (200)..(429): n is a, c, g, or t
  misc_feature (485)..(506): n is a, c, g, or t
  misc_feature (509)..(872): n is a, c, g, or t
tttgtctctcagggcggactatggaaccccgcacgcgcttttacgtctgcccttgntgctttgccaatgtttcctgcgttccctgatcttgatacgtataccccttgatgactgtacgctccgcagccgacgacgagcgcagcggtcaggagcgagaagcggagagcgccatnacgcaaccgcctctccccgcgcgtgcnnnnnnnnnnnnnnnnnnnnnnnnnnnnnnnnnnnnnnnnnnnnnnnnnnnnnnnnnnnnnnnnnnnnnnnnnnnnnnnnnnnnnnnnnnnnnnnnnnnnnnnnnnnnnnnnnnnnnnnnnnnnnnnnnnnnnnnnnnnnnnnnnnnnnnnnnnnnnnnnnnnnnnnnnnnnnnnnnnnnnnnnnnnnnnnnnnnnnnnnnnnnnnnnnnnnnnnnnnnnnnnnnnnnnnaagaattcggcacgagggttaccattctgatgttggagcggccgcggctgtaggcnnnnnnnnnnnnnnnnnnnnnnaannnnnnnnnnnnnnnnnnnnnnnnnnnnnnnnnnnnnnnnnnnnnnnnnnnnnnnnnnnnnnnnnnnnnnnnnnnnnnnnnnnnnnnnnnnnnnnnnnnnnnnnnnnnnnnnnnnnnnnnnnnnnnnnnnnnnnnnnnnnnnnnnnnnnnnnnnnnnnnnnnnnnnnnnnnnnnnnnnnnnnnnnnnnnnnnnnnnnnnnnnnnnnnnnnnnnnnnnnnnnnnnnnnnnnnnnnnnnnnnnnnnnnnnnnnnnnnnnnnnnnnnnnnnnnnnnnnnnnnnnnnnnnnnnnnnnnnnnnnnnnnnnnnnnnnnnnnnnnnnnnnnnnnnnnnnnnnnnnnnnnnnnnnnnnnnnnnnnnnnnnnnctgtagttttccctttcttgtcatgtctttatctgattttagtattagagtaatgctggtctcctagagtcagttaggatgtgttcccttagcttctatttttttggaagctattgtagagaattggtatgatttctttcttagaaaaaaaattttaaggaaatatttctgggtcaaagatttatttcttaaatgtttgatcaatcatc

SEQ ID NO: 122827 - DNA, 2090 bp, Homo Sapiens
  misc_feature (568)..(582): n is a, c, g, or t
ttttttaaagtttataaagctttattaaacatttcaaacagctgtgcaacgaacacaccaaataaaagctctagaatagcagtccagacgtttcacaagtatggcctcacagtcccattccctagatggactgcctccagttctgttctctgcctggcccatctctctttcccctcaggcaagagagagatggatggatcagactgaaaggacaggcatgctgatctccagcaggcaggggccaggagaaagtctcgtttgccaacacttgttactgaagcgcagaaaaagcagcaagtgacagtcacaaagtcttcctgggtattcttcataacgtacagtctatatgcgcaggaacgaagaagctcctggcgggaggatgatggccactgctcccctctgtcttgtctgaaccacctcggagtccagtgtgctggtcactctgcaatccccatgctaaataaaaactgtagcggcacctaccatatatagctagctattgctaaacctcaaaatcagaccacgttcgataaagcttctttaaaaggaatatacacatgtatttgtnnnnnnnnnnnnnnngggcacaccaaaaaatatccaaacatctatcaaggggatcaaggccgttacgaaacacacaggtactctcccactcactcagctggggactgctagaactacgtgaacacaccatacttcaatgctgcagagcatgcacgggagacacaatgaggccccctccttgggacagttgagaaaggcaggaggaagggcaaaggaagtgaggctgggcgggaaagcttgagcccagacacccaggtgaaagagcaacatctatctgttgcttcctttcttaaaaatgaagtggagaaaatactgaagatttgtggacaactaacagtcaagacatgtttctgtctagcctgctgaacaaggaaagaaggatgaaaaagcgaggctctcgggcgtcagcaatctcttcaaattcgagataagtgcaaaaatgagccctgtcttggacaggtactccccaaaaaaggaaaagggtagaagagaaataaagggaaaccagaagagggactgaggagtcagtaacattctgggaaggaaggagaccctgacaaggaggggtcacagaggtgacaatgagactggcattttatctgccccaggtcacattggggcagctgaccaggatggacccagactcctcacagtaatgaggcgagaggggtggtcatgcggccagccaggacctagatggggacagaacacacacaaccacaagaccacccacgactataggactttacaataaaagcaccggtcagtgccattattcacattgtaaggataaaacatcacaggccaaaaaggcgccgtcaggaatgtgacacccgcgaggctgcgggatttgaaactccaatgctttatgacctatgtcaatgcctcccctcccgtcttctgcttccttggaaagctaacagggcaggccgttaggtgcccacaacgccgggatcatgcgccgattctggaagcggggaatcggagcagtggtacaggaaacagtttccccagcagctatagcagataaggaacagggctgccaggaaaaccaaggcacaaattgtgcaaggcttccgttccaggaggaagctgagcaggtagaagcccatgaacatggagtggctgaaccacagggcggggttgaggggcttggggatgaggaggacgggcagcagccactggaggcaatacatgatctctgccgggcagggccttcaccaaggctgccgggcaccgctgcaggaaccgacctaatgggagccagcgggcgcaggcggctgccctccgctttcttcaaccctcactctccaggagctgagccgctgtgctctctggctgtcagcccgggatcaccaaggcagcagggatcctgcaagccctgccatggcgccgccgccactgtcgccgtctgccgcagcctgcctccacctcagctcgccaccgacgccgcaggaagccggggagacgcccccttagtcttctagtccctcgtgccgaattcgccacccaggcctcgctac

SEQ ID NO: 122828 - DNA, 434 bp, Homo Sapiens
taaagtttataaagctttattaaacatttcaaacagctgtgcaacgaacacaccaaataaaagctctagaatagcagtccagacgtttcacaagtatggcctcacagtcccattccctagatggactgcctccagttctgttctctgcctggcccatctctctttcccctcaggcaagagagagatggatggatcagactgaaaggacaggcatgctgatctccagcaggcaggggccaggagaaagtctcgtttgccaacacttgttactgaagcgcagaaaaagcagcaagtgacagtcacaaagtcttcctgggtattcttcataacgtacagtctatatgcgcaggaacgaagaagctcctggcgggaggatgatggccactgctcgccttctgtcgtcttctcgcaggcgtatagtagtagtagtaggc

SEQ ID NO: 122829 - DNA, 2258 bp, Homo Sapiens
  misc_feature (54)..(71): n is a, c, g, or t
agctaaaattaaccctcaactaaagggaataagcttgcggccgcctgctcaggnnnnnnnnnnnnnnnnnngccggaattcagtgtcatttatttttagagaatcctttttccatattcaaaacaataaaaccagtgatggagcgatcagtattgaaattaattaggccacctgcccattcactgctaaactgtgggaaatttaatcatggtagatgagagatgatttcttccaagggatccattcattaaaaatgtagctgatgatactttaatacttgggtaagtttcaaattatctccaaagtaagtatttccaacttaggttacaagcgactgcttccaaaaagaagactgtttaaagtcaagtcattgctgtgatgacggggcactgggtggggcacacactgggtacctgtgttatgcctgtgctccagcagctcattgcctcccgcatgaactcttctaggtttggaaattccactttaaatatgaggaaatgtctgctcatgtagatgatatgacttgccctagaacacaaatctagaaaatgcagcaaccagaattttacccaagtttgttgaacaccgaaatctagcctcttcccatgactggccccctctctctgagcagtaatagtgagcattgctggccaccagggccacccatccttactagggctcctggtccctactgcacaaaattctgttatttgggattcagacctctggaaaaacaaaaatggagtttctagagttcaattgtgccaaaagacaattgtcatcacatctcctcttggagaagggaacatgtcagggttgtttgtgttcaggcagcaggagttcccctaactcgtgggaaaagcaactgcacctcactcctgtgactgcctccccaaagaatcctggcaaatgtagagagccagtggaacagaaaccaaccccaacagttaccaaggggaaacaaagttttcattttattcaggtgctcacaatgaatcggtctccagattcatttgatcaaaaataattccagctgaaaatcatcacatcagagactcttcacatgtactaaaggtgttgttggtcaggctcctaacccagcaacctgaggggggctgctaacgtgttcatgtgtcccactgtagagatgcaacacaggcatagccaagctcctaggcgtcatgagaaggggaaaggaggctccagatgccaccttctcgctgtgcaaacttgccaggccacagggtatcggacatgccctgtgggccacggggatgcttcaggatggagcaatgtgcccaaagccgggttccttgaggctggggatgtcgttcttcctgtagaagtcagcctgcacatggttggcacggccaaagtcccggtttaggggctcaatgggctgattgatgcgcttcccatagacagaagacgtcagcactccaaccggcctctcctgttcctcttcgttaacatgaagtcccaggctttttgcatgttctctgtcatctcggtgcaacttctgatcataatctaggcgcctcttaaaaatacaatcatagagggaaataattcctgtccgcgccgggcggtagtagtagctgtgctctttggggttcaggcgccgcggcgggatgtagctgaaggcggactgcgccgagacgggcggcggcctgggcttgccccgcagcgtggacgcggtggtctcctcctcgtcgtcctccatgccgccaccgtccagcgcccccgccttggccgcggtccgtcccgcccgcccaggggcccagtcggagtctgcaggcctcaggttgctcagcgccagcgtctagcccgcgtctgtgttcggtcgttgcctggaaaccgccgcctggcgacccggagctgccctgcagcattcccgctccagggtggagcgaccctcccctcctccctcccggcccctcgactacacctggggtctctccttccgttcctcctcgggaggagcccgactgggagacgccgcggggactacccatttccagcccgctcacctttcccatgcagcagcccctgcttcactcactgatcactccttcgcgagaccattagtgactgagcacctagcgcatggtgtgtcaggagctggagattgagccttgaacggagcaggccttgtccacaggaagcttacagtctggagaagacacatgaaagacgcgaagaagccaaatgacttgccgaggctccagggcagcgctgtccaatagaaacatgatgag

SEQ ID NO: 122830 - DNA, 698 bp, Homo Sapiens
ttttttttgaaattcacagtccattaaattcttcccctctcttcttttagcaaacttgtaacatccttttatatcctttcttaacagaaggaaattaagcaaacaaaccagtcttttgccttttctttctctgtttcactcccccttcttattttatttatttattgaattgccatatacggccagttaaaactgctgccggacagtaacatatcccggatgagggtttcgatgggggttttacctaccaaacggacgaaaaacaattgctctatgactgaggaggagacggtgcggagggaagggaggcgaagcaaaagctttccgaatctcgtcggctggttggggtactggctcctaacgtattcttccaaagcacactgagacttttcctgcaagctttccacatgggctacatcagagagaccacaggcatctgaggtgaacaggactatggccttgaggcagctgtactcggctgagtcaacgtgcagcgccttgagcttctccacttgctcttggaagatccgtatgtggtccataaaggcgaccacccggtcggcggacatgggcgaagcatgcaggccggcggcggccaggagcggggcgacgtggaggggcatggagcactgcgccgcattcaacacaaacagctcgctccaggtgaggcgaagcagggcaaactggtcgtgatctgc

SEQ ID NO: 122831 - DNA, 1073 bp, Homo Sapiens
  misc_feature (551)..(562): n is a, c, g, or t
  misc_feature (590)..(601): n is a, c, g, or t
  misc_feature (994)..(994): n is a, c, g, or t
aagatgtttaattttatttaaagagaaacaggaggcaagcagaccagagctagtatggctgttccacaaagtcatcagggttgcagactccttctgtatttctgctccatgatccataacacccagataccattctcaaagtccccatgagagtaacggagctccagcttagatgtccacattgtaggcacggaaaaaaagacaggaaaaatggatttcgtaaatctcctactcatataaatatcacttctatcttgttgacctgcaaggaaggctgagattttcagcccagaaatttgttactaaaaaagagaaaatagatatagggtaggaaaaaagcagtctgtatcacaaactctcatcatttttcattgcaaaatagtctgtaatatcagttattttgtttacttcaaaagcaatacattcaagtttttaaaaaattcctagatttattagactttggatcttagacttcgttaaaaatcacttcacaccttgtcgcacttctctaacagctgtgctcaataatacactgattacatccactgggnnnnnnnnnnnnaataatacactgattatatccactgggnnnnnnnnnnnnaacagtatgaatttcctcttatagcaataatggatgagatttaaatgacagctttctcacattcattatggcatacagtgccccccaaccaagtcatcttggatgtgttgataaaagatttctcaatattcattatactcataagtactctcctctcatgcaaattctctaaaataacactagtgaaaatggtagctaatatttgtggtatgctacgttcaaggcaccattctaagagcttttacatgtaataacttacataatacttccaagaatcttacaataaaggtaatatacttaggtctatcttaaaatgattaaaccaaggtagaggttaagtatcatgatacatataacaaaatgatcaactagtagagctaagataacgttganaaagatatttgttttcaatatggctaaagggcttcctacatttactatattaaaactattctccaatttgctaatgttt

SEQ ID NO: 122832 - DNA, 759 bp, Homo Sapiens
  misc_feature (389)..(398): n is a, c, g, or t
attttcactagacaaaaatctatttttaattgtataaaattatacatataaaatacatagaatgtactaagaagatgagtaaaatctttgacaccagaagtggacagatcaggaaacaatttttctcaagttatttgggatcttactggttggtatttgagaaaaataataaatccaggaggtacgagggcaattcttcccacaactcacaccccttaatccacacgtcccagagaaaggagaaacaggagtgttgatgagtgccagcttataaatgtcaaacagacacacctggtgtgtctagctgtttttgcctttactccaacccgacgtgtttcatggaatacaaacatggggcttctaccccagctctcttctgattagtaagnnnnnnnnnntgatagggcctggagaattcaaggaagcccgtttcaagcactaataaaattgtagctggattccttacctcttacccaacatgatttcaaaagcaagaaagttgcctttcatcttgcccctatcaaatccaaaagagccaattatagcctgtttcataatctatttttattgttgttgttacacttgaactttctgtttggaacctaatctatttctaaaagcaaagtctgtataattgttaagtgggaagtccaattgcaggaatactaaatgttccaagctcagtttagaaagtacatgggacaataatatagtataaataagagatcacagagagaagggggaaatatatattagaga

SEQ ID NO: 122833 - DNA, 1062 bp, Homo Sapiens
catacaagtttgcttttatttccatgttcaacctgcggagaaaaccggccacaacctgcacggtgggggtacaaggcatggcggcgccctcccggtgggtctccgggacacgtccagcactgcccgcaatggggatgcaagtccttcaacggaaatgctgctcggctgtgtacaggcaccgtggaaacatcactgggcgcaggagaaggtgccgccagtggcgtcgctaagtcttcggagccaacgccggcggttccaacagaaaactccaaacaagaaagaagtggaagcgggtgccttaaatcccccactgcagacaccaggggctgaaaggcacaaaaatgtgtcgcaatggcagaatccaggcgcagtcacagtccagagccagagagcacagggaggaggcgggagtcacgcggcttcctgcaggacggcctcggctccacagcacacacggctgcgctgcaacagaggaaccgcggctcacactcgggagtcctgtagctcagcgcgggaacagcaggcggagtccgtccccacagtgctccaggtcactcctgattcccgaggggaatgatttcttcagtgacgaagaactcaatggtctcctcttcccagtcgtccacgttgctgtccagctcgtcagtgtccacccctcctcgcaactccaggcgctcgtttttctgctccatatagagctcctgggccattttccggtacttccggaaatcttccatcatggtgcgccttctctccaccaattcctttgaggctttggactgactcaaacgatccttctgttcaaagatcttagagtatttcttcagatcctttttaatttgcttgatctgttcctggctcaggagtgtgggaggccggggccgccacagcagctggcagaagcggtccttgttgttcttctgcaggaggcgtcctggaaagtccacagccagtacgcgttgtccaccttatggctccaccaggacacagaggtgacgacgtagcgcccagtagggatcccattcgacgtcgcctcgtgccgattcacccacggctcgacta

SEQ ID NO: 122834 - DNA, 3010 bp, Homo Sapiens
  misc_feature (2830)..(2881): n is a, c, g, or t
ttcatacaagtttgcttttatttccatgttcaacctgcggagaaaaccggccacaacctgcacggtgggggtacaaggcatggcggcgccctcccggtgggtctccgggacacgtccagcactgcccgcaatggggatgcaagtccttcaacggaaatgctgctcggctgtgtacaggcaccgtggaaacatcactgggcgcaggagaaggtgccgccagtggcgtcgctaagtcttcggagccaacgccggcggttccaacagaaaactccaaacaagaaagaagtggaagcgggtgccttaaatcccccactgcagacaccaggggctgaaaggcacaaaaatgtgtcgcaatggcagaatccaggcgcagtcacagtccagagccagagagcacagggaggaggcgggagtcacgcggcttcctgcaggacggcctcggctccacagcacacacggctgcgcacagtgctccaggtcactcctgattcccgaggggaatgatttcttcagtgacgaagaactcaatggtctcctcttcccagtcgtccacgttgctgtccagctcgtcagtgtccacccctcctcgcaactccaggcgctcgtttttctgctccatatagagctcctgggccattttccggtacttccggaaatcttccatcatggtgcgccttctctccaccaattcctttgaggctttggactgactcaaacgatccttctgttcaaagatcttagagtatttcttcagatcctttttaatttgcttgatctgttcctggctcaggagtgtgggaggccggggccgccacagcagctggcagaagcggtccttgttgttcttctgcaggaggcgtccctggaaagtccacagccagtacgcgttgtccaccttatggctccaccaggacacagaggtgacgacgtagcgcccagtaggatcccattcgacgtcggaagccatgtagtgctctgcgatgttcatgaccgtgcagtccgaagtgtccacaaacgctaaggcaccgttcatactcctcaggcccgccaacaccacgaactgtccttgggggctccagaagatggtgttcgcctgctgcttgtcgaacatcttgatgagttcaatcttcccgttgtttttgacgtggtagaaagacacagatatccgcggagcctctccgtgcagcacagcaaacttacttccatttggttcccaggcaaaggctatgatggtttctttcatctcgaccacatccacaggtacctgtttctccctcattcggaaaatttcaaaatttgtgacaacaccctgggtgcctttcggagtcctatctactttcacacacaagtagtctccgttcttctgccaatggagcttgcagtccaccacattgaacaggttcctcactcggatctcttgcctggtagggagctgcatcagggttaccctggctggaatatctttgtcttcaggcacccagaaggcgattatgttaccaccaggagaccaagaaaagtcttttatcccagagatcttcaaactcttcttgtccaaaagacccatagaaggagtttcatagatgctaagcgtatccagggtcattctggcaaagaatttgccatcatggctccacttaaaaataggccaatgggctgagctctcacagtgaaaacccctcttcttgtgccccgtaaggatgtcccagatgattatggcctgagggtcatcctgcgtgtccatcagggggctaaaggtcaccaggtacctttcacaaggtgagaagtcaataagctgaaccccttggtggctgaatctctgaatttgcttgaatttctctcccccccatagagcaatgcctctttgatgaaaggtagccaggtaggtgcccttaggagaccaacgcacatacgtctctgtccatctcgctctttcttcaattgagacagggtcttttacgtcattccagaatatggaagtgcggtctccactctcaaaaatcacactgtactgatctctgcattctgcctcttcaagccagtaacgtaagttccccaggtctttgaaaggctgtttctctggaatatcccactcgtcactgatcgtcatatacttgtcaaaatccgtaaagaggttgacccggaatgtgtgctgcttgtcaagcttgtagccgtcggcgttcttcacagcatccacagcgtgggcaggggacgcgtactccaggaaaatatacccttttgtcttcccatcctcttcaggataaaaatcatttgtgattttcccaaacttggaaaagatcttgtggatgacatttttgagtttctcaagtcggtcgggtcccacctgagggacattgtccactacaatcaccgaatcgattccatctgcttcctggggccgatctttgagtacatctcccagtaattcttcctcgctcacgtcgtccacgaagtcctcggggtcgctgaaggagggctcgtccgcgtcgccgttctccagcgcccggggttcggcctcggccgctctgccctcgtttcctcccgcgtcctcggacaccgcctgggcccggctgtcggagcgctcgtcccgagcctgctctcctggggcctcgccctgtgccgggacagggggctcagcatgcgacccgggcagctcctcggcggccggcggcgagggcgactcggacgggccggaggccgcctctgcctcggccgccggctcggtcctcacctcgggctccggcccggcctccgcgatccccacctcctcactggaggcctcggtccccgcggcctccggagcgccgggccccgcgggccgcagcagcccctnnnnnnnnnnnnnnnnnnnnnnnnnnnnnnnnnnnnnnnnnnnnnnnnnnnnctcggccgcctagggcaccgccacgttctccgcgtcctgcatgggcccaacgctgcctactcgcagggctccgcggccgccgcgcttccgactctccctcgtgccgaattcgccacccaggcctcgctc

SEQ ID NO: 122835 - DNA, 978 bp, Homo Sapiens
gtgggatatatttccccaccttgggtcccaccgggttgcggtccatattgccttggtccaaaaaatcccggtaagaggagggttgggccccgggaaatggtggtgcctggctgtgtcaaagcttggtaggccgttccggcgtttctttcacagcaatcccccaaccttgggcaggggacgcgttactcccagggaagatatacccttttggtcttccccatcctcttcagggatagaaaatcatttgtgattttccccaaacttggaaaaagatcttgtgggatgacatttttgagtttctcaagtcggtggggtcccccgtgagggacattgtccactacgatcgcggaattggtttccatctgcttcctggggccgatctttgagtacatctcccagtaatttttcctcgctcacgtcgtccacgaagtcctcggggtcgctgaaggagggctcgtccgcgtcgccgttctccagcgcccggggttcggcctcggccgctctgccctcgtttcctcccgcgtcctcggacaccgcctgggcccggctgtcggagcgctcgtcccgagcctgctctcctggggcctcgccctgtgccgggacagggggctcagcatgcgacccgggcagctcctcggcggccggcggcgagggcgactcggacgggccggaggccgcctctgcctcggccgccggctcggtcctcacctcgggctccggcccggcctccgcgatccccacctcctcactggaggcctcggtccccgcggcctccggagcgccgggccccgcgggccgcagcagcccctcggctggcggcggctcggcggccggctgctgctggccgggctcggcgcgctcctcggccgcctcgggcaccgccacgttctccgcgtcctgcatgggcccaacgctgcctactcgcagggctccgcggccgccgccctcgtgccggaatcgccaccccaggcctcgctc

SEQ ID NO: 122836 - DNA, 747 bp, Homo Sapiens
  misc_feature (658)..(658): n is a, c, g, or t
tttatatattcaaaaaatctttattaagggcctagtatgtgccagatattctttattatatgtgtaagaaaaatattattaacatattgtgggtgaaaacatgcaacactatgaacatagttttcatttttgaatggcttttactttttcagacaatagaaggcaactggaaaagaggcaaggattctaactacatactgcagaaaaaatattcacacctgtcaaattccaacagctggcactgttgttgttctacgaataagcacacacagaatcctcgtgaatagttctttgtctcttgctctagtaaatcataacctgcttgtagcttttttatgaaccttcaggaataactcttcagaggatgctaatacatcattaagattaaattgaacctcaaaggtgggttttttttccaaaatgataaaggccaccaacactgcaaggtttgccgtcattcccttgatctggtaagtgacaccgtcttcagggtttgtgtactcaaagatatgattaataaaacggtgaccaagacgtgtgacgtaatgctggtcatggacctgtggatgcaggaaataggccagaggcaccaggaatacatccttaacttcagcaggattcggctgggcctggaagttgtggtctattaaacccacanatggagttatcaatgtatctgtctctgatactgtgtgatgagagcattcacctctgtggtgttccaaattatgacccagcttacgatga

SEQ ID NO: 122837 - DNA, 1139 bp, Homo Sapiens
  misc_feature (434)..(446): n is a, c, g, or t
tttaagtttttctgtttgtttctgcaaggcctagctatcttattacaatttatatttgctctgcaacaactacaagaggtaggcataaagcatgaaaaagtttctcagttagtacctcgccatgtgttgttcactgcacaaaaccattcactttggacatgaatagtcattccttctattatcttctaaactctaaagcaaagctgctgccacccgtaaatgttctaaaagagtgtactcacaagtaagaaactttctctactgaaggatactgtcacagagtttgttgcagagcatctatatatatatttatttatttattttaaaaaaataaacaacaatgatgaacgaacccaggttcctagaaccaattctcttgattctctacttccacaaaataaagtgtatcatttggccaagactacagatgtgtnnnnnnnnnnnnncacagatgcaagtgccatgcaaaaataaattaaagaacagataccaaaacatacatgtgataaaactacagaaggtagatttttaaaagcatttatataaacataatttataatacttctcttttttcctttatatacagtcacaaagctgtagttatacatctaggatttcctctgctgtacccccacagcgtaatctgtagcgaccagttctccagcttatagttgggtcccataatgcagacaaaaaaatgtatattgtcatggattcgcggatgaaccaggcgactgcataatcaagttttgaaaaacacagtgtgccaccctggacacccctgagttgaatgtagtcaaatataaaccatgccaggcaatgacacatgaaaaataccataatatcccatctgaacacatggtgggctgcccatccaataattaaactggcaacaaagcattctgaaattggctcacaaattattgtagcaggaagcatgttaattcgtagtttggtccacctgatcattctggattgaaactgagaaattgaatatgagccagagttttgcattgcaacttgagtggacattgcaaacctccaacctcggtcagctatcgctttggccataaagtaatcttcggcaatgtactgagcaaaagctataagtcctcctgcttgatccacacatcttttct

SEQ ID NO: 122838 - DNA, 734 bp, Homo Sapiens
accatggaataaacattttatttatttgtgtatgtaacatttattgacatctacccactgcaagtatagatgaataagacacagtcacaccataaaggagtttatccttaaaaggagtgaaagacattcaaaaaccaactgcaataaaaaagggtgacataattgctaaatggagtggaggaacagtgcttatcaattctgattgtgcaacaatgatatacaatccaatgaatgaatgaatggatgttctgcctgaagtttctatttctttcttgaattacttctctttccatatagtttctgaatgcctttaatatcatcctgggaaagtttaaaattttggggatctccatttccataggttggatacatcactgcattaggatcagaggaatgtcccatacccaaagaatggccaagttcatgagttgcagcatacaggaagttaatccctagactgctaccatccgtccagcgttcatcctcatcgaagtgagcatctcctccgagacctgtcccaggcgcaaaggcatgagccagcgtgtttcctggcccatcaaatgggtaggagtccccatgagctcctcgcgcaaagccaatcatgatgtcagcagttccccatacaactttcctgaaatgcagggggatctctttgccccacatgtttaaagcctttgacactaatcgatccactgtaatatgcggtaagtctcgagtatatgatacgatcctgt

SEQ ID NO: 122839 - DNA, 917 bp, Homo Sapiens
aattgaaaatatactgtaacaacaacaacaaaaactgccatatactgaccatgtgaattatcacatatttcctacatactgggctcaagagaagatacagtacaatattttagctgccagtactgtcagtctaaaaagactgaaggcttagtgcattccttggaagacaaatttggcaaacaaaaacaaagattatttcctttgtttccttgagatgcagttaaataaaacagatatccccaaagtaatgaagactcatttcaagtaattactctgcttaccagttttatttacacagtaattgttatgagtggtttttagtgaattctttgtatttacattttatatacacatttatacttgaaaggtaaagaaactgtacaataataaaaaaataagaaaaacaaatacagtaacttaggtccaactgaggaaacaaatacatgaaagtatgattaaatttagtcaggtagtataacctgaatgagattactgccagatgttatattccctctatcaaggataccaataccaaggaagtagttactggagttaaaaggtcattctaaaacctgctaagaccatggccactccttcaatattttattatattaccagtctccaataagtaagtccctataatagcaattaccttttgagggttctactagtagtccttagactagaatgacccatggggtaaaaatatatggacaccctagggccccatactcctaaagaggcagtcactacactaacaaggatcgcaggcttgttagtttgaaaactatatacactaacagaaatagtgtgcttaagtgttgtttcaaactaaactgcaacataaaaacacactgtaaatctaaccaaacagcatgttatatagccatcactcaatacactcaagtgatttaggt

SEQ ID NO: 122840 - DNA, 1283 bp, Homo Sapiens
  misc_feature (114)..(177): n is a, c, g, or t
  misc_feature (295)..(303): n is a, c, g, or t
  misc_feature (479)..(548): n is a, c, g, or t
aaagccaggtagaccccctttccaaaaattggttagggctggttatgggtccctaaacccaactttggagggctgggggggcccgaaaataagccctggggaccgtgaattttnnnnnnnnnnnnnnnnnnnnnnnnnnnnnnnnnnnnnnnnnnnnnnnnnnnnnnnnnnnnnnnnaggaaggaaaacttttaagccggcagcctatggcggttgttttacccctttttccctttaaaaatttatattttccctagggccttaaaattttggagggaggttggcccaatatgtnnnnnnnnnaaagtaaggttcctttccaaaaattcccaagtaaccgtttttcccggcccggcgttgtaaaaaggcggcccgggcctaggttttaaaacggccccctttaggggccccttttttcaaaaaaaatggggtcgggtaaacttgggccccccgggggatatttttaagcggcccccccnnnnnnnnnnnnnnnnnnnnnnnnnnnnnnnnnnnnnnnnnnnnnnnnnnnnnnnnnnnnnnnnnnnnnncaagtgttactcttctttaaacttttatatatgttaaggctcttctttttcttttcaatatactctacttagaattttaaaaaataaactttcttttttggtacctcttgtttcctgtattagcctgggaaacatttagaaatacatctccctagaactcttctgtgcaaataataaacataaataatattaacatttatttatatatattaaaaaaggccatttcaaggttttcactgtgaccgccttgaagatgctcctataagtagtctgtggtctggcccttgaagtcctgatcggcctgagtggggctggacaggaagtccacgtcccgcttgtccatctgcaagctgctccgtccgggagaactgtaagacactccccagcctgctgaccagcgaccaggaggaaatccagttgagtaagctgaaggtaggcaggctgaagagggaagacaggggggtcaccctgccggtgctggcagctctcaccttggactcctcaggacaccctcctggactcctcaggacagcctcccctggcgcaaaggacatgggggccggtgcgctcagcccctccagcagggtgtgctccctcactggcatgctcatgtccactgtgctgggctccccgctggcctccagggagcagaccggctgctgtgtgtgccaagaaggctgggacaggggcacagaggtcttgactgtcctccctgatgagtgctcggttcccgag

SEQ ID NO: 122841 - DNA, 592 bp, Homo Sapiens
  misc_feature (235)..(495): n is a, c, g, or t
  misc_feature (514)..(529): n is a, c, g, or t
ggtcctattctaaagggaccagtaaaataatgatcttacttccaaatctccttggaatttcacgacagcacagactgactttataccttcatttccagcgtggtaaaaatcgattaacacttctaatgagtcaagtcctagggttttttggttttgttttgttgccaacgaggaacacagctctgggggaatggtgtcatccacctcgctttaaaaataagcacatgatggctgnnnnnnnnnnnnnnnnnnnnnnnnnnnnnnnnnnnnnnnnnnnnnnnnnnnnnnnnnnnnnnnnnnnnnnnnnnnnnnnnnnnnnnnnnnnnnnnnnnnnnnnnnnnnnnnnnnnnnnnnnnnnnnnnnnnnnnnnnnnnnnnnnnnnnnnnnnnnnnnnnnnnnnnnnnnnnnnnnnnnnnnnnnnnnnnnnnnnnnnnnnnnnnnnnnnnnnnnnnnnnnnnnnnnnnnnnnnnnnnnnnnnnnnnnnnnnnnnnnnnnagagcgaaactctgtctcnnnnnnnnnnnnnnnngaggtgggtggattacttgaggtcagggtttgagatcagcctgaccaacatggtgaaacccta

SEQ ID NO: 122842 - DNA, 1061 bp, Homo Sapiens
  misc_feature (483)..(483): n is a, c, g, or t
  misc_feature (840)..(840): n is a, c, g, or t
  misc_feature (908)..(908): n is a, c, g, or t
  misc_feature (912)..(912): n is a, c, g, or t
  misc_feature (915)..(915): n is a, c, g, or t
  misc_feature (943)..(943): n is a, c, g, or t
  misc_feature (948)..(948): n is a, c, g, or t
  misc_feature (967)..(967): n is a, c, g, or t
  misc_feature (972)..(972): n is a, c, g, or t
tttttttgtctgaaaatgtttttatttttacttaagcacaaaaattgagacgtaacatatacatttgtacatagaggggaaaaaataccagaaaggagttcataaaaccccagccgctgccagtatcattcagtggctggggcctgcggctgtctcgggcccagagccggaggctagttttgtgggaaggcccccgagtccacacacccactcggcagcctcgagggacagggtgctggttttaagggtggactcctacgtgtcccatcacagtgacacaccccccagggtgtgaaccagactccactgggtattagggggccctccgagagatggcttatcagtccctgctgagggatgcggttctggactggctggccctgcccttcctgaaagtctggatgctgctgatggggagcatgggcggggcaggtggcatctgaggcagagacaaaggcagccgtccctcggttcgggaggggnggggggtagtcacagcaaacagggccaaaccaaccacaccaggacaggcagaccccaccctcctagaagacgctggacgctaggcaggacagcttggggtcagtgtccttggtcccttccagtccccaaatcccaaccaacggcattgtacattcagaaagtctgaagagagtaaggctcagcaaggggagggctccagagggctcaaagtgccatcccctgcaggagggtgcagggggataaagggctattaatccgtttctcaggaacacgaggcagggaagagcttaaggcaaccagcttctctggatccgtttatgaggcagagaagagcttgaggcaaccagcttctctggngagctggagacactggagtgactggggacagatctgtcacagaactgtgagaggcttatcccagccangcanganggactgggtgtgtctaaaagcagatcanggcangctgcaggtgggggatcanggcangacctgaagaagtccactggatggccagtcactgtatccactggtgggggtcggtgtgcagacaaactcatccatgctcaagaaagaaa

SEQ ID NO: 122843 - DNA, 2267 bp, Homo Sapiens
  misc_feature (53)..(67): n is a, c, g, or t
  misc_feature (287)..(301): n is a, c, g, or t
  misc_feature (976)..(976): n is a, c, g, or t
ttttaaaggggtggggactctcctggggtgtttccccaattccccagggtgannnnnnnnnnnnnnnaggggtggggagacccagacctcccactgggggtaattaggggggcccttccggaggagaatgggcttattcagttccctggctgaggggatgccggtttctggaactggcttggccctggccttttcctggaaagttgtgaatgcttgctgatggggaggcatgggccggggcaggtgccatctgaggcagagacaaaggcagccgtcccctcggttcnnnnnnnnnnnnnnntagtcacagcaaacagggccaaaccaaccacaccaggacaggcagaccccaccctcctagaagacgctggacgctaggcaggacagcttggggtcagtgtccttggtcccttccagtccccaaatcccaaccaacggcattgtacattcagaaagtctgaagagagtaaggctcagcaaggggagggctccagagggctcaaagtgccatcccctgcaggagggtgcagggggataaagggctattaatccgtttctcaggaacacgaggcagggaagagcttaaggcaaccagccttctctggatccgtttatgaggcagagaagagcttgaggcaaccagccttctctggaagcctggagaccactggagtgacctggggaacagatctgtccaccagaacctgtgagaggcttattcccagcccaggcaggaaggactgggctgtgtctaagaagccagattcaggccaggcctgcagggtgggggagtcaaggcccaggaccctggcagaaagctccagctgggatgggcccaggtcagcctgtgatcccaactgtgtgggggtgtctgtgtgtgcacaggacgaagagaacttcagtcccactgcttccagagacaaaagaatcctaccaaaccatcaccagagaaggaaagagagctttgttttttttngtacatagagggggaaaaaattccctgtccctcccgttccagggagagctggtcgctgagggaggaggaagagccacggcaagaaccctgccaggtctgtgctgggcacaaccaccaccacataaggcacccacggaaagtgcagctcagaaggcaggcgagagaaaggctgagggggagagaagagaggaggactaattcccctggaaggctccttgggcagcagatgaagcagctctgtggaaggttctgctgctgaagatgccctgggaaaactcctcctgggcctgctggaagctggcccctgtccgtcggtagagggagtgcacccgctgcaggaggaagactgagagcacggcacagagggtgaagaagccagccaccaccatcatgatgactgatatggccagggaatgattatccagtgtagacagggctgcaatccaaccgctgtcccccaggccagggatgccaaccaactggatgatgtagatccctatttgacaaaaaaatacaaagaagaacacaaagaagctgaaagagttgtcggacctaaaggccttatagatgggtcggtaccaacaaaggaaggcacagggagtgaagatcagaaaccacaggatggagaggccaaagtccactcccttggagctgttgcccgagaaccaggccaggcaggcaagcaggttcagaaacagagtcactgaatgcaacatccacagatagtagagcatcttgcatatccgctggtagtcggcagggatctctgtggagaaatcctgatagaagcagggcttcacagggcaccacgagggcagagggggccagttgttctgtctcacatgcaagttggctacagtgttctgcagctcccgctccttgcgttccagctcggcagctttcctgtccagttcttcctgctgccggagcaggcctgcctgggctgcagacaccacggcctggggggtcggctgggttggttccactgatggctggagaaccgctggctgtgaggacccagggagttgggtgacaggaactgttgtcgctgcatttgtctctgagaaggggttgaattccgccaggccgccctgcggggcgttggtcagctgggtcacagagggatcctggaaggggtttacatccactgggtccgcgaaggggttggtgtcgaaagccgacatggtgatcgggggccagcgggcgaactccgcgaacgctgctgcctccgggcacccagacccagcggcgcttcgtgtagaccctccacttccgggagcgaggcagcccc

SEQ ID NO: 122844 - DNA, 712 bp, Homo Sapiens
ctagtcttctaggaccctttatttgggaacataaagggacaggctccctgagcgggtgctgatgagcccttccctcccctctgagtccagtggtcccctaatctgccccatttccatgcccacgtgggtaccatttttgtagcacctgccattcctgggccatctaaggggtcagccttgagggggtacacgagaggcaaggacccccattttccctgagctccacctttccatcggatcccacgctccttatgttgaccagggggcaccatggacatggagccacatcctttacgttgccgtctcttcctgactcccttgagcaacactcactgcgtccctgatgccctcgtgggatacacttctggggtagggctccccatcattgagtgacagcagaggagggccgaagctttcagccggggccatggggtggcaaggggagaagatgcagttaccagggctggtgcctctattccgacgtatcatcacctgcatggccttgtgcttgatgcccgatggccacattaagtccctgggctgtcactcaagggcagggaccacatcttcatcttggagtcatggtgcctaacagcaaggctgggtggacagtcaatgctgggccacaggttatccaggttggcatcaccaggcccaaatgcccagcttggagagccctgggggaggcatcatcctccagagcctggagggg

SEQ ID NO: 122845 - DNA, 2036 bp, Homo Sapiens
  misc_feature (17)..(17): n is a, c, g, or t
  misc_feature (635)..(725): n is a, c, g, or t
aatcatcaggttgcgtnttgagagttgcgcgcgtgatcgtcgcgacgagtgcatgtgatatctcagtagtggagcgcaggagagttggtgtggagagagagaacttccaccgtgtgtgtggcgcggacgccgagtggtggagaagggggtatcaaatatattttggctacgtctgaggattatgtggacgttctgtggtggagaacgtgttgagtgaggtggatcaccagactgttccggagcgagcggagcaggcggtggaggaggagacctcggtgcgcgagtggtgtgtcacaggcgtgagctgtgaggatgtggtggtcggcgcgccgattccccgagggtattgggcgggttgcatcactggtgtgtgggtattcggttgtggagtcattctccgcggcgggagggggtgtttcaaatatgtcgtatatattctcacagccaaaggttgcgtgtcggggagggagcaggtctgtggaggtgagggtttgggaagttggcggggttgggggccttggtagcgatgtttagcggggttttgtagtccgaagcattcaacgaagcgccgatgggcgccgcggaggagacaggtggagggctatggtgggtttgtggggggaggtgtggttggnnnnnnnnnnnnnnnnnnnnnnnnnnnnnnnnnnnnnnnnnnnnnnnnnnnnnnnnnnnnnnnnnnnnnnnnnnnnnnnnnnnnnnnnnnntgccgttgcccgaaatgacaagtaccgtttattgtcgttacacaaatgaacccagcctctggcttgggcaccgtcccacggaccagcagatgagcatggtcagccgacccctttccccacccccgagtcatgtgcagtcatacactccaggcagaaagtcgcagtatcgaataccggacacaggttcccttggcttggtggtgcatctctgatccacagactggcccacctctcggagtggccaacggagtcgctgaaacgttgtcaaataagcaagtaagtgcaggagccctgggctgggggcctctggcctctgcagccgggtgggaggaggatgtccaaggtgtctgcggggtaggcctcggctccacacctccgctgtgaccacagcctcaggtcaagctgtgctggggccatccaccttcctttgccatttagaagatggggcttggagcttggcaacacagaaattgacatcagccttataaaaccttggctgaacctaccgacctccaggagaatttcagccaaaacaaaaaagcaaatacacagagggaccctggaaccagaatccctccccatgggaaagacgaaggcacagagattcgagccaagtttcccaacatgttggtgtttgcagaaaagtccggtcacgtcacacacagcacagaggcaagaagcgaaggcagtggcattcacaggactactttatattaaagtttattacatttggaaaatctactgtacagggaaaaacccattggattaagtagagttttgccaaaagcaaaagactatcactctttggaaaatattcctgattccagcccagggcccagggtggggccacaggagctaacggagaacctggccttggatggaggcgctcagagccagctctgcccaagacacccctcgtcaatttccaggaggaagcagcccctggagacggcgccacaggcaggacgggcgtggtctgcaggaggatctccaggcccctgccgccctccctacagtcctctctgtctgaaggctgagtcccagcattcacttctcacacgggcttctccaacgtggcagcggcccaggcctcagcatggccctgagcgcatggacacaggcacgactgcttgaaagaggcggcggccccacggcagcctggactggccagcctgccaacagaccaccagaaacggggccaccagacagatagtccataccctgttgcacacatgagcgacaaactcaagagacaacacacaaactaagcctacattttggcttccagatttggttctcctagtttaaaaa

SEQ ID NO: 122846 - DNA, 778 bp, Homo Sapiens
agaaaattttggaatttattacttccaagattatttttatgtgaaatacatttctgaattccaaacaaatggattacaaataaactttcaaaatgcaacttgtttctaagttgaattctgcctttaaactgtttgggttaatgagaaacagtaaaatagcaatgtaataatataccttaaaatgtttaataccttataggatttgctagcaaaattatttagattaaggatagttattcttttatttaacaatttagaaaaaagttaaagtttgcaaaaacattatataataatgaagttccaacagctactaacgacaataaaatctattcaaagttttacaaagcccttttaattgcataaattgctaatgtaatactattgatgatgatttgctgaaatgctggtatacaattaactccacagtcattaaattaatggtaatttgtcttatttgatattcaattatagaacaagagtattgatgttatttggcttccaacagcgcatttccagagtcagactatgcctttcttggtcctgaatcagagtttagtataggaaggctgatgattgagcaatctaattgagataatagaaagtcatgaactagatcctcttggtgataattatttcctaattttgtcctactattttctacaaatgttgattgttcttgaacagaccactgctgacttataattctaatgtctatgctttgctttcttatatgatcaattagaacattactatttggataagaatttcttttataatt

SEQ ID NO: 122847 - DNA, 1271 bp, Homo Sapiens
tttagattttccaactacacagtttattagtaaagtatctcaacaattctcagagcagtaaaaaccaaggcatccccaacactgcatgcgtgactagaccagcaagaagtcctcaacttgcaccagtccacatggcagcagggggcagtggtgagtcctccggagcccagtgcctgggcctgactggccccattgatgagtgagctggatgacagggccgctggagataggacaatcggctcacagggtcctttcatgtccgatccccttagcattccgagggagccacaggaactggggcggtcgtgcaagcgtcggcatgaacaggggtctgtttggagtctgaatgctctgctgcctctgggtggcctcagccacactgggaacgactgtctataaccctgggaactcgaagtgttccatgctcactcgggaagcactgataaccttccccataggggaaacgactcacaaacacaggactccgtcagtagtttctgcagagaaacttaaaatcatgaaaagggtcatcaatcaacagatctcagaagtcactgtgcagggactactgagggccgcgagaggaagtgcaaacctcagctgaaaagcaactcagggtggctgagtgagccctcacttcccggaccacccgcacgtgcagccaacacctcccaactacttgggccaagtcggctcttcgcctccaagtggaggctgctgggtctcttcggtctcctcctcgcccaagtcctgtttctccctctgggcgtcgatccacctctgcggtgcgatcattttcttcggcccatggggcggcgggccaatgagagcctcaatgtcctcatagtttatcacttccttttccagaagggcgtttgccagcgcctgcaacttgtccaggttgtcctgcagcaccttctcggtgtgtctgtaggccttggccaccagcagtcttgcttcatggtccatcatctgctgcaggccttggctgaaggggtgccgcccgatgcccatgaggccctcctgcgcctcagggaaggagatgggcccgatgccaggtgccatcccaaactgcttcaccatggagtaggcgatgcgggtgaccttcctcaggtcgtcctgtgccccagaagtgacctcgttgaaggacagtgcttccgaggcccgtcctcccagggccatgcacatccgctcaaacagctgctccttggtgaagaggtgctcggacgcgtgggtcgacgatatcccgggaattccggaccggtaccagc

SEQ ID NO: 122848 - DNA, 913 bp, Homo Sapiens
  misc_feature (825)..(842): n is a, c, g, or t
tttaaccgtcaattagtaaaagtactttattttcctcttgtatttgctttatatcttgctttacaaagttacgaagttcacagctttataccaaaatgtaagaaggctatttgcttataaacatttttgcagtcaggtgtcatctgatttcattcttctaatccatattcaatattaaaaaaatcagaaaccaagggtgctggagcagctctagggcatatatttctcttaaataggagaaagattttcaacagcttttcctccttgaccccctcctttcccaatttatttgggtcactaccttgaatttagagtgaatctgggaaatgtagtcaccaggtaacccagcagggccatatacttgggcttggaggtgaggttagaggttactgtctaatacagtaggtctggtttctatgaggagctcatatccacttgcataaggaaacctagtctatcccaaatcacctccaccacaacttctattcctgtctattagaccacttctcttaaacccgaggaacctgatgatttgggggcagggataaaaccattattttataaatgtggcaggtatggccttcgtaattctagaagctcccgtttaggtaacagaaacaaaatttagatgtaagcataaactgcagttatttgagcaaaccagagcatatgtgctgttcaaatcccacttcacaatatacttcaatctcacctccaatgaattctcttccataaaataaaccattccactaagtatatacctactcccaccaaatcatccacatgcctcatcactaaagttgtcccttgtataatctaccagcnnnnnnnnnnnnnnnnnncctagcaggcggccgcaagctttttccctttagtgagggttaatttcagcatggcactggccgtcgttacc

SEQ ID NO: 122849 - DNA, 1046 bp, Homo Sapiens
  misc_feature (84)..(93): n is a, c, g, or t
  misc_feature (117)..(130): n is a, c, g, or t
  misc_feature (201)..(223): n is a, c, g, or t
  misc_feature (952)..(971): n is a, c, g, or t
ggaagagaagagatgcaacacaccagaagaagcagggcaaaaatcagaacatagggagtgggacaagcaaaagggggtagaagnnnnnnnnnngatgataccagccaacaagccacnnnnnnnnnnnnnntgagggcagtgagaggcaaataaaaaacagaagcaagatgcgagcgagaaaggaacaacccaacagacgcnnnnnnnnnnnnnnnnnnnnnnncgcccacgcacaccccaccgcccccccgaagccatgtcactgaaaaggcctggggggatggtatatggccctttccccaccaggcgctaaggggaacacccccttccccaggtcttttatttgtttaagttatttttgcacaaatgactcttttatatttaattcgatttcattgcctcccttcttaaagccaacaggctcagtttacaaacctgtgagctactgttggctgctgccctccttcccagtgaaaggtacaaagcaataagcatcatgcatcctccccttacccctccaacacccctctgcctctggctcaggttgctcaaagcacagatcctctcttaccccgtccccaggtttgaaacacatagcctcatttcaaggtgtagccaggttcccccgactttcctctgggatataaaaaagggggtaagggggcaaagagagccctctgggcctctcctcccatacacactacactgccccttctccccccatcaaaacgctcagagacgttgtgatgatgcgactgaggattatgcaacgtggtccaaccggagcggccagcatgaccagctgtccaggggctgcctcctgccttttcttttgtaaagacaagacccttgggagttttaattctgttttgtacttgccctgtggggcctccactgcttttctatgggagacactcttaatttaacagatgagaatattttgaaactctgnnnnnnnnnnnnnnnnnnnncctgagcaggcggccgcaagctttttccctttagtgagggttaatttcagcatggcactggccgtcgttagaacc

SEQ ID NO: 122850 - DNA, 505 bp, Homo Sapiens
tttgccagattttctttatattctcatctgttaaattaagagtgtctcccatagaaaagcagtggaggccccacagggcaagtacaaaacagaattaaaactcccaagggtcttgtctttacaaaagaaaaggcaggaggcagcccctggacagctggtcatgctggccgctccggttggaccacgttgcataatcctcagtcgcatcatcacaacgtctctttcactgggaaggagggcagcagccaacagtagctcacaggtttgtaaactgagcctgttggccactgtccacaggtgcaggtggctggcaggggctcccaaggctcagcactcagctctccccaatcagggtcagatccagctccaggtatggctgctatggggccagtttcctcctcttgtttttggcaggacggccagggcgggcccggggaggcagagggacagctgctcgggctgtagggctgggttccaaggtaatgtcctggcgggagctattgct

SEQ ID NO: 122851 - DNA, 728 bp, Homo Sapiens
  misc_feature (46)..(59): n is a, c, g, or t
  misc_feature (69)..(256): n is a, c, g, or t
cccttgggggccccgccccccaaaaaatgttttaaaaaatttttcnnnnnnnnnnnnnncccccaaatnnnnnnnnnnnnnnnnnnnnnnnnnnnnnnnnnnnnnnnnnnnnnnnnnnnnnnnnnnnnnnnnnnnnnnnnnnnnnnnnnnnnnnnnnnnnnnnnnnnnnnnnnnnnnnnnnnnnnnnnnnnnnnnnnnnnnnnnnnnnnnnnnnnnnnnnnnnnnnnnnnnnnnnnnnnnnnnnnnnnnnnnnnnnactttgtgtgttgtgttttattaacaccaaaatgtgccacatcatggtttagaagaggtggagggtgcaggcaggaggctccgaaggcccaggcagggccgccagcctctggcctctccatggactccagctggagagcctgtccgctcagcaacaccccaggcagcaccaagaataacatgcccacaagaacatcatggccaagagacgcacaggcgcatcccgcttccaggcacctttcccacctggccagaagtccctgctgtcatcccgacttgcacggtggttttggtaaccagtgggctgtgcaggagtgaaagtggggtcactttccttcctttcccagctgctggagtcggaactgctgcctttgtttggcggccttgtttcttaaatcagttccctcttaggatttattacactaaaaaaataattagtttttgacaagaaataggagaatacagaaacatga

SEQ ID NO: 122852 - DNA, 1073 bp, Homo Sapiens
gatggctcagctcagcccagcccttggggcccctttattgaaacaactcacagcacagtatttgagacagacagtgttggccggcggaaccccaggaggctgagaagtcgaggttgcggcatccctcactgccctcctgggggaggcatcctccaagcagacctgagcggccccgggctggggcgggcgatccacacacagaggcgataagagcacttggaatcagggcagccatgcagcactgccctaggcggggatcccccaaagtctgacagtttgggcatcagtggggtggcaggtgccccctcagctgcctttatgagcgcgctcttccacgtaaagctgcatctttaaaatgtccgacgtcatggtttttagtggtatcagccgggggtcatgcatgtggacatcctgctcatccgccaggatccaggggaaatccttgatgacctggatcttctccatgttgcgagtggcggcttctctcgtgtgcaccaggactgtgaaggtacagcctggggggttgtggtccaggacggcatcgcacacgctgatcttcaggatgaaggcccggagcagctgctccacatgagacaacagcgagtctgagctgatggacagcagtggaggctgggtgatctcaaagacgaatttctccactgggcggtgctctttatccaaaatcaccaccaccactttctccacatcattcttctccaggagtggcttgacgcagtgcagcgtgtcctggatatactgattcagctccgggtggcaggacatctggaccggcacgttgtacttcttgcgtttctggaagatgcccacggggtagacctcgcgcacgtagaggatgagatgcacagccacctccaggaactcgcagagcacatcggccaccacttggccaaagttgaggtcttgtcgtgtgagcgtggtcatccttcccgctaccggctctgcgctcggttcccgcccgagatcgggcccggccccgccgcggggagccaccgaccggaccgatcgcgcctcccgctcaacccggggcctcggcgccgctcggtgacgttccc

SEQ ID NO: 122853 - DNA, 695 bp, Homo Sapiens
tacagactaataaatctttttcacagtattcagttttctcacctcttgctattgtatattgtagattttttcattcatgtgttatgtaatttacactgatctctgctatgttaaccccccaaataagttatgtgtcctttaaggttggttactataatacccctcagtaagattccagtattaatttctgggcagtttgttctctgtatacaattgcaaatgataagcatttttgtgagtgaccacctttgcaatatgtttgttaatttacttcatgttgggttctttctgaaatgtacatctttacatataaaaacctcacattctacttgatttacacttcctagtctacattacatgtggttgaaggttttatacattctatatgcttttactaaatatacaagatttactactagaaatttggagaaagaacactaacacatgtacttgtgatttgttcatgttatattaaaacttgagatttgtgtatttatgtagagtctgtattgacaagactgttgttttttgctccttgagctatataataatctgtgtattggattgttgtcttgatttggtctaaatttgaatatatatgagttacttgaatataacaaaaatgaattttgtttgatagatttatattgtaacctttttctagttcttgaataaatatagcctgctttcccttg

SEQ ID NO: 122854 - DNA, 817 bp, Homo Sapiens
  misc_feature (730)..(730): n is a, c, g, or t
  misc_feature (737)..(737): n is a, c, g, or t
  misc_feature (755)..(755): n is a, c, g, or t
cagagtgaaaataaatgattttattgcagggccaatgataggtagtcacaagggcatgaaatggcagatctcttgtctgaagcagagaaggcacactggcagactccatgtgtgtcaaacgctgtgcatgaatcaggtttttagaaggaaggtaggagaggaaaactactcactagcagaactgaactgctgtaaaataggttaaattctttgaaaagtgaaaaatgatagtagcaaaatcatgaagttgtatctgaaccagagccgtgatgtaaccaagtaagatggaagtttccatccagaggagttaattccgaacaagtcacagaaaggtgagagctgccggttccggcacgctgtcttctggagtgccagtgaccgggcaagaaatttgattctttcctttgattctcttgggaaagaacacatttcccaagcccctggagacccacagggtttggcactgtccgtgaggctgtgctcctgaggacggacgttcaggaggccgtggaggagcagcgctgcaggagcagggtgtggcagctgtcgcacactcgcaccggcttggggtaggagggcagggctagctcgttgctggagcaggtgttgcagaagatgtggccacagttccggcagtggtgctttctccgggaaatggagactccttctcacactgcctacagtgtgtcgcttcgtcatctttcagccaggcgtgggcttcagtgctggntcactcntttatatctcatcttcanctggactgctggagtgcagccatttctgagggctgtctgctctcgcaatctctgcagtctgc

SEQ ID NO: 122855 - DNA, 1415 bp, Homo Sapiens
  misc_feature (44)..(44): n is a, c, g, or t
tactcactagcagaactgaactgctgtaaaataggtaaattctntgaaaagtgaaaaatgatagtagcaaaatcatgaagtgtatctgaaccagagccgtgatgtaacccaagtaagatggaagtttccatcccagaggagttaattccgaaccaagtcacaggaaaggtgagagctgccggttccggcacgctgtcttctggagtgccagtgaccgggcaagaaatttgattctttcctttgattctcttgggaaagaacacatttcccaagcccctggagacccacagggtttggcactgtccgtgaggctgtgctcctgaggacggacgttcaggaggccgtggaggagcagcgctgcaggagcagggtgtggcagctgtcgcacactcgcaccggcttggggtaggagggcagggccagctcgttgctggagcaggtgttgcagaagatgtggccacagttccggcagtggtgctttctccgggaaatggagaactccttctcacactgcctacagtgtgtcgcttcgtcatctttcagccaggcgtggcccttcagtgcctggttcacttcttttatatcttccatcttcagcttggactggctgaggtgcaggcccatttcctggagggcttgttcctgctcctcgcagatcttctgcagctctgccttctcgtcctgaagctcccgcaactcctttttcagtccttccacttgttgcagctccattctgagtagagaggaagtgtctttctcgtgctgtaattcgcgctgaagagcctgtctttgctctttttctgatttcaattctttctccaggcttgagcattgctcgtgcagctgggagagctgcagctgcagggcgccgatcctcccgcccagctcctgctgcagcttgtggctccgctcctcagccccctgcctcgcccgctccgagtgctgcaacctttcttccatttgtttcatgctggacataacttggttggtttttccttcaaaggatgtgatggcttcattcttctgctgcaaactgctctctgcattctgagctttgtgaaacatctgtaaattaatcgctttgacttcttccagctgctggcggagggcaactagtgtgtcctgcttctcgtgggtgtccttttccagtaacttcattgcaatttccatttcggttttcattccaatttgtaactccagttctttttccagttccaaccggactttcttctcctcttttagctgcttccacacatcactgtacatttcatccagaccttgccgagtttgcttgtaaagtctccagctcaactttggtatcctgttcggttatgtctagactcttatcgcttccttttcgaattgtttcattttgtgctcttaactgctgctgttcttcatttacgtgagccaat

SEQ ID NO: 122856 - DNA, 915 bp, Homo Sapiens
  misc_feature (62)..(106): n is a, c, g, or t
  misc_feature (110)..(144): n is a, c, g, or t
taatcaccacccccccaccaacacaagtcgtatacgactcactatagggcgctagcgcgtannnnnnnnnnnnnnnnnnnnnnnnnnnnnnnnnnnnnnnnnnnnnccgnnnnnnnnnnnnnnnnnnnnnnnnnnnnnnnnnnncagtcgacggtaccggacatatgcccgggaattcggccattacggccggggatacctttcactgtgcaatctcaagaggaagattttctaaattagacattgtctttaccttaaagaagaaaattgtctatttcagtgtcttttttagcaagattgaccaaaacaggtggtaggtgtgtaatttttaactgtcatgaaatactgtaatgcgcacctttgctaataaggaaatggtctccctttgaattatgggaagtttcttgtctgtgatatggggtgtctgtgtacatatatgtatatttccttttttaatacaggataataatatggggtcttgtccttcaccttttaagttcagggaacagtttgtcctgaccacacatatgttatcagtgtaatgctttatgaagctttagaaatgagctcatgactcattaaaaaataataaacatgatgctattttaatattttcaaataaataatctgaggatgtgtttcatactttagcatcaacgctgagttgtgccttgtagaattgcattgtctatacatgcaaaagactattaagttaggatgaactagattccctaattacagtgaaattctatcttgcaaatgctatagaataacttgcattttaaagtgtatttgcacattttacatatgctatgtggttgcctttgggttttctgtacagattgtttttgttattaaatggaaaaggcctgaattatgctcttatgtgaagtaaattgatataacctaaaaaaa

SEQ ID NO: 122857 - DNA, 575 bp, Homo Sapiens
  misc_feature (273)..(336): n is a, c, g, or t
gtctaatttattctttattttcttccgatgttttatctttggcacatttttatcagcaggtcttactattttatctgctttaatccattcatcgtatctcacattccatccgcagtaatgcaccaagtaaaggacctctccaccttcgacatcagaatctttaatactagcttcatacattttttgatttttccctcgtccataccgcacttggactttcatgcctggtggatagcactcaaactcctcttcctcattgttgtcatcatcatnnnnnnnnnnnnnnnnnnnnnnnnnnnnnnnnnnnnnnnnnnnnnnnnnnnnnnnnnnnnnnnnttctttattcgtttcatctccagattttgctttttcttcctcagcttctacctttatgttgagggattcatctaccctagttgtgtcatcatctttgtcgtccagattttcattgtcttctggttttttaatgttaacttctttttcctgatcagaatgtgtaggtatagattctaataaattctttttacttcccagagagggcttaatattttcttttctttcaatttcatcctcaa

SEQ ID NO: 122858 - DNA, 712 bp, Homo Sapiens
  misc_feature (653)..(671): n is a, c, g, or t
gaggcactcatctactgaatgacctctctacttccccttcttgccattattaacccatttttgtttattttccttaaatttttagccatttctccatgggccaccgcccagctcatgtaggtgagcctgggcagcttctgttggcagagcttttgcatttcctgtgtttgtcctgggttctggggcatcagccagctaccccttgtgggcaaaggcagggccacttttgaagtcttccctcagatttccattgtgtggcctggtgggtcagggggagtctttgcaccaaagatgtcctgactttgcccccttgcccatcagccatttgccatcaccccaaacaactcagcttcggggccggtgaggggaggggcctcccccagcacagatgaggagcagctggggtaggctgtctgtgccatggccccccactcccccttcccttggagggagaggtggcaggaatacttcacctttcctctccctcaggggcaggtggtggaggggcgcccagggtcgtctttgtgtatgggggaaggcgctgggtgcctgcagcgcctcccttgtctcagatggtgtgtccagcactcgattgttgtaaactgttgttttgtatgagcgaaattgtctttactaaacagatttaatagttnnnnnnnnnnnnnnnnnnncctgagcaggcggccgcaagcttattccctttagttgaggg

SEQ ID NO: 122859 - DNA, 303 bp, Homo Sapiens
ttttttgtagacatattttcatttctttattagaaagaggtctctacaccatagccacctctctctgttactttacacatctttctttttctttttcccttagaatactgtacagcggacacaaaaaaatcccaaggcaggaaaatacaaactggcatatttaatcaaaacaagatcatatgaaataacaagcaaagtgaaatgtctgtcaatggttttaattacagtacaaacaatataaataaagcatcattgagtcattgtgaaacataaagttgctgaatgaggtaatagaaaacatcc

SEQ ID NO: 122860 - DNA, 974 bp, Homo Sapiens
  misc_feature (411)..(411): n is a, c, g, or t
  misc_feature (597)..(597): n is a, c, g, or t
  misc_feature (726)..(726): n is a, c, g, or t
  misc_feature (852)..(852): n is a, c, g, or t
  misc_feature (867)..(867): n is a, c, g, or t
  misc_feature (889)..(889): n is a, c, g, or t
aaccaaggattcaaaagataatttattagtctgagaagaggagtcacatactatacccagtaatacgcttcttttatttttgtgcctttatcttaaaaatatatttaaacaaaaacaaagataatattgaattttcccataaactttgctttcttatttacagtgttatattgtaaataactttccattatacacaaattaaggactgtgcattactgtatgttctctttacatattctttcataatatagtccatacagctcgaagctatgcaatatttaagcttagaaaagcttgatgaaataagtacaaactgtatcaatcagactattatttaaaaaggttctgacattaattctctgctagattgtttcactgaaaccattctttgttaaagaaaaatgccccatnataagggatgagaacaacagtttaagttaccacaggatccacttaaactggttaacaaataaaaacactttattacttattactgttattaaatggagcactaccactgtcaagtcatttaaacaagtagatttactcttcagttctgacatatcacatcagcgacagttggtacctctttacganataaaaaatgtttcctgcaactttaaggttttacttgtaacaggtaaagcacacaatttggaaagatggattaacattcctggtcacacaatgaggagttctatttcatccacggagaagcaaacaacntactccaaacatacacatatgtgcgcacatacgcgcaacactcaacacagtccggttaccaccaaagggcgcgtgtcactaacgctaatacagaagattgagtctcgagcatggacgaggtgcaanggattataaacaaanaaaaacaccactcattaaaacnccaagtcaggtctgatgcctgaagctcaatcactgagggcagtatgggtcccagggaaccattcatggaaacgcctcggcatctg

SEQ ID NO: 122861 - DNA, 758 bp, Homo Sapiens
agctctggtgagtctgactcatactcggagaaagtttttggaatacatacacatttggtgcatataagagttgggtttccttttcccactttctgagatgtactaacctctgccagacccttaaatgattttgttatgttttgcatttttgaggccaaccttattttgtaactgaaaaaagtccagttttgcatacacagaaatttggtcattttagaagtctcacaacctgaataatttgataataattgaatatgctattaacagctttttaagaaaaggttctattagtcagttttttccttgtctgtcatattatgttggttaatgtctcttatggccaatcttagtaaacagacctaacactcactgcatccttttgtgccttactttttactttccttttgcccttttggtatgtgcgcatgtaagatggtaagtttaaggctaatgaatatatgtttgtaatttcctactcactactctgcagttaaagctaaggccttaggcaaaatctagaaatgtttatattgttttgttttttatcaagtggtgtcaacttgagaaatacaaagaaaggctatgcttaactgtataaccgtgggggattttagccatgagaatatgaagctgatgtcagcctgctaacctgttttaccaaaaggaaaagatgtttccaaaaatgttttcggtgtagactgtttaaagatgaaaataaattatataatttattatatgaaataaatttttgataagtc

SEQ ID NO: 122862 - DNA, 1020 bp, Homo Sapiens
ttttgggttaaagcgctttttattggttaatgacaatttcatttggttataacttcaccctaattgtttgcatgtatattctttaaaccactgtttcctaaaactgtctgatgagaaagttacctaaatatttgttaaaaacacacaatcctaacatgaaaaattataataccaacaatctgtacttctaatcaattccactgaaattcaaaataatttggcaattttagcaaactatcttggtctcatcttagttttaataaaacagaatttccagagcaaaggcaatgtgattggtattaaagtaatcaatttgcattaaaaaagaaagaatacaccattataatgaatgaatatatttattcaggtcactgctttttaagctattttctaagtatatattgatgaattattgttaaattgatattctttaatagaaactacaattactgacattaaatataaaacaaatattttcattagaatcatgcaaaatctaaacaaatttttgaaaataccacccaaaatattttttttctgtatatgacaagacacacatcagatcataagcaacaagaaaacaaaaaagatatgaaaaagatataaagacctccccctcaccacatttggattcatcatatctattatgattgtaccattaatcacaaagggtaaggtgatatttctgttaggaggaggcagtgtgccctaaaaagcattgacaatctcattgtcatatacccaagaaagaaccctgaacctggaaggggaaaaaagccttaaacgtgtgtgacgggaactcctacgcactctgtccttgttttctttcatctcgactttcagttggcttgttactctgacacaaagatggagtccggtacacaggcaggaaaatctctctagaaaatgccacctgattatgaatgaattatctcttataattctaattatacagttgcacatttctctgcattttctctttacagcagtttttaaaatgtgttttgaccttgtttttgc

SEQ ID NO: 122863 - DNA, 738 bp, Homo Sapiens
  misc_feature (577)..(635): n is a, c, g, or t
  misc_feature (696)..(696): n is a, c, g, or t
  misc_feature (721)..(721): n is a, c, g, or t
atgaaaagataggtttttattcatcaaaagttaacagcaacaggcacatattaaaatgagtatggcaaagccttttacaaatggctttacactcaagctttctcccaagaaaatggctgttgcaacaaactgtaaacaattaataaacagtcttttacagtaacaagggaaatacaaatgaactaaaagaaagcaccggtttctcttaaaactagattacagttgtgcttactatacataaaacaatttaaaacaaattacaaaagtggaatgtttgaagtttaaaattagtccttatagtttgtcctagaaaacatctgttcacatcaaaaggcccgtcaaagggtaacgtttcatcaaagggagggacaagaaaacaatgcacttttttcaaatcaaaacaagaagtttggtcacttagctatgtgcatagtttaaggcaactggagcaatctgttacagcttacctaccaaccttcccctcccccgagtgtggctgctcattatgtcacattctaaaataataaataaaagcttacatttcaaatctttgcccacatggagaaacataacatgnnnnnnnnnnnnnnnnnnnnnnnnnnnnnnnnnnnnnnnnnnnnnnnnnnnnnnnnnnntacctctcactcactgcagcgaaagggactttagtacccttgatctgaaggaacactctcncatccacttttatttcagattggcnataccctgagctgatta

SEQ ID NO: 122864 - DNA, 883 bp, Homo Sapiens
ttagtttttaatttggggtgggaggggaagaacaccaatgtcctagctgtattatgattctgcagtgaagacattgcatgttgttttcactactgtacacttgacctgcacatgcgagaaaaaggtggaatgtttaaaacaccataatcagctcagggtatttgccaatctgaaataaaagtgggatgggagagtgtgtccttcagatcaagggtactaaagtccctttcgctgcagtgagtgagaggtatgttgtgtgtgaatgtacggatgtgtgtttgcgtgcatgtttgtgcatgtgtgactgtgcatgttatgtttctccatgtgggcaaagatttgaaatgtaagcttttatttattattttagaatgtgacataatgagcagccacactcgggggaggggaaggttggtaggtaagctgtaacagattgctccagttgccttaaactatgcacatagctaagtgaccaaacttcttgttttgatttgaaaaaagtgcattgttttcttgtccctccctttgatgaaacgttaccctttgacgggccttttgatgtgaacagatgttttctaggacaaactataaggactaattttaaacttcaaacattccacttttgtaatttgttttaaattgttttatgtatagtaagcacaactgtaatctagttttaagagaaaccggtgctttcttttagttcatttgtatttcccttgttactgtaaaagactgtttattaattgtttacagtttgttgcaacagccattttcttgggagaaagcttgagtgtaaagccatttgtaaaaggctttgccatactcattttaatatgtgcctgttgctgttaccttttgatgaataaaaacctatcttttc

SEQ ID NO: 122865 - DNA, 982 bp, Homo Sapiens
  misc_feature (688)..(688): n is a, c, g, or t
  misc_feature (706)..(706): n is a, c, g, or t
  misc_feature (756)..(756): n is a, c, g, or t
  misc_feature (786)..(786): n is a, c, g, or t
  misc_feature (806)..(806): n is a, c, g, or t
aatgtgcagtcaagtttctctctttttttcttctaggaatgataccatgccagtaaatccctacagaacatttccagtttggcaacaagcagtcagtcgatcattcacatttgtactcaagacagcaggcctgggcaaaactcgcctgaatttcaccctgaaaagtgctccccatcatctgaagaagcagcacctggtaacaggcatggccattcagagggtacttagcattttcatttcacctggggtcttgaagcacttcctgaaaactgattgtgccttgacatttacctgtaaaaagaagtgtaattctacccctttggcagatgtgtaaactaagacggtgcaaggcccacagaagtaaggagaggaccaggaaagctgacagtgaatctcctgctttgtccatcaggtcctaaaagtgtctctcacttgtaattccacagaagtgaataaagcataacttctttgactgggattggctggtagggatgacaggacttaatgatgaagcagggagctgctttaatggcttttccctctattgcaagtttttccttgaaaggacagtcaacaccacacctagaatcagaggatgttggcagagtgtcagagctaagcggggcttcagggtaccagctaattcatccctccagccctcactggaagggaaacttaacccctgcanacaatgcagatgcctaangggcactatgacttaactcagtctctgcctctgagtggaggatttctctngcacagtccactggctgagttcccctcgtngcgatttctggctcgagggncaattcctatagtgagtcgtataatcgtatcagtctagtgttcctggtgaatgtatcgccacatcaacacaacagcggagcaaatgaagctgggtgcagatggcatcaatatgctggccatgcgctcatcggactgctgcatgatatgacgcacgcggaagcgtgcgtgcgctcgc

SEQ ID NO: 122866 - DNA, 1199 bp, Homo Sapiens
  misc_feature (899)..(899): n is a, c, g, or t
  misc_feature (921)..(921): n is a, c, g, or t
  misc_feature (1001)..(1071): n is a, c, g, or t
  misc_feature (1087)..(1087): n is a, c, g, or t
  misc_feature (1090)..(1090): n is a, c, g, or t
  misc_feature (1092)..(1092): n is a, c, g, or t
  misc_feature (1144)..(1144): n is a, c, g, or t
  misc_feature (1162)..(1162): n is a, c, g, or t
gggaattacaaaggtttaagaatacatgctgagatcagttcttacaaaggttaagaatacattactctagtgactatcaatattttttgtcttcataccccttgacactctttaaaaagtattgatgtttccaagaatttcctgtgggttatatcttccagtgtttgtcgtattacaaattaaacctgagaccatttatttatttattttaattgttttacctcacctggaccatgtgaaacctgagcccttttaaaaacaggaatgtacaaacacatattccattatccataaccctcagaacaattatgcaattgcatgttatttagcctctggaaaatcctgtgagtatctttcaataaaaatgctaatatttctacctatgaaatttcaagcttgattttcaagattgagattttgcagttgaataatttcttacatgtgtatgtatatacacacataacacagaaaagtgtaaaattagtcccatataaggggtgtgtgtgtatcagtgtcacataaaaccaggctaattttatgtttattagtcataatcatcttcctcatcttcatcttcctcagattcttcattctcagctgcgagtagaactgcttcttgtgcagccctgaaagcctgctcctcctccacactaggatcatccatttctgtaatttctggtccactggggtattcttgataaactggtggtggaactgggggtgtataattgtctggactatacttatgaccccagcctatgtagaaattttcacactttttgccattggagaaggcatatgctccaggccaaaggttggattgaaggactgcaatagcatattgtggaatgagatttgaggataaccgtgttgtccaggggggtatattctgaatctcntaatcttcagagattggtgtcnaaagaggaggcccacttcctgttctatgtagtcagaatcgtctttttccatcgtgccgaattcttggcctcgaggggcannnnnnnnnnnnnnnnnnnnnnnnnnnnnnnnnnnnnnnnnnnnnnnnnnnnnnnnnnnnnnnnnnnnnnncacatttcacacaaanacnangcgggagcataaatgtaaagctggggtggctatgagtgagccactcacatanttgggttggctcacgccngcttccagtcggggaactgtcttgcactggattatga

SEQ ID NO: 122867 - DNA, 741 bp, Homo Sapiens
catccacaacatcccctttttattgatattaatcacagttatgaggtcttgtccatcagaaagcacaatttgcattatgtagaactacatacaaagacataaaaataaaacatacatacaccaaccaccacaccagttaatctcaaccaatcaaacctctgaatgtgtcttcaattttgatcatcagtgcttcggaagaacgtacatagacccagcccaaggttggcctttggggtctgatagcattcacagagcaggagattcacccttggaagcaattgaatgtgtaaactctgagagcagacactgacaatgcaatgcctgcatacctgactcctgggctgccttccttctcagcagagcccactgaaagtctcacgtgtgcctttaaccaatgaggatggcaggccttatctgtgtttgaagtggacaggtcattgctacccctgttggagaagctatgtaagaaggagtaggctggcttctggtctagttcgactcattctttatagggacatttcagaatgatgagttggctaaaatttactttaaaggggaaatgtaaaattacctcttcttttcctatccccttcttcctttcccatcctgagccctctggcaaggcctgttgcagctcaagagtttttgtcagattataagttaccaaatggtcaacagggaaggaccacagcagattcaaactctttcattcacttgagttactgaaatggtcctctttga

SEQ ID NO: 122868 - DNA, 902 bp, Homo Sapiens
ccacaacatcccctttttattgatattaatcacagttatgaggtcttgtccatcagaaagcacaatttgcattatgtagaactacatacaaagacataaaaataaaacatacatacaccaaccaccacaccagttaatctcaaccaatcaaacctctgaatgtgtcttcaattttgatcatcagtgcttcggaagaacgtacatagacccagcccaaggttggcctttggggtctgatagcattcacagagcaggagattcacccttggaagcaattgaatgtgtaaactctgagagcaggccttatctgtgtttgaagtggacaggtcattgctacccctgttggagaagctatgtaagaaggagtaggctggcttctggtctagttcgactcattctttatagggacatttcagaatgatgagttggctaaaatttactttaaaggggaaatgtaaaattacctcttcttttcctatccccttcttcctttcccatcctgagccctctggcaaggcctgttgcagctcaagagtttttgtcagattacaagttaccaaatggtcaacagggaaggacccacagcagattccaaaactctttcattcacttgagttaactgaaatggctccttctttgagtaattgaagagtttgagttctagcagtttgctggtgtctccaagtctcttagaaacatgatggctataaacttatcaaaataaatgcctaagaaatttggaaagcgcgacaaatggccttgctcctggaatccattgacagcagaggcctccgaacaaacccacactctgtctgtctcttctttccacagggctcactgtgagttcacagttgtcctcatcccctttccttcaataatgtcaatctttgcctttaaaaaaa

SEQ ID NO: 122869 - DNA, 847 bp, Homo Sapiens
  misc_feature (68)..(93): n is a, c, g, or t
tgtggaagacgcatgcaactaaattaacctcactaaagggaataagcttgcggccgcatacgcggccnnnnnnnnnnnnnnnnnnnnnnnnnnggagggtttaccttctttattccactatgtataactattttgtaggttcagagaatcagaacacatctgttgcaaaggtgtgcgatccagtctcttaaggcgggtctctgttcctaaatgtagagatgcagtttggagtcacgttaggaagtgggacattcttaagccatggagaggatgtgaaggaatactaacctacactgggacagtgggaccaggaccactgactggagtcacgtgctgtggtctgacatagatgtctctaacatcatgtcactttcattcatttcaatttcaaaggtttcttccaaggaaggtctggaatctggagttttccttgaggtttccaatggcgtaagccccgtttcttctgcagtctgtttttctacttcaaattccctgaaatcccacggaggtgaaataatgttttttagtgtcttcattgtatgcacatcaaagtcataacattttaatttgtctttaatgtctgctccaatataagcttcagaatcaccaatgtacatttcgatgcaatgaccaagcattgtaacagaaaatgtatcatctcgcctaagaccaagggctgtgtggaagtagtccacagcattttcaaagttgcccatcagactgtggatatatccaatagcagagtaggtggatgcgttctgaggaatcaacaccagtgcctgacggtggtaatccaagggctcagcatactttttaagttttctgcagacatgccccaagttgttca

SEQ ID NO: 122870 - DNA, 962 bp, Homo Sapiens
accacgcttcttctcttcttatcgcctctcttttttgatggtttaccttctttattccactatgtataactattttgtaggttcagagaatcagaacacatctgttgcaaaggtgtgcgatccagtctcttaaggcgggtctctgttcctacactgggacagtgggaccaggaccactgactggagtcacgtgctgtggtctgacatagatgtctctaacatcatgtcactttcattcatttcaatttcaaaggtttcttccaaggaaggtctggaatctggagttttccttgaggtttccaatggcgtaagccccgtttcttctgcagtctgtttttctacttcaaattccctgaaatcccacggaggtgaaataatgttttttagtgtcttcattgtatgcacatcaaagtcataacattttaatttgtctttaatgtctgctccgatataagcttcagaatcaccaatgtacatttcgatgcaatgaccaagcattgtaacagaaaatgtatcatctcgcctaagaccaagggctgtgtggaagtagtccacagcattttcaaagttgcccatcagactgtggatatatccaatagcagagtaggtggatgcgttctgaggaatcaacaccagtgcctgacggtggtaatccaaggcctcagcatactttttaagttttctgcagacatgccccaagttgttcaacaaaggttcccatttgtcaactgttacctcgttcccaattgctttaattttgttccagaagcatcaagaaaccatttttcggctgttttccattctccattctgaaatgcaaccacgccgacctcatgcataacaaaagggtcttccggtgcaatgctcagagcttggctgaagaacctttcagctagttttgagttattggtccccggccgtaatggccgaattcccgggcatatgtccggtaccgtcgactg

SEQ ID NO: 122871 - DNA, 1223 bp, Homo Sapiens
  misc_feature (813)..(861): n is a, c, g, or t
cggtcagacttttatgattggggcccagatttgactctgttaatgaggaaggtgaggactaaataggttggagttatgcctagcaattagaaggaaccagccctggtgtgcctcatggaagggtcagagggggtgggggtgccattcactgactggaggggcactcagaagcagtgaggtcaggggctgggatggccagggagagatgggtgtggtgtgtggtgcactaaacttaaagtgcttgtaacatttacacgcagaagtatttagcaggcagatggatagagaggtctggtgtttgagggaaagctctgagttgcagatactcatttgaactccagcagggataggctcttggataaacttgtcctaatgataacagagtcctcaggaagtctcctagtaggaaagaaagggagatagataaaacagcagttaccctggccttgtggtgtgctggcggcacacactgggagagagcccagcttgcaaggcgtgaaataattcagtgcaaacaaatcaggctgaacagtgacatatataactcgtgggcttgatgttgctatgttttaggtaacagttgacaaatgggaacctttgttgaacaacttggggcatgtctgcagaaaacttaagtaaatgaaagtagagcattttcccaaatatacctttgtgtctcaaagtttacttaatttttgaatactttgtcatattcttatttccatgagatccaccagctttcctgtacttggctgctccagataaaaattcagcctccaattccagctttaattatttaatctgggttggggnnnnnnnnnnnnnnnnnnnnnnnnnnnnnnnnnnnnnnnnnnnnnnnnnttatatgcaaaaattttagtgtgtccagaaatttaaattccgcaaaaaatttagggacccctacgggaatatactttaaacatcccctatcccacaagagtctgtattttcctgcctagaaggctttttgtggggggcccaataaacccgaggcacaccacttgacacaaaatgggggttttttctggggttaaataaatgccctggggccactattattcgcgggttttatcagggaattttaggagagcagatttctctctggccacggattatatcattgcaaggctctcccctatggagagttcggaaggttggtaccagattttacaacaacgtataatatatcgccgcacgcaaag

SEQ ID NO: 122872 - DNA, 1867 bp, Homo Sapiens
  misc_feature (119)..(127): n is a, c, g, or t
  misc_feature (269)..(279): n is a, c, g, or t
  misc_feature (328)..(328): n is a, c, g, or t
  misc_feature (400)..(414): n is a, c, g, or t
  misc_feature (422)..(647): n is a, c, g, or t
agccgggggcggtgtcggtgtggtggtttcctttctcaaggaaaagtgtcttttgccccccttttccgcggaaggggtggggttctttgcggggaaagttttgtttttaaaattgtttnnnnnnnnnggcttaaaatccttgcgccggggggggaataaaaaaggaaagaatatgcgcggggtccgcgcgggggggtgataatccaagggaagccctttaagcttcctctcgggttttggctggaatggggtccctctccccgggatgnnnnnnnnnnngggcggccacgccggcccgtcgttttggccggccgtcttcttttttggncttggggttcggttttgggttctccctgggggggcccgtcccgcgttggttgttttcgtttggtttttggtnnnnnnnnnnnnnnntgcccccnnnnnnnnnnnnnnnnnnnnnnnnnnnnnnnnnnnnnnnnnnnnnnnnnnnnnnnnnnnnnnnnnnnnnnnnnnnnnnnnnnnnnnnnnnnnnnnnnnnnnnnnnnnnnnnnnnnnnnnnnnnnnnnnnnnnnnnnnnnnnnnnnnnnnnnnnnnnnnnnnnnnnnnnnnnnnnnnnnnnnnnnnnnnnnnnnnnnnnnnnnnnnnnnnnnnnnnnnnnnnnnnnnctactcaaactataagcttttattattgtattttacagatcattcattcaggacatgctgcatctggggttggcatcatttcccttttgaatgacagaatgtgcataaaagtctcttgcccacgctgaactcacacgtgcccggcaggaaggagctctcacgaagtgccagctggatgtgagcttgctctggcagcagcagtgctgtccttgtttctgagctgccacctattcactggagttaggtgggtcaaagctgaaatttagcttggaatttaagtttctaattttatacttttcattgtggtctggtcagattttagtctgcttcaaaatcaaaaggtcactcagtcactctaatatgatcattttgaatatggaaatttgttatttacatgctgtacctcaaatcaaagaaaaagcacgcgtcaatatcacgcgtaggaaaaactagaaaattgttccttttccattttgccaccctgctcagttttcctcataaacggttccagcttggaaaacaagagcttcccctctcagacagatgcagcagcgggaggaagggctttggtcttaaactagaagctgcagctgaaactctccccgtctaatcctgctgtgtgtatggctcacaccatctttcctgagtggggaaaaccgctggcactgaatagctgaaaggctcgctgaaatctgtgcttcaagaacgagttaaagacaatacaataaaacacatagacactgaaggggttcaactaatgtccatcacttattctgctaatgtcagtgcctttcaataaacttctcaacatctgtgttggtaaacttctcaatatttgttctagcccaaccacggtgacaaagctcccttgcccaaagatcgtgagcctagacaaaggtggataagaaatatgaagtctaaagctatagaatatagcagttagtgaagtaaattaaacatgcccctcgcctgcatgctgatcagagtgttgaaactgaagacgacattggcaaaatgactcagaccctcagcacagatttgatcaagggcacagctcataaaaatagcaacaatttcgaattctcctatccaacgtttaggaaacaatccaatggcaagaaatgagaggagttcaatgccaacagtttgacctgtgggcaatcaacctataagtcctcaaaagaaaattccttgctttccctggaccaacagagatgggg

SEQ ID NO: 122873 - DNA, 2917 bp, Homo Sapiens
  misc_feature (923)..(965): n is a, c, g, or t
gttgatcttcttcaacttggatttatgtccatgattcgtgcaaatagctatccagggatggacagccaccctaatctgggcttctggcaccacaggcctccagctatggggtccagggtctgaacctcagggcctggcagcttcaggctggcgcccctcggcggacgtggctggcatggccttctcccatctgtgatggcttcagcaaggctactgtgagtggtggtggagagggccccagagccagaatatccatcattctcttctgttctggagacaaacccacacttcccacagctcctcacagaggggtaggggtgtgcgtggggcaggtcctgctacagagcttgaagcaaaaattaaacacacacacaaattggtcatggcaactagagggcctgaaaccacttccgggaggttttgaaggaagggggtcttggctgcctcccactcttaggattgctgctcctggaggcttctgcaacggatggtgggtcaaagccggatgaggcctctctccactcagcagcagggaaggagtttttcccagtcactcccagcagagtacaaatgaaagccttctgggtggagcctccccagtcctgtaaacagctcagttcagggactggtatacaagctggccacccatctcagcctctcatccagctgaggctctggccacaccgtgcaagtggcttctagtttcttggcaatctgagatcagctggctctgcaagatgaaggtggagccaaatgacacaatctggtctcactgaggcccctcacggtcattttttggagactctggttctgtaggcctggctgtgggagggtccatcacttgggagctctgatttggatttcgaacccctccacagggtagacgccaggtgtattccggcagatggaagaggcgcgagttnnnnnnnnnnnnnnnnnnnnnnnnnnnnnnnnnnnnnnnnnnntagcggatctgggaccagtcctcgaagccatggtgtggcaccatggctggcatgggcgggtaggcgtaggggtaggccccgcagagatgttctgggtggggctccacatggtaacgctctcctgaggcctttgctttcctcttctgctgtctgagggcttctcttgccttctcctcatctttgaatgcttttagctgggcatttgacagggtgacctgggcctgcagcttctccacttgcttcttcagctcttccttctcctcattcatgcgctcacgatcactgcgctccctctggaagtcctcctcgaagatcttcacctgctgtttcagcaactcattctgcgtgaccagctcctgtttccttaggagggcccctgctccttctgggctcccaaatgctgttggtggagatgatggcggggtttggatgctcagtgcttcctccagggccttgttgagccgctggatctccttttcctggtactcacgctgtcgggtgagtgggctcagctgatcctgcaggtacttgaccttttggcgcagctccttggcctctgctgtcagctgctccttgtcggtctcctccatttcaatcttggacttggccaggaggagcttgcggtcaaagtcacgctgcttctgctcccgctcggcctccaggtcagtcacctgcttctgcaaatcagccagcttctgacgcagctcagtgatcttctgctcatactgctgcttcatggaccggaaatgctggtcccactgcttgttcacttccagcagctcactgcgctgctgctccagcatcttcaccttcttctcggctgcgcccaaggccaccacctctgggaccttacctgccgtcacactagcctgctgctgtccagccactgccttcttgcctgtcccttccatcttcggtgagcctggccgcccagacgcaccctctttgttgccattgctcatcaacaacttcttgagctccaaattttcctcccgcagcctctcggcagcctgatcccgctgttccaggcccttatccaacttggccttcagagcctcgttctccttccgaagctgctcacacagggtctgcagaatggaggtgcgctgctcattcttgtgcaccttggatgccagtcggttgaactccagggccatgcggcccaggtgggtgaagagctggccgtggtccggctcctcggcacacacactcagcgtggtctccaggcgctgcaggtgcagcatcaggttgccgtcctcacggggcagggggcccagcgccatcgcattggcatggctgctgctctctggtgaattctgctcctcaggagtgaccacttcaaattcagaggaggtgccactggatggaggcttctggactggtgctggcttgtcactggggcatgcaggggctgtgggagatgctgtgacatttgagtcctttcctgtgagctcagccagggggtcgaaggagcccaaggagggagaaggtggtgggagcagctcgttgtccttcactagctcctctgccttctgccggagcctggtcgcttccatctgggactcttccaaaagctcccctaacatctttatcccttgcattttttccttcagccgggaattctccttcactaggcgctcaaaagctgcggatgcctctcctgagggcacgctgcccccagggtcgtagatccggtacggtcctctcccttccatgagggtagctcagcccctgccgtggtgcccgcctggccgaggacggggagcttggggacacagcgccccgcttgctgcgtccagccccgaatccagggacggggcagcggcccgggcaaggctccggccacccccgtagcactcactaggcctcgtgccagaattcagccaacccaggcctcgctaccttaggaccgtatagtacatgccgtcgtttaccacctgcttttgacaatg

SEQ ID NO: 122874 - DNA, 689 bp, Homo Sapiens
  misc_feature (454)..(455): n is a, c, g, or t
  misc_feature (460)..(461): n is a, c, g, or t
  misc_feature (467)..(467): n is a, c, g, or t
  misc_feature (573)..(573): n is a, c, g, or t
  misc_feature (575)..(576): n is a, c, g, or t
  misc_feature (583)..(583): n is a, c, g, or t
aactgtcagtcctggttcaccggcggatagatcaagaacgaagacccagtcatcaccgtgcttctgcatacaaggcaggttctgacacaactcagagatctgtctgcacatactgctgcttcatggaccggaaatgctggtcccactgcttgttcacttccagcaggtcactgcgctgctgcgccagcatcttcaccttcttctcggctgcgcccaaggccaccacctctgggaccttacctgccgtcacactacccctctgctgaaaacgagagaacgctgcggagttgggaagaccagctacggtgaaggtgacccctctaagcaactgtagccccaaatgagctgtttgtcctgtactaaggtcactgtcaactccttagccaggccccatcttgcttgttgggggctctggagtaatcaaagctccagtgcctctacctgctattctggnnaatgnngtgtgnagtttgtaaacactgctgcaccctgcatccaagaatgtgggctgggccccaaatacagtcagaagattctagattcagcagacattaagctggaactctttctggntnnatgaagnaagactgtcacctttttagctcgatactttttggagggactgaagggcacccaggaaactggccgacatctttgcccaactccccagtggaaagtgcaacccccag

SEQ ID NO: 122875 - DNA, 494 bp, Homo Sapiens
ttttctgtgtcaagctgttcttgcactgctcatcatattttcttttttcattttccagttgtattaagtagggcctcttgttgctgaattctggattgttgctgagaacaggtcatttccagtagattttctttatcttgtaaggttctcacttgcctgtgtaactcatctacgttctgatatagaagtttcctcttctgttgttcttcttgatattgttgctttactttagcttcattttgtgttgcttcttttatcttttcctctagctgctgcttctctgaaatacaagtgtctgtgagacagactttatgagcatgttctaatttccgctgcaggtccaaaatcttttcctctgcatcagcaactttagatttctcctgaaccatcttttcctgtaggttgttctgtgattttatgctctgagtgtgtttaagtacgtccaactccagttccttgagtttctgctgacagtggttgtactctgccgtgag

SEQ ID NO: 122876 - DNA, 657 bp, Homo Sapiens
  misc_feature (541)..(541): n is a, c, g, or t
tatatgtaattggttaccataacttttaacaaaccatatccatgaaacagtttctaagaactgcatgtttctaagaatgctgtgaaacaagattatatgtcaaacaattaaactaccttatgtattacagcacttctcaaacccattaatataattgttgttacaaatctccaagaggggcgtacagtatatagtgtttttctaaatatatttggccatggcacacgtgtgtatattttgcacacatgtgcatctgtgtgtgtaatattaacagttcccaggacagactaatataaacactgtttaggaaagataagattacaatacactctagtttcactaataggtatatactttcagttccaaagtttagaaagctctacactaaagctctctgtggaggcatacacatgtatatcaattataatttatgacatgtagtgtgtttgcagtcatttttttataaatgggtaccagaccattaattaagcatataaatccttgctgaacttcacttatatcattttagtactccttttangagtaacataatctgaaataaattcaaagaggatttgtacttagatttttgagctgtggaagagctttatgatgctaaaggtaattatgaaactgtacttttcttgcattttggta

SEQ ID NO: 122877 - DNA, 573 bp, Homo Sapiens
  misc_feature (504)..(522): n is a, c, g, or t
tttgatgctattttaaatgaaattgttttcctcattttctattaggattgttcactgttaagtgtatagatatgcaactgatttctgtgtgttgacttcatatactagttctaataggtttgtgtgtgtttagtctttagggtcttccacatttaagatcacgccacctgcaaactcagataacttcgctttttcccattcagatggcatttgtttctttttcttgcttattttctctggctaacacttccaatactctgttggctataagtggcaaaagtgggcattgctgccttattgctgatgttggagctttcagtctttcaccatggagtatgttagctgtgagatttttgcatatggccttattatagagtggtttccttctatttctagttattttctataaaagggtgctaaattctgtcaaatacttttctgcattgagatgatcatgtgttttttttctttcatctgttaatgtgatattttatatgcattgannnnnnnnnnnnnnnnnnngagacagagtttttgctcttgtcacccaggctggagcaaaactctgtttca

SEQ ID NO: 122878 - DNA, 563 bp, Homo Sapiens
  misc_feature (265)..(265): n is a, c, g, or t
  misc_feature (462)..(523): n is a, c, g, or t
attataatttattttatttaacaatctaagaagttcgcagccatcagcagctccagtgcaatttgaggtgcaattgggaattcaggaatctcggtggagctgttagtgtagcgaaccttgtacgtaaaatacatgcatactttcggatagcacatgtgaaggtatctctctaaaattgacctcattggtttcggttcttcagcaaactgacctgggccactcaacatggcttttattcggtgcctgatgttaatgcatgttctcntttttacaataaattcatggccatcagatgatatcaatttgacatacatggcatcaggtccttcacagccaccataggttttctcctctccatccattttgttcttatgaaattctactttgcttccccaggaactttagtagtttccctcactgtaggcaaagatttctcagcagccaggtgcagtggctcacacnnnnnnnnnnnnnnnnnnnnnnnnnnnnnnnnnnnnnnnnnnnnnnnnnnnnnnnnnnnnnnactccagcctgggccacacagcaagactctggtgaggcgc

SEQ ID NO: 122879 - DNA, 475 bp, Homo Sapiens
  misc_feature (120)..(120): n is a, c, g, or t
  misc_feature (440)..(440): n is a, c, g, or t
ttaattataaatttatttttatttaaccaatctaaagaaagttcggccagccatcagcaagttcccagtgcaattttcaggtgccaattggggaatttccagggaatctcgggtggagcntgttaggtgtagcggaaccttgtacggtaaaatacattgcatacttttcgatagcacatgtgaaggtatctctctaaaattgacctcattggtttcgttctcagcaaactgacctgggccactcaacatggcttttatcgtgcctgatgttaatgcatgttctctttttacaataaattcatggccatcagatgatatcaatttgacatacatggcatcaggtccttcacagccaccataggttttctcctctccatccattttgttcttatgaaattctactttgcttccccaggaactttagtagtttctcgtcagtnccgatgccaccgcagccgggtccccgcgtactgcc

SEQ ID NO: 122880 - DNA, 1123 bp, Homo Sapiens
agaactctaatcatgtattactctgaccatctggctacattcatttcttctgcaaacctgtacctagtaccttccaaaattggtttttaaataaacttcttaaattgtaccataaacaaaaggacaagtacacttaaagaatactgcagtttatcaaaagacataagaaatttcaactcatacttggagagttataaaaatcaatgttttggctaagttataaacatgtttataatgcaattatttgcataactctagtaatgctaatggcggctataagattaggtttctaaaaaaccactaaaaacataaaaatacttagcctcattatttccctgtagaacgtattgatttacacctaaatttcagtatttactatatcatcattgctgattttaagtcacattcaaaggataaggcaaaaccacctacgaattggcatatttgtttatttctcagtttgtgaaaatgtccttaatttgttgatgtagcaaacaaatttcaactttgattgctatgcaaaaaaacaagataatctgctttgcaatgaactttatatagttcaactgcatacaggcaacatgctatatatgaaaaagttactaactgaactacaggtattaaatactgaaaagagttaacagtttattataatttattttatttaacaatctaagaagttcgcagccatcagcagttccagtgcaatttcaggtgcaattgggaattcaggaatctcggtggagctgttagtgtagcgaaccttgtacgtaaaatacatgcatactttcgatagcacatgtgaaggtatctctctaaaattgacctcattggtttcgttctcagcaaactgacctgggccactcaacatggcttttatcgtgcctgatgttaatgcatgttctctttttacaataaattcatggccatcagatgatatcaatttgacatacatggcatcaggtccttcacagccaccataggttttctcctctccatccattttgttcttatgaaattctactttgcttccccaggaactttagtagtttcctggtgaggcgaggacgcagagtgtgtcgctccctcgtgccgattaacaccagtactgccgaagggttga

SEQ ID NO: 122881 - DNA, 696 bp, Homo Sapiens
ttttaggacggaattggcatatttgtttatttctcagtttgtgaaaatgtccttaatttgttgatgtagcaaccaaatttcaactttgattgctatgcaaaaaaacaagataatctgctttgcaatgaactttatatagttcaactgcatacaggcaacatgctatatatgaaaaagttactaactgaactacaggtattaaatactgaaaagagttaacagtttattataatttattttatttaacaatctaagaagttcgcagccatcagcagttccagtgcaatttcaggtgcaattgggaattcaggaatctcggtggagctgttagtgtagcgaaccttgtacgtaaaatacatgcatactttcgatagcacatgtgaaggtatctctctaaaattgacctcattggtttcgttctcagcaaactgacctgggccactcaacatggcttttatcgtgcctgatgttaatgcatgttctctttttacaataaattcatggccatcagatgatatcaatttgacatacatggcatcaggtccttcacagccaccataggttttctcctctccatccattttgttcttatgaaattctactttgcttccccaggaactttagtagtttctcgtcagtcccgcagccaccgcagccgggtccccgcgtactgccacagcccctatcccagggccg

SEQ ID NO: 122882 - DNA, 843 bp, Homo Sapiens
tttatttgaaagactgaaaatgtcacttggaaataaaggttgggggaacacacagaaatggatcggaacacaatggagagagacggaggcgctgtaactacagcaacctacacgccacgtatctcggaggagcaggctcctgcacacgcgggctctgtgacaccagacggtctatttgttcacaatactgaagggcatctagaattagctacagtaaggaatcgaaagttgcctgaagaatgggcacagaacggctgcgtccgaaaatggcctgtcacttgggagggtggagctgctgggtcttcctgttgaccactgtcttgcaaaaagtgcagaggggaaaggcggctttagtcatctgctgtcattcctttcactgggtccttttgtctcatttcatccagctgtctcttcgtctcttcttccatccttcgaatgtcgtccatggtcaggtcaacccacttatcgagccaacagaacagctgcctgtggaagtttgtaaacagacgcctctcttgcttatggatgaagttctccactttgttctgcaggccccaccacttgaacttgacggtcaccagtttgtatgcacacatatatgggcagtccttctggtttacaagctcttgcttccacattggggcccacagggtcctcggcctgttttgatagatttaaattttgctgggtcttcctctgccttgtaatcccttgctgagcacttggcttcgatctgcaatgtctatatatacggcttccacgtgtttccacgcctcaggctccagcttatgcacattctcctgccctcgtgccgattccaccccggcctcgcacctagcctaa

SEQ ID NO: 122883 - DNA, 1043 bp, Homo Sapiens
cttttcaacttgatgtagggttcagaagatacatacattccaaataccacagtaagcattcatctgaaagtttgccggttggtctttctattaattaaaaaaattcaaaacagaatacagatttaactatgtacaatatttacaacttacagattttacaacgaaattatacagttaagtctgtcgtggaaaagttggcattttggtatataacacttcagaaatttcaaaaacaactttacctcaaaaacatgttacacaaattttccaaagtgctgtagctcactggctcattttatctcaacaatccagtttagcaatccaggtacccaaatcttgaggcatgaagtaaccgctatactactgagagacagcactttttatacaacagcagaggctgttagaaaccttgggtctttaaaaccctataacaatgcccctttcaccctccaatcctgagacaacaaatcctgtagttccccctcatcatcgctgtcagcattctcttcttcctttttctgcagttcttttatggtcaggatttctttaagtttattttttatttcatcctggcgattccgtagcttttccacccgtcggtaacactctatctgctcatcgatctccccaatctggcggtccaaccgtccctcctcatcctcttcggcaactatggcttcggaaatagtgttgacctgcctcatggctttttggaattcgtcccactctttgtccatctgatcttttggagcatcaacctttcgtactcttgcatctacctcagggtcgtcaaaaaaaccttccggtaacgcttccgcggtgttttctctcctttccaccactttttcatgtatttctgctttctcaattgaccctgaatgaggaattatgggggccttgggaggattagtactaaagaaatcgtttggcagcacactacttgttacctcccgtgaagaggaaactgagtgctccttgccctgtgcgtcggagagcggcttgctggcgtcccccctttttctttctccatctccttcctcctc

SEQ ID NO: 122884 - DNA, 538 bp, Homo Sapiens
cacttaaacaaatgtttagctaaaattttattaaaaactttcagcccacccggacacggaagactttgcttttacagcagctaaggtatgttttcattaccccgtgagtgatgctaatgcattgcaaatagttattatgagtttatgtggtgcttggtgcctaaaataaatttcatttaaatatttaaaataactcctgaatataagcaatttattctgattactgataaaataacattcacattcaagcctacaaatctgagaaatcattattccatatgcacagaaggccacagtcagtagtctaatagtactgcttaccagtgtagtgtaaacttctttcagaatcagggaacaattctagatcagccatggtgagaaataagtgctcttctcttaggccagcgacacttccgatgggtcttgacatcccacctatgggctggtgtgtgaaactctcatctctacgtccctccccagttttaagagtcaccatgtcacataaaagctccagcatcagccaggcacggtggctcat

SEQ ID NO: 122885 - DNA, 1030 bp, Homo Sapiens
aaagaaacaaagaaaagaaaaccagctttattgagatgtaattcgtacaccgtacaagtcaccaatttaaaatgtacaagtcaatggctttcagtaaattcagagttgtactgccatcactacaatcaatttcagaacactttcgttaccccaaaaagaaacacggccaccttctcagccatcacccaccagtctccccatcctctcttggcaactcctaatttcctttctgtctctatagaaaggaagtgttcctattctagacgttccatatatggaattccacagatggaatgccatttataatggaatcatggacctttgaatctgacttccttcacttaacatcatgcttttaagttcccccatgttgcggcagggatcagttcttcattattgacaaagaatgtttcatcatatgtataaagcacattttatttattcactcatcagtttaccatttgggtgatttccacttttggctattatgaataatacggctatgaacattcatgtacaagtttttgtgtggacatatgttttcatttctcttctatatacctacgagggaagttgctgagtcatatggtaactctaagtttttgagaaactgccaaacagtttttcaaagctctgtgctactttacattcccaccagcaatgtgtgatgatggttcgaatttcactacctccttgccaacagttattacgatctgtcttttttattatagccaccctagtgggtgtgaagtggtatctcatcatctcatcatggttttgatttgcttttccctgatggcaaatgatgttgagcatcttttcaagtgtttatcggccatttatttatcttctttggagaaacgtctattcagatcctttgcctgtttttaatggggttatttgtctttttattattgagtggtaatcattctttatagattctaggcacaagtctcttatcagatatacaatttgtgaaattttctctcattctgtgggttgtcttcacttttttgacgtctttgaagca

SEQ ID NO: 122886 - DNA, 1490 bp, Homo Sapiens
  misc_feature (592)..(601): n is a, c, g, or t
acccatgacgtagatagcacgccgcgaaaggggggggagcgcagaggggctgccttgtcgtatcctccgggcccgcggcgaccatgtctgcgtgcggtgtttcttcacactcgacgccgttcttttgacagtcaggcgtctgccccacatagtgcgcgccgaggaaaacgggcccccataggactatactggtccgcccccgcgtccctcttgggacagcgggcggggccccaagcggtcggggggcgcgaattattgtgaatcttcgggaagcctctgctccggggggctcccccggttggataagatacccccagaaaagtgcggctccagagagcccccactaccggggtatttttctcaaaaaaaaccctcggggtttcccacccggcggcgttttttttattgggggagagaataccacagccccttttttcatgaccgaggggtctccccttgggaaacacccttacttcccccgtgtcccctgtccctgtggggccccgcggcccccacaggcgaagggccctgaaaaagttttttaaggggccgagggcggcccagcaaggctcgtccccctctgcgcccacannnnnnnnnncggcgtgcgccgtgcgcgaccagcgcgcccgccggccggcgtaattaaaacaaattatttattccaagttctaccagtttaaagtttttcagaattacagaagcgaacaatgaaatcagaaacaagctctcacagctgtagcatttataacaaagtcattatctacatgaccttgatttaagaggtgtagagtgtttcttttattcagaatccatgaggaaagtttcgaagtccagatccaagtcggaaacgagggcacttacgaagtcatcaacagaaggacacttctgaagcataccttcaaccatgagcatgggctccctgcctccaccgtgggccagcatctccctgcgatagcgctccccggcagccctgttgaaaggatcctgtagaaaacactccttccaaaccatggaggcgaccgctctggacatgaggtaagagtaatatctagcaccataccccacgaggtggctgaatcgcagctgccaggcagtatttggaacatatggtaggccatagaatttctcttgtgtttccttgagaatgtctgtggttgaattcctcaggggatgcttcccatggtagatttgatccagagtggcataaaagacctgaagttgcatatcagctgcagcacaaacctttttagattcacaaagacgagacaccatattttttggcagtggctgtccagtctgataatgtctggcaaattggttaactactcgataatcatttgcaaagtactccatcagaatagaaggaacctcagcaaaatcagtagggcacctggtcccagtgacgtgttggtaacgagtacgtcctagcattgaatgcatggcatgtcccatttcatggaaaagattttccatcatgccaagagtta

SEQ ID NO: 122887 - DNA, 1206 bp, Homo Sapiens
ttttttcagtttaaaatgttttatttcatagctcataaaaaagtatgtatgtacaagactcaagtaaatagaaaggcagctttcaatcacaaatcagtttttcagattttactgtggaagcatatttaatgcacacatttgaatgttacacataaataattttaacgatggagtccaagttctggattttacattagatctgcatatataagacacttgtggtcaaatttcaagattggtaaagccagtttcaagctgcttatattttgagtacaggtttcactattacaaatatatgatgttaaactaacaaactcatgaccttcaaagatgtcttcgtcccacgcacacacatttgtaatttgtgtccatttgctatttcccttcttctataatcttcaaattatatagttatgcattgagttccctatgcatctcacccatctcctttatctcagccttctcatactttgccattctcttctttctggaaataaccagcacaacaattccagcaacaactgctatcaccacaaccacaataacagcaataacaccagcttttagaccctgcattgagaattcaggtgctttttcatcaacataataaattaaagtttgaccaggatccagatccagttgttccccatttactgtcaggtccattttcttagaatgaaacaaggattcacctttaacatctttttcaaaataataagccacatcagctatgtccacatcattctgagttttttgagaagaattttgaaccagatcaatagtgataacattattctcatacaaaatactcgtgataaattttggatccagttgataacgcgttgtgatctccttctgaagtgcagtccgcaaacttttactatcataaggtttttctcttgctttgtgttttagttcaatgatgatccagtaggttctcactcgctcagagcaggttatttcagtgtccttgtctgttcttctgaccccagcagtgttcacacaccagcacgtggaggtgccgttgcactgcttggccttaaagagcccgctctcatcgcagtcaggatcataaagcccatcattgttctggagggccccttcaggttttgctcttctcccaagttttgagccattcatttctgccttcatcacccccggccgtaatggccgaattcccgggcatatgtccggtaccgtcgactg

SEQ ID NO: 122888 - DNA, 1420 bp, Homo Sapiens
  misc_feature (269)..(269): n is a, c, g, or t
  misc_feature (543)..(552): n is a, c, g, or t
  misc_feature (903)..(914): n is a, c, g, or t
cagtcgacggtaccggacatatgcccgggaattcggccattacggccggggaaaaaaacagtcccctggaagtgggggctgtgacatggcaaataaagaaaatgaactggcttgtgcaggccacctgcctgaaaaattacaccatgatagtcgaacatatttggttaactccagtgattctggttcttcacagacagaaagcccatcatcaaaatatagtgggtttttttctgaggtttctcaggaccatgaaacaatggcccaagttntgttcagcaggaatatgagattgaatgtagctttaactttctggagaaagagaagtataagtgaacttgtagcttatttgttgagaaatattcaaattttaaaacaacaattaagtggattatggtaacaggaaaaccatcttactttggttccaggatatactggtaatatagctaaggatgtagatgcttatttattacagttacattgagagatttcatctactaaagagcatttggtttttcaaaacatccctgaactgtataatttacnnnnnnnnnngtctcgtctgagaactgtgaactgtggaagaaatcaaaactattttttcttttaaaaagccacgtaatgaaaccactaatgaaatcccagcaatctgcttcacattgaagtggaaaaatatccaaaaggagcagcttcaatttcattgaggtgaaagtgcactatgaagattgttcacctttgctgcatttgggagttatatggttatttggtaacattaagaactactggattttaatgcaatcctgcataaaaatataatttatactatgtgaaaaaataagacaggacttaccactaggaaccaccaagaccaatcatcattaacttttttaagattgtgttttattnnnnnnnnnnnncacttaaatgtgtgcagctattttcttatgttgaaaagactgaaagtttaaaacatgaaaaaaatcaatattaaacattttttgttcacactgagatactgtgtatgtaaaatgccttaattattaataagccaatgtgttatgataccaatatctgttttaaaaaactaaaaccaaccatgcttctggcatgataaaatcatggaattaaatcaggggtttacattcttgtagagtgttcttgaaacactctctgcaccatttttaaaacttgagaatagttttagtatctctgatattttttgccagaatcatcatgtcatgtatgaatgtgttatccctatctaaggaaaaaggtgaatatgtttttgtatgaatgtttaactggaaatgtccatggacttggctaatttatatttactttttattgtacatagatttctaatatttttcattcctgtatcatttaaacttccttcatttgagtaaattcactaaatatttct

SEQ ID NO: 122889 - DNA, 1128 bp, Homo Sapiens
gtaaattatacaggttcaggatgttttgaaaaaccaaatgctcttttatagatgaaatctctcaatgtaactgtaataaataagcatctgacatcccttagctatattacccagtatatcctggaaaccaaagtaagatggttttcctgttcccataatccacttaattgttgttttaaaatttgaatatttgccatgcatgttataatttctgttttggatgatagttctgaccaccaccttttaatgactgcttgaagccagtgttaaaccaactataacatattcttcaaatttgcttttaagtagtgactttactagaggcaacaagtcaacacagcagccaagtgagatatattgtttttcttcctgtaaacaattggtgagcacaggaaggcaatctaccacaacgccaagatcttctatcctcaacaaataagctacaagttcacttatacttctctttctccagaaagttaaagctacattcaatctcatattcctgctgaacaaaacttgggccattgtttcatggtcctgagaaacctcagaaaaaaacccactatattttgatgatgggctttctgtctgtgaagaaccagaatcactggagttaaccaaatatgttcgactatcatggtgtaatttttcaggcaggtggcctgcacaagccagttcattttctttatttgccatgtcacagcccccacttccaggggactgtttttttctgtaacaaggatttggaaagggatgatgaactttctttctgcgatagatcactttacgaagtttatctgggcttttcacagtttgtccaactgttctatttatgtaagcagccaactgttttggagatttcttaacctccttcatgttcttattagtgaaattagagatcttttttctaggaagatcaatgaaatgatcctcaatcttattacaaaagttccgttttttaacattgtgggtttctgatgccataatctcttaagtaccggcgcctcatggtaccgcggcgcctcagcccagcctcggcgctgacgaccagcgcccggcagcctagagagtccctcggcttctgggccgagtcccactcagggccattcaaacgcggccgcgcgcccc

SEQ ID NO: 122890 - DNA, 980 bp, Homo Sapiens
ataagtccacgggttctagggattttgggaaaattaggtaatgttggttagccccaaacgttgttttttaaaaaagtatagttttgggtacatctttaaagttatcaaaacttcaaaattgagaaccaaatttaaaaagttccatatatgcacctctagtaagcactaaataggttacatagcacttggttaagaacaattaatttggtttctatattattactaattattattacaaatcaaaaaaacactgtgataagaacttcaaagcatatattcaaatatagttaaagcaatgaatagatgaaacatgtctacttttatttcatttagaaaggaattaacttttttgttaggcttttaagaaaagttctattcattttaatcccctagggaatttgtaatatgtcctacttcatatcatcttctgttgcctctattgatccacattttctgcagtggatttcttgaaaagaatcacacttatagtatgcctctagaaatatgattttactgctttgaagtttacatgaaacatgccagttgcttaactctaattttttatatgaatctcagtagcacttttgttgtacattgtgttccaataagtatagtatggaacactttctcatttttagttcccataatatgccagtttttgctttcctagtgttctgtgagtattaggatttggcaatctgcttttgcatttcaatttctgttttacatgcaagaaaaacatggacactcttatgtggtgcttgtagctgtgtctccgtagagctcagtaaatagttctacagggtttagaggatgagaagcgattgtcaaattaggctgaattgtagaacacaaataatttaattcaaaataacttaccaattttatatacatgataaagtattcagacaactttctaaatgcataatagtaaaagattgtgaccagatattatgatattaataaagttaccagatact

SEQ ID NO: 122891 - DNA, 1240 bp, Homo Sapiens
  misc_feature (1093)..(1102): n is a, c, g, or t
aataaaaagacaatcagcaatattttattttgggcacttagcatttcacagatcctcaatacattttgaggtaggtcaaatattaattatgtattttacaaacaaaactcaagcagttgttttattacttgtcccaaaccacaggagccagttctatcgtggtcaggcaataacatggtctctgatctttcagattaatctttcatgtgtgaatttaatggtaattacttgcaaatattcatgaaaaaaaccaagactagatatagaaattctactctgggttattttaaacttcttaaattgattctataatgagtatatacttgctctcattacaaatatatatatataactgatctttacattacaaatgaccacagcagtgactgtgttgcttttctgccttttggggtgagtagatcaggaagataatcagcaagctttcctcagagcactaggcagcctttaacttaaggtgctatgtttgaggcaccattgactatgatttggggtcataggagagcaggtatactgatggaaccaggattcagaaaagatgcctggatccaaaaacgggaggctctctgcaagtcaaagatgaagagaaaaatagtaacatctcaagctactgatcctgagtatcatgctacagcattacaactacttgtgagaggagctcctacaagagcagtaaacttgtcccagtaaagtctgctaagttctaactagataagccacaagtaaaactaaattggtattttactaaagtgacatctacagaagcaaacatctaaacatttttaataggagttttacctgtcatgtaaattactctaattgtcacaagcctaattcaattagcttgtcataattcctaaaataatttaccaaaattcagctcatcttgacataggttcttgagccagtattccgaaccgtttcattataaagttccttttatttaaacaattgtagaatattagtaataataaaggatcaagaatagttaacttgagcctaggagtaaggttgcagtgagctgtgattgcactactgcactagagctcaggtgacagagcaaggccctatcctnnnnnnnnnngagaaagaagttaacaactgagaaattagaaggaaaacgccattattgtgttatataaaagagtaaggatatagacacctatgcttccatatacaacaaacagctcaataccatttgagtcaaagaacaaaggggaaa

SEQ ID NO: 122892 - DNA, 1113 bp, Homo Sapiens
atcattttcttcttccgggatgtctcaggaattgagaacaatgacgaccaatagctcagatcctttccttaacagtggcacctatcactctcgagatgagagtacagacagtggactaagcatgagcagctacagtgtccctcgaaccccagatgacttcctgaacagtgtggatgagatggatacaggtgatactatcaaccaaagcaccctgccctcacagcagaaccgtttcccagactaccttgaagccattcctgggacaaatgtggaccttggaacactggaaggagatggaatgaacatagaaggagaggagctgatgccaagtctgcaggaagctttgagttctgacatccttaatgacatggagtctgttttggctgccaccaagtctagataaagaaagctttcttacatggttatagagccctcaggcagactgaattctaaatctgtgaacggatctaaggagacacatgcaccggaaatttccataagccagttgcagttttcaggctaatacagaaaaagatgaacaaacgtccagcaagatactttaatcctctattgttctcttccttgtccattgctgctgttaatgtattgctgacctctttcacagttggctctaaagaatcaaaagaaaaaaactttttatttcttttgctattaaaactactgttcattttgggggctgggggaagtgagcctgtttggatgatggatgccattccttttgcccagttaaatgttcaccaatcattttaactaaatactcagacttagaagtcagatgcttcatgtcacagcatttagtttgttcaacagttgtttcttcagcttcctttgtccagtggaaaaacatgatttactggtctgacaagccaaaaatgttatatctgatattaaatacttaatgctgatttgaagagatagctgaaaccaaggctgaagactgttttactttcagtattttcttttcctcctagtgctatcattagtcacataatgaccttgattttattttaggagcttataaggcatgagacaatttccatataaatatattaattattcccatactttaatatagattttggtggataattt

SEQ ID NO: 122893 - DNA, 1094 bp, Homo Sapiens
  misc_feature (72)..(72): n is a, c, g, or t
  misc_feature (185)..(197): n is a, c, g, or t
  misc_feature (226)..(226): n is a, c, g, or t
  misc_feature (256)..(316): n is a, c, g, or t
tcgcgccgccggggggtgtgttattcttgggggcggaggagaaaacacaacccaactcttttgttgtgggcncgcggatgtctctttgtggggaagaaaaattatttacccatttgtttttgttttgtggtagggggggccgccccctcccaaacaaaaaaaattttagaaaagatttttttgannnnnnnnnnnnncgccgaaaaaaatagcaaagtataggtcnagtgaaatccgcgcgacccaggagagggcnnnnnnnnnnnnnnnnnnnnnnnnnnnnnnnnnnnnnnnnnnnnnnnnnnnnnnnnnnnnncaaggtggggaggaagggcggaagaaaagatgatatggggggtttgttttttacacttaatattttatttaacatgttatccaaccacttctaaaacagcctccatggcacggtatggaatagagcagtgattctggcacaggaaatggtctccaaaatctcaaaatatcagatctctaccttgtcaagtcatctattaagttcaatgttcaagattatcaagcatacagccccactcttctactgtaagcaatggatgggctagagagatgtcaaatcaacatgggtactgccatgcccttaggatagcatctgtcctcaaagctgaaagcagccattgcccctctttgctgtcttccaaaaactccccagacaggccaatggctgattgtggacaaattcaccagaatctggttccgtagctacagtagaaggctaagtatctggtttctgatctcaatggttcagaatcctgagcctgaggtgactctcccagagccttgctcacagcaacaatctcactacctcttgacaacgttccgtggcacttcaaatttgcctctgcagctagagcatgtctctttcacatccagccatctgcacccatgcagaatagctgctcacactagcccaggagtcctcagggtcttctacagttctgcacccaggaagaatggaggaggcagaaggtacttgtcacccttcctggctagttgttgtgaagtccatcactcaattccagaggaattcagttctagaggaaaccttttctacaaag

SEQ ID NO: 122894 - DNA, 878 bp, Homo Sapiens
  misc_feature (200)..(208): n is a, c, g, or t
  misc_feature (280)..(288): n is a, c, g, or t
aagtgaggctaaatttttattagttgaattctaagttattaaacatattttaattatattcatccccaaactgcattgattcaaaaacacattttatgtaataatacattttacacaataaaatttaatttattaaagaaactcattttatgagtataattaactcaaaaagtttcttaaagcttttatctccaaaattnnnnnnnnntattgtatagacagaagtcttctgggcttggactcatgttatagtggttccctctcatccattaaaagacannnnnnnnnaatttgagggttcctataaagggtacacttgcttcggtgacatgtatatttttctctttgtaggactattcttatttcctcagttatatacagagaataataattagataaagtatggtgataaaaactagatttcacacattagcatttctttcatgagacatgaatactgacatcagttctctgcgtacattaagaagctcctcttctagcatgtccttaagaagcctgtcttgcagcactttcatatcttctttcatcaaacacatctcggatgtaaaaacagtttcttcactatcagtattacagaagacacttttagccaatgaagttttcaaaagatgaagcctctgttgttcgcttttttgatatgcactgaacttctgaaatatcttttcccaaaagtccacacattccttttccaaatcttttaaagactgtgaatctttctcaaaattctccagctcctctatgataatgaattgcaatttatcaagttttctaatcctagagtcctgactttgatgaatcattggtctcagatgctgctgagcttgttttcaagactgcgtagtaaaattactcaccat

SEQ ID NO: 122895 - DNA, 1071 bp, Homo Sapiens
gccgccgccccagggctcgcccggtcctgtctccgtccctgaagcggtgcggcgctcaggtgagcgaggtgtcgtcgtcgctgccctcgccgcccgcgccgcccatccgctcctctctgctctcggccaccgcgctctcgtcgatgttctccagtgagtccgcatgctgcaccgacagctccgacagcgccaggctcggcaacgggctctgctccgggtgcagccacggcttgaagtgaggcaggtgcttctgtttccactcggggtacttgaggcacgccttgtacatcttcttcatggccttgggagccaggaactgagaagatttattcaccacccacttgggtaaggagcctttggggtccacctgggccaggtaggtgatgacgcagctcttgggccctgtgctctggatgaggtagcccgtctggatggacacagctcggaccaagtctttccgaggtgggtatttgggatgtttgactgagtagttcataatgatgtaatcagcgcccatggggagccaggagcggagggtgatgacatcacggttcttcaggggcttgggacacctccaggagtaatagcccacgtcagcgttgactgtcaagcgggcgatgtcaaaagtctcaatgacgttgctgtcccatttcttgcggtactcaatgtcgtgtaggacgtcgtagagtgtctcggctggcacatcacagcaactccatccggcacttgatcttgtgcagcgtccgatccatctccacagcctgcacccagacagacaccccagccctgctataggtcaggttccagcccacctcagcctcacactctgaccggaagctgcgaaagtcttggtcatcgggcacctggacactctcacggcccaggaccggccgaggcccttggggctctgtagaggccgccagcttctccatggggagtgtggggaggcccagggacctggtcctagtccggctctcctgggtcctccgcggaggctccgacaacgtcgacgcggctgcagatgctgacgccaccttcctggacctttgcccgccgctccgccgggcccgc

SEQ ID NO: 122896 - DNA, 598 bp, Homo Sapiens
  misc_feature (570)..(570): n is a, c, g, or t
gaggctgtgggatcgtttattggggctctgtccagccaggctgcagcacccgcctgggcctggcccggtgccaccaggtgccgggtgggggaggggagaaagtgcaggagcggccgccgccccagggctcgcccggtcctgtctccgtccctgaagcggtgcggcgctcaggtgagcgaggtgtcgtcgtcgctgccctcgccgcccgcgccgcccatccgctcctctctgctctcggccaccgcgctctcgtcgatgttctccagtgagtccgcatgctgcaccgacagctccgacagcgccaggctcggcaacgggctctgctccgggtgcagccacggcttgaagtgaggcaggtgcttctgtttccactcggggtacttgaggcacgccttgtacatcttcttcatggccttgggagccaggaactgagaagatttattcaccacccacttgggtaaggagcctttggggtccacctgggccaggtaggtgatgacgcagctcttgggccctgtgctctggatgaggtagccacctcagcctcacactctgaccggaagctgcganagtcttggtcatcgggcacctggacact

SEQ ID NO: 122897 - DNA, 556 bp, Homo Sapiens
cggtcctgtctccgtccctgaagcggtgcggcgctcaggtgagcgaggtgtcgtcgtcgctgccctcgccgcccgcgccgcccatccgctcctctctgctctcggccaccgcgctctcgtcgatgttctccagtgagtccgcatgctgcaccgacagctccgacagcgccaggctcggcaacgggctctgctccgggtgcagccacggcttgaagtgaggcaggtgcttctgtttccactcggggtacttgaggcacgccttgtacatcttcttcatggccttgggagccaggaactgagaagatttattcaccacccacttgggtaaggagcgggatgtttgactgagtagttcataatgatgtaatcagcgcccatggggagccaggagcggagggtgatgacatcacggttcttcaggggcttgggacacctccaggagtaatagcccacgtcagcgttgactgtcaagcgggcgatgtcaaaagtctcaatgacgttgctgtcccatttcttgcggtactcaatgtcgtgtaggacgtcgtagagtgtctcg

SEQ ID NO: 122898 - DNA, 931 bp, Homo Sapiens
cccaggtggagttcccgccatggctgccacccgaccaggttccggacacgcgcccaaggttcgggcaaccggggtttgcttccggggtgcagcccccgccttgaagtgaggccaggtgcttctgtttccactcggggtacttgaggcacgctttgtacattttcttcatggccttgggagccaggaactgagaagatttattcaccacccacttgggtaaggagcctttggggtccacctgggccaggtaggtgatgacgcagctcttgggccctgtgctctggatgaggtagcccgtctggatggacacagctcggaccaagtctttccgaggtgggtatttgggatgtttgactgagtagttcataatgatgtaatcagcgcccatggggagccaggagcggagggtgatgacatcacggttcttcaggggcttgggacacctccaggagtaatagcccacgtcagcgttgactgtcaagcgggcgatgtcaaaagtctcaatgacgttgctgtcccatttcttgcggtactcaatgtcgtgtaggacgtcgtagagtgtctcggctggcacatcacagcactccatccggcacttgatcttgtgcagcgtccgatccatctccacagcctgcacccagacagacaccccagccctgctataggtcaggttccagcccacctcagcctcacactctgaccggaagctgcgaaagtcttggtcatcgggcacctggacactctcacggcccaggaccggccgaggcccttggggctctgtagaggccgccagcttctccatggggagtgtggggaggctccgacaacgtcgacgcggctgcagatgctgacgccaccttcctggggacctccccaggcagagttggccctcgtgccgattcaacacccaggcctcgtacctagcctgtaa

SEQ ID NO: 122899 - DNA, 906 bp, Homo Sapiens
gagtttccgacaagcgcccagggttcggccaaccggggttttgctccggggtgcagcccccggcttgaagtgaggccaggtgctttctgtttcccctcggggtactttgaggcacgccttgtacattttcttcatggccttgggagccaggaactgagaagatttattcaccacccacttgggtaaggagcctttggggtccacctggcccaggtaggtgatgacgcagctcttgggccctgtgctctggatgaggtagcccgtctggatggacacagctcggaccaagtctttccgaggtgggtatttgggatgtttgactgagtagttcataatgatgtaatcagcgcccatggggagccaggagcggagggtgatgacatcacggttcttcaggggcttgggacacctccaggagtaatagcccacgtcagcgttgactgtcaagcgggcgatgtcaaaagtctcaatgacgttgctgtcccatttcttgcggtactcaatgtcgtgtaggacgtcgtagagtgtctcggctggcacatcacagcactccatccggcacttgatcttgtgcagcgtccgatccatctccacagcctgcacccagacagacaccccagccctgctataggtcaggttccagcccacctcagcctcacactctgaccggaagctgcgaaagtcttggtcatcgggcacctggacactctcacggcccaggaccggccgaggcccttggggctctgtagaggccgccagcttctccatggggagtgtggggaggcccagggccctggtcctagtccggctctcctgggtcctccgcggaggctccgacaacgtcgacgcggctgcagatgctgacgccaccttcctgggacctttgcccgccgctccgccggggcc

SEQ ID NO: 122900 - DNA, 720 bp, Homo Sapiens
ttttttaacaaggtccatgaagcttcatatccttaaggcgtttgttatcaggagcagcaggggacagcagagtcctgcctgcgcaggaaccctctaagcagagtgcagtgggataacaaacttgcagccaaagggcgagtggtagttgatgcccacctcctggaagacctgctggggaatgccaatgtcgcacaaatagatacggcctgcgtgctcccccagtggcagaggcaggcccagtgccagtgaccatttggcatcaatgccctgttcgacttcatgcacaggagggtctatgctgagtactggtgcccggttctggttggcccaggccacagctgccttgtaccagggttgatcgcgcaggaagacgttctcagggcaatcccaggcagttgatgaccaggtccacagggctagtgggcagatctttgaggctagacacttgttggccttgggtcttgctgaagagcgacagctcattggtgatagattccaacatcttgacaaaattgggcaggaaaaggatgacctggacatcatggttggctaggtgccttccacagctgataccctgagcccccttcacatgaggtccacacagtagagccactgtaggcctctggtgaaatttttgggattcacctgttaggtctccgaggagggtcagtgcatctgactggcaacacacctgtcatctccagtctccgctcaagggtc

SEQ ID NO: 122901 - DNA, 679 bp, Homo Sapiens
  misc_feature (230)..(275): n is a, c, g, or t
  misc_feature (497)..(506): n is a, c, g, or t
tacatgacctgctgaatttcggtacagtgtttttgtagctaacttattttgtcatgcacataatgtatatttgttatgcactacttttgtatatcttgtttttccaacagtgaacatttttaggcacacttttcactgacgggatatctctttatgcaatacctcaatttttcatattgcaaagagtagctttttgtacttttattactgagagatcttcatatacttcnnnnnnnnnnnnnnnnnnnnnnnnnnnnnnnnnnnnnnnnnnnnnntgctttttatacatttcagtgctctgcatacattttaaattatgaatgtcgtgcactggcaatgctattttagagtctgcagagaagagaaagcatgttgcttaaacatccttccccagcaccagctattggtgtacctataatttaagaaatagtctatgtaaagtcacaaattaatgaaaaaaattcgcatgaaaatgacagataacactgtagttcctnnnnnnnnnnttaaatgcataagcataaggtagaaattaaaataacaaaattgtctacagcttcttactaagtttttaaaattattcataaaatgcagacatttttggtgaatgtttagccatttttaatattaataaattgatgttaagtgtttgattcagagatgtctgctcttttaaatt

SEQ ID NO: 122902 - DNA, 1762 bp, Homo Sapiens
  misc_feature (77)..(111): n is a, c, g, or t
  misc_feature (453)..(465): n is a, c, g, or t
  misc_feature (871)..(908): n is a, c, g, or t
  misc_feature (1139)..(1139): n is a, c, g, or t
  misc_feature (1147)..(1164): n is a, c, g, or t
  misc_feature (1339)..(1354): n is a, c, g, or t
  misc_feature (1604)..(1612): n is a, c, g, or t
  misc_feature (1639)..(1639): n is a, c, g, or t
tatagactcactataggcgctacgtcgtcgagccgaacgaccgagcgcagcgaagtagtgagcgaggaagcggccgnnnnnnnnnnnnnnnnnnnnnnnnnnnnnnnnnnncagtcgacggtaccggacatatgcccgggaattcggccattacggccggggttgcgctacctaacagtaccatcttggatccttcaaaaccaaagacttgccccagcactgctgtggaaccacctggcttatgacccctatggatgatctttaggaaaagcagccctttacttttaatacaggctttaatgaactatacctgttaagttccaaaggtcaaaatggaggcatttgctgtctaatattcaaacatagaaagggagctgcttttaaagaattccctgcaaatactgaaagcagtcatgcgaatggagggtgctcttgtgtagctggtcagggacnnnnnnnnnnnnnctcctgaactacatgattctaattggaatgttcatttgcctctttttactcttttaaatgcttgtaggtggcttggggtgtgctatcgtgctgttcctactcagtaaacaggtgtgatgagttaacaagaaataacactgtttgagaactagctttgaataataatttttccctttgtacatgacctgctgaatttcggtacagtgtttttgtagctaacttattttgtcatgcacataatgtatatttgttatgcactacttttgtatatcttgtttttccagcagtgaacatttttaggcacacttttcactgacgggatatctctttatgcaatacctcaatttttcatattgcaaagagtagctttttgtacttttattactgagagatcttcatatacttnnnnnnnnnnnnnnnnnnnnnnnnnnnnnnnnnnnnnncttatattctgctttttatacatttcagtgctctgcatacattttaaattatgaatgtcgtgcactggcaatgctattttagagtctgcagagaagagaaagcatgttgcttaaacatccttccccagcaccagctattggtgtacctataatttaagaaatagtctatgtaaagtcacaaattaatgaaaaaaattcgcatgaaaatgacagataacactgtagttcccncaaccacnnnnnnnnnnnnnnnnnnccctggtcggccgccctcggcccctcgaagaagcttttctagaccctttcgttttggcggcgcggggccccagtagggtaaggggaaacatggggccataagctgggtttccccaagggagaaaccctggggcccatggaactaaaggggcccttgggaaattccctcccccccnnnnnnnnnnnnnnnncacgcccccgggggcggggaaaaaacccgcgagaccggttttctcgtggaaccacaaaaatcgcccaaaagaggggaagggcttgcctgggagaagggtcccgattcaaccgtgggagatccccttttttacaaaacagggggaggttcctacaaagggggagaggctccccgaaaatattcacaaaatttaaatgagccccccgcgccgcccttgtggcagacattcatattagtgagagagaagaacnnnnnnnnnagaaaatctctctctttaaagagagtnatttctcgggggcccgccagagtgggggaagacccccacttccacaaacacggcgggtctggttgaggtaaaaccctgggaagactccccctcgctgggcggcaaatccaacacgctccctcg

SEQ ID NO: 122903 - DNA, 1839 bp, Homo Sapiens
  misc_feature (95)..(113): n is a, c, g, or t
aaaattttatgtaatgtttatttttttaattcccatcctaactttggctttaatccttacctctcatttccattcttttctttgaaatccaattnnnnnnnnnnnnnnnnnnncaaagtgtttaaaatcacaattatctagagtcataataaaattttcttgtctccaaagagggggaaaacacaccacttttatttttatgcagcattttcaaatatgcatgtcaatatatattttataaactatttaaaataaaaacccttcatcctttgaggttattgacattttctagttcactgacacatctcccataatacaatagttctattcattttcatgaatgaggtgggaactacactaaaaagtaggattttaatccctgaggtgccagttaaaatggacgaggttgcccttgcaacacaagattttaaaaatcagccttaaataataagcatggatcatgctatttgaatcagaatcacctccatagcatgaagtcatttaggaaattgcatttattgggttaagttcaccctgctattcccagccctcatgctataatgatctttccttttgcaaaggaataacacagagcaaggaagtctgctgaaacttctgagatcctcagaaatcaagagaaaccacagtcgcgtttctccgatctccatccacagtgttggagaggatttttcagcaccattccgagacctggaaagggtgatgaactgctttgatttttctacttctccatacatttggccaaaaaggagcaatcctcctggctagaaaaggggcatgtcctgctttttctctgaaatcacaatattagcagagctgggttcagttccttgtgcccactgtccctgcagacgctctcctttccaggcggcctccagtggtttccggggtcctgctgctccctaatagtagcgattcaggctcctggtcccgggcacctcaggctggccattcatccagatctccctgatgatgcgctcgcgctcctccagccgctgggcgcgctccagctcctccgcagaggtgaacacattcttgttcaaagtcctctcgaagcggcggtgtctccgcacggagagatcggacacggtgtcctcactgccatcctcgctgtcgctgctgtcgctgctgctctctctgtcctgcaggaacttcttcccgggacgccgcctgcagtctgtgtggcaagagatccttatcaccagagcagccagggtcagcaccagcccgatgcacacgccagaaacaaagtacagagctgctcgctcaggattttctgagacaaaggaataggccgctaggatgttgctgagcaaagccatctccacgtgctctgggctgtggctgaggggcagcctcatgggacatccagaggggacctcctggaggtgcttggctgaatcaacgtggccactctccttcttctcttctggggagaggtggggtgtcaggagcagagaagtttctggtaagaacagttcatctctgatgatgttggcatcagccagtagaggttctaaaacttgtttggccccagttggcttctcagactctttgctggggccccggcgcgcacttccggggactgcgcttggggcgcgcggggccgagcagggggacccggagctgatcactgaggggcggacacgacaaagcgctgcccgggtcttgggccggcaccagtacctcggaaaggaatcccggcggaggggccgccggggtcagggctggcctggggatgtggggtcccggcctgggtgctcacggacggcggcgccaagccccgcagaagctgcaggagcccgagtcagtgggaggaaa

SEQ ID NO: 122904 - DNA, 1085 bp, Homo Sapiens
actttctcccataccctttggcccaaaaaagggggccatccttccctggttagaaaaaggggccattccctgctttttcttcggaaacccccattttagccagagctgggttcatttccttgtgccccatgtccctgcagacgttttccttttccagggcgcctccaagtggtttcccgggggtcctggtgctccctaatagtagcgattcaggctcctggtcccgggcacctcaggctggccattcatccagatctccttgatgatgcgctcgcgctctcccagccgctgggcgcgctccagttcctccgcagaggtgaacacattcttgttcaaagtcctctcgaagcggcggtgtctccgcacggagagatcggacacggtggtcctcacgtgccatcctgcgctgtcgctgctgtcgctgcttgctctgtctggtcctgcaggaacttcttcccgggacgccgcctgcagtctgtgtggcaagagatccttatcaccagagcagccagggtcagcaccagcccgatgcacacggcctagaaacgtagtacagagctgctcgcgtcaggattttctgagacgaaggaataggccgctaggatgttgctgagcaaaagccatctccacgtgctctgggctgtggctgaggggcagcctcatgggacatccagaggggacctcctggaggtgcttggctgaatcaacgtggccactctccttcttccgtcttctttgctggggccccggcgcgcacttccggggactgcgcttggggcgcgcggggccgagcagggggacccggagctgatcactgaggggcgtgacacgacaaagcgctgcccgggtcttgggccggcaccagtacctcggaaaggaatcccggcggaggggccgccggggtcagggctggcctggggatcgtggggtcccggcctgggtgctcacggacgcgagcgccaagccccgcagaagctgcaggagcccgagtcagtgcgacgcgtggtcgacgatatcccgggaattccggaccggtaccagcctgctttttgtaacactggtctatatgtcacctatgcggtggg

SEQ ID NO: 122905 - DNA, 776 bp, Homo Sapiens
  misc_feature (121)..(180): n is a, c, g, or t
gactactcagaggtatgtaacgaccacaatacctgctatatgtcgatgattcagtcagagttaacagtagttaagcccccccaaaacaagacggaaagtgaaaatacttcagataaacccnnnnnnnnnnnnnnnnnnnnnnnnnnnnnnnnnnnnnnnnnnnnnnnnnnnnnnnnnnnnccatgtaatgcagaatttcaaaatttctgcattcacggagaatgcaaatatatagagcacctggaagcagtaacatgcaaatgtcagcaagaatatttcggtgaacggtgtggggaaaagtccatgaaaactcacagcatgattgacagtagtttatcaaaaattgcattagcagccatagctgcctttatgtctgctgtgatcctcacagctgttgctgttattacagtccagcttagaagacaatacgtcaggaaatatgaaggagaagctgaggaacgaaagaaacttcgacaagagaatggaaatgtacatgctatagcataactgaagataaaattacaggatatcacattggagtcactgccaagtcatagccataaatgatgagtcggtcctctttccagtggatcataagacaatggaccctttttgttatgatggttttaaactttcaattgtcactttttatgctatttctgtatataaaggtgcacgaaggtaaaaagtattttttcaagttgtaaataatttatttaatatttaatggaagtgtatttattttacagctcattaaacttttttaaccaaccaaa

SEQ ID NO: 122906 - DNA, 981 bp, Homo Sapiens
  misc_feature (339)..(403): n is a, c, g, or t
aataggcatggtacctttttccatttcttcttgtcggaagtttcttttggttcctcaagctttttcccttcaaaatttcccggacgtattgtctttctaagctgggactgtaataccagcaacagctgtgaggatcacagcagacataagggcagctatggctgctaatgcaatttttgataaactactgtcaattcatgctgtgagttttcatggacttttccccacaccgttcaccgaaatattcttgctgacatttgcatgttactgcttccaggtgctctatatatttgcattctccgtgaatgcagaaattttgaaattctgcattacatggannnnnnnnnnnnnnnnnnnnnnnnnnnnnnnnnnnnnnnnnnnnnnnnnnnnnnnnnnnnnnnnnatctgaagtattttcactttccgtcttgttttgggggggcttaactacctgttcaactctgactgaatcatcgacaatatagccaggtatttgtggttcgttatcatactcttctgagtagtcatagtcggctcccgaggacggttcactactagaaggcatttcattcacaggggaaatctcactccctgaagacatctcacttcttgaggtaacctcaaatccatcagcactgtggtccccagaaaatggttcacgcttcccagagtaggtgtcattgaggtccaatccagcagcataatggcctgagccgagtatcaagagcgacagcaccaccggcgccggcggtagcagcggggctctcattggtccttcgcagcggcggcgtctcggtctctggggcaactcggtctctgggacacgagctgccgccaaaacgagcgggtgttggaagagcgagtggagaccgggagtgtgcgccgctctcgaaggcttggggagctcggggcggcgggcgcggcgcctcgggctgtcccgggacctctggggcgctggcacccaggtgtgcgaacgtctcc

SEQ ID NO: 122907 - DNA, 955 bp, Homo Sapiens
  misc_feature (232)..(232): n is a, c, g, or t
  misc_feature (265)..(265): n is a, c, g, or t
  misc_feature (311)..(311): n is a, c, g, or t
  misc_feature (427)..(506): n is a, c, g, or t
tagaaggaccggattcatccccttttagggctatgctttgggcaagtgactcccaaagggaatatcccggtaattttatctttcagttatgctaatagcaatgtacatttccatttcttttgtcgaagtttcttttctttcctcagtttctcctttcatatttccctgacgtattgtctctaagctgggactgtaataacagccaacagcttgtgagggatcacagcagacnataaaggcaggctatggctgctaatgcaatttntgataaactactgtcaatcatgctgtgagttttcatggacttttcncccacaccgttcaccgaaatattcttgctgacatttgcatgttactgcttccaggtgctctatatatttgcattctccgtgaatgcagaaattttgaaattctgcattacatggannnnnnnnnnnnnnnnnnnnnnnnnnnnnnnnnnnnnnnnnnnnnnnnnnnnnnnnnnnnnnnnnnnnnnnnnnnnnnnnactttccgtcttgttttgggggggcttaactacctgttcaactaaaaaagaaaagatttattgacaagagtctctcaaacgtgaatataattttagagacatgagagaaagatgtcatagcagtgagcgctcacaggggtaacagccatgcgtgcctcattacctaacacaatataaaagttagagaggactgcataaccctaatttataattttcagttttttctacctgaaagtagtgtccactcatgattatagttgggaattagtgagtactacttgcaggtggaaaaaactgagaattataaattagagttactctatgttacaatgctccaacacccagattacaacagattataatcaaattgataatttccatggagctcattttcgtggtcaatctatttgaaaacaggagcccaggaatatttgtattcagtgcttcag

SEQ ID NO: 122908 - DNA, 627 bp, Homo Sapiens
  misc_feature (362)..(460): n is a, c, g, or t
  misc_feature (467)..(557): n is a, c, g, or t
acagaaggagttagagaaatctgaaaaagaagaggatgaggatgatgataggaaatctgaagacgataaagaggaagaagaaaggaaacgtcaagaggaaatagaacgccagcgtcgagaaagaagatatattttgcctgatgaaccggccatcattgtacatccaaattgggctgcaaaaagtggcaagtttgattgtagcatcatgtctttgagtgtcctattggactacagattagaggataataaagaacattcatttgaggtttcattgtttgcggaacttttcaacgaaatgcttcaaagagattttggtgtccgtatatacaaatcattactgtctcttcctgagaaagaggacnnnnnnnnnnnnnnnnnnnnnnnnnnnnnnnnnnnnnnnnnnnnnnnnnnnnnnnnnnnnnnnnnnnnnnnnnnnnnnnnnnnnnnnnnnnnnnnnnnntcaggcnnnnnnnnnnnnnnnnnnnnnnnnnnnnnnnnnnnnnnnnnnnnnnnnnnnnnnnnnnnnnnnnnnnnnnnnnnnnnnnnnnnnnnnnnnntttctacacctacccacttggtctaaacttgatccaaagacaatgaaggtaaatgacctccgaaaagaat

SEQ ID NO: 122909 - DNA, 710 bp, Homo Sapiens
  misc_feature (115)..(206): n is a, c, g, or t
  misc_feature (242)..(311): n is a, c, g, or t
tatctgttgatatctcttttgtcatctcgtttggtcatttcttcctcatccctatcatcttcttcatcctcagcttcttctgcttccatagggtcatattcatcttgattgttannnnnnnnnnnnnnnnnnnnnnnnnnnnnnnnnnnnnnnnnnnnnnnnnnnnnnnnnnnnnnnnnnnnnnnnnnnnnnnnnnnnnnnnnnnngcctgattttctccgtttgggttttggttcatcagnnnnnnnnnnnnnnnnnnnnnnnnnnnnnnnnnnnnnnnnnnnnnnnnnnnnnnnnnnnnnnnnnnnnnngtcctctttctcaggaagagacagtaatgatttgtatatacggacaccaaaatctctttgaagcatttcgttgaaaagttccgcaaacaatgaaacctcaaatgaatgttctttattatcctctaatctgtagtccaataggacactcaaagacatgatgctacaatcaaacttgccactttttgcagcccaatttggatgtacaatgatggccggttcatcaggcaaaatatatcttctttctcgacgctggcgttctatttcctcttgacgtttcctttcttcttcctctttatcgtcttcagatttcctatcatcatcctcatcctcttctttttcagatttctctaaccccttctgtcgtcttctcgcagccgtatagtagtagtagacggccgc

SEQ ID NO: 122910 - DNA, 784 bp, Homo Sapiens
  misc_feature (119)..(169): n is a, c, g, or t
ggcacgaggcacttcttgactttcttccacttctaattcattgttttctctttccgaaacacccttttcttctttcttctcttggtcagtgtctgtattatcctctttaccagccacannnnnnnnnnnnnnnnnnnnnnnnnnnnnnnnnnnnnnnnnnnnnnnnnnngctaggtctataatttcaatggtttctttgtctgaggatagtatggtaggagaaaaagttgatgatccgctgaaatatggcgctcttgctgtggctcttgtcaagttttttcgaaggttctcattcactgcttcactttctaataattttgccctgagatcttcgatttcttttatataactatgaatcatattactaatctcctcatttccttcacctgctctggcaagaacatggttggcctgatcactaacaagctgtgtaattctggacctcaatgcatcaaccgtctcttgcatggctttaattcttacacgcaggttattattttcagtctgtagcatagcattctcatgaaacatgtcattgatgctttccacaccctcttcgtcaattattcttttacctgttttgtactccatgagctccatctgaagtcgtgtgatttcactacgaagtgcattgatttgctgactagctctgtcctgattgaccatcaccttattcttgatatttctagctcgattggcgtatttcagggtgtttaacgtttccataaagtctctgtctgaagggctgacacatgctatcatgattgtttggctattacccccg

SEQ ID NO: 122911 - DNA, 1712 bp, Homo Sapiens
tttttttcggctaattaaactttgattttattatgtacatggatactattaaaaaggtgaattcgtgaaattttaagattgtgtataacacataaaagtcaaacttctaatttggtaagtaaataatcctaaacttaacacagtggttctttaaaatgtttaaatatttgtcttagatgctgaatatagacaaagagaactgtcatcttaggagtaaacacactataactctgtaaaaagaaatcatagaaaagtaaggtagtatttctcaaataagtcctcccatgctaaaaccacagtgacgcgcagacactagcctagaacctattccagtactgcaagtactgacaggctgcaaacaccagtaacaacctgcctggagccttgaccttgaaaacaaatggctgttgtgaactgatgtgaccaaaccaagagatggttccttacaaaaacaaagcaaaacacaagatgaaaatcaagcagaaaaagaaaataatataaccttattttgagaacacgacttcatctcaaaggatactttttgtatattaatcctcacagattaataagagcagttaaaataattttgtgtagatccagaatacaacaggtgactaagttaatgactaacacaatttacagacttcaaaatgataatactgaattccaaatttcacagcataacagatgactataatatactaccctaatcaactcttatttagtgtctatacagcatctacagagctcttcatccatcatatttctcctcttagactttctgtgttcatgactcattttcatccatttctgtcggagaactgctttgggaggagcagagcgagtaagtgccatactccggtatgggcctgtgtggtggccagttgttttcttgcaagagtgatcttggagataaaataaattgagtctcaaaaaattccaatgactcgccatcttccttctccatcagatactgatactctccgaatctgaccatgcacctgtatggcaggtccattttatttaggtagcccagctctctgcgtgtccacgatcagattggtctttttactcatatgtgtttatttcaaaggagagaactgagctgttgaattttttaaacagctgcagagaaaactgaactcgggaaacctgtttgtcctgaaaagtataatgacagatgttggaatttcggccaaatttcaccacttcgctggaagggagtttctctctgtttaaacttattgactgaaatattccacactgcaactggccaggatggtaaaccgtcatctggagacaagttactgtctcttctgtgtcagcatcttcaaaactggtcatgatgtgcacaaggcccacctggggctcggggagtcagtgaactctcttcagctgttcggctctcccggctcagagcgaggggaatcgaggagactgggcgcaggatgggggtggacacccggccgctgctcctccgcgcgggtaagtgtgagccccggggtgcggggaaccgagccagggaccagtgaccgcgagccgccgatcctcccgcgctcccgcagcgcgtcaggcctgccttcccactggctggcagagcacgtcctctcgcgcccggggcctttgtaaagagcgcagcggtggcgcggaggttttcaggcccccggccgtaatggccgaattcccgggcatatgtccggtaccgtcgactg

SEQ ID NO: 122912 - DNA, 1320 bp, Homo Sapiens
  misc_feature (1209)..(1243): n is a, c, g, or t
ttttaatgatagaaactaaatgttacaatttattccatcttcaggattacagacattacagggcaggatgagtaaacaaggcaaatgaagcgagcaccttcagcttcccccctaccccgacatttaaccagatgcagcattttgacatttttaggatatgcaggttgacaattcactgacttgggttgagagctggcaatagcagatctttgcaatttaggttcttcctccacagctattccaagtatcttaattcctgaactgcacactgagagctctgaaatggtgttcactgcaacattcttgcagctttcacatcttaatctgacacctcttgtgaaggcagggaactgtgttaaaagctgtcttcctctttgctaatccaggccaccatcaatcttaaccattagttactatataaaaataaaagtgtgctcaaaagcactcactgaaactgttgtgcccagatcccttttcagagcattagttccctgagaggaaaaaaagaggtcctaaccaattgctttcataaatagtgaccccagtacagtgtatatgtcttttgcagcagaaatcaagaggtcaggcagctctgctcatcctgactagtttatcatcgtttgcatacaaggtatatttatgtaaagctgattccacgccaagtattgcaaccataatctcaaaaaaattgttcaattttagcacacagttcctgcaagataccacagcaggtgagaaatcatctcaaagagttcatcttttacaactgagaggaaaacatcgaaggaggaaataaaactcctctctcctaagttcctcatcaaatctgatggctatgttcacagagttagttgacaaaaatccagagtcctcaatttctggacttgcgaaatccttcaaggtgactgtcaaggtcaagaagaattttcaggcttttctttgccatggcccatgaactccagtccttcaataggaatctctttctcctttattgctttctgaacacactgctggtagcgcttgaagaggtcggtgcacgggtccccggagctgtcccccttgagaaatttctcggcgaaccagcgattgaagcactggtcgtactcgcgcttcatgtccgtgcatgcctcccccacactgttcatggcgacagtggtccccggccgtaatggccgaattcccgggcatatgtccggtaccgtcgactgnnnnnnnnnnnnnnnnnnnnnnnnnnnnnnnnnnncgccgcttcctcgctcaatgactcgctgcgctcgtcgttcgctaataaagcggagcgcctatatgatctataattct

SEQ ID NO: 122913 - DNA, 1059 bp, Homo Sapiens
tttggggttcttttccgccgcccccaagtgttttccccacaagtttttggtttaattccccggaaactcgcacccccgggagaaggttgggaaaatggggggttccacctggaaaccatttcttggcaggcgtttacccattttttatttgtggacccccttcttgtggagggccaggggacacggttgttaaaaaagcgggttcttccctcctttgccaaatgccagggcccccccatcaattctttaaccctttagtttgttatataaaaaataaaaagttgtggtcaaaaggcactcccgtgaaacttttttgccccagatcccttttcagagcattagttccctgagaggaaaaaaaggtcctacccaattgctttcataaatagtgacccccagtacagtgtatatgtcttttgcagcagaaatcaagaggtcaggcagctctgctcatcctgactagtttatcatcgtttgcatacaaggtatatttatgtaaagctgattccacgccaagtattgcaaccataatctcaaaaaaattgttcaattttagcacacagttcctgcaagataccacagcaggtgagaaatcatctcaaagagttcatcttttacaactgagaggaaaacatcgaaggaggaaataaaactcctctctcctaagttcctcatcaaatctgatggctatgttcacagagttagttgacaaaaatccagagtcctcaatttctggacttgcgaaatccttcaaggtgactgtcaaggtcaagaagaattttcaggcttttctttgccatggcccatgaactccagtccttcaataggaatctctttctcctttattgctttctgaacacactgctggtagcgcttgaagaggtcggtgcacgggtccccggagctgtcccccttgagaaatttctcggcgaaccagcgattgaagcactggtcgtactcgcgcttcatgtccgtgcatgcctcccccacactgttcatggcgacagtccccggccgtaatggccgaattcccgggcatatgtccggtaccgtcgactg

SEQ ID NO: 122914 - DNA, 774 bp, Homo Sapiens
  misc_feature (760)..(760): n is a, c, g, or t
tttcatgttttaccttttttattgaattatatacacctcttacaaaaatgcttgaagtaatttaacacctgtacatcagtacaaaacctggctgagtaaaatgaagagaggatctattcaagatcattaagaccaaatgtaaactgggaagtatgtggaagatagctgtccagcaagtgtctggaaggtgttctagctgggtagagagcctattctaacagacacgcacatcgcagaaagcagcatgaacagaaccacatcctagataagagttctgtgtacagaagatccatggaggcaagtgctgtcaggaaggacactgcctccctccaccctcccaaatgtcaccaccaagttccttcaggtgagacctcacacaatgtcaagtgctttctaggaaatactaagatcaggttgagagattctgcttggtctagtcaatctgaaaaattcaggctggaaagacaccttttctcaagagctgaattgacttttgccttcaaatcctgcctgcaccttgcctacgatggcatcaatttacacctaaggacctttgaagagaaaaattccattatttcttttctttcttgagagcagattttttccctcctcctttggaagatttgcagtactttgcttccatctgagccagaaattgtcatttccttttgccgatccttttgtctgctctgaatggctgcttcaggctatccacgccttcatcaagcccaactcctttctgctcatttctgcttctttnggctcttcctgagc

SEQ ID NO: 122915 - DNA, 464 bp, Homo Sapiens
ttttaataattaaaggtttagtttatacaattgataattctgcaaaccacaatatgtcaataactacatactgtaataaaaataaacaaagtcatacttaattctataatgcattaagaataacctaaaaaaacaaattgtgaataaaggcatatttaataaattagggaacatcttaacttctaatagactgggggaaatttttaagttttctatgtacacaaaggcagtgggaacaaatgaaaaaaacaaattactacattgttgcagcacattaaagactggatggtgtatattattcacaattacatcctctttcccatagcctggcagaggaaagtagttaccaagcacaggaacaatttcaacatctcactggagtctccaaaagcaagcagatactgcaggatgtcattaagcaacttactgtcacttcacaccatatgtggcagtaagaaacttaa

SEQ ID NO: 122916 - DNA, 553 bp, Homo Sapiens
caaaaccccagccctcaggccactttattgctcaagagtggtcagtctggggtatctgcatgcctgaactccatgatgatgtcgcctgtgtcggggtgaaactccactgcatagctgacagtccgtgggccacccagcagtgctctgggatctggggcagggctgaagaagtagacggcctgcttgcagtgggggttccagcagcagcccccctcagggtctgcaggctccaggaggccagtgctgagcgtgcactccggggtcaggtggtactccatccatagcaccgctgcgtggctctgcccgggccttctgagctccacggtgccctcggcacacaggggctgcaggggcaccggctgctggaagtcaaaggtcaggatctgccagggctcggaaaggctgcggcatgggtactcccacagcgggtggggctcagcttccctgctctccctgaagtccagggcacgcttaatcatgtcgtccatgatgtgcacgtcgaagccttcgcagtcaccacaggggctccggatccgccacaggtccctgaact

SEQ ID NO: 122917 - DNA, 685 bp, Homo Sapiens
  misc_feature (663)..(664): n is a, c, g, or t
gaacatgttaaattttattaaaaatatttaacatcgtacaaatattccaatacagttatggtacatgaacactgtaccaaaagcatgatttttattaaactgatgattaaatggaaaaggtcttgcaaatgtccctattttggtatttcttatgttactatatccatatcagcaatttatgtttgcaggagccttcagtccaattatagaaatagtcttagaacatagtacctaacattataatgggattcactaagtacaagtctacctacattatcgaagaggctagagaagtcccttttgcccaaccctcatatgtgagaaatcaagaaaagcaatgttcatgggatcctgacaaatctactatataaagtgagagcccttatttaaatttgagcaatttaagtttttccccagaatgtctcctttgttggttccacgaaatgtattttgtttttagtgtttaaagtcaacaaactggcattgcattttccttaacttacataaactcatcagaattacatgaatattcctactgcttaccttaaaacttcctaaggagcatgctatttagtgctaagttttataccctgatcctttctgtcactgacacatgcataaaatgttaccttaacacaaccctgcaatcactacaattcttannagtattacataatttcattct

SEQ ID NO: 122918 - DNA, 1242 bp, Homo Sapiens
gggctgaaggaactaagagtggaaacaatctctgactgcacacaagtgcatttgtgatccaccacaggcacgtttttgtcaattggctggggaagcccaacccatctaacctcctggactctggaaaggcattctccgggtctggtttctcacacattacacagcagaggtttggagttagttcacagaaaagttaacatcccggaacagtgcagaaggcttgggtttcagtttgctagggcccccataacaaaatgccacagaaccaggtggtttaaacaacagatttattttctcacatttggaggcgagaagttcaagatcaaggtgtcagcaggcctggtttttcctagaggcctcttttgttggcttgcagacagctgtcttctcactgtgtccttgtgcggtcttccctccatgcacacacatctctagtttcattatgtgcccaacgttcctcttctaagaacaccagttggactggattttaactttaaccagcctcatttaagttaatcacctctttaaatgctcaatctccaagtacagtctcattctgaggttccaggggtttctcaacgtaagaatttagggggacagaattcagcccgtagcagctgggcagcaggactcatgggtcccagttctcaggccccaaggactcagagcagcaaaggatacgtgacacaagcagggctgaactggacaccagactttctttggggttgtaaaaaggagaagtgtgactccactgccaagggtaagcactcttgtcttatgctaccctttattcttgaaccttggggcagcctgtgtctcccttccctaaacgtcatctgttccgtttttccagtcttccagacctggtccttggactggagaccttcacccttcctattttgtggctttctcttcaaatccacctcgtccttcctccatgacttataagtcatcatctctgctggtttctgaaatgagatatgcttcttggggtcttcagtgaagaggaatagcaagtgaaaggaggatggtggcagggtacatgaacccctaccaggcttttaggcttcccctgcatggcagccagcctttaagttggcccccaaccatccctgcctttttctattcacacccttgtgtggttccttcccacatttaataggcctgacttgtgtaaccactacactattgaagaaatgagagtttgacttctgagggtaagtcataaaatacatcgtggct

SEQ ID NO: 122919 - DNA, 1151 bp, Homo Sapiens
  misc_feature (105)..(113): n is a, c, g, or t
gtaaatacgcacctctccgaggcgaactccccttgtggggcgggtttgtttctccgagaacacggcgtcgggtgttgcacacccccgggcggttattctttattnnnnnnnnnatttcccaggcccttagttccagggcccagggttctccttgtggagaacacgcctatggccgcaggttccactttacccgcctgggggccgccgccgcccaaacgaaatgtgtttaggaaaccttccgcgagggccggaggcggcccgacatagtgatagacgggtgccgctcggtgtttgccgaataagttcatccagctttattgaaacctattacagaagacaatccaaataaaaccactgtctcctgtagaaatctgagttatgttgttttactacaaaagaatataaaacacattaaattacagtgtgaaggaattttaaaaatgaacagtgtatcctcattaaatgtttgcaaagtttcttcctaagcacttacaactagttacagctcttttaaaaattcagatttctacactcagtttaacgggagagacattcacacttaggtacttcagccccaactttcacggactattggaaattagaaggtactttgttgctaagtgaaaaaaatgcacattttttcatatcagggaaaattatactggacttaacagttttaaatgagcaataactcagatatattagagagaaatcaccgcttgccttacaaataccaaataaattccctagactcccctcccctgtagagaccatcagctcactgtgaaggcttgagcctcagtaggtaaaatttgaggaaaaaaatgagaaatggctaaaagaggcatctgctgcaggaaccttctgtgactgtcaaacattccctcttcaagctcccttttaaaacccagtccattcccaacatcactgaaaatgaaaagaataaacttgctggtcctcatgtcaaggcagtgttttcattgtctcttgatattttatcccatttcctattgacaacatctcccctacccctgaaattatttagaggttccctctatgacaaacccttgcttttttttagctttaggtataacactgacatcttttgaaaaacgtgttagtaaatactcaagttctggcctcatttcccc

SEQ ID NO: 122920 - DNA, 550 bp, Homo Sapiens
tcaatagatttgttaacaccagtatcaccacaaacacgtgatgaatgtaattgcaaaacacaaggtcatcactaggctatgacatcactaggcgatagaaattttttcagctccattataatcttatgggacccactatcaatatatgtagtctaccactgactgaaatgtcattatgtggcatacataatgtagagttttcaagggtaccttaaagaacatctataaatacatacacacacaaacacatttatacacccagtagtcaaaatgattttaaaaatcacatgttagctcaaaaagataattaacttttattattcattaaaaatgagctttctaaaatattagtaaatttcattttaagctctgtcttgaagtgctgataccactgaagtaacatttttcttctttcaattgtgtcttgtaaaattatagttttctcttttttaaaacagcagggagttccttccaggtctttgataagataaagggagcacccattgacttgattagcttgcagaggagcaccgtggtgcacagatgtatt

SEQ ID NO: 122921 - DNA, 844 bp, Homo Sapiens
  misc_feature (844)..(844): n is a, c, g, or t
attattaaatgtatatttttaataaagccaatagttattttacttataggagctttaaaagatacaaaatgtagagttccagtttggaagcattgtaactatacacacaatgtcctgctgatgccctagcaaggcacccacgcccaaccatgcaaaggacacacacgttcacacatgcacacacatgcgctttggcgagacccctctgccaagcgcagcacctggaattaccagtgttcagagcaaggcggtgccgggaacacagcacctacatggagaccacacaaacggcttcacacagtctcacagcccatggagatgcaattagaaaatgtcttccttaatagagaaaaacaaactggaaagtgacaattagtgacgtcacctgtgctggagcatcaaggattgacctctgtccaaggtgaggcctttggagaggcactattaaaacatgagtacttcagtataatggaactcgaaatacagggtactgtggacacattactgaaggaaatagaaaactatcttacaagtagaacagccatagacaactttaacagagattagtgtgcacaccgtgacagctaacacagacaagagccacgcagggttggtgcaaagcacgtgcctgaaaatgtctatatacaaaacagttctttgtaaacatggtgaggtgaatgctcagaaccacggcaaaagatcataaatacaggcagcaatgcatccccacacagcacaaaagacaacacctgaggcctgggaagagcctgacaacacagtactaaaaactcaggtggctgggctcagacaccctacgggtcctctcaaattagtgtgtgtgttn

SEQ ID NO: 122922 - DNA, 2103 bp, Homo Sapiens
  misc_feature (710)..(744): n is a, c, g, or t
tgtggtctgtgtttgttcttctcgtcttctgtcttctttggtggcttttttgtctttctctgtctcgtgtccttctttccgctgtctgctctttttctcctgttcgatcgctgtcacactccaagtggatcgtgtctggacttctgttccttattgtctcatgctcccgaatgtgctgtctcgggactttgtctcagctgtcagaggtgggcgctccttgccttcctccagtggccgtttggttcctgttgccttttgaaccattgtggggcttcggtgcttctctccttgtcgccgtctctttatagctcttgtgctgcctcttccaccctccctccttttgctcttccatcagtactcaaccacagtcccagtcctcatgtgcatcaggagcatcgatatggagcacatctcctgggcctcagggcaccctggtgtggggttgaggctggggccagcccagcctaggatggtcagcagcaaggtctcccgggggatggcttacctccctctgtctccctgtggtagtaaacggagtcccccacagccagccagaggccacctgaggagggagcacagcctctgccagcgctcttccctgtcaggagccagttagtggtcaaccccaggcctcaggccatcaccactgcaggtagttcatcgtcctttctgggcccagggtcccagggccacacggcactcgcatgtgnnnnnnnnnnnnnnnnnnnnnnnnnnnnnnnnnnnaggcagttcctcgcaaacactccgactcaagaaagcgagttttaaagtggagttaacttcagagagaggtgaagatgatgtcccgacattagaaggtttttctgtggatggatcgggcaccgtcttcctcatattcctttttggagacccacatcttcttaaaggtgtccagggaggcaaggatggagcccccaatccacgtggaatacagtctctcctgaggtgcagatatcctgatcttcacatcttttggagctagtttcttcacttcactcaggagcctgtcaccaaaacctttgaacagggtagagcctcctgagaggacaatgttagagaaaagcgtgcgccgcaggtccatgtctgacttctgaatggcgaacaccaggacctcgtggatgccttcactctcctctccaatcaaatctggcctgaagagcaactcagggggcccggaatcgggaaggaccaatctcaatggtgctgccatcaggcaggtagtactgagctttctctgtctctagcgtctcatccttttgggggtttatggataggtaacaggctctttcttttatggccttgacaatctcaaactcagaggatgagtggaagtcgtagccctccttacgcaggtagaggcgcaggaagcgagagacgtcccggcccgcgatgtcgatgcgcatgatggagtggggcatggcaaagccctcatagatgggcacagcatgggtgactccatccccagaatccagcaccacccctgtggtcctgcctgtagcgtaaaggctgagtacagcttgcatggagatgaaaagagcgggcacattgaaggtctcgaagaaaacttcggcagctcgttcccggttttttcgtgggtttaaaggcgcctcagtcaggagcacaggatgctcctctgagaaagtctgcagctggtccttagaatagacatattgccaaatgcgttccatgtcgttccaatccttgacgatgccatgctccatgggatagcggattgaaagcagccctcggtgctcctcagctttggggccaatgaagatgtcgccttcaagggctcctgccatgacacgaacgtgcttgggtcggcccacatagtttggaaagcagtatttggggatctgatcaccagcaaaaccagctttaatcacaccggatccgttgtcgatcacgacaggctggttggcgatcacatcgtaggactccatggcagaggaatctctccttctggggaaggaactgcccagccgggtccgccgctagcgccactgacacgcatcccgggaattccggaccggtaccagcctggggagccctcgttttcccaattgggtgggtagtggttgt

SEQ ID NO: 122923 - DNA, 1345 bp, Homo Sapiens
  misc_feature (158)..(213): n is a, c, g, or t
cgagtcccccacagccagccagaggccacctgaggagggagcacagcctctgccagcgctcttccctgtcaggagccagttagtggtcaaccccaggcctcaggccatcaccactgcaggtagttcatcgtcctttctgggcccagggtcccagggcnnnnnnnnnnnnnnnnnnnnnnnnnnnnnnnnnnnnnnnnnnnnnnnnnnnnnnnngcagttcctcgcaaacactccgactcaagaaagcgagttttaaagtggagttaacttcagagagaggtgaagatgatgtcccgacattagaaggtttttctgtggatggatcgggcaccgtcttcctcatattcctttttggagacccacatcttcttaaaggtgtccagggaggcaaggatggagcccccaatccacgtggaatacagtctctcctgaggtgcagatatcctgatcttcacatcttttggagctagtttcttcacttcactcaggagcctgtcaccaaaacctttgaacagggtagagcctcctgagaggacaatgttagagaaaagcgtgcgccgcaggtccatgtctgacttctgaatggcgaacaccaggacctcgtggatgccttcactctcctctccaatcaaatctggcctgaagagcaactcaggggcccggaatcgggaaggaccaatctcaatggtgctgccatcaggcaggtagtactgagctttctctgtctctagcgtctcatccttttgggggtttatggataggtaacaggctctttcttttatggccttgacaatctcaaactcagaggatgagtggaagtcgtagccctccttacgcaggtagaggcgcaggaagcgagagacgtcccggcccgcgatgtcgatgcgcatgatggagtggggcatggcaaagccctcatagatgggcacagcatgggtgactccatccccagaatccagcaccacccctgtggtcctgcctgtagcgtaaaggctgagtacagcttgcatggagatgaaaagagcgggcacattgaaggtctcgaagaaaacttcggcagctcgttcccggttttttcgtgggtttaaaggcgcctcagtcaggagcacaggatgctcctctgagaaagtctgcagctggtccttagaatagacatattgccaaatgcgttccatgtcgttccaatccttgacgatgccatgctccatgggatagcggattgaaagcagccctcggtgctcctcagctttggggccaatgaagatgtcgccttcaagggctcctgccatgacacgaacgtgctcctcgtgccgaattcgccacccaggcctcgctaccttggacc

SEQ ID NO: 122924 - DNA, 957 bp, Homo Sapiens
cctgagagggaccaatggttagagaaaaagcgttgcccccgcaggtcccatgtctggacttctgaaatggcgaaaccccaggacccttgtgggatgcctttcacttttcttttccaatcaaatttgggcctgaggagcacctcagggggcccggaatcgggaaggaccaatctcaatggtgctgccatcaggcaggtagtactgagctttctctgtctctagcgtctcatccttttgggggtttatggataggtaacaggctctttcttttatggccttgacaatctcaaactcagaggatgagtggaagtcgtagccctccttacgcaggtagaggcgcaggaagcgagagacgtcccggcccgcgatgtcgatgcgcatgatggagtggggcatggcaaagccctcatagatgggcacagcatgggtgactccatccccagaatccagcaccacccctgtggtcctgcctgtagcgtaaaggctgagtacagcttgcatggagatgaaaagagcgggcacattgaaggtctcgaagaaaacttcggcagctcgttcccggttttttcgtgggtttaaaggcgcctcagtcaggagcacaggatgctcctctgagaaagtctgcagctggtccttagaatagacatattgccaaatgcgttccatgtcgttccaatccttgacgatgccatgctccatgggatagcggattgaaagcagccctcggtgctcctcagctttggggccaatgaagatgtcgccttcaagggctcctgccatgacacgaacgtgcttgggtcggcccacatagtttggaaagcagtatttggggatctgatcaccagcaaaaccagctttaatcacaccggatccgttgtcgatcacgacaggctggttggcgatcacatcgtaggactcccctcgtgcggaattcgccacccaggcctcgctaccttg

SEQ ID NO: 122925 - DNA, 711 bp, Homo Sapiens
  misc_feature (58)..(58): n is a, c, g, or t
  misc_feature (475)..(499): n is a, c, g, or t
  misc_feature (507)..(639): n is a, c, g, or t
ctgcccacttgctttctgcattctttttttctctttaaaattcttagcgtcaagttgngaatgacggaaacaccaatttatgtcccaaattcttcccctttctggcacactgctttattataggcggttcccaggtcttatgctgttatcattcaaactgcagattacaagttgcacagtcagcaggaatgaaaaggatcaacagagtcttttgttttttccagcaaatatcctgagtttccagttagccatgcagggaaacacagtcattttcatagtattcactgtggtggctttcctctggatcacatcccaggctgcctcaaacctgttggtatttgtggcggtcatcccagagtccaaggtttcttcttcgtcagaaagccttggttcctgttctgagaacagcattttcctatttgtttttctccagcagtgcaaagttcctttcccttttctgggttacactgcttcnnnnnnnnnnnnnnnnnnnnnnnnnggtaaacnnnnnnnnnnnnnnnnnnnnnnnnnnnnnnnnnnnnnnnnnnnnnnnnnnnnnnnnnnnnnnnnnnnnnnnnnnnnnnnnnnnnnnnnnnnnnnnnnnnnnnnnnnnnnnnnnnnnnnnnnnnnnnnnnnnnngatgttcctaccttacctatttcctgatttccctttaaaaatagcctgggcaacagagtgagaccctgtctc

SEQ ID NO: 122926 - DNA, 749 bp, Homo Sapiens
  misc_feature (259)..(292): n is a, c, g, or t
  misc_feature (486)..(523): n is a, c, g, or t
tttttgagtttgaaaggctctttaatagcaagcgaatggtaattacatggtcggatgaggtcctcactctcaggggagggaggagggagcagaggtggacagggtgcagtataggatttacactgtttgaagcatctaacgaagggcaacagtttttggcaacccaattcacagttttgtaatttacaagagatttctttgaaaggaaataggaaggcaaagaaagcacacataccctaccggcaacacttcttgcctnnnnnnnnnnnnnnnnnnnnnnnnnnnnnnnnnncccaacaactattccttgcttttgcttcttgtgtagatgactaaattttgctctcatgctcaaattaagactggatcacggatagtgaagatctgccctagcattgaagatttacttcctcctcttcagagctgacatttgtactgcgcactactcttatctttatctgcctaggtgtcagaaggggcttagtnnnnnnnnnnnnnnnnnnnnnnnnnnnnnnnnnnnnnncagggaaaggcagtttacaaagaacagactgtcagctttctgtctggtatcaaacaacttgaatacagctctaagtaaattaaaacatttatttttatgtggcctggcatctacttttaatcgcttgtgcctattcagccttatagtgctttaaatggggtttctaacatgaaatgctcatgggtactatattttcgtaatccagatttaaataaaaatataaaag

SEQ ID NO: 122927 - DNA, 1406 bp, Homo Sapiens
  misc_feature (43)..(78): n is a, c, g, or t
  misc_feature (1033)..(1153): n is a, c, g, or t
  misc_feature (1220)..(1271): n is a, c, g, or t
  misc_feature (1293)..(1311): n is a, c, g, or t
taacctcactaaagggaataagcttgcggccgcctgctcaggnnnnnnnnnnnnnnnnnnnnnnnnnnnnnnnnnnnngatttcctgcttacatttattgtggctagagagcctaaacagctattttcttctccaaaaattggaaaaatataacacgatagcaattttttaaatacataaaacttcctggatcatgaatcaacatgagacataatagcctgtagatatcaattgtgatcgctttataaaatgtcattcatctaatgcatttctgaaattgcccttaaagctacacatacacacatgactctatatcacataaaggcatccattcatgaacagaaagaaaagtcttttattagtactgtgtagggaaggctaaagaaatatacatttaattcagaataatttttaagaaaaaacgtggggttccaagaaatggtgatttacattcaaatgaacatgtacatttgcaaacctggataagtagatattttcatgaagcacgctacaagaaaattcacacagaattatttgtttttcaaaggcctctttcaaagtacagactccaagtccaaagcaaatacccatggcatgaacaaataggatgcctaagattctaacatttgcttcggcatggctttcctcctcacttccctacctcacaacaagaaaaaatttcctagatgggacaatggcaagatattgtgctaatacatttcataggatttctagatgctgggctataacatccaggttacaatttggtgacggatttttttatttctattgcaaatggactacactccaaacacaaaaagattcttgccatagcatccaaacatccctatgtagacccacacttcctctcaatacagaaagagaatcactcagaaaggacaaagctggcagaccaagaaaggaggcaagggtaaactctgtcactggccaattatctaaaaccaaaatagcagcctctgttatccaagttgtcagttaaaactgtcagctgtcaggcacagtgacacacacnnnnnnnnnnnnnnnnnnnnnnnnnnnnnnnnnnnnnnnnnnnnnnnnnnnnnnnnnnnnnnnnnnnnnnnnnnnnnnnnnnnnnnnnnnnnnnnnnnnnnnnnnnnnnnnnnnnnnnnnntgtggtggtgtgtgcctgtagtcccagctgctcaggaggataaggtgagaggaacacttgagcccannnnnnnnnnnnnnnnnnnnnnnnnnnnnnnnnnnnnnnnnnnnnnnnnnnntgacaaagggagactctgtccnnnnnnnnnnnnnnnnnnntaagtcgccagctctctcctttataaacagtctttagactggtttgtatcatgccccttgatgtaccagagatatgtttaaccaacctagttttg

SEQ ID NO: 122928 - DNA, 1311 bp, Homo Sapiens
  misc_feature (161)..(161): n is a, c, g, or t
  misc_feature (1045)..(1092): n is a, c, g, or t
  misc_feature (1165)..(1267): n is a, c, g, or t
gatatccaattttataatagccccttcaaagggccggttcaaacttaaaactggggtttttataaggtttaaaaaatccattgccccaaaaagaaacctcccaggaaataggagggctatcacttggtgaattctacctaccccacttaaggaaagtaatnaattccctgttctacacaaagtctcacagaatttttgaaaaaggagggctttttaagtagaaacatttcaaactcctttttgacttataaatgtggtcataatagacactatacttattgcgtctctcctgtgcaagaaactgtgctttctacatatgaagatatagatggaagtgtttatactgccactgcaattcataaatatatatttgataagggattaggaaaactagatacatatttgaaatgtaatatgtggtcattactgtcagcaatgagcagaaaatagagtactatagaaaagattaccatgaaaggaacagaattgtgtttcagttttatatttgatttttcaaagagatggtggaaaaggatagttcttacgttttgcataataagaccaggggcaagaaacctttttaaaattacttggactatggtgaaacagaattttggtagaatataatttgaggacacaaatataattagtggactgaaagaaaacaatactttgatcaacttctatgatgacagcatgaggcgttctactgatcagctctccaaaataactggtaagtggtgaaaattccaaaactcctccccatctttcagctgcagttttctgcttcccaggaggagcggggcttcatcatttctcgttctgcccttagaagcttgttgctgaggctatgtttcaggggagtatgatggagagctatgagctcctttcattcatccagcctcatgcatgaatcagaggttcttctttcatgcagtaagcagagagtactctgggccaacagcccttgctttgtgaggcatggttccacgacaggagagagaagccaagaggaccccaggggggcaattatgatcacaaggtnnnnnnnnnnnnnnnnnnnnnnnnnnnnnnnnnnnnnnnnnnnnnnnnttgagtcccaaaacctcaaaaatagggaagccgacagtgcagccttcagtctgtggttgaagagtcccaaagnnnnnnnnnnnnnnnnnnnnnnnnnnnnnnnnnnnnnnnnnnnnnnnnnnnnnnnnnnnnnnnnnnnnnnnnnnnnnnnnnnnnnnnnnnnnnnnnnnnnnnncaatcggacgcgtgggtcgacgatatcccgggaattccggaccc

SEQ ID NO: 122929 - DNA, 1026 bp, Homo Sapiens
aattccccaaaggcccctctatgtttcacttggccccccggggaattctccccctaaggggaaaaccagggttatgggccccatggttcccctttacccctactgggggccccgcggcgccccaaaaggaaatggtcttggaaagtttttttcgagggcccgaggcggcccgacaaatttttgtattcttgtcgcggtgggtgggtggcgggttacgcaacaaaaaaaactttattgaattacaaattttaaaatggatcacttaaaagtgagattattttattctgaaacattatttcaaaaatgtactttgtttttgaaataaaacaaaatcttcaactatgaactgacaaaatagaggtgagttggtaccagtgggccaattcttaacacggacatttaaaaatgctgctttctgtattacaacaaaatgatatgcaataagaaattggaaaaagggagcaaaggagagtgcaaagcatgtactgaggtctttctacgggtgcctgacagaatgcagattcagcataaaatgtagactttgcaacagtggcctttaaagtatgctagagcaagtgtaccctagggaacctatgtcaaaacaatttttgtcttactccaaacagaaaaaatggtacacactttaacaaaagcaaaacttaattgtaagatctgtactgtaaagctacttgctatagcccatatattcagtttgttcaacaatctcactcatgacagaaaaagtcagcaaataagacttgggacaaaattattttctatcagtctccacatggaaagaccacagctttaatgaattatacaatccttaagattaatccttggtcagtatagatttccgaatcaaaatctagtcatgaactgtttacaatagctatactacactaagatgctaaacattttctttccagtatgtcttcctaagaggggaaaaaaatagtgggaagttttcatctttgcctatgaggggatttatgaaaagccttctaaactacaacagtgttcttc

SEQ ID NO: 122930 - DNA, 1441 bp, Homo Sapiens
  misc_feature (1321)..(1355): n is a, c, g, or t
  misc_feature (1358)..(1400): n is a, c, g, or t
aactgataatcaaaatatacttttaattgtaaaagatgatccattcactaatgttctaaaaatgtaaatttttatatatcaacttcataaagaataccttacagtatcttgtaatatataaattaagaacaagaaaaaatgagttttacttttctttaacagtgttgcttggcaatatattaattacatattaagtctatgaagtaaaagtttaacctacatctactggttgctttaatttttcacttaaagaccagaccaaaatcaaaaccttggaacttctacttttcaacctgaaataatcaaacaataactataatcctaaaatagcactgacacagtaaatattattcttatgagtgttaatggacgacactgatatatctcatattgtaatcaatttgagagttgccactgaaatcaattaaaaatgtttattctgaaagatgctactataaagtttatagactcaaatgcttataatgcttaatcaaaactaaatttacaaaaaaacctagaaacaggttgaattgaaacctgtagatcattttataatattcatgagcaacaacttttttaaagacaaaggctactgttttaatataaattaagagctttaacatgatctccctttagtgcttttaattgtcacatggctgtaaaccaaagacccctccaaattttaaatgatcactgatactacttgagcagaaattctcaggtgtcagtacttttaatgttgtgtacatcaaattacagtacaaagatgactataaacaagatgcagccctcggtttccatgaacagcacactattacagtaaaccaagtttatattccaccatcaagtgtggctctcccatgacttcgctttgtgatggatcattaagaatatcctcaaatccaatagtctcatcattacccctcaaaacatccagtgaaagatttgagcttgaaagaaatggaagacgctgaacctgctgcactgccttgaattccatctgtaattttagcggagcaaatagaccctgaatgtttctcagtgtggaaaaattcattttatcttggttgagctggaaatttttttctgataattcaaggggatgactaggcaaaagttcatttttcacacaagaaaaacctttccgaagaagatcatgactttcaaaaaggtccacttgctgaaagttcagtaactggaatactgtcctttagctcagatccaagtcctctggcattcatcttccgcagctctgcgaacagcctctctccccggccgtaatggccgaattcccgggcatatgtccggtaccgtcgactgnnnnnnnnnnnnnnnnnnnnnnnnnnnnnnnnnnncgnnnnnnnnnnnnnnnnnnnnnnnnnnnnnnnnnnnnnnnnnnnattacgagctagcgcccatatagtcgatatcagctttcgct

SEQ ID NO: 122931 - DNA, 797 bp, Homo Sapiens
cattaagaatattcatgaccacaacttttttaaagacaagctaactgttttaatataaattaagagctttaacatgatctccctttagtgcttttaatgtcaacatgcctgtaaaccaaagaccccctccaaattttaaatgatcactgatactacttgaccagaaatttctcaggtgtcagtacttttaatgttgtgtacatcaaattacagtacaaagatgactataaacaagatgcagccctcggtttccatgaacagcacactattacagtaaaccaagtttatattccaccatcaagtgtggctctcccatgacttcgctttgtgatgggtcattaagaatatcctcaaatccaatagtctcatcattacccctcaaaacatccagtgaaagatttgagcttgaaagaaatggaagacgctgaacctgctgcactgccttgaattccatctgtaattttagcggagcaaatagaccctgaatgtttctcagtgtggaaaaattcattttatcttggttgagctggaaatttttttctgataattcaaggggatgactaggcaaaagttcatttttcacacaagaaaaacctttccgaagaagatcatgactttcaaaaggtccacttgctgaaagttcagtaactggaatactgtcctttagctcagatccaagtcctctggcattcatcttccgcagctctgcgaacagcctctctgccccgttaccgtcagtcgaccccccccggccgtaatggccgaattcccgggcatatgtccggtaccgtcgactg

SEQ ID NO: 122932 - DNA, 1008 bp, Homo Sapiens
  misc_feature (880)..(914): n is a, c, g, or t
tcaaacttaaatttacaaaaaaaccttagaaccaggttgaattggaaaccttaggaccattttataatatccatgagcaacaactttttttaaagacaaaggctactgttttaatataaattaagagctttaacatgatctccctttagtgcttttaattgtcacatggctgtaaaccaaagacccctccaaattttaaatgatcactgatactacttgagcagaaattctcaggtgtcagtacttttaatgttgtgtacatcaaattacagtacaaagatgactataaacaagatgcagccctcggtttccatgaacagcacactattacagtaaaccaagtttatattccaccatcaagtgtggctctcccatgacttcgctttgtgatggatcattaagaatatcctcaaatccaatagtctcatcattacccctcaaaacatccagtgaaagatttgagcttgaaagaaatggaagacgctgaacctgctgcactgccttgaattccatctgtaattttagcggagcaaatagaccctgaatgtttctcagtgtggaaaaattcattttatcttggttgagctggaaatttttttctgataattcaaggggatgactaggcaaaagttcatttttcacacaagaaaaacctttccgaagaagatcatgactttcaaaaggtccacttgctgaaagttcagtaactggaatactgtcctttagctcagatccaagtcctctggcattcatcttccgcagctctgcgaacagcctctctgccccgttaccgtcagtcgaccccgccgctcacttccgtttccccctccccggccgtaatggccgaattcccgggcatatgtccggtaccgtcgactgnnnnnnnnnnnnnnnnnnnnnnnnnnnnnnnnnnncggccgcttcctcgctcactacttcgctgcgctcggtcgttcgcctcggcgagctagcgccctatagtgatgatcatttcttcttcctgccgcc

SEQ ID NO: 122933 - DNA, 1840 bp, Homo Sapiens
  misc_feature (1772)..(1772): n is a, c, g, or t
ctttctttccttaactggctacatgcttagaaactgcactggtcagacttgattttctttttaaagcctcaaaacatttttattgtcaggaaagcttttcagtggccagggatcagtctcatggccgtagaagcagccaaattcctctgcctttgccttcccttcaggagtcacatgctaaggcatccttgggcatttggaaaaggccgcttggggtgagagtgctctaggccactctgcaatgtccctgggcccgatgagtaacaaatgcaccccgggacccagagaagtggaaagacatgaaagggatttggaaacagatcgtaaaaataacctgtatgaaaatcacacagacaagaaaacaaacaaatccagctagccccttggatcctgccatccgtcttttctcccgggactgcctttgctttgtggagggtgagtcctgggacaggctttgggtgacaagttgtgggcatgttccatccaagcctggctctcccgactggcagagggaggtggctgacaatcaattcctctggatacattttcctgtgattgctcctgtgatcaaaggcagccaccgacaggtgcgggagcggttagttcaccacgtcatagtagtaattgcgcagccgcagttccactgctgcgaatccgggcctgttttccacatcgtatgtccagcacagattcatgagatcgtacatctctcttggacaccctgcagggcaccccatccgctctcctttctctaacatagcggtgacttcacttcctttcatccctcgatatggcttctgcccataggagaatgcttcccacatcaacactccaaagctccagacatcgcttttgctggagaacttgtagtagttgatgcattccggagcgtaccacttgacaggccactttccatgggtctgggccttgtagtagttttcatcagcacgcagtgctttggaaagtccgaaatcactgatcttggcgtaatgttgggtaactagctacacatttcttgcagccagatctctgtgcacaaaattgctctcctccaagtacttcatgcccatggaaacctgatgaaccagttctatgatgttcttatccttgacatgtctgttctgctgcaaatacttattgaggggaccaagttctgccatctccataaccagcatccaggactcggcctcgcatatcccgatcatccgcacgatgtacgggttgtccagctgctgcatgacatttgcttctgctaataactcatctttaagagcggggtcattggcctcgtttttcagtattttcacagccacggttttcacaacttttttcatttggtagtagccctttttcacagttccttaattaccagagcccagttctttgtcttccagcgtcagcagctttcggtccaggtaaacctccttgggcctgatctcctcagggtccgcgtaggggctctcgtacacctctgtgtccatgggtagggcttctctgtgggggcctttgtctgcagctcagggtgcaagttctggctcatacggattgaatgacacagtactctcttgccggttcccttgggcaggggaggacgcaggatgggaacctggaagttgtggacggcctccaaaattaacatttccctgtgtgccgattttttgacatgggacagtaagaactcttaactaaccatctgctttataagaataatgctcgactagctgccagagcgtgtcgaacttctttccctcggggatggagagctcctacgncctgtgcctgctgcacgcctcgtgccgaattaaacacccgggcctcctcctgctctattttttctttt

SEQ ID NO: 122934 - DNA, 147 bp, Homo Sapiens
aaagcctcaaaacatttttattgtcaggaaagcttttcagtggccagggatcagtctcatggctgtagaagtagccaaattcctctgcctttgccttcccttctgtcgtcttctcgcagccgtatagtagtagtagtaggcggccgc

SEQ ID NO: 122935 - DNA, 782 bp, Homo Sapiens
  misc_feature (712)..(712): n is a, c, g, or t
gacattttctcctaattttatttaaagccatcattatatattaaaagagcagaggtaattctgtcttctccggttgtgcagcacgatctgctccagctcgtcatgccagggcccggaaaacctccaccttctcccggtacagctggtggaactgcttggcaaggcagtggaaaggggcttcgaagttttccatctctttcacggatgtttcaaaacattccaggccctggcccagcgcccatgcccgggcctcagctgagtccactgctcgtctgccggccaggtctgtcttgttcccaactaaaacacctgggagagagatgcctggagcctgtgaccgagccttctccagccacttgctgcagttgttgaaggattcttcattggtcacatcatagacgagacataagacattgggactctcccacaatttatccagcatttccgaaaacagctccttgccagcagagtcaaaaatgaagagttccacactgtctcccgtgtcaggaactggcactgtcttcaccaccaaatccattcctgttgtcagggtgtagcttttctggaaatgggctccatcactgcggaagatctgtgccagggcggtcttgcccactgctgggtctcctgccaggatgcatttggctgccagcttcaccatggtaaccaacactctcgcgagccgtacccagaggacaagagcggctgctanagacgcgagtgggtgggcttcgggccctgggctggcctgggacgggaaggtggtgaggggagggctgatc

SEQ ID NO: 122936 - DNA, 532 bp, Homo Sapiens
  misc_feature (518)..(518): n is a, c, g, or t
ttttgacattttctcctaattttatttaaagccatcattatatattaaaagagcagaggtaattctgtcttctccggttgtgcagcacgatctgctccagctcgtcatgccagggcccggaaaacctccaccttctcccggtacagctggtggaactgcttggcaaggcagtggaaaggggcttcgaagttttccatctctttctggaaagacagtttaaaaagttggctgtgttcttttagaagggtcagagggccagctctcactcaatgcttccctcattcgggggctacctactttccacctcatttcatcttcacgcccttcgaggtagccactttcatggatgccagttttacaagaaggaaactcagatggagtcaggtaactcagagatgaaggtaccttgcaggaagccacacaccttgtgaatggtggagctggggcctgaacccatgtctgtttctacaaagcctgtgcttttagttgcagtcactgtacgtgtgacgagatgtganaatgacacttttcc

SEQ ID NO: 122937 - DNA, 664 bp, Homo Sapiens
  misc_feature (556)..(556): n is a, c, g, or t
acacaaattcagaagtctttattttgaaaaaaattcttccaacagtatttcacaatgaacaagaacttaaccaaatttatctatcatactaaagtatttcagaaatgaatattgaaaacagcctgtaagttttcatccaatatttaaaaccacctcctgaactaaaattggtcttcaaaaatcatggcgtattaacattttccaaacatgccctgctgactagaaggtcctgttattctttcttttgaacttcccagtaagtttccttgttccctattcctaggatttaaagtgcaaaggtactttttatgagctattaggacaagtattcttcattgaaaataaacttttgcagaaaacaaatcctgtgcttgactaacagcaaagacatgttaagaaatttctgagctccaaaccatgaggaatcagaatcacaactttcagagtaataactcacattttttctaaagcataggaagctaattttgtataatgaacaaatgtggttgtgccaaaataggttttgccacagttaatttccactttctcttcttanaaataaggtatagtctaagctaatgtagataaggaaaggcacgataccaacaactgcaaaacaaagtatagccccaagccatgcactttttagagtcatgagtaggga

SEQ ID NO: 122938 - DNA, 1328 bp, Homo Sapiens
ccatttccgtacttcattgagaacagatttatttttagtgcatttttatagcaccttgcctactacaaatttctggaatgtactcaatataaagagtgaaaaagaaaatataagcaattcaaatatatactttgacataaatgtaggacagttctatgtcccattcaacgtcatgaaaggtatagtagttggtgggtaaatagaaaccctgttgtactctgttgctgactaattgtggttaccttacttatcaataatattagaagtattatgctcacatttttcacctgtgggtacaaggaagcctggttgaagtcttttccttgagaggcctggatttgttcacatattcagatttcaactggctttataacaggtttccttatgtgcctcatattggctccaggttcactgggtttaaaaggagccaaagcaccataaggttttggcaaaggaagagtggcatctgcttctgggatgtaggcattcggacgctgctctgcagttgtgtaaacaccattgggcagctggcgattatctgcttccaagaactcctgagacttttcagcgatggccaaggcgtgcatttcttcatctcgaaggactttcaaccattctttctcaatttccttattgagtggcagacctttttctatcctggaattgcaagtgaagatgaagtcttctttctccctgacttccttttggagttcaatggttagggcttgtttcatggacagctcagcaacaagagccatcattttctcagttgcatttttgatccttctttgatagccattcatcttcttggctaagatcagtgtgtcctgcttgcagccctgagttttgctgcagagcctgtctgtgagcctggagacctgctcatagatgaaatccttctccagtcagcttctcctccttcttggccagttgtagttccagcatcaggctttacgaactgtttctccaggtctttaattctgtctgtacactgtgaaaactgaatttggagcacagctaggtcggcatccagggacctcttggctggcagtaatttctgggtcacacaaatttgtctttgcttctcagcaatcttcattttcaggaattggatcttttcttccagtagatgtatttcaatttctccatttagtttcatcttctcttggatatttattttttcataaaaaatgcatatttcttcttcccgctctatcagctgaacgccactatggtcaaattcagaggcagaggctaagtgggcattgagaccactcccccggccgtaatggccgaattcccgggcatatgtccggtaccgtcgactg

SEQ ID NO: 122939 - DNA, 1239 bp, Homo Sapiens
  misc_feature (175)..(183): n is a, c, g, or t
ttccattttatcttagacataatatttactagttttccaagcacgacagaaatgaaaaaatatatatattagaacaagaacaatttatgttaatctctacaatctgtgttccttctgcgagcagtgcctgattctactaaaattaacacatttaagttcagtcttatgcttaagnnnnnnnnntctaatgagggactaatttataaagtatacacaaatataattctttaataaatctttccagtgttcactatatctgcattacatgtaatgtttccatccacagaaactcaggatagttcttgtaaaatgaaacagaacattctgtgttcatctctggcaagcaatgaacaaatagaacttgctcacaaaggatctaaaagtgctgcctcaggaacataaactacgtgctatatgaatgagtcttggttaactggctactatctgggatctcttcctctgctcataccactgaacccatctcttataaagcctatgagaaaatgaaagctattgcagaagtgaaattcaacatgagccacccaaattcttctaaggtaaccattctaaagcaaaatcagcagaagtcatctcttctataataacaaacaaaaaacccaaaaggcaaatgctactgctcaatcatcagatgaactcacagaggcaaaaatatgtgacaacagcaataattcaagtaaagtatgtatgaaaatttaaacacgccatgttcaagttaagacagaagtgaaggggagctatgatctttatattagtcaaaaaagctaggcataatcaccaaatgttaattcactttacagtcatcaatgagactattgtatatatttttgcaccttgcgcttgtaaaagcagataaaatatttaatatgtaatttacaatgtattttaccagctcagcatacaggatgtatacagattatatcaaagtagtagacagttacgggcctgtgcaaaccctgcaaaaatagtacttcagatatctgctaattaaaaacaaaaacagtttgctgtttagaagtgatacaatttcaactaccacaaaatacaaagggctgcaacaatgtaaccattccaacaacatatataagttattaaataaagatttgatttgaaagaatataaatgaagactttaagtaggtcttttctacatgcatattattcctcattaaagaaaaaatatgtaaaaaggccattggtaattgctttgttaacatttgta

SEQ ID NO: 122940 - DNA, 1170 bp, Homo Sapiens
  misc_feature (58)..(78): n is a, c, g, or t
  misc_feature (123)..(133): n is a, c, g, or t
  misc_feature (1059)..(1093): n is a, c, g, or t
gtgccaagctaaaattaccctcactaaagggaataagcttgcggccgcctgctcaggnnnnnnnnnnnnnnnnnnnnnaaatttacacagacgtttaattagctttatttacagagcagggannnnnnnnnnncagtctccaatggtgcctagataacatcattaggcaagaatgccagtttaaaagaaatctatgcagaatcctaaaaataacagatgttggtgctcctcaagaagaggcaagcttgactatatcagcagctctctatgcctcagttactcagaagcaattctgttgcagtctctacatcccatgattttgaagacaaggccactattactgcattcctatcaaagcccatagcacataggttttctatttttttggtgtattctggactagaaactggtgctccagcatacacatgtgcccaaagtcgagctgtctgtttgaacatttcgggattttgtttgtactgatttgctactacagcatcctgtggatcatctggctctgcagctgccaatagtgcttgcaatgacaataataccgtgcggagagtcattgcagctgcccattgatctttcaggatatccaaacaaatagcccctgtgacggaactaatattaggatgccatattttagtgataaaccggaccttagggggattaaatgggtatgtttctggtatttttatctctagttggtatcttcctccttcatatggtgtgtctggaggtcctgctatttctcctcttaattctgtaaaattctcatctacaagatctactttaatttgatttttgctcgtctcctcgctcttcagcacctccttgaactcccgcttgattcgctgcaccgcgatgttggccatgtctccgcccgcagctgattcgtacccgcctcctccgccaccgctacgaccaccgccaccgccgccacctcttcctccaccgcctcctccctcggcgattcagacctgagcacacgaacactgccactaccaccccggccgtaatggccgaattcccgggcatatgtccggtaccgtcgactgnnnnnnnnnnnnnnnnnnnnnnnnnnnnnnnnnnncgccgcttcctcgctcactactcgctgcgctcgtcgttcgtctacaaccgagctagcgccctatagtgatctatcat

SEQ ID NO: 122941 - DNA, 467 bp, Homo Sapiens
  misc_feature (446)..(446): n is a, c, g, or t
agaactattaactgcctttcttctgtgggctgtgattttcagaggggaatgctaagagtatctcctgatatgcagcatgaatgaaaatggcaagtttcctggccttccttctgctcaactttcgtgtctgcctccttttgcttcagctgctcatgcctcactcagctcagttttctgtgcttggaccctctgggcccatcctggccatggtgggtgaagacgctgatctgccctgtcacctgttcccgaccatgagtgcagagaccatggagctgaagtgggtaagttccagcctaaggcaggtggtgaacgtgtatgcagatggaaaggaagtggaagacaggcagagtgcaccgtattcgagggagaacttcgattctgcgggatggcatcactgcaggggaaggctgctttccgaatacacaacgtcacagcctctgacagtnggaaagtacctgtgttatttt

SEQ ID NO: 122942 - DNA, 944 bp, Homo Sapiens
  misc_feature (843)..(844): n is a, c, g, or t
  misc_feature (850)..(850): n is a, c, g, or t
  misc_feature (852)..(852): n is a, c, g, or t
  misc_feature (863)..(863): n is a, c, g, or t
ttttcagcattattaacaaatttattgaacaactagaacttgacaagcacttgcccagtagaggggatacagtggtgagcaataatagtgatgataatgaggagcagttttccctagcaggcagcagttgaaaggaatatgggtttaacatccaccaatgaccaggagtggacagatccttttccaggagactgagtccatagtgggattaaaaacatccctgtaattcttctagcttccttcatccaaattaccaatattacagagaatctctagggtatttgctctgcctggaaaccttgactgaaggaaggctggctctggctgcacgatcacttatcacatttgttgggtgggaacacatctgtgccccattattaactgagtgtggcctctagtctctttcaaagtcacatgccctgtgggaactgcaacgttattctctcaaccaagacactctgcagagccaatccaaggagtgctgggtctaaggctctgataatcagctgggaaggagtccataggggtcttaactccacaaccactcacagtgatctcgatcctggagctgtcctgggaagggaacctcagggctacatgtgggctcttcccatgcaggaaaaatcaggctggaaaagaacgggcaattggccagggactgaagctgaacatctcccaactgcacaaattaccgtgtgagttatgtaagctacttaatgttgccctgcctctgcttccatacttgccaaatgagactacctgacagggtgttgtgaggattaaaggagtgacacccaccaaagctcattacacagcactcagaacgtttttaattctcccatnnatgtantnccatgtgttanatcccactctgttgtccacatctgtctgcttgtaagtcataacttttctaacccatttcctactgtataagggcataaggg

SEQ ID NO: 122943 - DNA, 1277 bp, Homo Sapiens
  misc_feature (1166)..(1200): n is a, c, g, or t
gcttttagtatttcggctgtgcgcgcaaccttttgtgcattcggtcctgcttttccccgggacggagaagtattcgtcggtgtcccacaaggagtactgttccggcgagaagcaccagcaaaataggccaggtccctcacaggctgcgatccaggcttgggcgctcttgaggaaggggtctgcgatggaatgctggcggtcttttccagccgaggaagggattttctgatgatgcagggatacaccctccccggaggccgcctctcatgatcaacagatgctgctacttcatataggcccactccatctgcaaccacaggtgcttccacagctgggatgttctctcccttggtgttgctccactgtatttgggtttgggggtaccagccggtggacctgcactccagatggatccctccatcctcataacccttcacttcgacgtgaagattagaacccagtgctgcaaccttcagctccaccagggctttttcatagaagtcaccatcttggaaataacacaagtactttccactgtcagaggctgtgacgttgtgtattcggagagcagccttccctgcagtgatgccatcccgcagaatcgaagttctccctcgatacggtgcactctgcctgtcttccacttcctttccatctgcatacacgttcaccacctgccttaggctggaacttacccacttcagctccatggtctctgcactcatggtcgggaacaggtgacagggcagatcagcgtcttcacccaccatggccaggatgggcccagagggtccaagcacagaaaactgagctgagcaaggagtgagcagctggaccaagaggagggagacatgaaagttgagcagaaggaaagccagggaacttgccattttcatctatgctctgccaaaaatgtctgtccttgagtgtctttacctttgggttccagtatggaaaaccatcccttggtattcccattggagaatcagagcccacagaataaagacggtcaatcaataattctccattctttctattatggcttagcctctcatccggaagaaaggaaaaagagaaagcaaatattgtcttctcaccatgagaaacagtaagaccccggccgtaatggccgaattcccgggcatatgtccggtaccgtcgactgnnnnnnnnnnnnnnnnnnnnnnnnnnnnnnnnnnncgccgcttcctcgctcactactcgctgcgctcgtcgttcggctacaaacgagctagcgccctatagtgatctatcag

SEQ ID NO: 122944 - DNA, 888 bp, Homo Sapiens
  misc_feature (145)..(145): n is a, c, g, or t
agagagtctcagcgacagtggtctagagtcggagatgtgcttttcagcgagagatttgagacagtcacccacagagtgcttcagtcaagagtgtatgatacagccatccatcgcaccacagtgctcacagcgggatgtctctccntgtgtcgctcacttattgggttgggggtaccagccagtgacctgcactccagatggatccctccatcctcataacccttcacttcaatgtgaagatcagaacccaatgctgcaaccttcagctccaccagggctttttcgtagaagtcaccatcttggaaataacacaagtactttccactgtcagaggctgtgacgttgtgtattcggagagcagccttccctgcagtgatgccatcccgcagaatcgaagttctccctcgatacggtgcactctgcctgtcttccacttcctttccatctgcatacacgttcaccacctgccttaggctggaactcacccacctcagctccatggtctctgcactcatggtcgggaacaggtgacagggcagatcagcgtcttcacccaccatggccaggatgggcccagagggtccaagcacagaaaactgagctgagcaaggagtgagcagctggaccaagaagagtgagacatgaaagttgagcagaaggaaagccagggaacttgccattttcatctatgctctgccaaaaatgtctgtccttgagtgtctttacctttgggttccagtatggaaaaccatttcttagtattcccctctgaaaatcacagcccactgaagaatggtggttaatagttctccattctttctattatggttgagtctctccctcgtgccgaattcggcgcgccgtcgacttcatactctctccccccta

SEQ ID NO: 122945 - DNA, 1355 bp, Homo Sapiens
  misc_feature (354)..(364): n is a, c, g, or t
ttcgattaataacttctttattctggaaaagcaaatgaaagtcatattcatataaacactgacattacaaagtacagggaaaaggggaagggagaaggaaacaaaaccctttacaaatcctgctaatactgtcttacccaaaaagaccataatgctttgtcccatattcagtcacttatataataaaccacaaataaaatcttctctggaagatacattgctcctctttgagatggcagggaaaagggaccggaagttggggtaggaggctttattcttttggcagatcctctcagtcattatagatattgctgcactgttaataaaaaatatatgcttctctgtaaagcattnnnnnnnnnnntccaaggatgagatggctgagttctcagctcaagtatctccaaatacattgctgtccattccctgacctttccgtgtgttatttcttggttgttttccggatcaatgccattctctgtttgtgagcttctgtggtgcaagcttttttgtagggtcggatttcttcagagccaaatcctgggatccacatgttccactggcgctctaaatgcagctggacatctttcacctccagggtgctagacttgcgatgccgcgcaagctgacaggctgctgtcaccacactctcgataaaatcatcagcaatctgcagcagcatctcctccacatcttcatccaactgctcattaggatccacttctcttactaagtcctgtaatttcttcttggtcaatacctgattgttttcagggctaagacgacctcctgccccaggagtgcctggtatctttaccactgcagtactattggccatggagccttgtggaggggtgctggctggttccggttttatggatgagaaattggagaggttgattagggctgaggggccaaactggttcataatctgccgagctttggacttcagctcatagagcttatcgagatcctgtttctttttggagctgtgaggaccaaggccaattaaaggcagcagcgtctatctccccatgatatgcagagactgccccagtgaagcgttcgtctcagcagccggtccgactgcgcggccctccccgacttgccggccgtactggcctccttcccggttgcctatgtccggtcttgtcgcctgggtccccacagccgcgtcttctccgagcctgatcctctcagtcagtcccttcccaagagcctgaatcctcacagccccgtctcgtccacaacctggtccttcgaacactgacccactgtaggtctgggtcctgactccctcctcccgctcttgttcctcaactgccagggcccaagactcacaggcagcagcgtct

SEQ ID NO: 122946 - DNA, 1250 bp, Homo Sapiens
attaaacattagtatttattaaacattaaaatacaattgtatttactgaacattcttactctttaaagtgaatgtgtaaaaaccacttttaaaagagatctacagataatgagtaactccagaaacaaaggaagatgaggaatgtgaactaaccaggagaagaacttgagatccttgacaattaactccttggtctctcaagatttctatctttacaaagaattctacatgtactatcgttctggcatagaatttccacacatttcacataaaatcccttgtctctaactaaagaaaacttttttcttagtagtgaaataaatgtgttgagtgtctactggtatgcatatatcaagaattttagagacactaaatttttagacatgtgataagaatcatctgactaaaataccttatttccttatcttgagggtcctatggagtcactattattactctaattttacatttgtgtaaactgtggctcagaggttaaatgacttaagaacgcaccagtaatgagatttgaccataagttttactttgaagctcatgcttttcccaataaaatatgctgacttccacaagtctgtggattcaatgacacatttactgtgcgttcttaagtcatttaacctctgacccacagtttacacaaatgtaaaattagagtaataatagtgactccataggaccctcaagataaggaaataaggtattttagtcagatgattcttatcacatgtctaaaaatttagtgtctctaaaattcttgatatatgcataccagtagacactcaacacatttatttcactactaagaaaaaagttttctttagttagagacaagggattttatgtgaaatgtgtggaaattctatgccagaacgatagtacatgtagaattctttgtaaagatagaaatcttgagagaccaaggagttaattgtcaaggatctcaagttcttctcctggttagttcacattcctcatcttcctttgtttctggagttactcattatctgtagatctcttttaaaagtggtttttacacattcactttaaagagtaagaatgttcagtaaatacaattgtattttaatgtttaataaatactaatgtttaataaatactgtttgatgtttcatgtttttaagcattgaagttttaataaaaagctttgcttttaataaataaaatttcatgttaattttaatgcttttccaagaaataaagtagcagtcactatt

SEQ ID NO: 122947 - DNA, 842 bp, Homo Sapiens
ttttagatgtccaaaaccacatttattaatcagaaaattccaaattacatgttgacaatttacatgtataagtgcaattcaatttcagcaaagagtctcttctaaatcagttcaagattgagtgatgaaatattcaacatacttctgccgttgacttaaaactggatcattaaagcttgaagatcaaattttaattctgtatacctctggaaagatacagatgttgatgaagatctttctttcagctggtaggttgtatagtcaataatctttgtacttccctccttatttcctaagttcatatttaaggtgtgagaaaaataaaattatactgaacacagaaagcttatattaaaacaataaggactgaatatatttgggtattactaaaaatatctagagatcaacacagatatatctttattcatgagcttaaaatctgaagtaaaaatttcatgctaataatattaatgctttcacactaggactaataagtcaaaaatagaatgtcatatgcttcacaagtctttcacttttgctgaatattataaatagaaataacatttaatatgagtctatagttgttttacaatgcagtacttcatatatgaatctatgtatgaagttgaaggaaacagaatagcagactaatggaatgcattgtctttcttgtttggtatttgtattggtcaatcacaacagggagtagcatattgtatttattaagtcccacaggcttcagtaactcttcagtaagtccaaacactgtgtatcaacatttgccaaagaagcaagagggaaagacattacttaatacgacaattctgacaagacatgtatcc

SEQ ID NO: 122948 - DNA, 828 bp, Homo Sapiens
ggcttgtgggattttcaagatgttttattgactatctaatttgaatctacttacaaagagaagaaaaatgtctagtatgtaaagcaatgaatgaaaataaatgtttatcctaagtcattattgagtacaaatccacagcttaacaatgtgtttttaacagcaggagagcatgcaactgctctaacacacagggtcagaaataaaaggtaaaagtacatttgttttgtaactgtaaatatacaaatataaaatttaccatatctaccctgtagtgtggcactgcttaactgccaaatatacagtcattcaaaaaccttaaggaaacattgaaaatgtctcaggctactttactgaacattaacgaatattgtgttcttgagctattagagctaaaagtattatttttaaagttatatgagcaagggaataataaaagtatcatttcacgtgtcttttaatcccatagacggctttttgttaaagggattaattatgttaaaaggaaactgatttgacaaatagaaaccagttccagaaccaaagttgtcctcttggtagaatgtcaaaatgtatattatttccaaagtattttcattattaatctactcaaataattacaaacagtttaatcaagggagtcactatttaacacttttaaaatctacactggcagttggaatggaacttttacaatgctattaaggaacagttctctagactttcatctgcccctcaaagtgacatccctgttttatgttaaattaccgacctctaaggaatcaaaggcatgtagagacacagaattgatattttgtttggggagaaggg

SEQ ID NO: 122949 - DNA, 1032 bp, Homo Sapiens
  misc_feature (596)..(970): n is a, c, g, or t
  misc_feature (979)..(979): n is a, c, g, or t
  misc_feature (994)..(994): n is a, c, g, or t
  misc_feature (1003)..(1003): n is a, c, g, or t
tatttggaaagtttgcttataactctgatcaaggccccattttcatcctttagcctctggttgtctgcttttaggtctggtaacattttgagctcttcttccatttcagatattcttctttctagagctcttcgttcccttttttccatttccaacagtgatctatcagcaaatctttcttgtctctgggtggccttttccaactgtaatttaagatctgttagttccatatttgtatcatgtagctgtgccttcagcttttcattttcagctagaatttgttcataaagctttttaaagtcagttgagtcatccttttctagcctgctgctgtaaggttttctttcttctaagtaactgtatgatccagagcgacccagcaaggaatcatatcgatcaccagctgatgtagaactggtttcatatctagaaatggaatccgtctgagtttctttcttattggatccctcttctgtgtctgattgttgttcttgttcattttcatcactatcttgtgtccaaaatgaaactcctgtagatcttcttttctctcttggtcgtcgtcgttctctgattgacctcgtgccgaattcttnnnnnnnnnnnnnnnnnnnnnnnnnnnnnnnnnnnnnnnnnnnnnnnnnnnnnnnnnnnnnnnnnnnnnnnnnnnnnnnnnnnnnnnnnnnnnnnnnnnnnnnnnnnnnnnnnnnnnnnnnnnnnnnnnnnnnnnnnnnnnnnnnnnnnnnnnnnnnnnnnnnnnnnnnnnnnnnnnnnnnnnnnnnnnnnnnnnnnnnnnnnnnnnnnnnnnnnnnnnnnnnnnnnnnnnnnnnnnnnnnnnnnnnnnnnnnnnnnnnnnnnnnnnnnnnnnnnnnnnnnnnnnnnnnnnnnnnnnnnnnnnnnnnnnnnnnnnnnnnnnnnnnnnnnnnnnnnnnnnnnnnnnnnnnnnnnnnnnnnnnnnnnnnnnnnnnnncgcaggaangacatgtgagcaaanggcagcaanaggcaagaacgttaaaaggcgcgtgctgg

SEQ ID NO: 122950 - DNA, 353 bp, Homo Sapiens
tttatttggaaagtttgcttataactctgttcaaggccccattttcatcctttagcctctggttgtctgcttttaggtctggtaacattttgagctcttcttccatttcagatattcttctttctagagctcttcgttcctagatcgatttaaggtaccaatgttagttatataattattatattcttaagtcttcttctatactgtgaaatagtgatacttcagaattaaaggtccaatcaggagcagtgtagaaaagatgtgatgccagtgatatgtaaagagctttccaaaatttgacaaaaataaatatgaaagatctttatccttagagtacaagctcttaatttaaa

SEQ ID NO: 122951 - DNA, 962 bp, Homo Sapiens
ttaattgttgccaactttttaaattaattttcattatttttgagccaaattgaaatgtgcacctcctgtgccttttttctccttagaaaatctaattacttggaacaagttcagatttcactggtcagtcattttcatcttgtttttttcttgctaagtcttaccatgtacctgctttggcaatcattgcaactctgagattataaaattccttagagaatatactaactaataagatctttttttcagaaacagaaaatagttccttgagtacttccttcttgcatttctgcctatgtttttgaagttgttgctgtttgcctgcaataggctataaggaatagcaggagaaattttactgaagtgctgttttcctaggtgctactttggcagagctaagttatcttttgttttcttaatgcgtttggaccattttgctggctataaaataactgattaatataattctaacacaatgttgacattgtagttacacaaacacaaataaatattttatttaaaattctggaagtaatataaaagggaaaatatatttataagaaagggataaaggtaatagagcccttctgccccccacccaccaaatttacacaataaaatgacatgttcgaatgtgaaaggtcataatagctttcccatcatgaatcagaaagatgtggacagcttgatgttttagacaaccactgaactagatgactgttgtactgtagctcagtcatttaaaaaatatataaatactaccttgtagtgtcccatactgtgttttttacatggtagattcttatttaagtgctaactggttattttctttggctggtttattgtactgttatacagaatgtaagttgtacagtgaaataagttattaaagcatgtgtaaacattgttatatatcttttctcctaaatggagaattttgaataaaatatatttgaaatttt

SEQ ID NO: 122952 - DNA, 1068 bp, Homo Sapiens
  misc_feature (262)..(270): n is a, c, g, or t
  misc_feature (548)..(578): n is a, c, g, or t
  misc_feature (1008)..(1008): n is a, c, g, or t
  misc_feature (1013)..(1013): n is a, c, g, or t
  misc_feature (1019)..(1019): n is a, c, g, or t
  misc_feature (1037)..(1037): n is a, c, g, or t
  misc_feature (1053)..(1053): n is a, c, g, or t
ttttcagcagttatcacaaatttattaactcttaaatatatcaatcagtcctttaccattatggcaagaaatatatacagtgtcccatggtaaactgcagtgtttcaaaatgatagaagataataaatgtgtaattcatttgtggtggagagaacaaatcacaatttcctcacatcttagtgcggaagacaaacttgatctacagtaatacttcaacaccacatgctaagttaaaagtgtaaatataacactctacatctannnnnnnnnctttaaatacatgtatgccacgtatagctgcttcacaaaagggtaaaagaaattaaaaagagaaaaatgaggccattattttttcacagatctcattggcaggttaacatggctcaatatatttactgtatatatttattttaaatatatatgttgttttaaattgtgtaataattatcagaaaagcttcaacccatctaccatacatccactagcaataatatctaagatgattagtaatcaacacagagaggtgagatgagagaaaagaggaaggnnnnnnnnnnnnnnnnnnnnnnnnnnnnnnncttctgctttaaaaataggcttctgaggactgtgaattactatcgttaaaataacaatgatggagattccatgcactgtaaagcacttcagggaagagaacaaaaatcacaggaattgaatcaacaaaggaaaaatgagaagcacaaagaaaacctaggacatttccctttttgttttaaactgggaaattctaactccttggaggaagacaatgatactctgattcaagagagaagctaaaaaagcacaagtcacaaagatcaagttcaaaacacttatgagaatggcaaacatttgtaagcctctctaacactagaaaactagctagtgatgatgcagaagtgaccctttcattcccccaagggcggaggttgagtgcgttttgcataaaaccccctctggctatcaagttgggtatcctcctgggcnactgntccccnatccggtaagacgttggnggtcccaggggggaancttggctttattccc

SEQ ID NO: 122953 - DNA, 1044 bp, Homo Sapiens
  misc_feature (782)..(782): n is a, c, g, or t
  misc_feature (796)..(796): n is a, c, g, or t
  misc_feature (977)..(977): n is a, c, g, or t
  misc_feature (1027)..(1027): n is a, c, g, or t
ttttttttaaggtatgcactaataaaaatttaatatcagaaaacagcatttttttaaccattcacaattaaagtggaaagagacaaaattataaggcagccatccatggaatgatttcatgtttacaagggatccagaaaaagggacatttaaaatcactgttccagctattgaaccaggggaactgcagtcttatcccatgagacttctaacttgctggaagatgccacaagaaaaaaagatcaaagccaatctccttgtgttaagccactgggttaggctgagtatatctagagaattcctaaatggttgtctagttctttcccacaagttacacatttccttcaggcctcctgaggtgaatctagatgtctcaggtacaaagaggttttaatttcacagcatctccaacagtgcactttgggtgatgtggaccattctgtattgagcagaaattttctaatggaaggaaggttcctctgcagaacaactacagaggattttcacttaacactgcagcagttctggatgaatctggtcatgattctcagtctcccaaggggctcaggggcccacaaggcaggaacatcctttgggggtttgtgctgctgtcatacggttcctgtgttcagtccctagctaccatgtgtttcaggggcttaatacactccgatgctggtgtgtcctcttagttctaatccttgaaaaagagaaaaaccaggcagtgacacttagaagtagggctggtaaaaaaacacaatcacattttctcctttctgcanagaaggacactcanacagcactccctttcttttctctatgatcaaataccagacaggctcactggtgttttgattgggaagaagagtgaagcgggagaagagaacacatactctagtggtatactgttccactgtcacgttcagtgcagatcttgctaaaaaaattggcatagtgtgacagaactgatcaactgnacacactgcttctgaatggatgcagcattactgggaatatgagggatggncatatatcttacttatt

SEQ ID NO: 122954 - DNA, 1186 bp, Homo Sapiens
  misc_feature (1109)..(1143): n is a, c, g, or t
tttgcataataccaaagaatttattgtaaatgtagtggcaaatacattcagaataatcatcattaaaaaggaactagaaaattatacatgtttaaagtatgtgcttttttcccaccacctttaagttaatggctagtaccaacattttaagtaatgaaatacttaatgtgatgacccattttcagataatttcatgactgtatcttcatcttaatttttaaagcagttgaccatgaatttcagtttcagttattctctgtttttatcaattccgtaatgatctgcagaatcttgtcattttcaagggacatctttggattttcaagcttttttcttaaaactgaatcaatgagaactctcagctgcttgaaaatgacagctatctttacaggggcctgaaaatagatccagccatcaatagaaagaagacgttctcggtgctgaacttctatatcaccaccaaaaagtaaaactggaaaaggggttattagggtagtttctctcaaatacactctggcataccttatcttctcctggtataagagccatccatgagtttgcaaatctcgatttactgaggatgggtgtacttgtgctttgccttgggccgtctccacaatgcaagccaatttttctgtaacatccactgactttgtatagattatcttccccacattgtcatacagtccagccaccagtacagctttaagaagggcaatttcttggaatgagagggtctgtgaggctctgtttccttcccagctggtagaagttgtggaagatgaaaatcctgctgctttaaccaactttattaactcctgctttacatcctctagggttaacagtgatgttctattaagaaagttcctccggcagtatgtgatttcagaacgataacctccttcttgtcgtgctttcttccatcctagatatgcattgtagatcgtcaggtggtctgaatccgccatggccaaagctgattttgcaagatctgcttcatcttttcgaccaattggtgtggtaaaaggagacttctctgtcataactgcagctagtgtcccggccgtaatggccgaattcccgggcatatgtccggtaccgtcgactgnnnnnnnnnnnnnnnnnnnnnnnnnnnnnnnnnnncggccgcttcctcgctcaatgactgcgctgcgctctgtcgttc

SEQ ID NO: 122955 - DNA, 1938 bp, Homo Sapiens
  misc_feature (549)..(561): n is a, c, g, or t
  misc_feature (839)..(878): n is a, c, g, or t
  misc_feature (1831)..(1865): n is a, c, g, or t
gagggaggatatgtacgggttagggaacctggctgctgctacttcacctaagagaagtgtgatgtgtgtaaggaaaagcacgatttattttctcctcagccaccgcagatagccgcgtagaatggagtagatacaccccggggcgttgcgttttacagtgaagaggcgatatatatggaggcaaattatttgttgtggtggcgctgaacattctaaataccggcgcgggacgggatgatatttctcattatctccgagttttaagaggttggtcggagagaaacaacagcggcgaggaattacaagtgtggctcgcacgggtcctttgttgccgtggggggcgaggggttatgtgttggggggcagaaaagcgggccttagagggaggcattatgctcccaccgctgtgtgcggaagtaggaagtgtgttctcacttcaaagggcgcggagtaatataatatgggatattccccgaatccccggactggagaggggcctgtgaatggaaagtgtcgcggcagagtaatttgcggctggtgacggccccnnnnnnnnnnnnntggtaaaagggaaaatccgatgttgtcgcttggagatccctattttgtattggggggcgagtagagggccccaaggggtggggctagggagtttcggtcgaaaaccgaatggattcccacccgggccgttttttatttggggaggggtccaggaccaaaaagtttgtacaagggttttctaagggagcaggtatgtctcaaggtagattgctttttttggtccgggtttccaaacggatggtttagaaatttttttggtggtgtgatgcgggtgtcannnnnnnnnnnnnnnnnnnnnnnnnnnnnnnnnnnnnnnncctatttagaaaattttattgaatatcatacttatcaaaagaaaaagttaattttccccaaaggcacccttcatttcacatgatctatactctaatgttcttttgtattaaaaatatggttaaatatggaattagtaaaatgcagcatataaaacttcatgctgagcaaaaacaagtccaaaacaactttaccatatatccatagaatagttcccacagtacatttcctatgtaaattatgtttgaatgcaatttttagaaccattttaagatacattttgcaatctgttaactgtaggcatccgcatttttcttccattacataatctgtttatctgattaagttggcaatatctgctaggatccacagaatgcaggaaaaaaagcagttatttctcaaggtttgagaaatctggtccacctttagtgtagtttcctgagatttctgctccactgaagtcaaaaccaggattttctttttggaatctctctaatgtaagctttctctgcatttggtcttgcacccaaggatccgctgcatattcagattctagtagagaagtccaacaatttgctgcatctctctttgtctttgtaagaacaatacgaaccatttttctgtcctccaaagtccatgttccctcatcagctattgtagaatcaaagagtttgcccttgaggatctcgcgccgcccaccgacagcgccacatgccggctctggaggccgcactggatatcctgggcgcgcgtgcctggcggcacctgaacttcaatgaacacctcctccaaggtctggtaccactggccccacggggtcccgcacggtaccaccccactccgctcctcaaacggggccgacataatccagtccctcccgccgcggccgcaccaggcggagccccccggccgtaatggccgaattcccgggcatatgtccggtaccgtcgactgnnnnnnnnnnnnnnnnnnnnnnnnnnnnnnnnnnncgccgcttcctcgctcactacttcgctgcgctcgtcgttcgcatcgaacgagctagcgccctatatgatctca

SEQ ID NO: 122956 - DNA, 764 bp, Homo Sapiens
  misc_feature (50)..(50): n is a, c, g, or t
gaatcccttaagtgcaaggactatgtcttcatctctctactgtcagtgcntagcacaaagcctggcacatagatggttcttaaaaatgtttattcaatgcatgaacagaaagacaaatgcctactaccaagtcagcctaaggttcattgcaactgcttatgcacataccaatggcttgcatatgtctcaccccatctaggatcatctagaccagggctgtaagggaacctacattcaacaacaggtgccataatatctaacaataatgacaggctattggaagaccaggaaaacaacaaagctcatgtatttcaccagctggaaaattcatctagtaaacaggctgtttgaggaaatctcttgacattggaagcatgatgcacacacgaccttaaaaccctaccaatagctctgatggaggaaagaagggaacctgagctagcacgttggtattcacgagggctcttctgtcctgaattggtcctctcatctctgggaaagagaaaagtgtccctaaaaaccacaatagggatgagatgtgccttcctagattcaagtagattcagtctgagacagcaattttgtttttatgtaccaacagaaaacctaaacaagcaggaaataaaagctacttccctcactaaagatatattaagggccaaatatttgttctaaattgattgctaagtctattagatattttgaaaagaaaaataaaaccccagactatttaaaaactgaaatctacaactgtatggagttca

SEQ ID NO: 122957 - DNA, 1428 bp, Homo Sapiens
  misc_feature (1111)..(1204): n is a, c, g, or t
ttttttttggcagaattattctttatttctggagacatttaatcagatgcagtaacactgattccaggcgagggcagggggcatgggtacccctgaagcaaccagtatcctgtggcccaaggtgtcccccatccccagacctgggatccccctcagttacagttaaatagagagaggaagatctccccagggggctttggggggagggtctgcctcctgcacccaccctctccacgcagaggagtctgagcacaagctatttacagtattcacatccactgtaccccaccaaatcaaggcaaatactacaggtggcccctccccaagggaagaggccagagaggctgtgagtgtatatgtgtgtatgggggagaagggatgtctgcgcgtgcgagcacacgaatgcactgaggggcagatctggctccggccaaagagacatcagtctataaggtgcagattaaaaacaacagagaggacccacccccaggggcccaggccacttccatctttgttctgtctttttctcctccagacatcctggtaggtgatgcagaggagccctcacaactgtgcccggatccaaggcaaaccctcttaaaggacttctgtgacctgcggggactgcaccacagctttcttgaggaaggcttctgcctctgcaaagggcaggagtgtctctggtgttcggctcagactcttgtccccagagggtccgttggtggagaagccattctcctggtgtgctgggagaggctgcaggccattcaccagggacgctggcaactccttgcttgggagactccactgaggctcctgtgggatgggctcctctttctgcacagcctccttctgcagccctggggaccgagcctccacagctttcacaggctctgggctggaaccgttggcgttggcctccttgctgtcctgcttcttggtttcagaaacttctgacttccgagtcctcttcatgatctcctccagacgctttctgcgctcttgccgctcttgctcctgctgctggaagtgcttttcccgctccagacgctgccgctccgcctcttcccgcgaccgagcttcggcctcctctttctgcttctgcagccgnnnnnnnnnnnnnnnnnnnnnnnnnnnnnnnnnnnnnnnnnnnnnnnnnnnnnnnnnnnnnnnnnnnnnnnnnnnnnnnnnnnnnnnnnnnnnntcccgtgccagctgctcctctcgcattcgcttgtccctttctgcctgcagcctccgctcctgctcctcgcgctcccgctgctcccgggcctggcgccgcttctcagccaagagccgagtggcttcttctcggtctgtggtgccggccattggtttgctaggggtcaccgggggagcctcgtgccgaattcggcgcgccgtcgacttcatactctttcaccacaa

SEQ ID NO: 122958 - DNA, 497 bp, Homo Sapiens
  misc_feature (203)..(203): n is a, c, g, or t
cctttccctaagaaacccaagttactctctgaaatcactgtgactcttctgtggccagagccagtggacactgcagtccttttctctgctctctgcagggttaggtgccatctttcattctccttttggaaaggcatttgcttgagcttccatgccatgccttccttctggacttcctgtactcccttgcctgccccagatcncacatctctgtctgtctgaagcttcaattaccacatcaaatgctgagggtcttcctgactgtataccagtgtttggactacctttttaatgtcttcgtttgaatgtttcacaggaacttcatacagttaaactcattgtctctccaccctggcctcagtcctaatcttgtttcttctatattcatcatctttagagccctcaagggcaaaacctgctggccatcctatactttcctgtctttgtccatctctcacatctgtttggtcaccaagtcctaaatactccacctccat

SEQ ID NO: 122959 - DNA, 875 bp, Homo Sapiens
gggaaaagttctccaaagaagagctgaaaaaggcccaggatgttttggtgcaggagatggaagtggttaaacaaggaatgagccatggagagctctcaagtgaagcttataaccaggtgtgggaagaatgctacagtcaagttttatatcttcctgggcagagccgctacacacgggccaatctggctagtaaaaaggacagaattgaatcacttgaaaagaggctcgagataaacaggggtcacatgacgacagaagccaagagggctgcaaagatggaaaagaagatgaaaattttgcttgggggttaccagtctcgtgctatggggctcatgaaacagttgaatgacttatgggaccaaattgaacaggctcacttggagttacgcacttttgaagaactcaagaaacatgaagattctgctattccccggaggctagagtgtctaaaagaagacgttcagcgacaacaagaaagagaaaaggaacttcaacatagatatgctgatttgctgctggagaaagagactttaaagtcaaaattctgaagtacagtttatattctgtcacaggattaattaattgccggttttcatactctagaaggctgaaactgatgtttatcttcattgacaaatttacccaccatctgtggtttttcagttgtttattttaaatgatatcgatcttacacattctgtgtataaagaccttaactccacaggacggacattttagagtttaaattattaaggctatcattcttttagtaatgtcatatttgcaaacttttttagttttggcctttaatttaaaaagcctaattttaaagtgctgcctgtgagtaactcttgaataaaaacaaaatataaaaa

SEQ ID NO: 122960 - DNA, 419 bp, Homo Sapiens
atgtaagctgacttttaaaaagctttcttttgttgcatgccctgtgcaggcatctgtattgtacatgcatgcctttcgtcctgttttcctgtataaagttagtgaacaaagaaatatttttgcctagttcatgttgccaagcaatgcatattttttaaatttgtcatatatggaaagagcatgtttgttacatgtaaaagctttactgatatacagatatactaatgtttgaagatgctgttctttgcaagtgtacagttttcaaatgttgttaccagtgaaacacccttgtggtttaaacttgctacaatgtatttattattcatttcctcccatgtaactaagaatcatggctatatttcatatcaacgttatattgaaagtgaagggaaatgattaatacaaggttttgtaacaaa

SEQ ID NO: 122961 - DNA, 991 bp, Homo Sapiens
  misc_feature (68)..(125): n is a, c, g, or t
gagtctgccacacgtttgacatttattgtttattcccacacccatcccatgaaacaagcaggactttnnnnnnnnnnnnnnnnnnnnnnnnnnnnnnnnnnnnnnnnnnnnnnnnnnnnnnnnnnaatgacagaactgagacttctgactccaaatcttacgctcccccgccacacctctttgcctttctctttcacaccaatggactttatgggtgactttggcataggtttttctaagaactggctcttaacaaaaatttctggccattatctgactgaatgtcacaaacaagtgctgtaagaacttgcttagagcctttttcctaaacctgtacaccagctcttgccttgtgaatttattcaccacaaaacacatgttcccaggggcccaggcaaagtctccaagtacccagtcccctttcttcagccttgcccacaccctcagccttcctgttaatccaggcgacccagggttacccagaggtccaggtcccagttgttcacttgagcatctgatgtaccccaaacacctgtgtgaaacgctctctgtccaggatgcgtccatagcgcagggtgacgtagaaggtctgtttcccactgtaccgctggatacgcacaaacatctcctgaggccggtccttggtttctgtcaggggaatcacatctgccatgggacagtatgtgtcctgccgccagccccagaagttcagatgggccacccgcagcatggtgccagactcattcagatacaggataccaaccagtctccgtaagaaatagctcatccagcacagcatggtcagggcaaagcccgatatcccactcatgaggcacacggtgttgagagtgaggaggccctgggagtacaagtaatagcctggtggcaaagctaccactgtcagggcagtctgtgccaacttcagtcgtgacaggaacccgaaggttctgatggcatcaaaacggtaaaacatcccctcgtgccgaattct

SEQ ID NO: 122962 - DNA, 587 bp, Homo Sapiens
tttttttctgccacacgtttgacatttattgtttattcccacacccatcccatgaaacaagcaggactttccattttacagatgtgaaaaccaagattcaaagagactcaataacctgctccaggacaaatgacagaactgagacttctgactccaaatcttacgctcccccgccacacctctttgcctttctctttcacaccaatggactctatgggtgaccttggcacaggttcttctaagaactggctcttaacaaaaacttctggccattatctgactgaatgtcacaaacaagtgctgtaagaacttgcttagagcctttttcctaaacctgtacaccagctcttgccttgtgaatttattcaccacaaaacacatgttcccaggggcccaggcaaagtctccaagtacccagtcccctttcttcagccttgcccacaccctcagccttcctgttaatccaggcgacccagggttacccagaggtccaggtcccagttgttcacttgagcatctgatgtaccccaaacacctgtgtgaaacgctctctgtccaggatgcgtccatagcgcagggtgacgtag

SEQ ID NO: 122963 - DNA, 1087 bp, Homo Sapiens
ttattttaagttgtttattttaagataatttacaaatatcttgctgtcttcagtaattcaaataatggaggaacagtttcttcggacaaaggcagcagtaagctaaaaacaaaatcaactggctgaattttccttctttacagagctgcagcaccagagataatttcaatcaactcttttgtgatgacagcttggcgggtacggttgaatgtcaatgtcaatttgtcaatcatctcagaagcattcttgctggcattgtccatggctgtcatcctggcactctgctcactagtggtggactccttcagagagtagtagatgatgttggccagattgtattcttggtaattttgcagcacgtcagcatcaatatcgtcatagatactcatgctgtcagcacttgcaacggtattaagggaaaagatgggcttttcttctgtcttataggagatgacagacctgaatttattaaagatgatggagccttcatcaaattcatatccagaatttagtaattcaagggcaatgactgacgcatctccaaaagtggggggctttcttcccacttctttgaatgccaccagaaactggtcagaatgagtcctataaagtatgcctctgattttgtcaccaattccaacaagcataacttctttcccagctgctgttagtgtagcaacctcgcttttcatctgtttagcaatggaggaatgaatagcaccacacagtcctcgatctgaggacacaccaataaggaggtgtttcttcttgtcttcaggccccttgatatcagctttttcatacagagctaaagatcccaatccatatattcgagctggtttcagctctctctcagctcgggcatattttgctgccgctaccattttcatagacttggtaattttctggatgtttttgatggactttagtctcctggtgacattgcggctgcaaggtccaggccgacagcccagcgacacccgcgcgagagaacatggtagccacagccctgctgaaggtcggtcaggcaggcctcccccggccgtaatggccgaattcccgggcatatgtccggtaccgtcgactg

SEQ ID NO: 122964 - DNA, 1602 bp, Homo Sapiens
  misc_feature (304)..(315): n is a, c, g, or t
  misc_feature (1473)..(1507): n is a, c, g, or t
  misc_feature (1510)..(1552): n is a, c, g, or t
gttggggggaggtaacccgaagccactttgttgtttgcgccgcgggggttcttctcttgggagggacagaagtttggcccccgttctcgtctctccccctaggggggccgccggggccccaaggaggaagggtttgaaaaatttttttgtggggtccgggggggcccccaaaaaccgccctttctttttcgcgggcgtttttccggggggcgtgtagccctccttggcacccgcgctatactattgtgttttaaaagaaatgtcctgtggttttttctttatgccctactgtccgcgtgtttgnnnnnnnnnnnncgtattttaagttgtttattttaagataatttacaaatatcttgctgtcttcagtaattcaaataatggaggaacagtttcttcggacaaaggcagcagtaagctaaaaacaaaatcaactggctgaattttccttctttacctcttgtctgaggatggaacttgattttcattaatccagagctgcagcaccagagataatttcaatcaactcttttgtgatgacagcttggcgggtacggttgaatgtcaatgtcaatttgtcaatcatctcagaagcattcttgctggcattgtccatggctgtcatcctggcactctgctcactagtggtggactccttcagagagtagtagatgatgttggccagattgtattcttggtaattttgcagcacgtcagcatcaatatcgtcatagatactcatgctgtcagcacttgcaacggtattaagggaaaagatgggcttttcttctgtcttataggagatgacagacctgaatttattaaagatgatggagccttcatcaaattcatatccagaatttagtaattcaagggcaatgactgacgcatctccaaaagtggggggctttcttcccacttctttgaatgccaccagaaactggtcagaatgagtcctataaagtatgcctctgattttgtcaccaattccaacaagcataacttctttcccagctgctgttagtgtagcaacctcgcttttcatctgtttagcaatggaggaatgaatagcaccacacagtcctcgatctgaggacacaccaataaggaggtgtttcttcttgtcttcaggccccttgatatcagctttttcatacagagctaaagatcccaatccatatattcgagctggtttcagctctctctcagctcgggcatattttgctgccgctaccattttcatagacttggtaattttctggatgtttttgatggactttagtctcctggtgatatctttcaaagttgccatatttcgaacttgaatccattgcggctgcaaggtccaggccgacagcccagcgacacccgcgcgagagaacatggtagccacagccctgctgaaggtcggtcaggccctcccccggccgtaatggccgaattcccgggcatatgtccggtaccgtcgactgnnnnnnnnnnnnnnnnnnnnnnnnnnnnnnnnnnncgnnnnnnnnnnnnnnnnnnnnnnnnnnnnnnnnnnnnnnnnnnntcaagagtgcgcgccctaattaagttgagttcttgtacgattgttcgtgt

SEQ ID NO: 122965 - DNA, 976 bp, Homo Sapiens
  misc_feature (864)..(898): n is a, c, g, or t
tgctcactaagtggtggactccttcagcgaatagtagatggatgttggccagattgtattcttggtaaagtttgcagcacgtcagcatcaatatcttcatagaatactcaatgctgtcagcacttggcaacggtattaaaggcaaaagatggcgtgtttcttctgtcttaataggagatgacagacctgaatttattaaagatgatggagccttcatcaaattcatatccagaatttagtaattcaagggcaatgactgacgcatctccaaaagtggggggctttcttcccacttctttgaatgccaccagaaactggtcagaatgagtcctataaagtatgcctctgattttgtcaccaattccaacaagcataacttctttcccagctgctgttagtgtagcaacctcgcttttcatctgtttagcaatggaggaatgaatagcaccacacagtcctcgatctgaggacacaccaataaggaggtgtttcttcttgtcttcaggccccttgatatcagctttttcatacagagctaaagatcccaatccatatattcgagctggtttcagctctctctcagctcgggcatattttgctgccgctaccattttcatagacttggtaattttctggatgtttttgatggactttagtctcctggtgatatctttcaaagttgccatatttcgaacttgaatccattgcggctgcaaggtccaggccgacagcccagcgacacccgcgcgagagaacatggtagccacagccctgctgaaggtcggtcaggcaggcctcagcgcgcatgcgccccccggccgtaatggccgaattcccgggcatatgtccggtaccgtcgactgnnnnnnnnnnnnnnnnnnnnnnnnnnnnnnnnnnncgccgcttcctcgctcactacttcgctgcgctcgtcgttcgctgcagaccgagtagcgcctatagtgattataatttt

SEQ ID NO: 122966 - DNA, 997 bp, Homo Sapiens
  misc_feature (48)..(48): n is a, c, g, or t
  misc_feature (90)..(90): n is a, c, g, or t
  misc_feature (120)..(120): n is a, c, g, or t
  misc_feature (882)..(916): n is a, c, g, or t
tgttcatggtcggcaatggtccaggggccgtcattccgaccaatttgnttccctaagggggggactccttcagggaggtagtagaagganttgggcccagatggtatttttgggagattngcagccccgtcagccatcaaaatcgtcaaaggaaactcatgctgtcagccacttgcaacggtataagggaaaaagagggcttttcttccgtctaataggagatgacagccctgaattttttaagatggagggagctttcatcaaattcatatccagaatttagtaattcaagggcaatgactgacgcatctccaaaagtggggggctttcttcccacttctttgaatgccaccagaaactggtcagaatgagtcctataaagtatgcctctgattttgtcaccaattccaacaagcataacttctttcccagctgctgttagtgtagcaacctcgcttttcatctgtttagcaatggaggaatgaatagcaccacacagtcctcgatctgaggacacaccaataaggaggtgtttcttcttgtcttcaggccccttgatatcagctttttcatacagagctaaagatcccgatccatatattcgagctggtttcagctctctctcagctcgggcatattttgctgccgctaccattttcatagacttggtaattttctggatgtttttgatggactttagtctcctggtgatatctttcaaagttgccatatttcgaacttgaatccattgcggctgcaaggtccaggccgacagcccagcgacacccgcgcgagagaacatggtagccacagccctgctgaaggtcggtccccggccgtaatggccgaattcccgggcatatgtccggtaccgtcgactgnnnnnnnnnnnnnnnnnnnnnnnnnnnnnnnnnnncggccgcttcctcgctcactacttcgctgcgctcgtcgttcgactaccgcgagctacgcctatagttagtaacaaatcttt

SEQ ID NO: 122967 - DNA, 1298 bp, Homo Sapiens
  misc_feature (1185)..(1219): n is a, c, g, or t
tgagccaccgcgcccggcccacagttttattctttacaggaggtcagtgcccatcatgttccctgtctacagacaaataaaaagctgctctctccagaggggcggcagcagtcctgatggtccagtgagacccagaagcttccaggagaccttcagtcccgagtccctttcagtcatcatcttctgagtctgactcttctgtggactcagatgcgctctctggcaagtcgtctcccatctgctggaaccttcccgactgtgaatcccacatgtatttgatggtcaccttgaattcagccatctcatacccaaaaagcttcaggacgcgagcctgctctggggtcagcacatcgccctccttgcacacctcgtagtcagacagcagagtcaccacacctctcttgagggcggtgggcaggcccagctgcctgagctgtggctccatggagtgggggaactgctccaggggccctggatccaggctcacagtgaaagctgctttgttaccagctcgggcgtagtccatttctgtgtatttcgtgaaccactcattcacctcttcctttgtgcggttggtgaacaggagacccacctcacccctcaaccttttgctgacctggtgcaggttgtctttgtattcatcagatgggctccgacccaaggccaccatcatcaccttgtttttgccaaagaacatccggctgtgcttccaggcgttccggatgtccttcagcttgctgttcctcatgttggccacagagaagatgaaaaggtacttgtaggtgtccacacatttccgaagctcttctatcaggttttgtttcaattccaagcctttcttggcagttttggttaaggagactttcttgtcgcgcttggatttgggcatcgcgctgaatccacgtgcggcggaagacggtgcaccccgttaggaccccggcggcgcgggggactctgggacggccctcgggggctgcccctcgcgtgtgcctgacccatgtgcactgcagcctgcctctccctgctaagccgccgcctgcgctttctcccgcgcctgtagggcaacttcccgtgtgccgaggcagtccctgaatcccgagcgtcccgtccgaccgagggcctcgcgcgctatcccccggccgtaatggccgaattcccgggcatatgtccggtaccgtcgactgnnnnnnnnnnnnnnnnnnnnnnnnnnnnnnnnnnncgtccgcttcctcgctcactactcctgcgctcgttcttcgctcgaacgagctaggcgccctatagtgattaatcatctc

SEQ ID NO: 122968 - DNA, 1318 bp, Homo Sapiens
  misc_feature (595)..(658): n is a, c, g, or t
tttattttgtgagacatttttttccttattaactctcttcaaattacttgctttttgtctttctgactggcagaggttatcttcctgaaaatcattacttacatttgaagaagtattagcttgggtctctacacttgtgctatcttcatttattaattttgtaataaacaattctgttagttcatccatttcatctttttcatttttttcaacttccttttgtgaaactgtagctgttgttcttgaattatcattgctctctgatacacacgtgtcagaatctttcacatcattcttagcaccttcttgctcagacgtttcctttacttgtgagttgcaacaccgtttgaatacaataagaagatttcggtgttgtgatgtaaatgccttagataatttatggcacttataatgtctaattatattgctttcacttgtaacaactgaagtacatccctttatcatacatggatactgggttacaaatctgcttgtacactcagacagggcatcatttctagcctttatagaatatacatgcttcccacgtttcagagaataaggcttattttcttcaatctgcacaatctttgcnnnnnnnnnnnnnnnnnnnnnnnnnnnnnnnnnnnnnnnnnnnnnnnnnnnnnnnnnnnnnnnnccacatctgctgtgcttcgtcccccgatgtttagactttgatttttcttggtttgccttgcttgacatattttcctggcctggtgttaatcttcttggacgaatcaaatgagccttatgtttgtcattatgcttattaaaaatgtgtcggaggagattcgaccgggttgcatatatacggtcacagccttcacaatcacatttgtatacaccatcttcttctgttttacttgcccttagtccaatcccgtggtctgcctctagatgaacaacatagttcaaatatgtagtaaatgaagatttacactctaactggtcacatggaaacttcccaacatccactgaagcagtcatactttcaatttcttcaggagtcatttcatgaagtttcatgtagtgttgtattaggccagtaattgcttggaaaattcgagaacagtcacttacctgacatcgaaattctttcaaagtttgtttagtttcagtttcttcactttctttaccagcttcactttcctcttcgacctctgctgaaaatgcaggtagatctgatttgtgtacagcctggtaatggagaatcaaattttgctgtatcgtaaaggcagcaaagccccggccgtaatggccgaattcccgggcatatgtccggtaccgtcgactg

SEQ ID NO: 122969 - DNA, 654 bp, Homo Sapiens
agagacggggtttcactgcttgtttaatactatgttattttttcctggaggagaatatggtctccttttgatactgtgatgaaaatgcagggctacctgcctgttcctcactctgatgcccatcctcagtgccggaattcttgtaggtgctcaggaaatacctctctggatggtgggttcttgtcagggcaacagtaaagctctggttattttttgctgctcctgaaagatccatgggactaactttccttctctgttgcaatagtagaaacagcgagatgtctatgtatgcctttctattgccactctggaacttttattgtttaagcatatgcttgtaagtatgttgtatagctagacttctaagaaccttccatcaagtggcaaaaggagggaactgcaagttcaaaatgtttgtttctcagtggactaactggacacctttgcttattatgctgacatttattgagaaaaacaaagtcatacatttaacattctctagataattcttttgttatctgggaaaacagtatttcaaaaataattctgaggtctaaagtagagctgtcaacttcttaatttttccaagtaaagtcttcaatactgtcatcaggtaaaattaccccattttataaaagacatcacattatcagt

SEQ ID NO: 122970 - DNA, 1036 bp, Homo Sapiens
  misc_feature (111)..(111): n is a, c, g, or t
  misc_feature (114)..(114): n is a, c, g, or t
  misc_feature (118)..(118): n is a, c, g, or t
  misc_feature (132)..(132): n is a, c, g, or t
  misc_feature (172)..(172): n is a, c, g, or t
  misc_feature (194)..(194): n is a, c, g, or t
  misc_feature (201)..(201): n is a, c, g, or t
  misc_feature (208)..(208): n is a, c, g, or t
  misc_feature (215)..(215): n is a, c, g, or t
taaggattgccttggagccagatccgcacgagggacagccatggagcagtccagtcagatgggtcacgtagagcccaccaagacctgctgggtgagccccctttccccttnagnacgntgtggctcttgtcntgtcccaggagcctccagcccctgcccacagaagggagcntgcagagggccagaattactanccattcnccacccntagtccntcagtggcttgcctataggtgccacagggcacagctccatcattgccactggtttttcctaagtcatgcaccaaggacttcagaaagttcttcctccgagtcagtcagtggtgccgggaccccagggcagcctcctcgactcctgaagaaaaggcagtgcccgtggctgcctctgtcttcactcgctgttgatgtgaccgccaggcctcctctcgtaccttggacaaaggatacacctgaaccagaatagttttcttaccctcacattgaaatgaggattttgcttaaaacagcacttgccgccagtgggaggagggaggttttatttattcccacagtttctcctgggccttctggaatgaccatgttttcctgtggcggtgggtgtgtcattgcgcccgccgtcttccaaagccttacttccccaagctgccagccaggaggtgataaccaccctcccagagtttctctcggctctttttttaaaagtcccccaacaaataggattcttgctgggaaaggaagttcggtaaggaaatgtcaaatctggtttttaaacaaggtccaaccctgcaatgaagcagccacttcagcccagagagattataagaactgatgtggccagagtgcctacccactgtggccccggtgctctgcccccacgccccgaccatctggtcttggtagatgtccctagacgggctgagccatgtgcaataagaacatagatcctaaaggatcctctggaagctgtatttcttgaattagaattctcaaattgtacatctgttaatatatgtttattatgtgactggcaaaaa

SEQ ID NO: 122971 - DNA, 660 bp, Homo Sapiens
  misc_feature (76)..(189): n is a, c, g, or t
  misc_feature (194)..(239): n is a, c, g, or t
tttctttctttgagacggagtcttgctctgtggctcatcctggagcacagtggtgcgatatcagctcactaccacnnnnnnnnnnnnnnnnnnnnnnnnnnnnnnnnnnnnnnnnnnnnnnnnnnnnnnnnnnnnnnnnnnnnnnnnnnnnnnnnnnnnnnnnnnnnnnnnnnnnnnnnnnnnnnnnnncactnnnnnnnnnnnnnnnnnnnnnnnnnnnnnnnnnnnnnnnnnnnnnncgtgcccggtgcatccctaatcttgagcatgatctcagtcggcaaatgaggccatctgttttcagcctgtttgaaaataagatgtggggaggccatgatggaaatagcacgtggggttaaacataactggcagatgtgggagcgatggtggggcatgccattcaaacaggtcccaaaatgggtgcaacaaggtatagcacatctaccactcgctaacttgactgacttggagaaatgactacacttttgcctgtttcctcagttggaaaatagccatattaacacctctttcattggcttgctgtcagggtactgggatggggggaggtgcatgggttggggtggccaccaggtggtgctgtgccacagcgggcagcccctctggaaatgactggcatcataaaatctgtcttcatacccg

SEQ ID NO: 122972 - DNA, 695 bp, Homo Sapiens
  misc_feature (558)..(558): n is a, c, g, or t
ccccgttccaataaaactttattttgttggatattggaatttgaatttcatacggttttcacagtctcaaaatattcttttgattttttttcaaccacttaaaaatgtaaaaaccattcttggcttgtgggctatacagaactagatgatgggccaggtttggcccatgggtagtagtttaccaagccttggtttaaagccctcatataagctgttgtagacattaagatgagttaaggcatatagtttagcacagcgcttagcaaaatagggagcgctgtgttcatcattgtcattcaagatgatcgttctctccaggtctggctgatgtgaggggtggaggtggtgtctgctttggatttctgctgttcctgagggagtatctgcattttccacagcttttctgtctgatttgtattttcctctgattccttttgtcatcaggtattcactgggcacctgctgtgggcagggctctgcgctgaggttcttgtggctgctgtggccttagctttgccttttaggggccttcctcctcagagaggctgtcctctctcncatgtccctggagatgtccttcccatgcagcagggtctggcagcctctgggctctccaggtttgtggtgttctgggggtcctggtgaagacacactgcactcgaagaagtggagacaagtttattgaggagcttgac

SEQ ID NO: 122973 - DNA, 661 bp, Homo Sapiens
  misc_feature (640)..(640): n is a, c, g, or t
ttttttaatgtagaaaccacatttattaaccatggatttactgagggcagtttattaggtattatccatcgcttatgctgacatctgattttgcagagaaattatagccattattttattaagataattctacgagatcaatttagtttcttgaagtagcatatattcaattcttcaatagggtttggtttaatttagctatcaaagtcagatgtctctaaactttacacactaaactcatcgtgagcagaaaatttattctttgtacatattccttctgttttggttcttcaagctgaaacatctcaacttccagaaatatggttgccagatcaaaaataccagagtcctaagggttaagatttgaatcgagaaaaagatacatgtacacattgtattatatacaaacaagcaacaacaaaaagtttcatcatgtaaacaaaagaatataaattatagacataattggaagtttcaaacagtccttaaatcattgtgagcttctctaaaaggcacaggtcttggagtgtgggcacagagccattagtcagatgtctgggtggtctcccataatagcaatgtatactctaaagtgggctttttgtgaactctgtcagggtgaatgagttaggcctcttanaggaatgaaatgctttcacat

SEQ ID NO: 122974 - DNA, 2020 bp, Homo Sapiens
  misc_feature (60)..(80): n is a, c, g, or t
  misc_feature (101)..(203): n is a, c, g, or t
  misc_feature (246)..(352): n is a, c, g, or t
  misc_feature (644)..(652): n is a, c, g, or t
gtggaccggtccggattccgggatatcgtcgaccacgcgtccgtcgcgagcggccggccnnnnnnnnnnnnnnnnnnnnngagacagagtctctctgtcannnnnnnnnnnnnnnnnnnnnnnnnnnnnnnnnnnnnnnnnnnnnnnnnnnnnnnnnnnnnnnnnnnnnnnnnnnnnnnnnnnnnnnnnnnnnnnnnnnnnnngtgtgcaccaccacatccagctaatttttatatctttagtagnnnnnnnnnnnnnnnnnnnnnnnnnnnnnnnnnnnnnnnnnnnnnnnnnnnnnnnnnnnnnnnnnnnnnnnnnnnnnnnnnnnnnnnnnnnnnnnnnnnnnnnnnnncagccaagatttggggaattaagaaaggaaatacaaacacaactgagccaaggaaagaatctgactgataacatcactgcattcagcatccaaagaaatccattacttttacaactttgtatttctttttaaaatacaggcaggcaaagaagataacaaatatttttaaatggatgcttaacagcacagtgttaataaccatcttcagaaattgtacagtattaaacatgtcttcagccaagctccaacactcagaagacaaaagacttgaggtcaaaagctattaatcccnnnnnnnnnattattattaaatgtcctcattttctaaaaataagcaaccagagcttgtcaacattttcttaagactgattattacaaagccattccaaagttaaatgtacaatccacagtacatcagagagagacacaataataaatgtataatcaaaggtactattattgatcacaatttattttaaagtcaggaaaagcctgcaataggctggacaaatacttgattgtgcccatgtttccatgggatggacagcagcactgagtcacacaatgagagcaacacttccttttccaccttcctggaaaaatgtttgttagataaggcaaaggatgggtggctacagaatggtggtttgaaccatgcaagaacagcaaataataggtaataggtgtgcagtaaacatctgactgctgaatcttgggtgaaaaaggcagcaagaaaaatgaccacagaaggaaatggttgaaaggcatttcaactctgaactttttaaaataatgcaagaaataataagctttttaaaaatgtctttctgccacctttatatagggcagcacaatccaaagataattttctcttctctgtaattttttaggttggtgcacagagtggtctgcttctgtcctcttttgttccaaatgaggtgaaacataaacccacctatgtgtcttcctctaaagctctggattatagaaatgatcaacaaataacatttattttcacatctaagcataaatactaaaatgaagattactgttcactttcctcttccattatttcaactctgcgaggcccatagagtagaacgtaagcgatatgccagtctccaccaccagaaagccgtaagatatcttctggtgttacgatgctgactttgtcatcatcaacgttaatccattcatcttgtttccttttcacccatgatacataatgacctgaagaactagaccttccctggtgtgttagtactgcttgtaagtcatagtatccacaattattggagccaatatcatcagcaaaagaaaagggttcatacttaacttctttctggggactactctttttgtcacttgtatttggctgctgattcacttttttatcttctagatccttgaatttggatcgaaaagacaccattttctcttgaagttctggtgtacacagttcatacatatccaacataagaggaaatttaacatccttaagaactttggcattcacagattccttctctttataaaaaaatcgagccatctgaatggtcaagtaagcaggcagccggctgatcttggaagatttgatatacaaggcatttctttgcaacgttggagactgtttggtgatttctacctgaagtcgcaatttaagtcccc

SEQ ID NO: 122975 - DNA, 1341 bp, Homo Sapiens
  misc_feature (134)..(138): n is a, c, g, or t
  misc_feature (140)..(162): n is a, c, g, or t
ggggggattccagccctatccaaggcccgggttttcttagaaacaagtaaggcccaggtccctttccttccgggccccgggcgccaaaggaaggttttgaaaagcttttgagggccggggcggccgaccaggtnnnnntnnnnnnnnnnnnnnnnnnnnnnntaaatgtcaagaggtctttattgaaataatagcacagttacacttctaataccctttccacttgtatacaacagatgaaaaatgcttgctacatacagtgcacagacagttcaataatgagaactaatacaactgcatttgaaataaataaaatagcctatttaaataatttaaagtaaaattactgtacaatatgaaaataaagatacataaatgttagaatctacaaagctgtagaaataaaatcattattctgcattacacaaaacagtgcaagaaaaaaatccaaataagcttttggagtgcaaagtttaaatcttccattttaaattatcatgcagacatagcatttcaagccatgctatggtctatgtcaaggattttaatttttaaggagaaaaatgccagtaaatttactgtaccatcaagtgttgcatcacataactgctgctgctctgcttctacagttcagtttggaagggaggtatcctgttgcattcaaaaaactgaagttaacaagtttctgaagcaaacacatttaccttttagcctgaaacaaaattatatgacaaaataatcatatccctgggtttaagaaaaaagggcctataccatgtagtaaactaagaagcagtttttcattcatctttaaactccacaatgatccttaagtgaaagcaaccatgtaacttttgagtgacatatattatggaattctgacctctagaagacaagtgataatacaatatgggatcgtgagaagagcaaaagtaattctgaacacctgggaagtttaatctgggaggaacttggttgcattacatttaataatatagttgaagtataattccatttcaatgtgcatataaaactgttatttaggcaaagaccaaggaatgcattgaatactaaaccgtaaacacattgtccatcctgacttggagtgcacaccaacaactgaagagctcttctgcagactttggcaacgagactacatatagcaggtcacagcagcacgagctcacatggaagactgaaagcactgcggaataacaccacccaacacctcctataagtgggatacatggtaataaggggcctcttcgtgctaaaccactttcctggacactatgttcttcagatttgtaattttcacaactcagtagtcttaagtctccc

SEQ ID NO: 122976 - DNA, 495 bp, Homo Sapiens
tttgaataaactacacacacatttattaaatagtgaaatggttaacaaaggcacatcaataaccacttactatatatacagaaatatatataattaacatggatccaattatctcataactgccattttttccaacaaagagtcattcaattcttcatgtcatgaaggttaaaggcaaagtcttagtccccatcttatgctttcccaccctcttcttgaaaactacattgaacctctatgggttaatcatcgtcttctgtagccataaggtctctgcaagcatgctgactgcaggctcctcagattctttctccattccctcaagtccagtttttaatgaacaggctgtttgctttagcaggtgctgttgctggtattcatccagttacactatgattttttaaaaataaatctttccttgtacttgtacatgcctgcattgcattgcatcacttatgaagagatagctccctctctcatcaggaaaactggatt

SEQ ID NO: 122977 - DNA, 2893 bp, Homo Sapiens
  misc_feature (89)..(89): n is a, c, g, or t
  misc_feature (93)..(93): n is a, c, g, or t
  misc_feature (128)..(128): n is a, c, g, or t
  misc_feature (130)..(130): n is a, c, g, or t
  misc_feature (162)..(162): n is a, c, g, or t
  misc_feature (180)..(180): n is a, c, g, or t
  misc_feature (186)..(186): n is a, c, g, or t
  misc_feature (227)..(227): n is a, c, g, or t
taagacaggatgatgacttcgctcccggatgaggctctaccgtgtcacgtctagtaactagacaagctttgttagagtgacagccatgnaatntttatccttgatgattgattgtgagatcatgagcntntgagttcccagagccatgaaatgaatcacgcncattctcaagaccatgcntgatcnccattcagatgtagcaatacttacattcctgacaatcatcntgcacctccacaactatgatttctgcctgtgtctcaagatgcgtgcaaaaggctctgaaggaaagctgataagcaagttttggagcctctgatgaatcttgaggttacagtagctagagattatctcagccctgtcctggcagatctggcacaaagaagaggaaacattcaggaaattcagactcgccaggacaacaaagttgttattggatttgttcccttagcagaaattatgggttattcaactgtgcttcgaacgctaacatcaggctcagctacttttgccttagaactatctacttatcaagccatgaatcctcaagatcaaaatacactgctcaaccggagaagtggtttgacctaaatgttttagtttttggagagaaattcaggagcacctagctacttcattttcagtaagaacaatttttattgctttatttattggacgaataaagtactgtttcagtacattcagagaactagataaaagatataacttaagctttgatagtggcactggagccacccgttttaatttatataatgagaaatgtgctttgatgtttaaagccactgtacctgaatcatgctgttcatctatgaagttattactataagtagccttcagaagagtggtatcacaaagttgtgtttcttttgtgtccttaagcttgtctcacaagaaagatgccaggcctctaaatgtaataagatagagggtcaaaggttcaatcaataaaaatattttattcaaaaaacagtctaatatcttattttacatgatttcaaaataaagttgattgtagtacagattgctgtggcctttttcccctccattttttacatgttctcatggttacaatatccagcataaagaggttgtgcagctattccacgttcgaccatcctgcagcggtgccttgtcagtctgtcataggcgtcatccatatctctgacatctttggaactccagagtctctcaccaacagcacttgcccgaggccataatcttggagtgaggttagttgcatccacatattctccccatagacaagcttctccaccaatgaaaagttgtttctgtttctgagtaccgccaaaatcaagaggttccactttatagtatttcctccaatcttgtccatagctaatcaaatctaagtaccaaggagcagaaaggattacagggaagccagatgctgtgactctactgagttcctcaggatatgcgctgtctttccatacttcaactattgtgcccggcgcaagctttgctttatcatcaaaaacctcctgccagacaatggatcccttgtttatggttgcaataatatccaaaaccttttgaatgtagaaagattctagtttcttaaaatctgtgccaaagcctttttgcctcatgaaatcttgaatttttggatttgattcccaacatttaaattccacttcatctcctcccaaatgaatgaattgatctggaaacacctcactaatttctttgaaaaatgtagtaaggaagctgtatgttgtattcagagtagggtttataggtccaaaagagtccaacttgttttgtctactgtaacatggagtcaggaggtctttctgaccttttccccaagatagtgtatgcccaggggtatcaaattctggcaggactcgaattcctcgtaatctggcatattcaatcaccatacggacatcatttggtgtataaacatgagacaaagaatagcttcctttattgcttaactcaggaaaagtgatgctctgatatgggaaagactggtcatcaactatgtgccagtgaagaacattaaacttattaaaagccatggcatccagagttttaagaataatcttaactggcagataatgtctggatgtatcaatcaaaattcctctgtgagaaaaccttggagaatcaataatggtggattcattgatggtgaaagttccataagaatcttgataaactaactggctaaaggtctctaaacctcgtaatgctccccaaactctgttggccttaaggacagccactggttctttcacaagtaaagtataagactcatctgaagatatgttggggaaagcatcacactctgactgaagggtgattgagacaagaagttgctgaacctgggttttagcctggaattcagcaggttcatgatgccacttgtagaaaccaaaaatatagccatgatatcgtcgaaacgcttcctccagcagggtgcaggaggggcccgccgtggaattggggctgtggctgatgtagaagttctccggggcgagatgcagcaggttcggggtcatcttcaccgagagcggcaggggccacagcgccggccccggcttggccgagacgctcggggcccgagccgcctccgccacctgcaccaccagcgccacctgagtcagcagcgccaacatcgccgccagcagtgtcgccaacagcagcgccagcagcatgggcggccggggcagccccagcccgcacagctccatggccgctcggctgctttccgcccggtctgccgagccggagcctcgggacccgacttcccgccccggacgcgtgggtcgacgatatcccgggaattccggaccggtaccagccgtttttgtcagatggtatgtgatgtgttatgttgtgggtg

SEQ ID NO: 122978 - DNA, 502 bp, Homo Sapiens
caatcaataaaaatattttattcaaaaaacagtctaatatcttattttacatgatttcaaaataaagttgattgtagtacagattgctgtggcctttttcccctccattttttacatgttctcatggttacaatatccagcataaagaggttgtgcagctattccacgttcgaccatcctgcagcggtgccttgtcagtctgtcataggcgtcatccatatctctgacatctttggaactccagagtctctcaccaacagcacttgcccgaggccataatcttggagtgaggttagttgcatccacatattctccccatagacaagcttctccaccaatgaaaagttgtttctgtttctgagtacctaaattaaaatcattgaattaagttcagaagttcaaagcttatacacagaggcaatatttcatcaagatttgtttcctccatctttatcctagggcaacatttcttgcccgtggttagcaggaccttgggaaatgc

SEQ ID NO: 122979 - DNA, 2279 bp, Homo Sapiens
  misc_feature (525)..(525): n is a, c, g, or t
  misc_feature (643)..(673): n is a, c, g, or t
  misc_feature (1142)..(1150): n is a, c, g, or t
  misc_feature (2042)..(2042): n is a, c, g, or t
taaaagcatttatccttcataccaattgtaacatctgacaccatgtagaagctaaaagtttagagggagtgagcgttttctcaagaccttcctcaagcattttatctttagaagagaaactgatgggcacctgatactctgtctaaatacgtttgttatatgtgttttgccctgtgccattcatttggaactttattgcattctttattttaaaaagcttgtttttacgtaatcatagagcttgctatttgtacatctgttgagcaacactacataactgatttttagttgacttagctatagcagtacaatgattagtaatgtaaaaattaacacagaaattaacctaaggaatgaagggtgggtttgtcaaaatatcaagtaaatttttgtttctaaagtacatttaatgtagatgacctaaagaatgcgttatccatcctatataaaagaaagataaaacacaggtcaccaattttctcatttcaccccatttaccttgtatagaggattgttcattccttntgggactaagttatagttatggtgagtgtgtatttactgtagttttgcctgatctcactcattgcacttcctggagttaaattttccaacagccatgttgaggaatagcactctgcannnnnnnnnnnnnnnnnnnnnnnnnnnnnnnaattgaagccctaaaccaggaattatttgtgttctaacaggaggatgaacttgctgaaaataaaactttgctatgtatttactcttttttaaaagacaaaagcaaaaccagactttctacgtactactccaaagactgtgattgtgactataatacatttttggtaatttttttatacctaatttgtataggaagtgctatttctcataggctgtttcttgaaattttaagtttattgctttaaaatggcagtgtttctcccactttgatatgctaacatttagtaagcactggctttatgaaagcggctttttataagtatactgcattttttgagcctatcattaattagcttagtatgaaagataagaaaatctccatgttgtatccatttggctcaggaagattctttgccttacctttcttagaactctttattgcttatcaaaagtttgagtacccgcttggnnnnnnnnnggtaattaaatattgtatgatttatctggttcaaggaagatgcactattcagttatctattgagaaattattttgcagtggttttagtgggtgaaaatgtcccatctgcaccagtacacaggcaggcattatcattcttcacctactttttaaatagtggcaacttgggattcattctggtgattctgaaccttgcctcatagcttaaagtataaaaaagattcaagagcagtgaggtttgttctttccagtgaatggtggactgagtggtgcgaggtggagggctaacaagaggaaagaactacattcttcagaatacagtgatgaaaattcattttgaaactcaaatattttcattttggatattctcctgtttttattaaaccagtgattacacctggccatccctctaaatgttctaggaaggcatgtctgttgtgattttgatgaagacagaattatttttctctgtagaaacacagataccactttatcagggaagttagtcaaatgaaatggaaattggtaaatggacaaaagctagctagtaaaaaggacgacccagcaacatgctttaaccccattgtatgtttgtggaaagagcatagtttaacatcttgagaaatttgggacataaagttttcatggtagacagttcatgcagtatatgaattgacataatggaaataatctgattttatttttacaactaacatccattccccttcatttaaacaccttttgtgttttacttcagtgaggagattggagtctgaatggatctgttttccaagagattctgagaaatttttgtattcagcagttggaaagctctctattctagttgataaaacttcccttttttgatgtagatgcagatattctatacagntctgttggcttttactaggactgtaaacttttgtgataaattcaaataagattttatttcttgggaatttttggctttcacaattatccttaaaatccttgagcaatctgtatacaattaagagatttctgacatttattcttacactaaatgggatccactcctaggatttaagcatgttaaccctctggtggggttttgaaacctctcccaaagttgcatgtaaaatagcctttt

SEQ ID NO: 122980 - DNA, 1305 bp, Homo Sapiens
cacttttaccccaagttgttgtttattttcatgaggggggaaaaaagaatcctttatgatagtgaaaatatactttattttttaatacaatagctgccagcaatatactggtgctgatgttccaaagataaaagaaaatacatgcattctataataagctttcatttgcctgttcaagaaattataaagaaaatactccaattctgttcaacattacggcttgaggagttgaaatttttccatgataaaaatatactttgtgtggcccaaaccttgactatttataaaggatggagtttttaaaagcccacatgtatcaataatggatgctcccctctctttgaattaaatgcttaaattcaaattaatgcaagaaattggtgaatcattaaatgatgaaatttgtatcaaaatgttcatgaaaaaatacatttctatttcctctacatttttactttgtagttattttctaaatgggtttaagggcacagaaataaatgctatctacatgcaactctggagagattcaaaacacaacagaagttaacatgcctaaatcctagagttgatccatttagtgtaagaataaatgtcagaaatctcttaattgtatacagattgctcaaggatttaaagataaattgtgaaagccaaaattaccaagaaataaaatcttatttgaattttatcacaaaagtttacagtcctagtaaaagacaacagaactgtatagaatatctgcatctacatcaaaaaagggaagttttatcaactagaatagagagctttccaactgctgaatacaaaaatttctcagaatctcttggaaaacagatccattcagactccaatctcctcactgaagtaaaacacaaaaggtgtttaaatgaaggggaatggatgttagttgtaaaaataaaatcagattatttccattatgtcaattcatatactgcatgaactgtctaccatgaaaactttatgtcccaaatttctcaagatgttaaactatgctctttccacaaacatacaatggggttaaagcatgttgctgggtcgtcctttttactagctagcttttgtccatttaccaatttccatttcatttgactaacttccctgataaagtggtatctgtgtttctacagagaaaaataattctgtcttcatcaaaatcacaacagacatgccttcctagaacatttagagggatggccaggtgcggaacgcgtgggtcgacgatatcccgggaattccggaccggtacagcctgctttttctacacggtctatatgtcacatagct

SEQ ID NO: 122981 - DNA, 684 bp, Homo Sapiens
  misc_feature (521)..(521): n is a, c, g, or t
tcgaagcatcctaacaggatatttgtgtctaacaggaggatgaacttgctgaaaataaactttgctatgtatttactcttttttaaaagacaaaagcaaaccgaatttctaagtactactcccaagactgtgattgtgactattatacatttttggtaatttttttatacctaatttgtataggaagtgctatttctcataggctgtttcttgaaattttaagtttattgctttaaaatggcagtgtttctcccactttgatatgctaacatttagtaagcactggctttatgaaagcggctttttataagtatactgcattttttgagcctatcattaattagcttagtatgaaagataagaaaatctccatgttgtatccctttggctcaggaagattctttgccttacctttcttagaactctttattgcttatcaaaagtttgagtacccgcttggttttttttcggtaattaaatattgtatgatttatctggttcaaggaagatgcactattcanttatctattgagaaattattttgcagtggttttagtgggtgaaaatgtcccatctgcaccagtacacaggcaggcattatcattcttcacctactttttaaatagtggcaacttgggattcattctgggtgattctgaacctttgcctcatagcttaaagtat

SEQ ID NO: 122982 - DNA, 607 bp, Homo Sapiens
  misc_feature (117)..(117): n is a, c, g, or t
gctattttcttccttgaggtgtgaaccacctgctagggtgtgaatgggcgagagttcacaacaggtgtctggagatcttaattacaaggcttgcatctcctgtccaccccacacctngttgtgcctgctttgtgggcagcgtctgtccatccctggcctcctggccttctcatttcctcttgcagtggccgtgacagtggaaggagggccgaggacagcttgctcactcatgctccccacacacacctcccttgtctcccccacacaggcatggggtcactgcccgattgactcctggttgtcagcagtacttttccaaaagcttcgagccctttgagccctttcatctgctagggcagagacacagagcaggatgggggaagacttcccattctccaggctttccctgaagaaactctgcaaaaatcaggctcaggcagctcctgagagccagccaggcaggatgggttgagtgaggtgtgtggggtgggagaaaacccttagccaagttctcaaagggatgggtgaggaggatgaggctgaccccaggtgtctctcctctgcacaggtcgtctcctcccaaatccacttcccccctcgtgccgaa

SEQ ID NO: 122983 - DNA, 702 bp, Homo Sapiens
agttttaacttacaaaaaacgtatttattaatccagttttcctcttcttgccataatacataagcatgacacagatggcctgatacatcagcatggaactgtcagaaagccccaccagtcactgcttctagagttacatgactggcttttgtttggcaacaggacaataattacagcgtggtttcaagtaccatacacaaagcagaccaaccccaggatctccagcatctgcgaaggctcactggggtaggcctgggaggaagaatccaaagcactgtacagatgatcaaaacacttccggtagaacactgctgcagctgcacctctccttacagagccagagcctgctccatcagaggcctgcttcccttggctgatggtcagaaggctgcacaactggatcgccctaggacacagtcccacatgacatcccaaggctgggccaccatcatgatctttccagctggtccgtctagccaagtggtgctactgctgcttgtgtggaaggggcttccaggtgggtgggagcttcctgtggattagggtgagtccgcagagaataaggaacactcctccccaccacaagacctcctggcactctccatacagcacatagcccaggaaggcctgcgagacacagatagctgtgagggactcaacttcagcaggtgggcacaacctcactctcctgggactgacttc

SEQ ID NO: 122984 - DNA, 1471 bp, Homo Sapiens
  misc_feature (78)..(112): n is a, c, g, or t
aagtgatcgatcactataggggctagctctgtagagcgaacgacgagcgcagcgaggtagtgagcgaggaagcggcgnnnnnnnnnnnnnnnnnnnnnnnnnnnnnnnnnnncagtccgacggtaccggacatatgcccgggaattcggccattacagcacagccaggagcgtccgggatgagctcagccgcggccgaccactgggcgtggttgctggtgctcagcttcgtgtttggatgcaatgttcttaggatcctcctcccgtccttctcatccttcatgtccagggtgctgcagaaggacgcggagcaggagtcacagatgagagcggagatccaggacatgaagcaggagctctccacagtcaacatgatggacgagtttgccagatatgccaggctggaaagaaagatcaacaagatgacggataagctcaaaacccatgtgaaagctcggacagctcaattagccaagataaaatgggtgataagtgtcgctttctacgtattgcaggctgccctgatgatctcactcatttggaagtattattctgtccctgtggctgtcgtgccgagtaaatggataacccctctagaccgcctggtagcctttcctactagagtagcaggtggtgttggaattacctgttggattttagtctgtaacaaagttgtcgctattgtgcttcatccgttcagctgaacaggaggatggatacagccgcgaggctaaaaaacggatttcctcttcctagcttaaaatctgatttacactgtttggttttttaagaaacaaaagtgcatagtttagaattttttttgggtgaatatgtttgttcttggactttatgagatagtcttataagaatcacgattttctacacctgtcattgagccaagaaagtccagtttatgacacgtatgtactagtgaacaccgtcctcgatctgtacgaaatgtgaaatgtttagggacatctccatgctgtcacttgtgatttgccctcttatgtattttggtcatattgccaactggaaagtcaaaattttctaacaactttaagtaagttctttgaagacttagtgctgtttttaatccagtttagaaagtaacttaattttaataccgctactaaaaattcgaaaatttcttctttaatcacattcaatatggttaaaagaacaacactaattgacattgcgtgggctttttctccctttgtttaaaatgtcatttgttgagcaagagttgtatagtattatctacttacttgaggctgttaatttttcattacagtgttttgtaaatgtatccacgagaccatgatgcattgttttgtgctcaacttgtgttttgtatttaaagcattttgaatgaagtgtattttataagcatttaatatttatgctctttagaatggaacacagaaaacaaaccttataagtcctgattaaattaatctgaaccaaaa

SEQ ID NO: 122985 - DNA, 985 bp, Homo Sapiens
caagtttttacagactaaaatccaccaggtaattccaacaccactgcctactctagtaggaaaggctaccaggcggtctaaaggggttatccatttactcggcacgacagccacagggacagaataatacttccaaatgagtgagatcatcagggcagcctgcaatacgtagaaagcgacacttatcacccattttatcttggctaattgagctgtccgagctttcacaacaggactaaattttcctccttatttgcccagtgtgcacaagtacacgaacccctggtgggagtccagcttgtcctgggcctggacaggcccctctgtctgttttcctagccacagagacagctctctgactgtgcacacactgtgaccggggtccctcagcacacgggctgccctgagaaagcgctcttcatcacaggacactggacccgggaggtgacactcagaagaggacactgctgggcatttttctagagagtggaacaaaagcctctgggaatccactgtgagactttttttctgggcttctctcagaaaagtgatgaatttaaaaatgaaaacctacaatttttaagagttagcttaaaattttaaagagttggctctgaggaaaatctgagaggatcttagatatttctgtgcttagaaagcaaaggttcaccagcaaataagaggaaagtaatacttattactgagtttcctccagataacttaagtttccatcaatattcagaacatccaagaagcaaagtatgtattctactaatcttcacatacagacttctctattcatccgctctcatgaagcctccaggctgcaagggacacagtaccatgggttttgagcttatccgtcatcttgttgatctttctttccagcctggcatatctggccaactcgtccatcatgttgactgtggagagctcctgcttcatgtcctggatctccgctctcatctgtgactcctgctccgcg

SEQ ID NO: 122986 - DNA, 829 bp, Homo Sapiens
  misc_feature (37)..(37): n is a, c, g, or t
tttcaaggcatttctttggcggtcctggcggcttcanttttgaaggtaggtgggcctgctgttcttgggagttcccagatcacaagccaacacactcattgcctcttaggagctctttgggagtcagaggggcccatgagcgggggcagctgaattctcatctagcagggcatctatccactcggctgttgctaaggatgaagacaggaaggttcccaggcaccccttgccttgggacctttagccaccgcatctctgcagggtcagggaggcatctcttaacttgcctagtaccaaggcttctcttgcaagagcaaaggtactatatagataatgctgaggtcagaagctacccatgtataatacagtcacgtgctccctcttgcacccaaaaacagcctgagctgtttgatacccatagagtttctctctgtgtttgagtttgaagcagcccttgaagacttttccataatcagagcaaagtgatcttccttagaaaatccatagccaactaccaacccctcttttctctttcagcatctggtccagggaatttcttttttcaatttggctaatgaagggcaaccacccagaacccagaaaatgcagattcactcagtttaatcttgaatgtggaaacagttcacctcctcccttcatcacgtctccgtgtgcttagagcagtttcgttttctcagttggatgccctgtgtctctgtgagtggggtggagcaaagggaaccaatgccgaagaccgagggcaggggagggaggcgggggtggacagggaggcagcttgtgaatttttgttttactgtttaactttatt

SEQ ID NO: 122987 - DNA, 647 bp, Homo Sapiens
acagctcctaaaaaatgcgcactggagctgaagaagagtaagaggaaagattactacaagattctaggagtggacaagaatgcctctgaggacgagatcaagaaagcttatcggaaacgggccttgatgcaccatccagatcggcatagtggagccagtgctgaggttcagaaggaggaggagaagaagttcaaggaagttggagaggcctttactatcctctctgatcccaagaaaaagactcgctatgacagtggacaggacctagatgaggagggcatgaatatgggtgattttgatccaaacaatatcttcaaggcattctttggcggtcctggcggcttcagctttgaagcatctggtccagggaatttcttttttcaatttggctaatgaagggcaaccacccagaacccagaaaatgcagattcactcagtttaatcttgaatgtggaaacagttcacctcctcccttcatcacgtctccgtgtgcttagagcagtttcgttttctcagttggatgccctgtgtctctgtgagtggggtggagcaaagggaaccaatgccgaagaccgagggcaggggagggaggcgggggtggacagggaggcagcttgtgaatttttgttttactgtttaactttatt

SEQ ID NO: 122988 - DNA, 1035 bp, Homo Sapiens
  misc_feature (66)..(106): n is a, c, g, or t
  misc_feature (974)..(982): n is a, c, g, or t
gtggtggagaaagggaaggggttggctttttaatttatttttcttcatcttttataacaagaaagnnnnnnnnnnnnnnnnnnnnnnnnnnnnnnnnnnnnnnnnngtagctttctatatatgtagtaggttggctttaatttaatatacttgattcagaaacaaaacaatagagtacaaaagtgccaagcagaacataaaacatccttacttttatttcacacagttttatatatagatagaagactgtacaatttgagccgggtgttaggccagctattttccttttcctgtgctttctcctttgagagattgacaaagcatttgttaacgtcctattatttaccttaattacatttttgtaacaaaggagtctgtaactttatttatacttatgaatatatccagggactacttctcattgctgagcagcttttaatacacctctgcttgaggagaaagtctagttcattgctactgccaagagctagttcttgtgttcatatagtaactgcacagggcttatagctgcttcattctgctactttgtaactaggagccattgcatttattaaatgtccctcagtaacgttaagtgctagttgtgattttatacataaaggccagaagctgtctgaggcaatcatgattgattgtatgtatcacttactgaagaatacctgaagtgatcatgtaactacttataagggatatccatttgtttgattacatgggtaaataatttgtcattaaacttgtgtttgaatcatgaattcccttgtttcaaaagacttgcagctaatctaaaaaactggtgatatttaatatgcatgtatgtatctaaacacccacatatatttgtggtttaagtgtgagaaatcttgctaatctatatgccacagaagagcaaaattgtatccaaatttatgccacttaaatttctttaccacgagggatagagcatgcatactggnnnnnnnnncttgatttgcccatataattggtaatggataacttaataaatttgtgtgatat

SEQ ID NO: 122989 - DNA, 1392 bp, Homo Sapiens
  misc_feature (322)..(331): n is a, c, g, or t
  misc_feature (1148)..(1161): n is a, c, g, or t
gcggccgcggctgtaggacttcctttttctaggttattgttatatttctagtaacactgaaggtaaaataagcttataaaagaaggaaaacatcagaatggtgtatctagaatacacaatcttgctccttactcctccatcatctctaatgaaatttttcttgatgtctgtggctcagtcagtatatattttgaaagattcattgtggtgaatattttgagtcctgacagtttaaacgtgatagagggaacaaaggatttatatattttttgtacaaagttttttcttaaactgtataattttgtaaataatttgtttgggnnnnnnnnnngtgtactaaaactaccagcgtatagatttcaataagaattgttgtatttttgtatttggaaactgaaaattacagtaaataaatggaactctaagaaaaatttcagtagacagttcaacagaatgagattccttttcatatgatttttttgacctcaaaatggacatcttatttcactctcagtaaaaagttgaaaatttgactttttagtattgggggcagaagatagaagtgtgttaaagtgaaaaacagttttttcagtaaggtttgaggccctttctataagttttcagtacaccttaaacaggactaaaaatactttaaaagtgtgctttcaaagaattttaaaacatgtttgactcaaagatgaatttgaagtgagttaattataatactggaaaacttcaggttagcataaaatagtttatatatatcccctgccccctttgggatttacttccaccatcaaatcttcaactgttagaatttcacttaaaagtgaataactgccatacatgttttcttggcatcttcatttacagaaataacatacagcatctaaagcaagttctgtccctcttaatgtgtatgacatctttttaagtagctgatcagcaataatagccaccagttgactaggtcagcctgatatactagtggatcactgtccaagataaaaaggtaaccccaagtattgcaaaatttccctcaatttctttatgtaacattgaagaaatgttgttaccagctaagatgataaattggaaaacagtcttgttaaggtgaaaggggtccttggtgatggatcattatttcnnnnnnnnnnnnnntcatgtgaaaaggaatagtggttcctcttgatgtatagtatgcctgtattatagtttttacaaaattgtgaacttgtgtaatagtataataggagatattgttgaatttctaactgtttatacatttaaattcatatatgtaatgtttgttttatcaattacaatctgaatttctaagaagcatgttgacttttgcaataaagatgcaatatggaatggttcacaattgga

SEQ ID NO: 122990 - DNA, 1403 bp, Homo Sapiens
  misc_feature (1263)..(1297): n is a, c, g, or t
  misc_feature (1301)..(1343): n is a, c, g, or t
atgtaattttgttttattcaaacagttgatataataaagatattcacatgcattttaaaattatacaccgatttattataagtgatataaaatacagtgaaaagaatttattgttaaaaactgtcagtgaaacatctgatacacatctggctatgaatggtagattcaaacgtgataaaactgccacttgaaatgcatcacagtaccagcaggcacgtggcaatcttacctccttacttctttgattacaatgatacgatattcactatatccctctgtggttgtccttttgttaaaatttgttctggttttcatagttccttttgtacttcaacaatcacattttggcaacttactctggtaattaaaagttggattcaaggaaaactatgaactcccacatttgttcattctcctttccatccctgaattctgtcttttgtaatgtagaccttgtgtgacccacacagcaaaatttaaaaaatgtacccacttcagatttccccacctatccaacctaatctgatatctcatcctgacagactgcagctgccaagaagaagattcctgtgctgctctcaggaaaatatgtcccacttgttttctaattcaataaagatactggtttaaatgtgaagccacacaagagaaagatgaagccaaagctggtccccctgaggaattgttttgaaataaggcattaggaccctccattcaattcatatttaatagaccaccatctcttctgccttcatcaggaattttacttatacataaactaaatagtatctgcctatgattaatagtatttaattacacgcacttttgtttgagtttacttccttgctttctgaaaaaaacataggtatttagacactagttcatgatgataaaattaaaatttagttttacaaaccaaaattgaaactgtcatttgtaggaaaaaaattcaaatttaaaattgttatttttcactattcttagatagcaagagaagtaagaatttctgttactgtgatttatatcacaacagaatttttttccttgacaaaggaccttttaaaaatcccaggaaaggaccacaaaataatcaaagactgcacattgtaaataaaacccttcagctgttattgaaacataagtataattacacacaaggaaaaggtattataagcagagaaaagatgccttaagaattctttgtctttttcccccggccgtaatggccgaattcccgggcatatgtccggtaccgtcgactgnnnnnnnnnnnnnnnnnnnnnnnnnnnnnnnnnnncggnnnnnnnnnnnnnnnnnnnnnnnnnnnnnnnnnnnnnnnnnnntataacgaccctagcgccctatagtgagtcgtctcatgttggtggtggggtgttggggga

SEQ ID NO: 122991 - DNA, 1052 bp, Homo Sapiens
  misc_feature (942)..(976): n is a, c, g, or t
gttttacaaacaaaaattgaaactgtcatttgtaggaaaaaaattcaaatttaaaattgttatttttcactattcttagatagcaagagaagtaagaatttctttactgtgatttatatcacaacagaatttttttccttgacaaaggaccttttaaaaatcccaggaaaggaccacaaaataatcaaagactgcacattgtaaataaaacccttcagctgttattgaaacataagtataattacacacaaggaaaaggtattataagcacgagaaagatgccttaagaattctttgtcttttttccaactgatggacatggagtgagctctaatatcattatgttttagaaatggcttcatccagatccaactgtacaccattaatattcacttccatgcagccattataaaaggcattcactggtgtggccactgaatggaacatctggaaggccacccaggtatgtggccacttttgctttcattgctttgtccaaggacggcaagttgtctttgaaggtcttcatgggagatggtttctattttaagtggtgtcgacaactccagattgtttctgttgactctaaattccagatgagattgttgatcggaacatagacttagggcctgtatccgatatattacagtattttcaacagataacagaatatcctgtgatttttcagaggtggagtccaccaaggacacagcaaagggcactgtgttgttaccagaaaccaaggcaagcataacaccagtgcccgtggatggacgaatattcaaggtcacatttacatgccaaccctcagcactggatacattattataatctatgtgaaattgagcaattccagaaccaggatagtaggagcccttctccacagtaacccccggccgtaatggccgaattcccgggcatatgtccggtaccgtcgactgnnnnnnnnnnnnnnnnnnnnnnnnnnnnnnnnnnnccgccgcttcctcgctcactactcgctgcgctcgtcgttcgctgcggcgagctagcgccctatatgatctatcatt

SEQ ID NO: 122992 - DNA, 1041 bp, Homo Sapiens
  misc_feature (680)..(680): n is a, c, g, or t
  misc_feature (807)..(807): n is a, c, g, or t
  misc_feature (831)..(831): n is a, c, g, or t
  misc_feature (867)..(867): n is a, c, g, or t
  misc_feature (872)..(872): n is a, c, g, or t
  misc_feature (881)..(881): n is a, c, g, or t
  misc_feature (940)..(940): n is a, c, g, or t
  misc_feature (1008)..(1008): n is a, c, g, or t
  misc_feature (1015)..(1015): n is a, c, g, or t
gggatttataagtattttatttttctgagaaatgaccaaaaaattggaaccagttttaacaatctctgaaaactttaaattctagacatgtttattttgaaacacacttccaaacaagataaacaacaatatgtaagtctactacactgcagaagtagcttaaacttgccaagacatcctcctttgcacttgtttcctcaagagttgctaggtcattttttttgcctgtggccagcagcctctttaaaaacaacaaaggacctaatgtcaaagtcactctcaggtgtttgccctgccagctcaggccttctccgcacaccgcaccccgaaggagcacggaggcccgcagggctggctggccctggttccagcctcaccgccggttggaccgcttttcgtacttgtcctggctgctccgctttcgtggcggggagtaactggcggaacctcgagcgcggaagctgtgcttgtaaggatggcttctgtgtttctttgggttttcttctttctgggcctggctcttggctggttccttatcgccctctttttgttcatggtcttgctctttatgagagggcaatgtgtttttaattgtgttaattagaaatcttttattggtgctagcaagaggacacttcatcctggggtggggaggagaaaagaaaaccatcacaaatcanatggttaactccaaagctggacccactatcgtgattagtaccaaagaatcctgctccacagaatcgagtttctgaatttgttagctttccttggcatgccactagtggtaactctgagtacaaggangggaaaaaaagacgattgggatcntgagacagactggctggacacttttaactttctccntctgngactaattncctactgagtctatgtacaggtatgacaactgtgactacagatcattatattttcttcnctagtagtgctatttacgtactattggataattatgcactgcgttatacaacatgaaatgtctttcanggactanagaatcctcggcgatctggccgagca

SEQ ID NO: 122993 - DNA, 638 bp, Homo Sapiens
gttttttgcctgtggccagcagcctctttaaaaacaacaaaggacctaatgtcaaagtcactctcaggtgtttgccctgccagctcaggccttctccgcacaccgcaccccgaaggagcacggaggcccgcagggctggctggccctggttccagcctcaccgccggttggaccgcttttcgtacttgtcctggctgctccgctttcgtggcggggagtaactggcggaacctcgagcgcggaagctgtgcttgtaaggatggcttctgtgtttcttcgggttttcttctttctgggcctggctcttcgctggttccttatcgccctctttttgttcatggtcttgctctttatgagagggcaatgtgtttttaattgtgttaattagaaatcttttattggtgctagcaagaggacacttcatccaacccatgggtcccattgtttcagctctagttttcccacgttttgcctccttaagcagttcttctattgctttcctctccagctcctgatcctcttccatcgctggggcggtttctggatcctcaggtggtgctggcggatcgggggctctgtcccatagcgcgaggcgcggaggcgaagcaggaagcaaggaccgaccgacggaaggcccc

SEQ ID NO: 122994 - DNA, 1450 bp, Homo Sapiens
  misc_feature (14)..(14): n is a, c, g, or t
gacatccgatggcngggctcttccgcgcgccgcctcttatgtgtcctgcgatgtcgccgcacgactcgtgggtatctccgggcgcggggccgctacagcgggtgcatttaagggccgattgtgcttcccggggtctttgaggacgccgcggtggagaacgcctaggggtttggcgatcgtgcagctcagggacaggcgggaaagggggggcccaagaccgcggcggggcgttgaagctgcaaacggtgcgagcacgccagttcacgggtggcatcaccttcctggcgtgcgggtgatatgatatgagcgtcagcaagggtgggcgtaccgtgagcgcgagcgccgtcgctatgtatgacttggggtcggagcgaggcatccgttaccggctcgtggtttgccagcgccagcgaggcgattttctctctatgcgggggtagcacgcccctggcgccattccggttgctctgcgccgagaagcgcccgcctggtgggggctcccgtcagcacacgcgctgcccggtggaccttttccctggcgcgcgggcgcgccgcgcggagacgtgctttgaaaggttcttcatggggctgcggcgggggccagccaatgcgttgggtctttgtcgcgggttccaagtatgtcccgttgttggtttgcggcgtggtgattcacactggctcgctgctggttgtcccttcttccgagggttcttcttatgtctcctaaataaaagagggaatttattagaagaatacagaggttcttgcagagattccaacagctgcaaggggtcaacagctagaatcacgcctttctgaaggacagagtatgctgtaaccacaaacttctaattctgggttctgcaccatcaggaagagaatatcctacaggacagttctccttgtatactgcataaaggactagaatgtggattcatttctgcttgctttttgatccttatagtcctttatgctggcctcaaacttgtcaagcacatgttggcagacattcatgagctcattcaggcctctctgaaatggctcaacagctggaagggtacctcgagtctgaatgcgtaaattaattttgctctctgaaggatgggtcgtagtgtaaccacaaaattccacttccgggttcttcatgatcatgtaacgtagagaatttcctagggtatggtcttcctcgtgcaatacaaatgtcacacagtgtctatctgttccagctgcctggaccatttccagggctgtcttcctctcgccttcagccattgaggtcttcaatccagatatttttctctccagctcctgatcctcttccatcgctggggcggtttctggatcctcaggtggtgctggcggatcgggggctctgtcccatagcgcgaggcgcggaggcgaagcaggaagcaaggaccgaccgacggaaggcgcggaggacggaaggccc

SEQ ID NO: 122995 - DNA, 444 bp, Homo Sapiens
  misc_feature (117)..(117): n is a, c, g, or t
gtgtcccccacagtgcaaggaacagtgataagccattctggtttcggagcacgtaaatgcgtccatgtacagatagtggagattttttgatatgtttacactttgtatattggttgnaaactgttatccacttatatatatgtatacacacgtatatataaaatcctatttatttttgcaaaccctggttgctgtatttgttcagtgactattctcggggccctgtgtagggggttattgcctctgaaatgcctcttctttatgtacaaagattatttgcacgaactggactgtgtgcaacgctttttgggagaatgatgtccccgttgtatgtatgagtggcttctgggagatgggtgtcactttttaaaccactgtatagaaggtttttgtagcctgaatgtcttactgtgatcaattaaatttcttaaatgaaccaaaaaa

SEQ ID NO: 122996 - DNA, 835 bp, Homo Sapiens
  misc_feature (108)..(217): n is a, c, g, or t
  misc_feature (528)..(557): n is a, c, g, or t
ggattttaataaaatgcagaagtaggttgacaagaatttcacctgcaaccttgtcaaccacctagaataaaagcctctgcagccctcccctaaagactcatcaatgtnnnnnnnnnnnnnnnnnnnnnnnnnnnnnnnnnnnnnnnnnnnnnnnnnnnnnnnnnnnnnnnnnnnnnnnnnnnnnnnnnnnnnnnnnnnnnnnnnnnnnnnnnnnnnntacaactataaaaaaataaataaatcctccagtctggatcgtttgacgggacttcaggttctttctgaaatcgccgtgttactgttgcactgatgtccggagagacagtgacagcctccgtcagactcccgcgtgaagatgtcacaagggattggcaattgtccccagggacaaaacactgtgtcccccccagtgcagggaaccgtgataagcctttctggtttcggagcacgtaaatgcgtccctgtacagatagtggggattttttgttatgtttgcactttgtatattggttgaaactgttatcactnnnnnnnnnnnnnnnnnnnnnnnnnnnnnnaaatctatttatttttgcaaaccctggttgctgtatttgttcagtgactattctcggggccctgtgtagggggttattgcctctgaaatgcctcttctttatgtacaaagattatttgcacgaactggactgtgtgcaacgctttttgggagaatgatgtccccgttgtatgtatgagtggcttctgggagatgggtgtcactttttaaaccactgtatagaaggtttttgtagcctgaatgtcttactgtgatcaattaaatttcttaaatgaaaaa

SEQ ID NO: 122997 - DNA, 1054 bp, Homo Sapiens
  misc_feature (17)..(17): n is a, c, g, or t
  misc_feature (108)..(108): n is a, c, g, or t
  misc_feature (112)..(112): n is a, c, g, or t
  misc_feature (115)..(115): n is a, c, g, or t
  misc_feature (120)..(120): n is a, c, g, or t
  misc_feature (155)..(155): n is a, c, g, or t
  misc_feature (163)..(163): n is a, c, g, or t
  misc_feature (166)..(166): n is a, c, g, or t
  misc_feature (176)..(178): n is a, c, g, or t
  misc_feature (182)..(182): n is a, c, g, or t
  misc_feature (199)..(199): n is a, c, g, or t
  misc_feature (293)..(293): n is a, c, g, or t
gcagagaggacatcganctgatatctttgatcaccctacatatattgacatgactgcgatcttagtatttcactttgagataccgagtccatcactgagccattcacnaacntcntatcntccctggaggaacatgagagattgaaactgtactntgcagtgnacntgggagacannngccnaatctccttgttggcantgctgggcaggacctaaatgaaggaattcaacacttaccctggcattggtatggcagctgatgagaaggtacacattgaatgtttatcggatcntggagagggtgaaaaagtaaatgatgaaattataattaaatgggtcaatcagactcttaaaagtgcaaacaaaaagacttctatttccagcttcaaggataaatctataagcacaagtttacctgtcctagatttaatagatgccattgcaccaaatgcagttcgtcaagaaatgatcaggagagaaaacttatctgatgaggacaagctgaacaatgctaaatacgccatttcagttgctcgaaagatcggtgcccggatatatgcattacctgatgacctcgtagaagtgaaaccaaagatggttatgacggtgtttgcatgcttaatgggaaaaggactgaacagaataaaataatcatttcatatgattttctgccacattaaacatattgtatgcctcacagtttacaggattctgaaatgtagtgggtgtaaaaccagagattatttgtatgctcaaaatagttatatattcattaatgaattcaatatcctgttcatactagttagagctggtcagcctttttgggtaacacagttaatttaccaactgatacagataatagaatatattcataatcaagctgatacttcatgattaaattatttttgttgcttaaaagtcgtattagacaagactaaatcattcttttttatggttcaaaaaagatgaatacaaacgtttttgcaggttctgctgtgaaatgtggtttgatttttttggtgtgttaattttgatcataaatgcattcatactc

SEQ ID NO: 122998 - DNA, 698 bp, Homo Sapiens
  misc_feature (634)..(634): n is a, c, g, or t
cttgaagtgccactctatattttatttcccagttaaccatgtctacattttctaagatcagtatattgttttctttgttatcatcattaggctccataatataattttacatcatatattattaaacatttatgactacaagaaattcttgaagctacttctacatgtgatcatatcaaagtataaattttgctaacaagacacgctgtgtaccaccttacagatttatagtttatgcggcagagttagaaatctgtgacaagtcctaacacttgtcacatctcaatgtggttttccttaaaaaaagcagccaatatccatgtaaacagtacattgtgagatgtaaaatttgattgatagctcctaaatatcatcccaaatatacacaaattaaaagattattctaaatgctttttcatcttacatatcaagaaactcataaagataacattataaaaggcaacatttgttaaaaggccactgtggttaactttatgtcactggagtcaatactgcagccactgtcaatttcctggatggttgaggttagaagttgattctttcaaggcaaacatcaagtaattcgatttgtctagatgactgaacagagagaattcttagccactcctttcanatggattgttcaggtcaagttactttaatgccaggtcagtcagggaatcagagacttggtgttg

SEQ ID NO: 122999 - DNA, 879 bp, Homo Sapiens
  misc_feature (573)..(726): n is a, c, g, or t
  misc_feature (730)..(791): n is a, c, g, or t
aaaatgaaacaatgccaacagcattgacgagacacatttaataacatacaaagctaatttagtgcctcataaagaataaggataaatggatccctatgccctcaaaccaaaaacaatctttattttcacatagttgaattaagtatttctggggccagtgtgggggaaagatggtatggaatgggagaatccatccttcctgcaagaggagaaagccagggactactctgtctatatttttacaaggaaattcttcctttgtttctagtaaacaaactcagaggcactgatgttgggctggaacaaggactttctggtggggagggcagctggactgcatagacttgaggttccatttttgaggttcaccttgccttggggtctgtccttggttaccaccactgatgtctaccatgctggactttggagaactttgcttccacttcagcacaccttggtaccttcagtcaagcttttattaaagacttaaggtagagccaggctgtggtgagattaggaaatcttcccggtcatgttgttcatcttttcacctactctccccctagctacaannnnnnnnnnnnnnnnnnnnnnnnnnnnnnnnnnnnnnnnnnnnnnnnnnnnnnnnnnnnnnnnnnnnnnnnnnnnnnnnnnnnnnnnnnnnnnnnnnnnnnnnnnnnnnnnnnnnnnnnnnnnnnnnnnnnnnnnnnnnnnnnnnnnnnnnnnaagnnnnnnnnnnnnnnnnnnnnnnnnnnnnnnnnnnnnnnnnnnnnnnnnnnnnnnnnnnnnnnaatagttaggactacaggtgctgggctctggattcttgatactgtcttctactcctacctatctccccttttttactaataatctttt

SEQ ID NO: 123000 - DNA, 612 bp, Homo Sapiens
gtcttgctttggctatttgggctcttttttggttccatatgtacccatccatgagcatgggatgcgtttccctttgtttgtgttgtagatggcttttattactctaaggtatgtcccctttatgccgattttgctgagggttttaatcataaagggatgctggattttgtcaaatgcttttttctgcatctattgagatgatcatgtgatttttgttttaaatctgtgtatgtgctctatcacatttattacttgtgtatattaaatcatccctgcattaatggcatgaaacccacttgatcatggtggattttctttttgatatgttgttgaatttggttcattagtattttcttgaggatttttgcatctatgttcatcagggatattggtctgtaactttcttttttgttatgtccttccctggttttgatattatggtgaaactggcttcatacaatgatttgggggaggattctctctttttctatcttttggaatagtgtcaataggattggtaccaattctttgaatgtctgatagaattcagctgtgaatctgtctggttctgaacttattttttagctattggcaatctttgtattactattt

SEQ ID NO: 123001 - DNA, 810 bp, Homo Sapiens
gaaaagttcaaattttaattaaaatctttattgaataaaaatgtttcagactaggtaagactaagaaagcagaatgttttacatctctaaaaaatattaaagctaaatctctataaatgcagtacaaagaaaagcctacagcttaagacacctctccctcccatccatacaatttggaatatcaactgtgtacaacaaatgtactcaagtttataatgtccccaaaccttaagactagaaaatcatcccaagaaaaaggcctatagttggtttaatttcaccctgagaatactgtgataaaaatcaatatatttcagagctagtaagtatttaaaaattagtgtctcaaaaaggggacatcataagggaaatacagggtttagaggtctgagctcaagtggtgtaagacagttctttcttcttcctcctttaaactcttcactttgctctaacacggaagatgggggacagtgatcccgaaggtattactaaaatattgcagctttcagtaattatgagaagcacagatatcaccagaaaagaaagcaatcatttggagtacggtaaattcactggcagatacaaaagcttatttgggagacagcagatctctctaagcaccgaagagtgtaggttggtttttcaattgcctcaaaaagtgctctgttgtattatacctcaggacgtcgagttcaggatgtagtttagagagcaggacataaagtagtaaattcctcatatatatcacagcaagaaaattaacctaaaaaatttaaagactaaataatctcttaacaggtaaatactaaa

SEQ ID NO: 123002 - DNA, 1101 bp, Homo Sapiens
  misc_feature (869)..(964): n is a, c, g, or t
gcacgaggagggatgaaattcctttagaacttgaaagatgacactagcgaacaccatgagaatactgtctacagtttttggtacgtcatcactagaacagtgaccccaaactgaatcatgaaaggtctgacatgatgtaatctgatcttccatgtgttattttggccccacatctcttcttgattttttagtcttatttccttagtgttattatcatacttcccctgatatatggccgtacttcctggccctgggcttgacatttcccacccttcattctccatacatatgagatgtcagaaaacatgcagtaattgatattatgggacacattggaaaggattgaatctggaattagttctgtccactgtggaggggagaggaaataatgctgtaaatgttgagttacagaaagtccaatgtcaaatatagtttttttgtttcctttcaaatgtattacagactgtgccaaaacagttaccaattcacactgtcaatattaaagtataccatagtatacaaattagtcagtacttgctgttaattttaatatttctgatttaacagttagttattaagtggtacttcattgctgttttagccaacgttttaaaaataatttgggagtttgactattttggcttacgtactcatttccttttctctgctaaaaatgttttgcttgtgtgcgttcctgatttttgtcttgtataatcttgatctttgaaaaccctcaaacatgtattaaattgttgtaactttttttcattagagggaagacattaaggggattggggacatttgtttcacacatctgcagtaatatgagttaactaatatttaacaagctctttctttacattagctgnnnnnnnnnnnnnnnnnnnnnnnnnnnnnnnnnnnnnnnnnnnnnnnnnnnnnnnnnnnnnnnnnnnnnnnnnnnnnnnnnnnnnnnnnnnnnnnntgagttgagcagaaaagttaggaaacttgctcagggtgataatacagttaggagtgtcagggcccatggacaaatcttgtcagtctccagaacctaagatatactacgtcactgacagcttgaacatttgtatttat

SEQ ID NO: 123003 - DNA, 686 bp, Homo Sapiens
tttttttgaccatgatattctttttattgaaaagtaatataaaatggctttagacataaaagatagtattttacattatttcttctgttatatttttacgctttgtgccagaatttacttcttgcaactattcttgctttatctggaacagtttactccgttattgaatatctattagtgtttaatatagaagagcttaataaaccgctaatccgaaaataatggtattcccttgcttttcagacctttttgctgaatatgcttatttatgtccaatgtggaaatctgatcctgttctcttccactctgccagcagttccttttgtactgcttctggtagttcatagaaaacttgaggatcaatgtcagaagggaaagtaattttctcatcaacagaatctggctctctattttctgtaagtccttcatgagagtctgttgctactgtttgcttatggctatctgtagtgtggtttctggagaaaagttgctcactctgcaagtttggaaatgaatgaaaagcagacacagcagggtttgaatttgtaaagtggaatccttgaggttctttaggtccttgacttattcgttcatcttttaatctattatctaaataatatgaataatccttttggctagacatgtaagaagaactactgctattaaagcctgatgttcccggttca

SEQ ID NO: 123004 - DNA, 675 bp, Homo Sapiens
  misc_feature (203)..(249): n is a, c, g, or t
  misc_feature (315)..(329): n is a, c, g, or t
gtttaaaacacagactttttattttttgcatttattgtggtaaaatatacataacataaaaccttttaaccatttatttttaaacattttaagcttcttattgaaatataacaatataggaaacacatacacagtacaacttgtaagtacactgctcaatcagatttcatctggatcaagaacagaatattccaatattccgnnnnnnnnnnnnnnnnnnnnnnnnnnnnnnnnnnnnnnnnnnnnnnncctagacatagtaattaaaatgggggttaagagaggtaatctctctatccctttgtgtgtgtgtgnnnnnnnnnnnnnnncatacataatcccatatctatgcatctatacccaccctataatgtaccattttcagaaatgggtttgcagaagactttctaaggggtatttgttttattgtttaaaagattatgtggtaataactttgggatacactaaatagagtaatcaaacaagtttgtcacccaaggaaattttcacaaattcagacttcagggcctattgactgatcattctcaagtcaagagaggaatgaggagaatccttcttgcccattctagatatattttttacattatgataaaatatacataacaaatttaccattttaaccatttttatgggtacaatttagtggcattacat

SEQ ID NO: 123005 - DNA, 469 bp, Homo Sapiens
  misc_feature (296)..(310): n is a, c, g, or t
tattttttgcatttattgtggtaaaatatacataacataaaaccttttaaccatttatttttaaacattttaagcttcttattgaaatataacaatataggaaacacatacacagtacaacttgtaagtacactgctcaatcagatttcatctggatcaagaacagaatattccaatattccggaaaagaaaagaaacatgttaaaaagaaaagatttttatttaaaaaacctagacatagtaattaaaatgggggttaagagaggtaatctctctatccctttgtgtgtgtgtgnnnnnnnnnnnnnnncatacataatcccatatctatgcatctatacccaccctataatgtaccattttcagaaatgggtttgcagaagactttctaaggggtatttgttttattgtttaaaagattatgtggtaataaactttgggatacactaaatagagtaatcaaacaagt

SEQ ID NO: 123006 - DNA, 705 bp, Homo Sapiens
  misc_feature (487)..(550): n is a, c, g, or t
  misc_feature (661)..(661): n is a, c, g, or t
  misc_feature (673)..(673): n is a, c, g, or t
tggtttgagtttgacaaatttattggtactttagtaaagacattcatctcagtcatttctctctcccagcttgaccttaggttaatatttcatttgggtcaagaaaataatacgtaggagaggtatgttattttaacaaacaggaaaatggacaaaaaattgatagtttgcctacattaaagtaagttaaattcatgtatcgatataattaaatcatgtaagaactaagagttctatatacatttccattgtcttacttgggcttattctaaacttaaatgctagtgaacaaagtgttaggaatatacacaggctgcttctctggagttattaccaactaaaagacctcagcaagcagctaccaccaataaaacagtctgaagctgcctccaaatataatattgtaggagttttcaaggaaatttttatactgtatgcttttgtctgtgactatgcttttaaagatgtgtttaactgtcacatttannnnnnnnnnnnnnnnnnnnnnnnnnnnnnnnnnnnnnnnnnnnnnnnnnnnnnnnnnnnnnnngtatatgtggtgagattccaaaaaatgtttgaagatgcattttctttccttcaatttcagtatctaaaatgtgctttttcagaggccattggtcaatatgtacgcatttanaataaaccatantattttaccagtaagaaagccgatagttaagt

SEQ ID NO: 123007 - DNA, 1050 bp, Homo Sapiens
  misc_feature (802)..(812): n is a, c, g, or t
  misc_feature (831)..(833): n is a, c, g, or t
  misc_feature (838)..(838): n is a, c, g, or t
  misc_feature (847)..(847): n is a, c, g, or t
  misc_feature (854)..(854): n is a, c, g, or t
  misc_feature (856)..(856): n is a, c, g, or t
  misc_feature (865)..(865): n is a, c, g, or t
  misc_feature (886)..(886): n is a, c, g, or t
  misc_feature (889)..(889): n is a, c, g, or t
  misc_feature (898)..(898): n is a, c, g, or t
  misc_feature (910)..(910): n is a, c, g, or t
  misc_feature (925)..(925): n is a, c, g, or t
  misc_feature (932)..(932): n is a, c, g, or t
  misc_feature (936)..(936): n is a, c, g, or t
  misc_feature (945)..(945): n is a, c, g, or t
  misc_feature (976)..(976): n is a, c, g, or t
  misc_feature (1016)..(1016): n is a, c, g, or t
  misc_feature (1033)..(1033): n is a, c, g, or t
ttttttgagtttgacaaatttattggtactttagtaaagacattcatctcagtcatttctctctcccagcttgaccttaggttaatatttcatttgggtcaagaaaataatacgtaggagaggtatgttattttaacaaacaggaaaatggacaaaaaattgatagtttgcctacattaaagtaagttaaattcatgtatcgatataattaaatcatgtaagaactaagagttctatatacatttccattgtcttacttgggcttattctaaacttaaatgctagtgaacaaagtgttaggaatatacacaggctgcttctctggagttattaccaactaaaagacctcagcaagcagctaccaccaataaaacagtctgaagctgcctccaaatataatattgtaggagttttcaaggaaatttttatactgtatgcttttgtctgtgactatgcttttaaagatgtgtttaactgtcacatttaaaaaaagttcatatacaatacaaaaatacaaaacaaacaccctacaatacacaaatctaacaaagtatatgtggtgagattccaaaaaatgtttgaagatgcattttctttccttcaatttcagtatctaaaatgtgctttttcagaggccattggtcaatatgtacgcatttaaaataaaccatataattttaccagtaagaaagccgatagttaagttcaattcaaattggagttcataagttagtaatttaaatccttagacaaagttacagaaagtgcatcttcttattttccatcttcatacaatgttaannnnnnnnnnngggtgttatacctttttannnaatanaacagccanatacttnangcatatgtnatttacatttttggtggtggnttngtgttttanagaacagctccnttacgatttgctcangtctggntggnatgctacangactagctataacaaaacagagagccatcanatatgattactttgtacaatggtttcttgagacatgaganacagacattaggtgatnctatcatatcacagtaa

SEQ ID NO: 123008 - DNA, 1253 bp, Homo Sapiens
  misc_feature (225)..(288): n is a, c, g, or t
  misc_feature (1231)..(1231): n is a, c, g, or t
acaggaacacagatttgatgttttaataaaaatacgatgtctacaaaaggtgcttaacacggcccaggacgggctgtccggtggagtcagccgtaggacccctgaaggatttacaaaatattagatgagccactgagaatcaccacaaagcaatcgccctcacggcccttgccagggtgacggcacagcaggaggacaggtgcccaggccagtggttctagctcnnnnnnnnnnnnnnnnnnnnnnnnnnnnnnnnnnnnnnnnnnnnnnnnnnnnnnnnnnnnnnnnctttttccagtgttgctacaatctcagccacctggctggtggagatgtgaacatcttctttgtccaccagctcaatcaccttgacgaggtcgtcgatgttgaccttgccatccttgttttcatccagtgctgcggccaggctggtgagcttgctttcgggaatgtgcttgacttgcttcatggcgttgatgagctcagcgacactgatgacgttctccccccgtgggcatgccgttggccggggccagcttgccagcctgctggtccatctccagctgcgagatcaagccatcgatctgcccgatcatttgctgcaccctttttgtcaatctcttgctggctttagattcttccacgtatttttcttcaccagtctttgaaagttccttcttgatctcctgcaagtcctcgctgtagtcctgcacatcctccttcagcagctccagctcctccttctccttggtgagtgacttcttctgctcctgcagcttagagcaggcatcgctgaggatgtcgatttcctccttcgtgatctcttcctccttcaagccctccagcaccggggcagtgtccttcaaggtctctgactgcaggactgtgtcaggcatttctggctgtggctcggtccccggcctttggggagcagctaccacacgttcgggctcaaaatccttcgccacctccgagcgcttctgcagctccttctcacggtgctcctgctggatggccgcctcctcctgcagcgtggcctccagcttggccttgttgtccacctgctcgccctccacctcggccactttcacctgtgcttcctttgccacatctctgggagggtctgcagtgtggacttgagctggtcggctggagagagggtgtccgggagcgacgcgtgggtcgacgatatcccgggatatccgaccggtaccagcctgctttttgtaancctgtttataagttactaagct

SEQ ID NO: 123009 - DNA, 334 bp, Homo Sapiens
tttttacaggaacacagatttgatgttttaataaaaatacgatttctacaaaaggtgcttaacacggcccaggacgggctgtccggtggagtcagccgtaggacccctgaaggatttacaaagacagagccggctcaccagcacactcctgccagcaccgggacccactgcgaacaaagacagagccggctccccagcacgctcctgctagccctgggacccactgtgagccactgcggggtgtccttcatttaaaaaaagtctggactgtgacactgcagaaggagtctgaaagcccaattcctgaatccctgcgttagaactgagagttcag

SEQ ID NO: 123010 - DNA, 639 bp, Homo Sapiens
  misc_feature (77)..(77): n is a, c, g, or t
aaagtacagtgagggttgggaatcagtacaatactacctagtgctgctactgttgtccaatacaaggatgtaatatntgaattagccaacaattatccttcttgatagtagtataaacaaccctcacctatgaatattctcattaatttttttccatgctacagactttggttggtatgtgatctttgccacctataactaatgacttagaaagagatgtgggttctagtcctgatctgtccatttgtgaacctattctaattactcccaccagctaggcctgaatcattacctatgaaatgctggtgttggattaaatatctaggaccttttctaacactgtaacattataaccaggatgttttacaaattaaaaataagtaagttttttacttatttatccagtttagttccagtagttgtgactattctcaatagccataggaatcatgctaaattccatgaaggtacacagaatgtatttcctcattaggaacaatattcaaagttattgtgaatgtcacaagatgctgaggaaatgccaaagcaaccacattttttcagacctgatgctactgtagcaacagacattcatgggggaaatgcacttggtgaataattgtaattaaagtatcaatt

SEQ ID NO: 123011 - DNA, 693 bp, Homo Sapiens
cggcatgtccacagccatgggccgttccccatctcccaagacctcattgtcagctccacccaacacttcttcaactgagaacccgaaaacagtggccaaatgtcaggtaactcccagaagaaatgttctccaaaaacgcccagtgatagtgaaggtactgagtacaacaaagccatttgaatatgagaccccagaaatggagaaaaaaataatgtttcatgctacagtggctacacagacacagttcttccatgtgaaggttttaaacaccagcttgaaggagaaattcaatggaaagaaaatcatcatcatatcagattatttggaatatgatagtctcctagaggtcaatgaagaatctactgtatctgaagctggtcctaaccaaacgtttgaggttccaaataaaatcatcaacagagcaaaggaaactctgaagattgatattcttcacaaacaagcttcaggaaatattgtatatggggtatttatgctacataagaaaacagtaaatcagaagaccacaatctacgaaattcaggatgatagaggaaaaatggatgtagtggggacaggacaatgtcacaatatcccctgtgaagaaggagataagctccaacttttctgctttcgacttagaaaaaagaaccagatgtcaaaactgatttcagaaatgcatagttttatccagat

SEQ ID NO: 123012 - DNA, 840 bp, Homo Sapiens
  misc_feature (760)..(760): n is a, c, g, or t
aacactaaaaggcaagccaggttatggttttaagaagtaccaatttaataatgaatacttagaaatatggtacacagataccatagtaatataaaatgcatacaattttaaattattttcttataaactctctacatgaatggctggcggcttccaacagataaacttttggacaaaggtacaagatatttttgggcattcattttaaataccatctagttatccaattaggaggtttctaaaaaaataaatatgacaaatatatggatttctgaagtataaactgacatacaaatctatatattttcttaatacttttcattaaagcatctttaaagcattctgtaacatgaagttgagagttcaaattagatgtaatgaaaaggcatgaggttttattagaactgtgtaattcacatatcaaatttttacataaaagtaaacaaacacaaaattgaaaagcaaaatacgttattttactctccaagttaccaatttcagaaaactactcactggaaaaattaatattcccaattctgaatgttaataagaaaacatgtaggtgcaattccagaaacttaattctaccttctaagaagcagtgaaggagtaaggtaacactgccccttggggattgtcaaagcttttctagaactgctggagagctgattctcttttgagacagtgagaattaaaactatccatttcaccagcatacaaacctgtgataagctctcttttccagacttccatatgatcnagaactctgaaccataggttagtgaactgaccttaaatgtgcccacctcctccatctcactgaacaggcagctccagagg

SEQ ID NO: 123013 - DNA, 760 bp, Homo Sapiens
  misc_feature (354)..(374): n is a, c, g, or t
ttttttagcattttatgacttttattttacatgtcgccaacgtttgtacaacatacagtggctacatctaaaactttgagcatttttttatggcgcaaagagacagaaaggttaatgacacacttaactgttacagtgactttgggtagggccctaaagacagcacacgctccagagggcgggctgagtgttgttcacacttgggtcctgaatcgctgttgtaaggtacagagacacactttaactggggaatggggtccccacacagtgatcgccccacgggagggtgacagaatatgccaggaattgtcttggacatgggccccagtcaccacaatcagatggcttattggnnnnnnnnnnnnnnnnnnnnnccttgattgcgacacaccaaagctgttccaatttgtaaaaaactgtagttattacattgcaatgaaatctctttaccaaatcttgggccagtgttttacctggatagtgcttacattataaatattggtttttgcccttagtgctaacataagaaaaatcagttccttgtatactcaataacagagcttggaccagccaatgctgtctattcactcatggctataatgcagccgacagaattgttcaccatggaatgttttataaacctgttcatattccagagagacaaagactcaaaactacaagtgcaaagttgggtagagagagctgccagaaacactagctcattaggcatagaggccacagcaaatcaaattgttccacc

SEQ ID NO: 123014 - DNA, 803 bp, Homo Sapiens
  misc_feature (49)..(58): n is a, c, g, or t
  misc_feature (60)..(64): n is a, c, g, or t
  misc_feature (66)..(68): n is a, c, g, or t
  misc_feature (70)..(75): n is a, c, g, or t
  misc_feature (77)..(79): n is a, c, g, or t
  misc_feature (134)..(134): n is a, c, g, or t
gttctaggaaaagctttcttgcaggggcccgaggccggcccgacaaggnnnnnnnnnntnnnnntnnntnnnnnntnnnaagtgtttgccttttaggttatttatttgcccagggaatctttgactttcccganatatgtactgtttgggggtacgatgcatgcagagccttttaaaatgcctttgtacaatttcatctcaaaatgatttcattcacagcatacacagaaatctaaaaagagacatggtatttacaagatttaataagtttttgctgctttaatgaagaaactgatcaattcttttacagtagggaaagaaacatggacattgggtatcataaataattcagaattgttcagtctcaaagtaacttttcatggctttagaattaaaattgagtcatcattctattaatctctgaatgcccaagccatgcagaatctacttgtattaaatatttggggatgcaaataatacaggaaaaaaagtctggtgaatgtgaaaacgtcatcagaattaacctttacaataggcaaatactgttaattctttcgaaaagatacagtagtggtgcaacacagacagtgcccaatttattctgatttttaaaagtaacatttcagttgtcatttttctttctctacagatagatatacagacacacacggttacatggactcattcaaggtctaacaatggtacaatattaaaataattcaatttttaactataaagggacatcttcacattccaggatacatcattgatatttttagaggacaattcttctatgccttccc

SEQ ID NO: 123015 - DNA, 1096 bp, Homo Sapiens
  misc_feature (100)..(100): n is a, c, g, or t
  misc_feature (102)..(102): n is a, c, g, or t
  misc_feature (104)..(104): n is a, c, g, or t
  misc_feature (112)..(480): n is a, c, g, or t
  misc_feature (513)..(523): n is a, c, g, or t
  misc_feature (569)..(577): n is a, c, g, or t
ccccctcttactgactcgattttgatctctcaggggcggactttgaaaaccccgcacgcgccttttacggtcgtgcctttgctgcctttgctacatgtcntncntgcgtatnnnnnnnnnnnnnnnnnnnnnnnnnnnnnnnnnnnnnnnnnnnnnnnnnnnnnnnnnnnnnnnnnnnnnnnnnnnnnnnnnnnnnnnnnnnnnnnnnnnnnnnnnnnnnnnnnnnnnnnnnnnnnnnnnnnnnnnnnnnnnnnnnnnnnnnnnnnnnnnnnnnnnnnnnnnnnnnnnnnnnnnnnnnnnnnnnnnnnnnnnnnnnnnnnnnnnnnnnnnnnnnnnnnnnnnnnnnnnnnnnnnnnnnnnnnnnnnnnnnnnnnnnnnnnnnnnnnnnnnnnnnnnnnnnnnnnnnnnnnnnnnnnnnnnnnnnnnnnnnnnnnnnnnnnnnnnnnnnnnnnnnnnnnnnnnnnnnnnnnnnnnnnnnnnaagaattcggcacgagggccgcggctgtaggcnnnnnnnnnnnaaaatacctctcacatagctacctttttaattaaatctccaaattnnnnnnnnntgactctacctacctcacataatcattttaagtagtgtctgtgaagagaatttgtatacctaaagtactgtataaacacaagatcttcttgcaccaactcaagcctggattactgctgtttactgctgcaatctcctaacgtgtcttcctgtctctccttgctccctttaccaacccatcctgtgttgggttaccggagtaatctgcctaaaagcacattttatcctttcaagaccttgcttcccacggtccactgcaggacttaatccatgttccctgggaagactgtggtctatgagctgaaccaaaacggtctgcccttgtatcagataaccctgaccttttcccaattcatagagaaaagaagttagtggatagaactttctcagtttgtaaatattttttccctatatgtacttgtttttctgtagtagtaaatccaagctttcgtctgctactcttgtagatgacaaaatgaatgattaagcagcaaataaatcataaagatttgaccacagc

SEQ ID NO: 123016 - DNA, 2246 bp, Homo Sapiens
  misc_feature (1367)..(1390): n is a, c, g, or t
  misc_feature (1712)..(2185): n is a, c, g, or t
  misc_feature (2190)..(2191): n is a, c, g, or t
tttcttcataatcatattttgatttttcacttctttctacatttataacatagctaagaatttgtagaattttggatataagtcaacctgaaagaaaaccaaacatttttcaagaatacaccatcgacaaagctggtaaatatttctgatttatcaagttcaatcaaacttgtttttttaatctttccaaatgaaatttatattaatggaaaaagtaaaccacttaacagagggtcaccattattaattatttcctttactctctattcctcacacttcactggccacttgaaacttctagagttcctttattaaaataactagatcaaacaatagactttgagaaattatttttcatatcaattttacaaatactgtatcacaaacattctacagtacaaatttaaataaagcaactttctaccttattaaaagattcttcacctcctaaatagaaactgaaggggaagcaatgctattaaggatcatacataagctaatagaggcagcagaattatctattaacattttcctaacactattctagtgaccttaacattttaatcacagagctgcagctgtttgcatgtgttctaaagctagcataatctttaagacagtcaggaaaaaaaaccttcaaaacaaattacataatattctatctagaaaaatttccaggaaagcacattcttgggtgaaagaaaaccacccctttgtcattgtgatgcactaaaaaaaagctttggagcctgatagtttggctcctggctctcccacttgtttggttaaggttcgagtcactgtaaaatgtaattatactcccttttcaaaggattattttgagaatttaataagaattgatggaaggggcctagcagatagtaaaacctgattaaaatatcactaatttaattatttcctagaagccaactgaaacatcataacatttattttcttggtagaccttatgagtttattctcaaaggcaattaaaaaatctccttcaggaaagccatgcacatttttattaatcatatttatactactaacaatgcttggctgatgattaaaaatacttaaatcacagtagacacacaaaaagagatgtttctcaacttatcatagggttacatcccaataaacctactatcagttgaaaatattgtaaattgaaaatgctagcctgtcttaaatatgctcagaacacttacagtagcctactgtttagcaaaattatctaacacgaagcccgttttataataaagtgttgaatttctgatgtaatttattgatgttctactgaatatgtatggctttggcactatggaaaagtcctaaattggagaccgcacataaatgaaacactnnnnnnnnnnnnnnnnnnnnnnnntaggtttctctaaatgagaatgtcaaatccagaattactttatataaaagtacacattctaatatatgaaaagatattttatcattattactttactatatattactgaatacaccagactgcattttctcaaatggcaaatgaggcacatttctctttgattcccccaggaacctccgcatcatctgtcttttggaggattcagattcttacgacatctgtgataccgtccatgaggataccaacggtgcttagtagtaaagaacattttgctaagttgttctatcataggtccttcctcaagcctcgtgccgaattcttnnnnnnnnnnnnnnnnnnnnnnnnnnnnnnnnnnnnnnnnnnnnnnnnnnnnnnnnnnnnnnnnnnnnnnnnnnnnnnnnnnnnnnnnnnnnnnnnnnnnnnnnnnnnnnnnnnnnnnnnnnnnnnnnnnnnnnnnnnnnnnnnnnnnnnnnnnnnnnnnnnnnnnnnnnnnnnnnnnnnnnnnnnnnnnnnnnnnnnnnnnnnnnnnnnnnnnnnnnnnnnnnnnnnnnnnnnnnnnnnnnnnnnnnnnnnnnnnnnnnnnnnnnnnnnnnnnnnnnnnnnnnnnnnnnnnnnnnnnnnnnnnnnnnnnnnnnnnnnnnnnnnnnnnnnnnnnnnnnnnnnnnnnnnnnnnnnnnnnnnnnnnnnnnnnnnnnnnnnnnnnnnnnnnnnnnnnnnnnnnnnnnnnnnnnnnnnnnnnnnnnnnnnnnnnnnnnnnnnnnnnnnnnnnnnnnnnnnnnnnnnnnnnnnnnnnnncacannatcgacctcagtcagaggtgggaaccgacagactataagaacaggcgttcccctg

SEQ ID NO: 123017 - DNA, 813 bp, Homo Sapiens
tttgagaatgtcaaatccagaattactttatataaaagtacacattctaatatatgaaaagatattttatcattattactttactatatattactgaatacaccagactgcattttctcaaatggcaaatgaggcacatttctctttgattcccccaggaacctccgcatcatctgtcttttggaggattcagattcttacgacatctgtgataccgtccatgaggataccaacggtgcttagtagtaaagaacattttgctaagttgttctatcataggtccttcctcaaggtgttcaactttttcttccaatctggttttcagcacttgatcatgtgtttcttcattattatgcacaggatctggccgagggataggttttgtgtgttcatatggaatgtccacagaagggtggtagcatactattgtcctgccatcagaagtcagagcaagctctacgttgcaattatagtcatctggtagaggagaatacgtagatttatgacaaacacaatataaagctccattttggactggaaataaatgtttcaagatagttctctttgacatcacccattttactgcagctacagccatggtgtttcaagatgcttatcaagtggtatgaaaaaagatgttctgaagagaaactgcttttagaatctgcttctaagcataccaatttctactcctgcttgacggcttctcaccacgaacccgccatcttgtttcaatcctggtcccacgaaacagcgctgcgcccccggccgtaatggccgaattcccgggcatatgtccggtaccgtcgactg

SEQ ID NO: 123018 - DNA, 192 bp, Homo Sapiens
ggttatttagattaaaaatatttattacaggcagatttgcttttcccaggaaaacatatcactggaaacatttggagaatgcaaactgggttaaacctattcccaagtccattatcaagtaaggtatcactaaagaaaaagataggagtttaaaactggggaagcccacacacaatttagacaggggaaaag

SEQ ID NO: 123019 - DNA, 572 bp, Homo Sapiens
  misc_feature (117)..(126): n is a, c, g, or t
ctgtattttccaagtttacgtttttctttagttcattcctctggtgtccgtttctctcttttgtgcgcgtgtgcacgtactctctctcgctcttgcttttttggttgtgtttcagcnnnnnnnnnngaaagaactttggatttgccgttggtgggcagtgcctgtccctggaggctggaccctcacgtggcagggctaggacaaggggcaggcccacggccgctgagaggatctctgtgtttaaagcctttgagaataagttactgcagttcccagggtgcaaggtagggattggcagaggggtttctggtggcggcatcccctagagtccaggccacaggggctcccctgtcaggcaaggagagggttaggagggagagggtaggaagagtgaaccagaagcacttctcccatgccagcctccagtttggttagagttttgtgggctccctgcccatgccaggctccaactttgggagccaactgagcatttggaaagagtttgtgagcggtgtggtgctctagacaaagggttaggaaggagaagagagagtggcgaagtttgtttcctt

SEQ ID NO: 123020 - DNA, 718 bp, Homo Sapiens
atgggaaacatgttttatttttgccatttagctgtgaaatcatcaggatccagacataagatagtgtaattattctgcaaacacccagtggacagctcttgtgtcacccatagcacccgagggtggtcaaagtggctcattctggctcttccaagaaatgaatccaactggtgacaggggactcagagacaacttctcttctcctttcccacagggagacatctcctgcttccttttccagggcaacgtaggctgaatacatcccaaagtgctcagatgagctgcttggtggccacaggcttaactgggcctgggccagccaaggaccgaacccaggctgttgggagacagcttggactctgtttcatgcagggctggtttagatttatcacaaccaccatactgggcagcacagcctcttagaatgagagccagattcttgagtgatcactgggagcttgtcctgagccatgggtctgctttcctctttgcttcagttgtacatgaccaggctcatccactccatttctgtcaggtagagtccttttccatccttagagaggttgcggaaggtctttgccatggcttcaagccgcatcaggaagcagaccaggctggggaagctgaccctgccgacgctgtcgctgtacctgagggtcaccagatgcagcagctcacgggtgatgaagttcctctgaggaatctgtatctctatggc

SEQ ID NO: 123021 - DNA, 1099 bp, Homo Sapiens
  misc_feature (68)..(80): n is a, c, g, or t
tttttcaggccctggtttcatgtgcctttaatacttgtttttcctttcctctgtattcactaaacaannnnnnnnnnnnngtaaggctacttttgtagctttttgttttccctttgtatttatcatgtttttaatttcttctctgaggaggaattctctgaatctgtatcttccaattcaattcgttgccttttgaggccactgtggccatgaacagccctgctactatctgtggctggggtgtcagtggggtcctctcttgttccagcattgggggtctcacaggccatttcagacccgcaacaatctttgtgtaggagtgtccctgtcagggacgagttatcacggtcagtgtctgagtgtcctggggaagagtaggccaccacctccagctcccccaagttctgcccgttattgtgagggtgagggggacgagggtgtaagcgtccattgttgtggttggcacagatggtttcgaggctcctctcctcactgtcatcagactgggtcctgggacagttgccagacccgctgttgagagtggagccagatgccttggggacaggaggagaaggcggctcctcagcccgactgctcagggcctttccattgagcttcttggtttcaaaagggtgctctacagagccgctattgccagtgtcctgagaggtaccctctggcacctctgcccaagcatggctgctgtgctcatggcctgggccattgctgggagttcctaggagtctcttctttaaaagtgtccttgctgcagccttcaggtggcaggtcctggttcctctgggccattgctatgtttagacaggcttccttactggaagaaggggctgggttgtctttgtggctggttcctgctctcccttcatctgcctccccagtcaccaaggaggtctctccatctttgttatttgagtaggagatataagagtagcggagccacttgtaagctttataaatttttcgctcaactgattctatgtcagaagttggtgatgcccggcttggttgaatctctagcgtggaagtctccgctcaggggacgaggttggggaggaggagaggtcatccactttgatctggg

SEQ ID NO: 123022 - DNA, 687 bp, Homo Sapiens
  misc_feature (66)..(66): n is a, c, g, or t
tcataagctgttaaggaccagtgccgagggcttttgagtgaaatgccagtcattgaaggtgcttcnaagaccaagggtgcctcctaaaagcttgacagggccttgactgcacaattcgagctgaatttgccccttgtcagctgccagtaaataattctcaaagggggaaaagctgaagtttcattacctgatccatggggctttgttggttttggcatcacacaggggaagctcttgcccctccattctctggatttgaagatgtccattggagcctgcagtgcctggacagggttcagagcggaaccttttgaagagtgtcaatagttgtaacagttcagctgttaggaagacaaataaatggaggagctcattaatccgcttttggctctcagtgccttttgcccttttatcacagccttattaggctcctactcatcttgaaccagaaaaaaatgaattgaagttgttgagtactaattggcaaagacttttaatcatgggccaagaactttcactgacttgaaagtaacttctccacagggaaggaccaaaaacctggtttaccttaaaacaaaaacctgttggagttcagcgtggtgtaaaaatgtaaggaagcattgataaattgtctaagtttatccatttgaaagaaattgtgtaagattatgatattctcttttcttt

SEQ ID NO: 123023 - DNA, 2381 bp, Homo Sapiens
cacaggaagagggaaacagcccaatatttatttatgtatacacataatcccaagtgtgtgctggggccaccaggcccttcctgggggaacaaggactgtcgtgcatgtgagtgacgacattaatagcatttacatactgtacagatgcaacctttgatgatacatatatttgataaaaatgagaaaacagatttgttgtagagtacctgtccacttttatagcatgagaacagtacaatcaactatttattttgcagttactcatttcagtgattgagaatttctgtgctgtgcagagagacggcctgtaattggtctcatcatccacttgattctaacatgatctctgcccaaagttccatttcttgggctttgatatttataatggcgcctgctcttcatcttgtcttacgctttccgagcaagttcaaaccagaaagaaaaggtgaggctagaagcccaaagtgagtgagtgtgaggaccacaaggaagcccaccactccacagtagatgatcaaaaccacatcctcacgtgggaggtagcacttggagagggtgtagtctgtgggcgtgatgctacccatgtctgaaactggggttggttcatgttcctcccactaaagaggacgtgaggggtactcggccacagtgattcacctcgcaggcgctgtgcgtgtggccacgagtccacggtcagttgagcaaccacagcagcttttgtgatgtctcccgtgaaagcacgtgatagttcttctttggtggatgttgctaccctatgatgaaactgggtgttgtatctgttcctccgaacttagagatgggacgctgagctcggggactcggcccccgtggtgcacctcgcaggcgctgtgcgtgtggccactgagaaccaggcgcggctggagccaccacagcagcttttgtgatgcctcccgtgaaagcacgtcatagttctccttaaatgggatgtccctttcctctggaggagcagcgtcttccccagaacagttagcatcacttctccgatacagaggataatgctgcaggaggacaggggcagacgtgggcagcagaggcccaggtccacaccggctggagccacgtgcctctcgggagcagttcagtctgtgagaaacttcaatgagctctgcttctgtttcagagcagatgccacagccatccccgttcagcgccacgctgttgaccatcacaaagttaatgcctttccaagaaaacagtctttcagagctgaacactttctcaaagcgttctactttgtatgtgttcatctcataatggaagccaatgtcatggtttccagcaactaccttcagctgtacatgacttgggtgtctgaacaattttctgaaaccgctccacatcatccgcccaggcctcaggggtgctccacttcccttcatcaaagatatcccccaggatgaagacgacttccggctgcagcaaccacagagctgtctggaacgctctctccatctgccattcccttcgtaatttgtccagccagtggcctaggaattccccaagcaaatgggtgtcagccaaaaacatggctttgagcacaggctcacgtgtggtctgttcaccatcagaggctgtggttttcacttcaggccaattacactgaaagatcgctaagtaatagattaaaaattcacaaaatagaagcacagcaaagacaacagctatgagtttcaacagcaatgaactcttcctctttaatggatgaaaattctgtcttccaaaccccaattcgatcatcgccatttctcaagcaacaacaaatccatcaagggttcaccacgagaaaactgcagagccctggggagggtgatggcattcaggtctttgctgggcacctataattttccaggaaaatcaccaagtcacctcatcttttaaagacagagagattggtacgaggctctaagttggcatctgctccccaaaatcagaattcatttataacagccatgctttccagctctgcgcacaacgccaggcagatggggagcaccgggcggtgcgggagccctttcaccagggcagggtggcttcggtggccgagggacccgggaactgcagccggagccggcgcgcacccagccaacttcctgtttccgcggtagcgcgcgggcctgtcactgaagccccgccccggcgacctcaggcgggcggggaagaccgagtcttcccggagccgcttcgtccgcccggcgccgcttcgtccgcccggcgccggagtcccacggccggtttgcggaagcgggtcgtctgaaggggcccggcgggtggctcccgggtctccgcggcctgtgatccccagagcggacaaccgcagctggggctccgtgcgcaactcg

SEQ ID NO: 123024 - DNA, 480 bp, Homo Sapiens
tttacacacagggtaactttttggaagagtactttgtaacaataaagtgctgtgcacagaaaggagaaatgccattatgaggatgtgtgtgccgacctgggaccagcagggtgaaagagtctatcattcatgatgagagctgccatttgcgctaagcacacaccatgtgccaggcactatgccaagaaattgttgaatcttcacaataactctgtgagaaaagggctgtcattggacagatgaggacactgatgctcccaggggtccacatcacatgaagaggaggtgacagggctgggccttggtccgaagctccagccttccaagccaaggcctgtgagaggaaccgctgagacctgatgttaggcctgtttttctcatgtgccctggagaaggggactaacaccatcttttgccaaagtttggtgagggatggccaagagctctttgaaactttgccatgtacaatagcactcacaa

SEQ ID NO: 123025 - DNA, 700 bp, Homo Sapiens
  misc_feature (640)..(640): n is a, c, g, or t
  misc_feature (644)..(644): n is a, c, g, or t
cctctcccctgaaaatatttgatgttttctatctgaatataaatcctgcagaagtcatctaagcctccaagtatctgtttccttcttggttaatagcacaacctggatgtcagacaggctgaccatgactcacagtgggactctaggcaactagtgtcaataggcttggggaccacaatgagtgaaaacaaaaacccttcctcttccattgtgtgttctaagagtgagcagacctaagagtggtggtttaagcactttctatcagaatggtgattgcttcagtgttctcaaggagatggcaacatcatggaagggcagcaacgtgagtcagcaacgtggtatatgggtcccaatcagcatctgcttctgatttgtttttgaaagaaaatccttagtcggttttcatttgaagcctgctgcagatcacagcgtcagggaaacattccaccttgctcctgggccagagcattccttggcaagaaagatctatttaaagatgaacgaccgagatcggatcgtgccttccccttggttgagctgttttcttatttgtgacaatttccagcgtaatatcttgatccactcatcagcttctactccggtctttgcacagagataaatgtcctgaatggaaatacanacanaaacagtttaccctttcttgtgaataatcgaattgtacagctgaacattctgttag

SEQ ID NO: 123026 - DNA, 1395 bp, Homo Sapiens
  misc_feature (1078)..(1090): n is a, c, g, or t
gagcactgtaactatgaacagcgtggtaaaaaagcaggctgttaccggtccggatattcccgggatatcgtcgacccacgcgttcgcgtcagaacttcaaaaagcaaaaaaatcacaacccatacaaaccaaaatttaaatgatcagtaatggcagcacaaagaaaacgccctctcctgactggtatagtggcagtctgaacgccgcccagaaaattgtcgccaaagagtttagaacacataaatatacaatacaagtaaacacatacacacaaaacagcaaacttcaggtaactatttgggattgcaagacaggataattcaaatgttcaaacaatcgtgataaaataaccattgtggaaactgcttggacttctgtgctttatttgattgactacaatgcggtattggtctcttgctgcacttcaaaagcaagcaacaataacaaaaacgaaaataacaagtgtgtgtgtgtgaatacacacacacactaactagaagtcttgtgatgaaaatggcacttggaaaaggttttatttttccactgaagttgaaggttaataaaatggtgtcaaacgtcccctggtcacacacttgaatatttttttagaagtgtgatgtggtatgattaccataaatcagacttaattattttcccttttacaagggaacagggcatcctgaattttagagcctttcagcaataagaagggatgttggtgagctttgatcctcttttggttttgcagttgttaggagtttttgctggcattttgaatatgctgctttcagaaaaaccaaggaagttttaaaattgcttcctggtccttagaggactaaaaacaagaccctcattcccactttcatttccactctagcaaaaactgggcttgcgtttttctccaactcctcgtttatatcctcccttccatgtccaagccttccattcctaagtgggattggctcagttttgcccatccatatggcagcatctctaatagctcttgtacagggtatcagatattgtgccttttggtgccaggttcaaagtcaagtgccgatctatgaaccagtgtacnnnnnnnnnnnnntccaggtatttgaaggagagacgctccattgtgaataaagagctcataccagctcctaagccctattaagaagaggcctggtcctctaatgccttgtttccatttcagttgttctttgagagacagaatgatgtactaaccattcgtgattattaagatagggttgggtcagggcttagggagggggcagaaatattggggatagaaaaaaaatctgatcattcctcagtgctacccatttctgtcctgtgtgggctgcttagctagacagcaggagaataaagtacaccgagaaccataatgaa

SEQ ID NO: 123027 - DNA, 2070 bp, Homo Sapiens
  misc_feature (101)..(114): n is a, c, g, or t
  misc_feature (126)..(136): n is a, c, g, or t
  misc_feature (172)..(232): n is a, c, g, or t
  misc_feature (238)..(317): n is a, c, g, or t
  misc_feature (332)..(351): n is a, c, g, or t
  misc_feature (357)..(374): n is a, c, g, or t
  misc_feature (382)..(505): n is a, c, g, or t
  misc_feature (1951)..(1985): n is a, c, g, or t
ccaaaggggccaaaaggggttttttccgccggggggattaagggtcttcaccccccctttgggaggggttcccccctcgcgcgaaaagtttaataaaattnnnnnnnnnnnnnnaaaaaggccacnnnnnnnnnnntaatttaatttgagagccccctggggcccccttttnnnnnnnnnnnnnnnnnnnnnnnnnnnnnnnnnnnnnnnnnnnnnnnnnnnnnnnnnnnnngggggnnnnnnnnnnnnnnnnnnnnnnnnnnnnnnnnnnnnnnnnnnnnnnnnnnnnnnnnnnnnnnnnnnnnnnnnnnnnnnnngggggcccgggcccnnnnnnnnnnnnnnnnnnnntttttnnnnnnnnnnnnnnnnnncaaagggnnnnnnnnnnnnnnnnnnnnnnnnnnnnnnnnnnnnnnnnnnnnnnnnnnnnnnnnnnnnnnnnnnnnnnnnnnnnnnnnnnnnnnnnnnnnnnnnnnnnnnnnnnnnnnnnnnnnnnnnnnnncacatcttccttccttttattgaaaaaaattttagaaaatggcagttaataaaaggcacaaacaaatcaacagggatatactagtggaaaacacaatataaaactaaaatgccattggcttctttaattggttaaaagcaaaaatgtaacaggcagaaagtctgtttcaaacaaattaaaaagctatgtgttttttaaattcttcccaaatcagatatatacacacccacaaaaatagtgtgtgaaggaaagctgtcatacacaagaagttgtatcctgaattcttcaaggaaacacatattgaaataggaattaagagtcagcaacagattaataattttttaaaattgagtcttaaaatgctacatggcccaaagctatactatataaagtactgctaggtacaaaagaaaaagtctgtacagcttttagcaaaactgctttcccagaaaagcaaattaaaataatgcaatcagcagatcaaggagactacagctagacatcagagctacaacttctcatatctgtgtcagaaaatcctatttacccagaatagactaaaatttcaggacaaaacagggactttttaacatttcttactttacccattttaagttctttttatctcccccaccccccaagccactaattcagcaagatccaggagaaagagggctacttttagaattggctactttatttttctttctatggcaagactgtcatggagcctggatatttcaggctcatatgcatccatgaccagtgtcccactgtggtcaaaaaacttagcaatggactttgtgaactcggcttcccgctgctgctttgttctcccactgatgaaggtcagcttcaaggtgtatttgtcatcaaaccttttaagactggaggacagctgccaaatatcatcaggatccattcctgtaggatctttcctgtgggccacgagaaagatgctcttctccttatatgaggtataaatggtcagaatccccatcatcacaaaataggatatgacacacaaagccaaaacgggtttggactctggaaaggggtgcatataatcccaaatcaaagccactatggcaaagaaacaggagattgtacagatggtgaggcgaccatcaattagaccaaaattctccacatatttgtatttttccagaagtacctttttggcagaatcatccaaagagtttttcacagctgatccatcccacttgtcaatttttacaggcttatcatctatcttccacttatccaacaagccgctacggccacttcctgtcccgcagttggaagcaccaccagccccactacagcctccgctaccaccgcttctcccgccctgtacagctgccgccgccatcttgtccgcctctgcgtctcccccccggccgtaatggccgaattcccgggcatatgtccggtaccgtcgactgnnnnnnnnnnnnnnnnnnnnnnnnnnnnnnnnnnncggccgcttcctcgaatcactgactcgctgcgctcgtcgttcggctatagcgagctagcgccctatatgagtctatacgaccttt

SEQ ID NO: 123028 - DNA, 1013 bp, Homo Sapiens
cgaaaaagaaggctacttagaatggctacttaattttccttcaaggccaagactgtcaggacgcctggaccctgtggtccaaaaactagccaatggactttgtggaactcgggctttcccgcttgctgctttgtttctccccactgatgaaagttcagcttcaaaggtgtatttggtcatcaaaccttttaagactgggaggacagctgccaaatatcatcaggatccattcctgtaggatcttttcctgtgggccacgagaaagatgctcttctccttatatgaggtataaatggtcagaatccccatcatcacaaaataggatatgacacacaaagccaaaacgggtttggactctggaaaggggtgcatataatcccaaatcaaagccactatggcaaagaaacaggagattgtacagatggtgaggcgaccatcaattagaccaaaattctccacatatttgtatttttccagaagtacctttttggcagaatcatccaaagagtttttcacagctgatccatcccacttgtcaatttttacaggcttatcatctatcttccaattaatggtgcacagatctgatggcttcctcacacagtggtgcttcagcagaaaagcctggtccaggatatgtccaggaaaggtcccacctgattttcccgccgagactctttctttccccttgaactcaaaagaagtcgccttcaggctttcccgacgttcagcttgtgctccaaccaaacccttgggcttcttcattgaggttacctttctgaaccactaaccagtgtccttggcctgcctccggcgtcgcttcagcctccgaggggtctgcggaggcgacgtcccagtcaggagggatgcgcgcctgcgagccccccggggatctcggagccgctccactgcggtgcctgccgctatcttccccacgccttagtaactgcgacgcgacggcagacagtgtaggccgcaaccgacggccgggacgtctaacctcaagtcccccc

SEQ ID NO: 123029 - DNA, 3648 bp, Homo Sapiens
  misc_feature (442)..(455): n is a, c, g, or t
  misc_feature (468)..(532): n is a, c, g, or t
  misc_feature (592)..(715): n is a, c, g, or t
caatagtggatgtttattttgtaattaaaaattattactggaaggaagatatgtactttggtggggtgcctgcatgggtgaacaagaacatgagagtgtccaagaaataaatggccaagtcaagaagctctcatagagatttatttagtgtgagaaatatgagaacaatagttgtaaagaacaaatcaataacccgcagtgtgcattttggaaaaccaaataacttcttcaaatttctgagtacacagagggtacctgccttgaaatttaaatgtctaaggaaaatgggagatgattaagagttggtgtggcctagtcacaccaaaatgtatttattacatcctgctcctttctagttgacaggaaagaaagctgctgtggggaaaggagggataaatactgaagggatttactaaacaaatgtccatcacagagttttccnnnnnnnnnnnnnngaaacaaagtctnnnnnnnnnnnnnnnnnnnnnnnnnnnnnnnnnnnnnnnnnnnnnnnnnnnnnnnnnnnnnnnnngttcaagcgattctcatgcctcaacctcctgagcagctgggactataggcgcatgctacnnnnnnnnnnnnnnnnnnnnnnnnnnnnnnnnnnnnnnnnnnnnnnnnnnnnnnnnnnnnnnnnnnnnnnnnnnnnnnnnnnnnnnnnnnnnnnnnnnnnnnnnnnnnnnnnnnnnnnnnnnnngtatgagccactccacccagcccagagttttcatttgttccttaaaataattaagctggaaaggcaaggacaattatgagcacaactgtagtcaagttgagaagacctcaaaaaagtcaagtttagaccttcggattttccatagaagagaaaaagatactaggttttagggtacagagagccagatctgaagagtagctgcagggggaaggtgctgttagaaggaggatatagacacattctctggggggaacatatggtgactgacccatgcacacaaagggggccttagcgaaactgcagaggactgatccttaaaccaatcacatctttgccaatctctgtcactgtggtgaccctgcagatttgacctttgaactcaggggaatagcaggccccactgagtggacacttttctactggctttccacggtagatgggccgatatgatgcagcacaaatgtcaaaggggttgtgcatgtcataattgagctggtaggcatctgtgggattcttctcacaggcagacaggatttttcgggtctgttgggccacctcaggcttgggcccgagttctagtaggcgccgagcaaaggtggcagctgtcttgaagttcttgagcttgaagaacagattgagggctgtacgcagcaccaggatcatgtgcacaggctgcaggtttgagtgggtgaaataggctgccatctcacagatgcgcttctgctgttctagagtctctttgggcagcttcttcctttctgtctccacggacaaacccacaatgtactcacggcaaatggtgatgagctgctgggcctctgcaatctcttgtttattgtccacaacaagaagtggcacactgagaaggatggaacggaatttttccacagcctcctcaaatttgccaactgtggtgagctggtagcacagctgcaaccgttggatgaggtcattaagcttcaggcccacagctggtacaccattcttcagccctgcatccttccagttgcgattaggatagccatacatggagggtaggcagggcagagcctgataggttgtgcggcctcgggcgtatgtctgtaggaacagttgcttgtaggggccaaactggattacccctacttggtcatgaaggagccgcatggctgtttcgaaagagcctgccaggatgtgatcaactggaagctgagagttattacaccagatctgagttggacttgttcccttggttgggggcacaaagaaaccatcttcagccccaccagctgccccaggggatatatccagctcaggagggagctccagatcttcttctacatcccagccacctccttcttcctgtcccttgccaagagcatcatcccccaaaccttctgtagcctccacaaacccatcttcatccaactgcagctctgcatcctctccccagccctctgtaccaacagtgtcaatgtcaatgtcagcagccagtgctcctcccttccctttgctggcaatggtgccttcaaaaaatcctttggatacagtcaataaaggccaattggtatccaatggcatgataggtgcaggtggctggagcagcttggcattagggtcaatgtctgggattgtctccttctctgggtcaaatgtctcctttaggctctcagcttcttcatctaagccatgggtagcagctgtgagataggccagggacttctgtccacagttcttcaggatccgcacacgctctgacacatcacccaggtatagggcattctgatagtggccactcatgtcctttctgatctcagcaatcttcatcatcttgcgaagtttttctaagttgccagtgataagatacaggaaggaaagtttgtcaaagtttttggtacgctgatagcacatttccacaatctggtggttcccctgcagcagggccacttctcccagcttttcccagcagttcttgtcatccagtgctttggctgcttccagagcaatctcaatgtttccacactccagtgccagactaaagcgagttttctcatccttgacaaaatgcagtgccacttcaggatagcccttcttctggagataagcaataatagactggccaactagtttggcattcctcaccatgtgcagtacctcatcatattttctgttgatcagggccagcttgaatttgaactcagtgggatcaatggtgagtacccggggacgacactccctgtctaggcagtatacattgttgcccttcacccgtgtgacatagatgggtaaatccagagttcgaatgatcccgtggtccccagtggtgacagcatatttgatgtggttgcttgtggtatagataaataccccactctcatcccaggccccactcttgacacgaatgttctcatgaatgttacataaagcatccagtttgcggttacagatcacaatggcgtgtttggctagtagtgctacatgtgacatgtctgctgaccagataacgtatttcactttagaaatcttcacagatgccagagtccgcttctgctgtacgtcaaagagtgtgatagagtccgcatctcgaagcaggagattgcctgtgccagcatagaagatctcatcacagttgggcacctgtacctttttggtgatctcattcttcagattcttgatcagaagcgaatgcatccgatctaggacagcaaaccgatttcgagcgacccaaacggctgtcaggcctgaggatcgtttcccttcaggcgcatcaggattctgggagtcagcatctttagggatggtgtacaggtcataggtactattctctagattgctagctcttgtacaaagcaggactgcattttctgctggattgtatgacatattgaatactggaaacttggaaccactccgcacggacgcgtgggtcgacgatatcccgggaattccggacc

SEQ ID NO: 123030 - DNA, 377 bp, Homo Sapiens
  misc_feature (266)..(300): n is a, c, g, or t
cagagccttcatttgttccttaaaataattaagctggaaaggcaaggacaattatgagcacaactgtagtcaagttgagaagacctcaaaaaagtcaagtttagaccttcggattttccatagaagagaaaaagatactaggttttagggtacagagagccagatctgaagagtagctgcagggggaaggtgctgttagaaggaggatatagacacccggccgtaatggccgaattcccgggcatatgtccggtaccgtcgactgnnnnnnnnnnnnnnnnnnnnnnnnnnnnnnnnnnncgccgcttcctcgctcactacttcgctgcgctcgtcgttcgtgcagacgagtagcgcctatagtgatttataatctt

SEQ ID NO: 123031 - DNA, 1687 bp, Homo Sapiens
  misc_feature (134)..(134): n is a, c, g, or t
  misc_feature (509)..(510): n is a, c, g, or t
  misc_feature (514)..(514): n is a, c, g, or t
  misc_feature (525)..(525): n is a, c, g, or t
  misc_feature (529)..(529): n is a, c, g, or t
  misc_feature (531)..(532): n is a, c, g, or t
  misc_feature (535)..(535): n is a, c, g, or t
  misc_feature (539)..(539): n is a, c, g, or t
  misc_feature (541)..(541): n is a, c, g, or t
  misc_feature (543)..(549): n is a, c, g, or t
  misc_feature (691)..(700): n is a, c, g, or t
  misc_feature (726)..(741): n is a, c, g, or t
  misc_feature (756)..(756): n is a, c, g, or t
  misc_feature (775)..(775): n is a, c, g, or t
  misc_feature (802)..(877): n is a, c, g, or t
  misc_feature (1626)..(1639): n is a, c, g, or t
ccctcgttccgacgcatcccgcaaccgtcccgcacgctgtgagagtcccgtacgtaaggcgcgcgcagctggtgcctctcacccgcgcctgtccagtgcgcacggcggtgcgcctacacgccgtgccgctcaancagaggcgcgccccgtggcgtcgatgtcgcagctgatctcatgctcatgagcactccatcggacggatgatcgtgtggcttccactcatccaatctcagtctcgtcaatcgcagcaaatacaaacccaccaacgtgcgaagcacgattggcgcccttcaggcaggactcagccgtcgccccggcgatataccagcccgggcggcgcgcgcagggccgtccgggccggctagagcgcggtcatggcagctcggctcctcggagatgccacggaccagcccgggcgtcatggagccgcgcgtgcgcgggggcgcgtcgaaggcgagcagccggcaagggcccgccgcgggcgcgccccccccgatcgcaccggcccnncgcngcggcggtccncccncnngcnccgncntnnnnnnnattgggttactccccggtaccaacccgacccctgttttcgaccgggtcccggggtttttttgggggggatccccgcccctttgtctttacccgggttttcttgggaacccagggttggccgcgttcccttttttttgggggnnnnnnnnnnaatcgaatatttttgaaaaatttttnnnnnnnnnnnnnnnncgacgaattttttgngttgggtggttagttatgngtaaaagtttgtggtggtttggtgtgnnnnnnnnnnnnnnnnnnnnnnnnnnnnnnnnnnnnnnnnnnnnnnnnnnnnnnnnnnnnnnnnnnnnnnnnnnnnctgctgtagacatttattgaatcatctgttgcaccaacagcacattgtatttcacagaagattggccacaggcaaaataaaataacccaccacaaatccgcttctgggggccttcttcagctccttagtcatccagtgttcactttggcaaacagaccagtttacagacttttgttgcaaatctaaggttccatttctctctgtagcattccggctagagagagacacgattgtactttggtagtttgtctaaggcggagttttcccacatgtaaacatttcactatacaagtgtgtgccagctgattgaagaactgacggcacccctacccctgaagagtgtacagtctaaacaggaggcgaacactgtcatccggacaggctgagaggaggcggggaaaggggctcgaaggagcctgggcagaccctgctggggaggggcctggactacaaccacctgctcccagaaatgacactgcctgaggcaggagacacagcaaaagccaactatgggaaatctgagcattagaggagactggcccctttctctaagacggcctcaggtaggaaaagggcagccattacaagaagaagagtcgtcaggtttggaaattgtatattaagcccttcactgaagtacacagtgtctgtgtgtgtctcaagctaagccatgctcctcaaacacccaaaaagaaaggaaaacagggagagaacagtcaccagatccaagaagcacatgatcggtgtcnnnnnnnnnnnnnngagctgtcgccagctgggtgcatccagctggggaagatgaactggtcc

SEQ ID NO: 123032 - DNA, 153 bp, Homo Sapiens
cttatgctgtagacatttattgaatcatctgttgcaccaacagcacattgtatttcacagaagattggccacaggcaaaataaaataacccaccacaaatccccttctgtcgtcttctcgcagccgtatagtagtagtaggcggccgctctag

SEQ ID NO: 123033 - DNA, 1339 bp, Homo Sapiens
  misc_feature (74)..(108): n is a, c, g, or t
  misc_feature (660)..(660): n is a, c, g, or t
  misc_feature (1246)..(1268): n is a, c, g, or t
gatgtataaatatatggggctacctccgtcgcagcgaacgacgagcgcaggagtagtgagcgaggaagcggcgnnnnnnnnnnnnnnnnnnnnnnnnnnnnnnnnnnncagtcgacggtacggacatatgcccgggaattcggccattacggccgggggtttaaaaaatagtactgtttaatgctaagtaaggcagcagtcattgtgtgtattcaggctttttaaataaaattagagctgtaaggaaaatgaaaagccacaaatgcaagactgttcttaaatggaaggcatagtcagcgagggtaaatcctataccactttaggaagtattaaaaatatttttaagatttgaaatatatttcatagaagtcctctattcaaaatcatattccacagatgttccccttcaaagggaaaacatttggggttctaaacagttatgaaagtaagtgatttttacatgattccagaataacacttgtattgaccaatttagacagataccagaccaattttgcatttaagaaatggttctgattatttacgtcaactcattagaattcagtgaaaagtaacagtcttttgtcacagagaatctgaaagtagcagcaaagacagagggctcatgacaggtttttgcttttgctttgcttttgtttntgaaagagtaaaagtactgatgcttctgatactggatgtttagcttcttactgcaaaaacataagtaaaacagtcaactttaccatttccgtattctccatagattgaagaaatttataccacatatcgcatatgaccatctttccatcaaatcaatgtagagataatgtaaactgaaaaaaaatctgcaagataatgtaactgaatgttttaaaaacagaacttgtcactttatataaaagaatagtatgctctatttcctgaatggatgtggaaatgaaagctagcgcacctgcactttgaattcttgcttcttttttattactgttatgattttgctttttacagatgttggacgattttttcttctgattgttgaattcataatcatggtctcatttcctttgcttctttggaatatttctttcaacacattcctttattttattatacattgtgtcctttttttagctattgctgctgttgttttttattctatttacaggatgatttttaaactgtcaaatgaagtagtgttaacctcaaataggctaaatgtgaacaaataaaatacagcaaatactcnnnnnnnnnnnnnnnnnnnnnnngcctacagccgcggccgcaagctttttccctttagtgaggttaatccggcatggcactggccgtcgttacc

SEQ ID NO: 123034 - DNA, 1061 bp, Homo Sapiens
  misc_feature (1061)..(1061): n is a, c, g, or t
atcaggacattctttattcagaagcatcaataacttaccaagtttcactgaagtataaaactcaacagaccatgaataggctaagtaaccacctgtgaatggaaacctcatgatacaagtccgtatatttaaaatactgtttatttgtgatttaacattaattagcattacatctaagagcaatatcagataacatttatacatttttccacaggacacagaggttcattggctcattctttatgccaaagcaagtaaatagaggcattagcaaaaggtgcaatagttcactgttatgtttaaaaaatatttatgcacattgcattcatttagatatatatatttttaaaaagttatggaaaagcatagttcacaggttactatttctacatacattgtaatacaacataaatgatgtagaacattaaaaaaatcttccaatagagagttaagcaactgaaagtttccaccaagagattaaaacactgattccagtagttagtgagatctagaatgacatttccaggctctggctcaactctgcattatcatatgcacacaaacagagccagctccaaaacacactgtaatcaatgtaattttttgcatgccaactcacccttaagaaacactttgagttatttttacccacgatcattctggatcattgattttgcatcgaactgtgacatcacttgggtgaaaggggaaacgcctatattaagcctaggtttaaatttgtatttacattaaaaagaaaggtcactgaaaagatttttttaaatctgtaaaaatcaagaagtggtagttttcttactggtgggattagacctgctgatttcttctagtgctgccctctaaagatacaaaaaattagaaagatttgacccttttaaaactcaaatatcaaccaagaaagacattgcttttggcagagaagcagaattttagaaatttgggacatgtttccaacaaatcacactttgtatcctatcgtgaatatgagtcaccccggccgtaatggccgaattcccgggcatatgtccggtaccgtcgactgn

SEQ ID NO: 123035 - DNA, 1014 bp, Homo Sapiens
ttttggtacaaaaggtgtctttattgaggtctgggttaaaattaggcacttggccagagcagcagcttaaatatgaggcaagcagtcaggggttagccatgcctggggctgggttggggtcatgaggctacaggcacagactgtccccaggtggacagaagttggagcaggaagaggaggaggaaggggccgcagagcagcctgggtcagaggcctggtgggccagcccagtgggactaggcaggaagctctgggtggcaggtccagcagggaggggaccaggatctcttgctccacgtgccccttagacccaggcctgagcctctggcaggggcagccgcacttggcagggcggtcttcccaagcctcacttcttcaccttggcatcgtaggtgcctgcattcttgtaggcgctcacgtagccactgtcgtccaggatgtcctgccgtcccgcaatgcccttgcccttgccgctctcatcgaagcgctccttgtgggagcccgtgtatctgctggtgtccgtcagccggtctacagcaccccctgtttttgctttagtgacgcccacattggctggctctttgcctgccaccagctggcagatggcatcgaaggcctcctccttgctcttccccttgaatctcttggtcgccagctcttccagggccttcttgaactcctcatagttgatgacccgagcagacttccccttgactttggagaagacgatgtccacatcggtccctgtcacggactttccgtcagccaccttgcagtccttgcacagcttggcccagttcttgccattcatctcttgcccactggccttggggtcaccatggatggcaaacttgcggaagctctcctccagcccagccatgtctgtgctcgctgccatgccaccctcgcggctgctcctgaagtgtgcgttcggaaggacagaacgacgcaggaatggaccgatggacgcgggagaccaggcggctccgcagctccgctccctgccggctcccg

SEQ ID NO: 123036 - DNA, 828 bp, Homo Sapiens
tttaattttaaagaaggtatatttatttaacaaacatgtatgaactattcattaacaatccaggactgtggaggacaggggacagaaacaagcctcgaagagatcacaatatggtggagtgcatgcatggcacacctggctatctgaatcagacgtttgcctctgtgtgtgtgatgaagacagtagtgagtggaatggacagagagtaactgtaaattctgtagggaggaaaacgaacgtttactcattctctaacagtcttttgctttactatggtcatatacaacagttaatctcccatcctcagttcccagatacccaccagaaaaccggtaattaacctctggataaactttcactgattacagatgaggagcgaggcaaccttaagccataaacaatattcctacagtatgggggagccgcaatcatctgaatgccagttttcagagccagcctgtgaacgtttcatctgagggatgttttcccgatgatcatcttatcattatcgcatcttaaaagctggagaagccctaaaagccggtttggcacaaatgtcaactcaagggaggaatgccctctgtaacactcctggcagctacaggctttccacagcagcggaatgtatttttaaccaacaaaaagtattagaaacagcttcctcgtactgaactaaatcctcctcatattttccaaccgtttctctaatggaatttaattgtttccatttggtttctgaagcaatacagaattagcctattctctctcccatttccttcaagaatttgaaaacaattatcatctgtatttctgaattatctccagacc

SEQ ID NO: 123037 - DNA, 812 bp, Homo Sapiens
  misc_feature (90)..(103): n is a, c, g, or t
acaggaagcagctcagcactctgcactgcaacaggccaccttaatagctaaccagcatcactcaactgctacgcagccgggcctggtgcnnnnnnnnnnnnnngagattagacctgtgtttgctaaaaccccagtcctttcacatgaaaaatctttatacaaatttgggtcacactaccttttagacctggaggtaaataaaattatccatattaatttacaccaccttttgtaggtttttaaggaatgaaggcaatgttgaagcaatgtcttgccagcgttaggctgtgtgtaatggctgcacacgtttccttaaaagtcaggaggccacaaattaggttaccaatctgttcatttcaaaccaaaacagtcatcactatagaaataaaaataaatttttgcctcaaatatccaaacccaataacgtaatcttaggtcgttcacctcctaagttacaataaaatgtgaataacaacaaaacggcacatagaatgaattttgccacctgatgcaaagcttcaaactggcaaaaaggtagaaaagtgtgacacaaccttttcaataggcagcctcttcttccagggacgttgcttccatagactgagtatgtgatccttttcccccaagtcctccatcacgttgcttcctgatgcatcattttcttaagaggacatctgtccttcctcttcaggagacttggggggcctcttggatcgcgaccttgacttggatttcctcttggatacccggggaggactcctggtcatagatgaagacctggaccgcgagcgagacctgggagaccgaggagg

SEQ ID NO: 123038 - DNA, 1151 bp, Homo Sapiens
  misc_feature (1044)..(1078): n is a, c, g, or t
tttctgagaaaagctaacaccaagaaaatgttttaattaaactacagaaacaatggttataatacagaatattcataagcaaaaagatacaccatgttataagtacttacaaagttacaaccatttgcttccttaacattttccatgttaagttcatacatgtagatatgatcagatttaccatttttagggggaagagggaaaaaaaggtgtatttatcatcagctagatgtgctcactgtatgctccgttatttatatgcaaggcccgggtgactggaagtgcagttgtcaggcattttaataaactggacagccatttgtttctgcacgacaaggcatctttacacaggagcaatcgggagaaaacaggaaacagccaagcactctgcactgcaacacgccaccttaacagctaaccagcattactcaactgctacacaactgcgcctagtgcacaaaaatacataagagaagagattagaattgtgtttgataaacaatcctttcaaaaaatcaagtcttttcacctgaaaagtctttatacaaatttgggttcagattaccatttagatctgaaggtaaataacatatacaaatttacaccaacttttgtaggtttttaattttaaggaatgaaggcaatgccgagtcaatctcttgacagctttaggctgtgtgtaatggctgcacacgttttccttaaaagtcaggaggccacaaattaggttaccaatctgtttaatttcaaacaaaaaaagtcagcactatataacaaaatgaaattttacctcaaatatccaaatccaataatgaaatctgaagtcgttcacctcactaaattacaagaaatttgaataacagcaacaaaatggcacataaaatgaagtttgccaactgaggcaaagcttaaacaagtaaaaagttagacaaatgttacaaaataaccttttcaatagccagttgcttgttccaaggactcttcttcgatggacccggccgtaatggccgaattcccgggcatatgtccggtaccgtcgactgnnnnnnnnnnnnnnnnnnnnnnnnnnnnnnnnnnncgccgcttcctcgctcatatactcgctgcgctcgtcgttcgctaataagagtagcgccctatatgattataca

SEQ ID NO: 123039 - DNA, 1758 bp, Homo Sapiens
ttcaacactaatatgtcggttacctttagggagacggaaataggtgtttatcatcgctagagtgctcctgtatgctccgtattatatgcaggcccggtgactggaagcgcagttgtcagggcatttaataactggacagcccattgtttctgcacgacaaggcatcttttacaccaggagccatcgggatgaaacaggaccagcccagcactttgcactgcaacacgccaccttagcagcttaaccagccattactcaactgctacacaactgcgcttagtgcccaaaaatccataagagaagagatttagaatgtgtgtttgataaacaatcctgttcaaaaaaatcaagtcttttcacctgaaaagtctttatacaaatttggtttcagattaccatttagatctgaaggtaaataacatatacaaatttacaccaacttttgtaggtttttaattttaaggaatgaaggcaatgccgagtcaatctcttgacagctttaggctgtgtgtaatggctgcacacgttttccttaaaagtcaggaggccacaaattaggttaccaatctgtttaatttcaaacaaaaaaagtcagcactatataacaaaatgaaattttacctcaaatatccaaatccaataatgaaatctgaagtcgttcacctcactaaattacaagaaatttgaataacagcaacaaaatggcacataaaatgaagtttgccaactgaggcaaagcttaaacaagtaaaaagttagacaaatgttacaaaataaccttttcaatagccagttgcttgttccaaggactcttcttcgatggactatgtggtcctttttccccaagtcctccgtttacactgcttgccgatacatcattttcttaagaggacaccgctccttcctcttcaggagacttggggggactcttcgatcgcgacctggatttggattccctcttggacactgggggaggactcctggaccgagaccgggacctggaccgcgaacgagatctggagaccgacgaggacttggacttggaccttcgtgcggatctggacttggaggtcgaccgagatcgagaacgagtgcgggaccgagacttcgagcggctgtagcgagatcggctgcgagacctggaacggctccgactccgggatcggctgcggcgacgccgcctagggctgcggctccggcgtccgtagccaccgcccccgtacctgcggggtggcggtccccggcggctgtggtgtgagtccggggggcggccgtagcgcgccatttgcacccgcagctcgcggccgtccagcacggccccgtccatggcatccatagcgtcctcagcgtcgcgcttgtcgtgaaagcgaacgaaggcgaagccgcgggactccttggtgtagcgatcccgcgggatgtacacgtcgccgacgcgcccgtacttctcgaagacgcgcctcagcgtgtcgggcgaggtgcggtaggtcaggttgtccaccttgagggaggtcataccctccacatcgggaggggggcggccgtagctcatagctctgagtggcggcccggagccccgcgaactggcgccggcttcctcagctctgggcggtgcgacgccgcgcctctcaggcagttgccttccgcgtggggacactgggaaaggccttgccgcagaacagcacggacgggctccgcaggctagcgcacgtgagcctcgtgccgaattcatcacccagggctcgtacctagccgatagtt

SEQ ID NO: 123040 - DNA, 1169 bp, Homo Sapiens
  misc_feature (78)..(78): n is a, c, g, or t
  misc_feature (103)..(103): n is a, c, g, or t
caaagccatttttgccaattgcaaaacaggccacccttaaccaggtaaagcaggcatttcttcaactggtaacacaanttgcgccttagtgccccaaaaaatncattagagaaggagattagaattgtgtttgataaacaatcctttcaaaaaatcaagtcttttcacctgaaaagtctttatacaaatttgggttcagattaccatttagatctgaaggtaaataacatatacaaatttacaccaacttttgtaggtttttaattttaaggaatgaaggcaatgccgagtcaatctcttgacagctttaggctgtgtgtaatggctgcacacgttttccttaaaagtcaggaggccacaaattaggttaccaatctgtttaatttcaaacaaaaaaagtcagcactatataacaaaatgaaattttacctcaaatatccaaatccaataatgaaatctgaagtcgttcacctcactaaattacaagaaatttgaataacagcaacaaaatggcacataaaatgaagtttgccaactgaggcaaagcttaaacaagtaaaaagttagacaaatgttacaaaataaccttttcaatagccagttgcttgttccaaggactcttcttcgatggactatgtggtcctttttccccaagtcctccgtttacactgcttgccgatacatctgctccaatacacgcccacagaaactggtccctggaggatcagccaaatcagttaaaatctgcaatactggccaatattcttttatcaaacaggagaccgcagcattttcttaagaggacaccgctccttcctcttcaggagacttggggggactcttcgatcgcgagctggatttggattccctcttggacactgggggaggactcctggaccgagaccgggacctggaccgcgaacgagatctggagaccgacgaggacttggacttggaccttcgtgcggatctggacttggaggtcgaccgagatcgagaacgagtgcgggaccgagacttcgagcggctgtagcgagatcggctgcgagacctggaacggctccgactccgggatcggctgcggcgacgccggctagggctgcggctccggcgtccgtagccaccgcccccgtacctgcggggtggcggtccccggcggctgtggtgtg

SEQ ID NO: 123041 - DNA, 568 bp, Homo Sapiens
cttccccttacctttcttcaccttggttatttggccaggaatacgtaaattcaaacttgtacatgctgatggtagcctttgtgaaattttcctaattgggccttttaaaaacatggctgggtggaacatttctgtaccctactggtttgaccagagccttagtaagtacgtgcctgaaactgaaaccatgtgcactttaatggaaggtaagctgaacttctttcttttcaaacctagatgtatcggcaagcagtgtaaacggaggacttggggaaaaaggaccacatagtccatcgaagaagagtccttggaacaagcaactggctattgaaaaggttattttgtaacatttgtctaactttttacttgtttaagctttgcctcagttggcaaacttcattttatgtgccattttgttgctgttattcaaatttcttgtaatttagtgaggtgaacgacttcagatttcattattggatttggatatttgaggtaaaatttcattttgttatatagtgctgactttttttgtttgaaattaaacagattgggaggactcatgaatgtt

SEQ ID NO: 123042 - DNA, 531 bp, Homo Sapiens
tttccatcaaaagtttctaattttattctgagaaaagataacaccaagaaaacaattttaactacagaaacaatggttagcgtaaaaaattaataatcaaaaagataaaccatgttataagtacttaacaaacttataaactatttcttccataacattctccatattttaagttcatacatgttgatatgatcagatttacaatttttcagaaaagacgggggaaaaggtgtgattatccgtcagctagatgtgctcactgcatgctccattatttatctgcaaggcctgggtgactggaagtgcagttgacaggcattttaataaactggacagccatttgttcttcaggacaaggcgtgttttccccaggagcaatcagaagaaaacaggaagcagctcagcactctgcactgcaacaggccaccttaatagctaaccagcatcactcaactgctacgcagccgggcctggtgcacaaaaacacaaaagagattagacctgtgtttgctaaaaccccagtcctttcac

SEQ ID NO: 123043 - DNA, 191 bp, Homo Sapiens
ccggacctgaaggctgctattgaaaaggtgtgtcacacttttctacctttttgccagtttgaagctttgcatcaggtggcaaaattcattctatgtgccgttttgttgttattcacattttattgtaacttaggaggtgaacgacctaacgttacaataaaatgtgaattacaactgaaatgaaccatagt

SEQ ID NO: 123044 - DNA, 561 bp, Homo Sapiens
ctcgatctcggtcgacctccaagtccagatccgcacgaagttccaagtccaagtcctcgtcggtctccagatctcgttcgcggtccaggtcccggtctcggtccaggagtcctcccccagtgtccaagagggaatccaaattcaggtcgcgatcgaagagttcccccaagtctcctgaagaggaaggagcgcgtgtcctcttaagaaaatggtaatgtctgggaatccgagacacataaccctaattcataaatgggatttggggtaggtctttttgagtcgtgttaatgtaagaatgactcctatcattaggagtgctgctcggaggttactcacctttgggaagtaatactgaagagaggggtttgcagaaaggatgtgtatgaagcttagataataatggctgtttcgtaaactgtttgagacctattaatgaaaatgactatttcttgctgtctttatccaacgtctgcattttccccctttaaagctgcggtctcctgtttgataaaagaatattggccagtattgcagattttaactgatgctgaccctaccagg

SEQ ID NO: 123045 - DNA, 1235 bp, Homo Sapiens
agcttttagaaaacaatttttatttaaaaaatcataaaaagtactggaatgaaaatacaggtaaagcatttgaaaattatttttctggcttagactgtttactggctcgattctagctctgtcctggtaaaggcctccagaaccttcacctactattatcaagtctggcctcatagggagggacttttactgtactgaaaggaagccagctgaagccgagatctgaagcgctcagcttccagttcccggaagaaaacatcatcatcattctgtgttatcatgtcctgcagctgctgaatttccttctccatcttagatctcagctccctcttcaccttatgtaatgtctgggcctgagatttctctctggctttaagttcttgatgttcctgtgatatggcttctgccagcaatgaaaactggtccttatagtagttctccatggagtccagttcatcctggtggcgtctcctttgttcatctcgcttttctttggcatagtttcttaggtctcgtaatctttgcttttgaatgtttaaaccttcttcaaacagtttcttaaatatcatttcttcccgggtcctcattctcatcatttttgcacacaactgaactctataatcatcataatattttcgagcacgaacgatttgctgtcgattttcttttatctttgattgggtcaacctttgcctacgaatgcagtccttgaagtcttgcagtctcttgttatgttcatattctttcttgacaagggtagtaaggaggtcatgccttcttagggcttcttctatttcatcttggagtttcttctttgatcgattttctctacatgcttctttcttaagctgttcaacctgtgcaatttgctgtttccacattttgcttagtgttgggccagaaacataaagaaacggaaactgctccagcataaggggcaggagactgtgttcacttactttcattggaactgctttatttggctttgggaggacacctcttagactctgcgttgtggtttttctagagtaaatcttccagggctgactacattctggagttcctttacgaacagcttctcctctgtatattttttctgtttcctcctccttctcatgtattcttagaggtccaatattctcttgaactttaagtcttcttagttccctttcacatgcttcagtaaacgcctgtgcttggaattggcagacatctgtttctcttggcttgcgctg

SEQ ID NO: 123046 - DNA, 1486 bp, Homo Sapiens
  misc_feature (66)..(66): n is a, c, g, or t
  misc_feature (74)..(74): n is a, c, g, or t
  misc_feature (78)..(78): n is a, c, g, or t
  misc_feature (96)..(96): n is a, c, g, or t
taacctgaattttgtcttccttcttgaatgggctttcttaaaaagtttcaggcttccccaccttcntgggcccnttantgataagttttcttttangggccatttcccagctctgttcccttttgtgcccagctgtgtattaaaactccctcatccagctggttttaatgtggaattgtgcttcagttcaagatcttcctgcctcctgtttgatttctcttttccctttcttgatcatattctttctttagtatttccaattcttgctgatgctcctttctcaacattcgaaggtctttctgcaatctaacaatctccttgcccagtttctgtttctcccgttctgccccggctaatttaaactccagatcactgtgctgggcttccatgttactaagcaatttgggttggaccaaatgtgatttggacttttcttcagtgttttcttccaaaagttctgtgggtttatttcttccatccatctgttgtaaagcctgtaatttttcatattttgaggtcaactcttccatttcaactctatgtacttctttctgtcttactaagcaggaatccagctcttttatcttttgctccaaaatctgacaggttagttccttctcctggagggttttctggacgtcgtcaaacacattttccaagttttgctttgcctgtatgttatttttacctccttctttttccacatgctgggctactatcaaggaatatttcttgtttttttcttcaagctcctcttgaagatgacctatcttactttgatcttcatgttgctttgcctcagcatgttctagctttattaagcgctcctggtattggcatcgcatttcaaaatgagaagaaactgtctcttctttttcctgccctaccctctgcaatagcttttctttttcagttaagtttctttgtaaaacactgattttttcttcatatgtcttctgcacacagccttgggaatctgcttcttcttgttcagtatatgctgccacattttttgctgatctgggtacaattaatgtttctgactgtgaactttccactgacttaagtttttcttccaagatgtgaacttccctttctctttcctgcaattttgtatttagctcactcaaatggctttctgtaccttttttatactgttcttctttctcttccatttgagataacaactgcttcttaatggcagcaattttttgttcagcttttctcttcaactctgctaattttgcagcactttctgactcaagcctatcttccaatgcctttaactcctcctctttgcttttcacacttaaattcacatgttctaattctttcttcttagtttcaagttcagctttcatggaataaacttggttttcaagtgttaagattttttcttcagcttctttaaccctgttgtccttttcttctcctaactcttgaaaatgttgaagtttctgaaccaattctttgtgttccctcgtgc

SEQ ID NO: 123047 - DNA, 578 bp, Homo Sapiens
ctttaaagcagttttttctcagcacgcaatggttcaaataaactctctgagacactttgttggtacagattttaaattacaagcttgatttgataccctcaaatacagttcttaaggaagattagttacaaatagttgtcagtactttcaaatgacagaaaaaattacattttagtaaaactggatgaatttttcatgtgtgaaataacaatcctttcaccaccaggtggaattactccagttcatgcaatagataactatgacatttttaaaaactgccctaatttttctagttgcgatttcatgcctattgtaagtcaaaacatcgttatgttcccgagctcacctcaccctccctgggaagtggcgaggacacccatggtttctctgagacaccactgggcccctgcttagcaagctattgtctcagtgctttcctcttgctgcgaaggtccccaggagatgttgggttcagaggaagtggctctggttgcctatgggcaaatactacaccagaggttacacaggatagagacccaagaggtgaacaggagggaagttttaacttattttgacat

SEQ ID NO: 123048 - DNA, 601 bp, Homo Sapiens
  misc_feature (452)..(526): n is a, c, g, or t
gggattttcaaaattgtattaggtatcactacataaagtaaaaactcttaagttagagtgcaaaatgaaagcgccttattgttttaaaggtgcaaaagcaaaatatcacaaacattttcaatagaaaactgatttataaatccatttacagaagatcaaaaaaatcaatgtttagtaccaactttaactataaataactaagaaggaaaaaactgtccttcatccttctgtttctgtttcaacgtctatgtcttctgctccttgccttttggagaaaatattgcgttgtaaggctgacgtctttttggacgaggacaaggatcaagatcttccttaatataaccttaaaaacaaatcataaacttagaagactgtatgtgcaacatgcatttctttcagcttatatctagtaaacatttctcttatttgatgctttgtaagtttacatgatnnnnnnnnnnnnnnnnnnnnnnnnnnnnnnnnnnnnnnnnnnnnnnnnnnnnnnnnnnnnnnnnnnnnnnnnnnnacagcaaatatttaccaaatggttacatatatcatctcatataactcacattcctttgaagtactttctactata

SEQ ID NO: 123049 - DNA, 654 bp, Homo Sapiens
  misc_feature (608)..(608): n is a, c, g, or t
cacagactacaactattgtattttcaaaattgtattaggtatcactacataaagtaaaaactcttaagttagagtgcaaaatgaaagcgccttattgttttaaaggtgcaaaagcaaaatatcacaaacattttcaatagaaaactgatttataaatccatttacagaagatcaaaaaaatcaatgtttagtaccaactttaactataaataactaagaaggaaaaaactgtccttcatccttctgtttctgtttcaacgtctatgtcttctgctccttgccttttggagaaaatattgcgttgtaaggctgacgtctttttggacgaggacaaggatcaagatcttccttaatataacctctttccatacaagtctgagtggaaggaaaaccaacttcccaaaaattctctggtgtgttgggtggaatgtagcggaatcggtgtcttgagcaggaagccaatttcttttctctttcttctgctggcatatctgcataataaatttcacattccttacacgtgtgcccaagcagttttcttctctcctcttttttccgaaccacctcaatatgaggaaaattttgcaagctagtctctctttcatcanccttaaaatacggctccacaaacgctttctgcttgactttgtcttg

SEQ ID NO: 123050 - DNA, 1065 bp, Homo Sapiens
  misc_feature (42)..(64): n is a, c, g, or t
  misc_feature (871)..(871): n is a, c, g, or t
  misc_feature (892)..(892): n is a, c, g, or t
  misc_feature (900)..(900): n is a, c, g, or t
  misc_feature (905)..(905): n is a, c, g, or t
  misc_feature (910)..(911): n is a, c, g, or t
  misc_feature (924)..(926): n is a, c, g, or t
  misc_feature (931)..(993): n is a, c, g, or t
  misc_feature (1032)..(1032): n is a, c, g, or t
ccctcactaaagggaataagcttgcggccgcggctgtagacnnnnnnnnnnnnnnnnnnnnnnnagtgggtaaaaccatttttattaactgaccaaagcacatcattttgttttctgatttgaggtaaaatcataaaacacagttcacaagaaaatacaatgactatttaaccacaattacaagtttgaaatctcactaggtgttcatatacttttacaaattcatacaactgtatagtctacttaagcttagtgttaaccaaaagagcaatatcaaagacctagacacttgactactacttttgcagtgggtatagttttataacaacagaataactgttaccttatgaatatactttactttaaaaaccacttgactagcgactgtactgtttcctcgtggttcaggggtgtgcatgaaggctcttaggagagcaaacacctgttcctattctgtatgtccctccctcatttcaaatgagagtaaccaattgagtaaaataaccaaataaccattgccccaccatgaacatggggcttgggaagacagtcctacaatcttcatcatatatttaggtttttaggccagccagctctttttttccaaagctttcttttgaatgttcagatcctattttaatcctaactatagactactgtgtttgtgagggtgtctgagtgtctatgtgagggcaaggacaacagtgcagtccagaaacacagaaaatatgcttttttgcagctgagctctgttttgagatttcattttgttactggacagcgcttaatccataccaaagtctttggaacactgcagatttgctttagaggtagataaaacagaaatcatgcagttaagtcaattgagaanaaaaagggattttgtgtcttnacagaccntcgtngcganntctggctcgaggnnncaatnnnnnnnnnnnnnnnnnnnnnnnnnnnnnnnnnnnnnnnnnnnnnnnnnnnnnnnnnnnnnnncacattccacacacatacgagccggagcataagtgtaangcctgggtgcctatgagtgagctactcaaatta

SEQ ID NO: 123051 - DNA, 1656 bp, Homo Sapiens
  misc_feature (57)..(57): n is a, c, g, or t
  misc_feature (201)..(201): n is a, c, g, or t
  misc_feature (517)..(525): n is a, c, g, or t
gaaaaacccccttggactaggcgaccggtactgtttccctcggtgtttcaggggtgntgcatgaagggtcttaggaggagcaaaccaccggtccttattcggtaggtccctccctcatttcaaatgagagtaccccaattgagtaaaataaccaaataaccattgcccccaccatgaacatggggcttggaaagacagtcntacaatcttcatcatatatttaggtttttaggccagccagctctttttttccaaagctttcttttgaatgttcagatcctattttaatcctaactatagactactgtgtttgtgagggtgtctgagtgtctatgtgagggcaaggacaacagtgcagtccagaaacacagaaaatatgcttttttgcagctgagctctgttttgagatttcattttgttactggacagcgcttaatccataccaaagtctttggaacactgcagatttgctttagaggtagataaaacagaaatcatgcagttaagtcaattgagnnnnnnnnngggatttgttgtctttacagaacatcatgacttaaagttgatcctttgctcttggtgcacatttaagatttttacctgttttgggaaatacccaagtcttccttgtctctcaggaaaaacacatttaaattcatcctgtactaactacagatagaagaaaaacagtattaacatgtgtattacagcactgcagttcactttctggatttgtgacacacaaacacatcatgcattctaagaagttaattttattagtgtcactagtgatgttaattaaaaaacttatagcaagtgctcaaaactttctaaatattgtaatcactatgttttaaagacagagtggactgttacaaatgattttgcaaaatacacaaatagatatacttccactgaatgctttaatcatttttccgggcactctcatcttttggttcttcctcatctgagtacacagtgggctcctccccctccttcagcagtttgcccacgtgatgatacttgaaagtgaactgagactcccagtcactcagagtctcctgctgggcagcagtgaggtcagaaaggtcatcgtactcatccttcagtgcttccttatccaggcaaaaatgtggcaaggcccctggatgcatctcttccagcaaagaccccatacggcccctcgggcccgtagaatttgcggcctttggtcacatcgaacaccttgccgttgatggccatgagtatgcgcgggtcctggacgccgtcgaagcgccgcagctcggcgggggtgaagtcgcgccgcttgaggcggggcagagggggcggctcgtcgtcgtcgctgtcgccgctggccgccggctggtccccgcgcacgatcttgtagagcaggaagatgcagaggccaagcagcagcaggttgagcggcgacgtgaaaatctcatgcagcagcccgccgctctccagatcgcttgggtcggcgccagtcgccaccacatcctcggcagccatgatctctggagtaaagagttgggccgcgctaggcagggatccggaactcagccactttccgagcgcgtgggtcgacgatatcccgggaattccggacctgtaccagcctgctttcttaaccactggtctatattcatagtgcgt

SEQ ID NO: 123052 - DNA, 865 bp, Homo Sapiens
  misc_feature (458)..(471): n is a, c, g, or t
  misc_feature (747)..(747): n is a, c, g, or t
gcccatctcacctaaccttcaaaatagttaaaacaaaaacaaacccaaactagctatatataacaagaatctttcaattcccaaactattgaaagaccctaagtcagccaatctatgaaattatacaagatgaaggtgaaaaagctgtgcttttttttaaaccattaaacccagttcttttctcttaaagttgtaagaaaatggaaaatctgtttttaaatcatgcaaagatttaaataagcatttttctatctgctctaagaaactgtttcttatcttacaattttaaatattcataacactcaaactacttttttgtggccatttatgtttttgacactagattgtatggtattatttagccaagatgtattataatgctaaattatgtataaaatatgatttctggaatttgtccatcttctattgaagtgccattattattgccaggggaactnnnnnnnnnnnnnncagtcttgcttgcagcaggtgtctcatgcactactttcttcaatccttttgtgccatagtgggaatctggacctttgagtgttgcacatgctgtgtagcacacattgggcaggatctctatgggttccttgaacatgaccctgaatgtgttagctgtcccatcacaactaaagccggtatcattctgtcccagggtttgctttttctcatattcaatgatctgtatattcacttgataatctgtagggccatgaatagatccatacaagccaaatncaactatagagatccttctattaactgtgaatctgattcgatcactcgtcccactgtaacccccagcgctttctactttgctggatctattgatgcagcattcctttcccctgagaca

SEQ ID NO: 123053 - DNA, 1671 bp, Homo Sapiens
  misc_feature (45)..(76): n is a, c, g, or t
aaccctcaactaaagggaataagcttgcggccgcatacgcggtcnnnnnnnnnnnnnnnnnnnnnnnnnnnnnnnnttatttatttttaaaaactccaggggatgtcccaaagttagtaaacagttctgtttcttgtcccttttatggctgcatgcagtttcaattgttcagtacaacagatgaggcatttaaaaggtctccaacgtcaagaaacactaactcatctctggcatatcatattttttaaggcagaagtattttctgtaatggttactacagagtgtttactggttaatttttagttaaccagaaccacacatcccatagataattccatttaactgaggtttatatccgtaagagcattaccatagaaaaatttccctttagcaatttcaagagacctcagccaccaatatacctaccttctttacaatataaagtgaaatattactttagatgaaaattttttgtatcttacttagaaaaaattaagttgatatttaaaagaattttgatttttaatcaccttccacaacgatttgatataccttaaactccactttcattttttataagagaatcactttcaagggaaaaaaatggatgttactatattttaaaatctgctttataaaaaagtgtataaatgtcaatctgccagatatacttcctatccccaacacagctgtaacactgactaatggggtcatgaccatgaagcaattttacttcctaaatagaaatgtgtaggtggcagaaagcgtatttttcagcaggagtgattctgttggatctctttacaatgtcagagcagttgttagaaatgttagtattttattcggtttcttgctgtgaaggattatcacaatgttgaagtgatggctgttcacccagtcgtcatcaccgtcatcatctcaatcttgggaatcatcagcagtgtcccccacacagagagacaggtatagtggtgcagtttagtgacagggaatccagtcttagatcctgtttatatcacatttttgtgaatttacacaaaattccatttatagctttaaaactgtactacataacacattactatactactacaaaatatccttctctataaatgcactgaatattttcttgggcattttattaggccttttttagcattattacaaatgctaacaacaagatacttcaaaccaccaaatataaagtcagcttcttaattttctgaaatttagttatttgagttaataagaattctgtaggaatactgacccatctcttttcatccaaccttcaaaatagttaagcctatttgcccatctcacctaaccttcaaaatagttaaaacaaaaacaaacccaaactagctatatataacaagaatctttcaattcccaaactattgaaagaccctaagtcagccaatctatgaaattatacaagatgaaggtgaaaaagctgtgcttttttttaaaccattaaacccagttcttttctcttaaagttgtaagaaaatggaaaatctgtttttaaatcatgcaaagatttaaataagcatttttctatctgctataagaaacagtttcttatcttacaattttaaatattcataacactcaaactacttttttgtgcggacgcgtgggtcgacgatatcccgggaattccggacc

SEQ ID NO: 123054 - DNA, 465 bp, Homo Sapiens
taagggctttatattattttctatagtttgctttatttggtttaacttaaatgtaacttgtctcttaaaaattacagatcattgaatatgagaaaaagcaaaccctgggacagaatgataccggctttatttgtgatgggacagctaacacattcagggtcatgttcaaggaacccatagagatcctgcccaatgtgtgctacacagcatgtgcaacactcaaagtaagagtcatgcactatgttccagatggtttcctcttgaatgttgcagaatgtgtgttttagaagctgagagtcactgacagctgagccatttataaagaggggggaaaagaagctgggagctaaaatattccactgccttccgaaaagaagtacttctccccacagctctgttctgaaagaaatagctcttcttaagaagtagccctttgtttcagtaagcagttgaatgtttggcaga

SEQ ID NO: 123055 - DNA, 1200 bp, Homo Sapiens
  misc_feature (370)..(389): n is a, c, g, or t
atttgtttgggagattcccagctagtttcagacttggtctgtgaaggaggcacactattttgcttggtatttgacttggatttatctgtctcttgtagtattggcggcacttgggaagagctcttgtcagaatcactttttgataagattacagatggctcggtagaagtagcaggtggaagagtcttgataggctggctatttttgacgagtacttcggctggatcactagtgcttatggtcttcaaggaaaaagctttttcctgttttggacgggttttagaggtattcactggaaggtcttctctaatctctttttctaattcttctgtgtcctgtgcagtagagttatcttcaccttgcttcttcnnnnnnnnnnnnnnnnnnnnggatttcccagttggaagagctccctctcccttttctttatcatcatctgagaccttttgatcatcaggaattggttcctgggactttagaagtgaagctctttcttcgtctacccaattgccccactcttctgctggtgcattccaatcagagttgggatcagcagaagacagaccatttaacccagaccattcatcatcgatatagggttgattacggctaacatcccactgataatcagaagtggtagactgagaaactggctcagcagtagacccaatgccagaaaatattgaacggtcactccaactccttccccagtcttttccatttgtattagcatctccagtgtcttgactccaggcagatggctcagttttcctctttcctgcagaagcaggtgaaacggagttccacttctcctcacctgcactgatctgtgaggagagttttacagacttttcattccagcctcctccattgacagtgaggttttcattcaatcctgaagaaacctgaagtgtagaatctccttttccagatttaaagttgctaacttgaacatttagatgagaatcacctttattcttcttggaaccaacaggaaatgatgcggttgtaagttgctcggtggtaactgtgatggtattttctatcccagggatagttgaatccaatgagccagaatcagtcagcacccttatcacgtttacgcctgctgtcgtttctctctgtgactaatattaagtgcccagggctccttcatcaagttcctttccacattgaggttcaggggaaccgagctcgaat

SEQ ID NO: 123056 - DNA, 1041 bp, Homo Sapiens
  misc_feature (952)..(952): n is a, c, g, or t
  misc_feature (959)..(959): n is a, c, g, or t
  misc_feature (969)..(969): n is a, c, g, or t
ttttttttggtttccaaagtttattaaaaatcaaagaatagaaaaactttacataaaaatatgtcaattttagcttccatattgttgtccacacacaaaaaaatcgaaacatgatatctttttgtcaaacctgtagcacgcgaccacagtggtagccaggccaattcatttgcttcaccatgacggaaatggaacatggtacctgtgtctatgaatcgagttttaaaatgcacaccccacgggacacgcactgccagacccgtagtggtttccttaatgtgggtttacagtcaatattgctaatgcgtagagattagtacaggcctacagatcagtttttataaatattctttatcaataggttcacaatttaaatattttaaatatttttgataactttcggtcatcgagaactgcagacacagtgtgctactctattctggaatgcctcctagagaacctgcagtcgcagctgacagctcccaatgacagagtgagccagtcctgcttcaaaagggcagaccgcagacattttaaagcttgtccttgctgggcgtcgatcacattcagagatcaatctagaactccccactgctgcacatgcatcagatgtcatggtaataagtatcttgtcttgacattctccactagtggacttcaaagaccaacctacctgtagtgtttagcaagaccagacccccgttttaaaaacaggaagtcagatggcctacaagatgcaaccaactcccaggacaactgtggtgctccaaaactcagggttaggcaggatggatatattcttgttcaaaaaaaggtacaaagacagtggttgttgtggcagatacacttgcatagtatacctgtatgcttccgacgtcgggcgcaagggtcccggccccacgctgggtgtgctctctgcgacacgatcgttaaaactcccacgggcactggnagctgancactctctanattgctctacagacgatgcatagcaagatcctcacggatcacagatccttctcacatcctaaactgggacag

SEQ ID NO: 123057 - DNA, 1023 bp, Homo Sapiens
agctgccctatctgtgatggtctactgttgttgttttgtgttgttctggtctaagtttccatcgtcttttcttctcatctctcttctatgtcatcagttttttcatattgtctttttttccttggtctacttctcagactctttcagttactcctccatctccgcccagtttttccattaatattgttgtggattacactctggttcaaatctgcgtagtttgtgcccctactgagtaccttttgtatctcatacgttttctttcatcttattgctgtaccattgacatccaagttctttaaatctggctaatcctgatctagtatgtccttggatttacccctctagcctgtcgtcttgaatacttctctcgtttatatcatcttggtaattccacattacgccttttcctgaaatttctcttatctgttttccatctctttttagtcttggattattctggactgtcagagtatctacttgcctttcaggttaggcatattccgtatccatccaatgcagactttaaccatgcttgttactattactcctgtagtttgaagatgtgctccatcaatcaattttcttctttcttcgttgaagactatttgtgaatgactattgactatatgttgctaatatagttgtctacattcatcacttgccagcatctgggcaagaccatagagtaattaagttcattccagtaagctttcaccagttgatatgctgtttgtcttgccctagatgcctggaaagaaggaatcgaaagtgcccagtgcattgataagttacagcagtctggaggcagactccccaatgtagtgcacattcaggtactcaggcataggagaaggcatggtgagcctgatatagctacatgtgaatcgctgagaagtggcccctctttttcggtgtaatttatgcttgaatctccagtgattaggtgtacactgccttccatgcccgctaccccggccgtaatggccgaattcccgggcatatgtccggtaccgtcgactg

SEQ ID NO: 123058 - DNA, 880 bp, Homo Sapiens
  misc_feature (306)..(314): n is a, c, g, or t
  misc_feature (474)..(503): n is a, c, g, or t
gcggccgcggctgtaggcttttttggtatcccatggaaaaacaggatgtatttatacagtgaatgttcactctgcagaggaacttccctccagttacatcttcctcatacattagccacctccacacttgacatatatgccaacatgtttcaaaaccaatctctgatggagcctaaagagttgatggtcctctacgtgaaagacaagaattactgtattgcatttgcttatagggaggtagtgtttttgctaacttgaagggatatactgtatttcacataagtgtgtgacttaagattttgggannnnnnnnncctcctttaaaaactggacctgaacacaagctttgagttgatgtttgtaataatctcaggacctgaaagattgtagcatttagtgtgtcttaaaaattatgtactgtaccagccatggatttttgtaaatatacctgtctcccttttttgtattttagtnnnnnnnnnnnnnnnnnnnnnnnnnnnnnngggggtggtgatgacatgtgaatgggtgcgggtatgtgtgcgtgtgtgtttgtataaggctcttttgagatgaactggtgcttgtttaatttccagctcaaatcggagcaggaatatggacaaactgctgctactgaaccctgcactgagccgaggtatttccatttggttaactaaacgctagctaccaggaaatgacgcataagtcacgttcttcttcccactgccatcttgcctttgcattctcagttttacgtgccctttgaactttaatggtaaaacatttcacactttggatggtttgcttgtctctagtttttagaaagttcttatcactccttcctaagaaaaaagaagggcaggtaaatttttttaac

SEQ ID NO: 123059 - DNA, 423 bp, Homo Sapiens
ttagagaatacagtaaatctttaatttgtataaatatttaaataaacttcatatttttcatgacatacttgagcatcttctatgaatatgcattttatataaggttttatgctggaaacagctatacacaatttctgatcaagactttttactcatgatctcttcaaattcttgactattaatgagaaatgattgttgttcacacaggtggtggtaagtggaaaaggagaatttacctatgtttctacccattaccaggatttccatttcattcctgaaatcatttaaatcccattaaacaatttaatagttttaaaagaacaattctttcctccagttattggcagatattactctactccttttgctacaaaacgaatgtttgtcccgcttcccccaaattcacaggctggaatcaaatcc

SEQ ID NO: 123060 - DNA, 617 bp, Homo Sapiens
  misc_feature (391)..(391): n is a, c, g, or t
ctcacccggtgctttgcatttgggaagaggtgatttcaagagtggccaggtgggacgcctctctcctccttattcggtttactatttattgttcggggtgttttttaattcctgtattgctcggcccggggagtttcgccccctgcccggctccgcggcgcggaggatggtgtggaaacggctgggcgcgctggtgatgttccctctacagatgatctatctggtggtgaaagcagccgtcggactggtgctgcccgccaagctgcgggacctgtcgcgggagaacgtcctcatcaccggcggcgggagaggcatcgggcgtcagctcgcccgcgagttcgcggagcgcggcgccagaaaggtaccaggcactgcgactccagggagtggnggggccgcaggggcgggggtaagcccacctgctgccgctgcgggatcccgcgcccgggagctgagagtcgccggccaccccacttctccgcgccacccacgagtgctgagctagtcggtttcaccttgtaaatttcccgggcaccggactgtcttttttggcaggttcagagttgatccgctcctttgggatcggtggctggctgactggctattcacccccaccc

SEQ ID NO: 123061 - DNA, 1208 bp, Homo Sapiens
  misc_feature (271)..(279): n is a, c, g, or t
  misc_feature (446)..(587): n is a, c, g, or t
  misc_feature (643)..(1038): n is a, c, g, or t
  misc_feature (1053)..(1053): n is a, c, g, or t
  misc_feature (1055)..(1055): n is a, c, g, or t
  misc_feature (1068)..(1068): n is a, c, g, or t
  misc_feature (1092)..(1092): n is a, c, g, or t
  misc_feature (1094)..(1094): n is a, c, g, or t
  misc_feature (1132)..(1132): n is a, c, g, or t
  misc_feature (1138)..(1138): n is a, c, g, or t
  misc_feature (1143)..(1143): n is a, c, g, or t
  misc_feature (1172)..(1172): n is a, c, g, or t
gaaggttcaaagttatattatcttgagttataattgtctgtttaatacaattacaccattttctcttctaagaaccatctcataatttaaagaatgacatggctgagaaaaatacttaggaagacatttttaggcgttgctgaatttaaatcatcttccaaatactacattctgctcctttctttattgtaatagtttatctgaaagtacacaaaaattaacaaattgcttttactatgcaactctgaaatatcaagtctgcctccaattnnnnnnnnncagtaactacttttataacattaaggtcaagtcatttgtaaagataatatcaactgagactttttggcacttacgactaatccattataaacaactgtcagtcttaaaaacacagttccagtaaacgtgtagttacactgggtacagataagaaaatacaagggcannnnnnnnnnnnnnnnnnnnnnnnnnnnnnnnnnnnnnnnnnnnnnnnnnnnnnnnnnnnnnnnnnnnnnnnnnnnnnnnnnnnnnnnnnnnnnnnnnnnnnnnnnnnnnnnnnnnnnnnnnnnnnnnnnnnnnnnnnnnnngcctacagccgcggccgctccaacatcagaatggtaaccctcgtgccgaattcttnnnnnnnnnnnnnnnnnnnnnnnnnnnnnnnnnnnnnnnnnnnnnnnnnnnnnnnnnnnnnnnnnnnnnnnnnnnnnnnnnnnnnnnnnnnnnnnnnnnnnnnnnnnnnnnnnnnnnnnnnnnnnnnnnnnnnnnnnnnnnnnnnnnnnnnnnnnnnnnnnnnnnnnnnnnnnnnnnnnnnnnnnnnnnnnnnnnnnnnnnnnnnnnnnnnnnnnnnnnnnnnnnnnnnnnnnnnnnnnnnnnnnnnnnnnnnnnnnnnnnnnnnnnnnnnnnnnnnnnnnnnnnnnnnnnnnnnnnnnnnnnnnnnnnnnnnnnnnnnnnnnnnnnnnnnnnnnnnnnnnnnnnnnnnnnnnnnnnnnnnnnnnnnnnnnnnnnnnnnnnnnnnnnnnnnnnnnnagcaaatggcagcananggcaggaacgtanaaggcgcgttgctggcgttttcanangctcgcccctgacgagatcacaaatcgagctcagtcanagtggngaccngacagactataagaaccagcgttccctgnagctctcgtggcctctgtccgactgcgctacggaaa

SEQ ID NO: 123062 - DNA, 1195 bp, Homo Sapiens
  misc_feature (1080)..(1114): n is a, c, g, or t
gtgtttgttacagcacgaggaagataatatttattatattttaactagaaacagagcagatagcaagttcaccaggtaaaaattttttttcttaaattatgcttaaacaacaataataaaaaacaagtctgcatgtatattttggtcactattatgatcttccagggcacaaaagccagcagcataaagaaacatgaataatgactgagaatttttgatgtgccaaaaacaaagatcactgcattaaactcctttattttgttaatattattcttaaacattgaacaattattaattattgttatttggcaaaatatcaaacatgcacatagtattcctacaagaatattgccttaatattgtcaatattaacgctaagcttattcctctccaaaattcaatgagttatggttccgctctctatatgtattagtgttagtggtaatatgcaaaactgattttgttttcagggttaagtagcagattgacttcgcatttggtggccagctgtgtaccctaatttttcatctattttcttaataaatttaattacatttcataagccctgagataacgtgctaaggattgtatacttttaatctatactttattccactcaatttgaaccccacataataagtcttttaagttatttacagatggttgtaactaaagcaatgacaaaatttactacttgtataggtaagactgataataaggcctttaactaagagttgcatattttatatgcacttttaacttgctaggagcaactcttaaaattacatctataattctgtcagaaagcaataagtgcttttcattttgcttacttccatatgtgtaaccagattcacttttttcctcccttgtaaaacaactactttcttttccttccccaaatattaatacgtcttccaactgaacaattgctaaaaggaacttagcatttgcacagcacattgacaactatggtgcttagcagagacatatgcccataataggcatctgataaatgtttgttccacccccggccgtaatggccgaattcccgggcatatgtccggtaccgtcgactgnnnnnnnnnnnnnnnnnnnnnnnnnnnnnnnnnnncggccgcttcctcgctcactacttcgctgcgctcggtcgttcggctttgacgagctagcgcctatatgtctatcagtcttt

SEQ ID NO: 123063 - DNA, 1245 bp, Homo Sapiens
  misc_feature (57)..(58): n is a, c, g, or t
  misc_feature (1091)..(1103): n is a, c, g, or t
ggtccacacctgtgcgtgacatcgtcgatctttgcgcaagtattggcgggcagtttnnttttaatttcagcagcatctttattgcaacaaagaacctgtaataaaatgcaagaaaactaatgtttcactttacatgattaaaagccatatacctaaaaatgagaaaacccataagcttactggagacatgcaattctttttatacaagtcaatgcttaaaacagcaggcacttcatgttctaaaattaaacacctgaattccaattttgctgaatacaatataaatttgttttggggttacttaaaaacaaacatacaaacactactttttctttatctgtaaaggacttatgaaatgatcacctagagcccaggaccttgcactaacatctctatatttgaggctggaagatggctaggtgaggctgggaaggtgggaatcaaaaaagtttcctttttcctttatatctgctgggaatagacacactcaccttatatagtttagaaatggccatgtctcttttcttacatcaaatagctataaagatgggctcccaggcttaagcaagcactctactctatattccaatcctcagatcctccactataccaaggaag[453 bp omitted]aaggaataaaacaagtagtnnnnnnnnnnnnngtaagcatcggtatcaatatcgcattcttttaaaaggtaatgcatgcattgtgacctaatcctcttgtatgaggctttggaaaagaaccaggaatggcatagagagaaaaactttcattccaaaattaatctccagacaaag

SEQ ID NO: 123064 - DNA, 660 bp, Homo Sapiens
agctgagaagtaagcacccttttctgactgcatatggtgtattcctcttgtgagtcccccataatattttataaattgtatgcccccatcttgtacaacagctgtcttattcgtattgtttataaactttgagggttaggactgggtcttactcatctttatgtgccttccttatgcttcaaagaatttaccatctaatggaagagaacatttgcaagttggctccataccaagctccttccacatactctactcatctgaactttgaatgcagaatctttaaattgcaaccccacatactaaggtcaagaaagaacttaatgggaattaatctccacccattagctttaccctgacatcaggattgccaaatccaatggactcttgtctattcttacgtgacttctgctggaaaatgcgaatgttgaccatcctgccacttggaactctcttcccactcctcacattgcttttgctaccactggaagttccttctgtttcttgtggagtaccttttgctgtctgggacttgtagataatggtgtttcctagggctccctccagggccctctgcctcactaactggatatacttttcctgagcaaatcccaggaaacttgcgtcagaccgtgacttcaaatacaggttgataaatgctaa

SEQ ID NO: 123065 - DNA, 1096 bp, Homo Sapiens
aggcaccatgtgaccaggcagtgagaaggacgggcctcactcccatgccagactgctcctcgggctgagcaggacctgaagctcttcagggcttcccaccaaaagcccaagcaaacttggggggaggcctgagggggcattcagcagtccttaaagggcttgagcttgcaacactcaggccagggactcggctgagggcctctgtggtgccaccatggggtaggaagtaaagagagaccctgtttccagcctgggaaccagtgggtgccctgaagggaggggaggcctcagggagttcgggacaggagtgtgcatggtactgggcggcccatgggggctcctggcctcttggttcaggcaatccctgagctggggacacattccatcttaggtccaagagacggaggtcaggagcatccctagaacgacctcccaggcacgaggaaggcccggggcagggccgggcgcagcgtggctggcttcagtaccctcgggcatcttgactcctgccctctgggactgcaaagggatctgcgggcgcctctgctgagtcaatcgtctggtaggcactacggtcctgagaagacccaaggaaaccagtgtggaccaggagctcacccccgcgctcccggtacatgtggtagacgaagcagcaggagagcggcttgagcagcaagctgaggatggccatgcccacgccaaagcggcccgtgtccgtgaggctgacccgcgggtagaagatgctgatgtgcacgatgtccaggaagatggtggccagcaagccacccagaaacatgcttatggcgtcgatggagtcccgctgagccacagcccacacgcccaaggccaggatggtgaagttggcccaggcataggagcctgagaatacaatgcagccccaggttgtcagcagccagtgacctaggagaatcaccttcaggttcacagcaggcagctccatcccgactcaggccgagggcacctgcgccgcagccgcggggggctcctaggctccgaactcggggaacaaacattgcccggccccccccggccgtaatggccgaattcccgggcatatgtccggtaccgtcgactg

SEQ ID NO: 123066 - DNA, 920 bp, Homo Sapiens
  misc_feature (203)..(203): n is a, c, g, or t
  misc_feature (209)..(209): n is a, c, g, or t
gggccaggaactcgggttgaggggccctctgtgggtgcccacccatgggggtaggaaagttaaagaggagaccctgggttccaggcctgggaacccagtgggtgccctgaagggagggggaggcctcagggagttcgggacaggagtgtgcatggtactgggcggcccatgggggctcctggcctcttggttcaggcaatccntgagcntggggacacattccatcttaggtccaagagacggaggtcaggagcatccctagaacgacctcccaggcaacgaggaaggcccggggcagggccgggcgcagcgtggctggcttcagtaccctcgggcatcttgactcctgccctctgggactgcaaaggggatctgcgggcgcctctgctgagtcaatcgtctggtaggcactacggtcctgagaagacccaaggaaaccagtgtggaccaggagctcacccccgcgctcccggtacatgtggtagacgaagcagcaggagagcggcttgagcagcaagctgaggatggccatgcccacgccaaagcggcccgtgtccgtgaggctgacccgcgggtagaagatgctgatgtgcacgatgtccaggaagatggtggccagcaagccacccagaaacatgcttatggcgtcgatggagtcccgctgagccacagcccacacgcccaaggccaggatggtgaagttggcccaggcataggagcctgagaatacaatgcagccccaggttgtcagcagccagtgacctaggagaatcaccttcaggttcacagcaggcagctccatcccgactcaggccgagggcacctgcgccgcagccgcggggggctcctaggctccgaactcggggaacccccggccgtaatggccgaattcccgggcatatgtccggtaccgtcgactg

SEQ ID NO: 123067 - DNA, 1708 bp, Homo Sapiens
  misc_feature (134)..(146): n is a, c, g, or t
  misc_feature (182)..(190): n is a, c, g, or t
  misc_feature (206)..(439): n is a, c, g, or t
  misc_feature (1601)..(1635): n is a, c, g, or t
ccccccttcccttttaggggtccgcggggggggttaaatttatttcaaggtggccggaccctttatggaataacacaataaaaccctcaaacgccctttgggggttttttaaaaaaatggggtgcccccggggnnnnnnnnnnnnnggggaaccaccccagattccccgccgggtttttttnnnnnnnnnggttacccccggtccnnnnnnnnnnnnnnnnnnnnnnnnnnnnnnnnnnnnnnnnnnnnnnnnnnnnnnnnnnnnnnnnnnnnnnnnnnnnnnnnnnnnnnnnnnnnnnnnnnnnnnnnnnnnnnnnnnnnnnnnnnnnnnnnnnnnnnnnnnnnnnnnnnnnnnnnnnnnnnnnnnnnnnnnnnnnnnnnnnnnnnnnnnnnnnnnnnnnnnnnnnnnnnnnnnnnnnnnnnnnnnnnnnnnnnnnnntacagaattccccaaactttaatgctgtgctctgaaaagggaggctggaggttgtggtgggtcacagtgttgctgacacctctggcctccagccctgcatccctaggcaccatgtgaccaggcagtgagaaggacggggcctcactcccatgccagactgctcctcgggctgagcaggacctgaagctctcagggcttccaccaaagcccagcaaacttgggggaggcctgagggggcatcagcagtccttaaaggcctgagcttgcaacactcaggcaggactcggctgagggcctctgtggtgccaccatggggtaggaggtaaagagagaccctggttccagcctgggaaccagtgggtgccctgaagggaggggaggcctcagggagttcgggacaggagtgtgcatggtactgggcggcccatgggggctcctggcctcttggttcaggcaatccctgagctggggacacattccatcttaggtccaagagacggaggtcaggagcatccctagaacgacctcccaggcacgaggaaggcccggggcagggccgggcgcagcgtggctggcttcagtaccctcgggcatcttgactcctgccctctgggactgcaaagggatctgcgggcgcctctgctgagtcaatcgtctggtaggcactacggtcctgagaagacccaaggaaacccccgcgctcccggtacatgtggtagacgaagcagcaggagagcggcttgagcagcaagctgaggatggccatgcccacgccaaagcggcccgtgtccgtgaggctgacccgcgggtagaagatgctgatgtgcacgatgtccaggaagatggtggccagcaagccacccagaaacatgcttatggcgtcgatggagtcccgctgagccacagcccacacgcccaaggccaggatggtgaagttggcccaggcataggagcctgagaatacaatgcagccccaggttgtcagcagccagtgacctaggagaatcaccttcaggttcacagcaggcagctccatcccgactcaggccgagggcacctgcgccgcagccgcggggggctcctaggctccgaactcggggaacaacttcccccggccgtaatggccgaattcccgggcatatgtccggtaccgtcgacttgnnnnnnnnnnnnnnnnnnnnnnnnnnnnnnnnnnncgccgcttcctcgctcactactcgctgcgctcgtcgttcgctgcagcgagctacgcctatagttattcaagtt

SEQ ID NO: 123068 - DNA, 959 bp, Homo Sapiens
  misc_feature (195)..(213): n is a, c, g, or t
  misc_feature (273)..(273): n is a, c, g, or t
ggccgcggctgtaggctttttttcttttgaacttgtaggtcaccatgtacttgacaagatttcatttacttaagtgccatgttgatgataataaaacaattcgtactccccaatggtggatttattactattaaagaaaccagggaaaatattaattttaatattataacaacctgaaaataatggaaaagaggnnnnnnnnnnnnnnnnnnnaaataaacaccttcttaagtgcatgagatggtttgatggtttgctgcattaaaggtattntgggcaaacaaaattggagggcaagtgactgcagttttgagaatcagttttgaccttgatgattttttgtttccactgtggaaataaatgtttgtaaataagtgtaataaaaatccctttgcattctttctggaccttaaatggtagaggaaaaggctcgtgagccatttgtttcttttgctggttatagttgctaattctaaagctgcttcagactgcttcatgaggaggttaatctacaattaaacaatatttcctcttggccgtccattattttctgaagcagatggttcatcatttcctgggctgttaaacaaagcgaggttaaggttagactcttgggaatcagctagttttcaatcttattagggtgcagaaggaaaactaataagaaaacctcctaatatcattttgtgactgtaaacaattatttattagcaaacaattgatcccagaagggcaaattgtttgagtcagtaatgagctgagaaaagacagagcatatctgtgtatttggaaaaataattgtaacgtaattgcagtgcatttagacaggcatctatttggacctgtttctatctctaaatgaatttttggaaacattaatgaggtttacatatttctctgacatttatatagttcttatgtccatttcagttgaccagccgctggtgattaaagttaaa

SEQ ID NO: 123069 - DNA, 1332 bp, Homo Sapiens
  misc_feature (1251)..(1285): n is a, c, g, or t
cagcaaaatgtagcctttatttacttaaacatttatttgcttctaggaaataagcgctttcctaatttcaagcaattataaaagaactgctgttttcttccacactcacttgccagagggtcgaattggaagtcacatatatgtctatgaacggaagttaaaagggaaattcaacatgaagatgaaattctgaactttcctagataaattaacattgctgggtggaaatattcagatgctgcttaaatacttcggtaaacactgggtaagattcatggaacttagaaaaaagctgtatgaactgctttaccaaatatcactactgaggaaatgtataaaataccacatagtataaaattacatgttaatacaatgccagattttaaataaagacctttagttttcctcatggtgtagttttattgtttcttccacgatattcagatgtgcaaaaaatttcacaagaaaacaagtcagcaagctcttaagagggcagcaaattcttcacaagtcagagggctcttgaacccacaaaaagacaagaagtgagtgtaagattataaaatgttaatgatgaaattccagaacaatgtacttttctcaagctctgctgcaaatttaacacaaacatcagtgttaattacactttgtcatgtatgactgagcttgctttaagctcttacactgaaaggaagtctcatttcatgcacaaaatctgttgcatgcctggcttccttaataaaactacagttgaacatttccagtgtcaaaaaaaattcaacgaagctaaactacaggaaaatgcaggttagtagacttttaactaatgcttctgaggaataatataaagttatcaaactgatacttagaaacaaaagaaaagacattgtcatcttggtaatttcattagtttcaataccaaacattatacaaagcataaatttttctcttacagttgtctaatttaactcaattgtgaatcagtattgaggatcaaaaggtaattgccccaattctatttcaagatttgccatttgtcttccattagtgcgaccatatttatgccatttaccttcccttttataaggctgtggctgaaggtgcttctgctcttgttttcgatgcctggagttttcaatatttaccatacgttgctttttatcaggtcgactgaaagcagtaaacacatttttcatctatcccggccgtaatggccgaattcccgggcatatgtccggtaccgtcgactgnnnnnnnnnnnnnnnnnnnnnnnnnnnnnnnnnnncgccgcttcctcgctcactggacttcgctgcgctcgtccggttatta

SEQ ID NO: 123070 - DNA, 735 bp, Homo Sapiens
  misc_feature (627)..(627): n is a, c, g, or t
gcggccgctccaacatcagaaagatacatgaagatgaattgaatgatatgaaggattatctttcccagtgtcaacaggaacaagaatcttttatagattataagtcgatgtgataaaaagcaacgtatggtaaatattgaaaactccaggcatcgaaaacaagagcagaagcaccttcagccacagccttataaaagggaaggtaaatggcataaatatggtcgcactaatggaagacaaatggcaaatcttgaaatagaattggggcaattaccttttgatcctcaatactgattcacaattgagttaaattagacaactgtaagagaaaaatttatgctttgtataatgtttggtattgaaactaatgaaattaccaagatgacaatgtcttttcttttgtttctaagtatcagtttgataactttatattattcctcagaagcattagttaaaagtctactaacctgcattttcctgtagtttagcttcgttgaattttttttgacactggaaatgttcaactgtagttttattaaggaagccaggcatgcaacagattttgtgcatgaaatgagacttcctttcagtgtaagagcttaaagcaagctcagtcatacatgacanagtggtattaacactgatgtttgtgttaatttgcagcagagcttgagaaaagtacattgttctggaatttcatcattaacattttataatcttacactcacttcttgt

SEQ ID NO: 123071 - DNA, 683 bp, Homo Sapiens
aaaactaaaggtctttatttaaaatctggcattgtattaacatgtaattttatactatgtggtattttatacatttcctcagtagtgatatttggtaaagcagttcatacagcttttttctaagttccatgaatcttacccagtgtttaccgaagtatttaagcagcatctgaatatttccacccagcaatgttaatttatctaggaaagttcagaatttcatcttcatgttgaatttcccttttaacttccgttcatagacatatatgtgacttccaattcgaccctctggcaagtgagtgttgaagaaaacagcagttcttttataattgcttgaaattaggaaagcgcttatttcctcttccaaaatgctgaaggtgatcaagtgagtaggcaatgatgcatcatcatgaaactctctatgtaaccagtttaagggatttaggtaaaatacatctgcttcatcaagataatgactttttccagtcaggtctggcgggcactggagaaatctcatgggaagtgggcagtgaacatggctgttataaggagtagagtggcacggcatcattataaatattgaagctgaagatttattgcgattgttgtaacaaaactttttgaatatgactcatgacatcaagagtacctcgttgatgaactaaaccagtttaaagggcgag

SEQ ID NO: 123072 - DNA, 505 bp, Homo Sapiens
  misc_feature (413)..(434): n is a, c, g, or t
ataagattattagtataaaagggtccaagcgggaggagaagcaaagtgagaaataagagataaaaatagacaagtcaaaaggcaggtttttagaatctcctcatggtgaactttttctctcttttgtccactgcatggtttctgtgattgaacctgcctgaatttaatcatgaaaacaagtgaaataatgtatgttaaatgcctggcagagtacttagcacagactagtgacccaataaatcagtgattgtcaaaaatccttatgagtcttctttaaaaaaataaaggccacttcctctcaaaaaattctcatacctgtcatctcagcactttgagaggctgagactggaggatgacttgagcccaggagtttgagacaaacctggttaacatagcgagaccctgtctctacnnnnnnnnnnnnnnnnnnnnnntagctgggcctggtggtgcaggcctgtagttccagctactctagaggttgaggcgggaggatggcttgagc

SEQ ID NO: 123073 - DNA, 699 bp, Homo Sapiens
  misc_feature (148)..(156): n is a, c, g, or t
  misc_feature (184)..(196): n is a, c, g, or t
  misc_feature (359)..(438): n is a, c, g, or t
gcgattgctttaaagaaagctttatttactacatacatcctaagaatgtactgtaaatggagcaagatctaaataaaagcttttcaaatataaagcagctaaagttaactaaaccactagcaatgtttgaaaacagaactctaaaacnnnnnnnnnacatttatatagtttgttcttaacactnnnnnnnnnnnnngttcacatttcaagttataaacttacttacctcagtagtgtacatgaaatggttttgaaacaataggaacagataagtcccagataggaggctcactgatacttaattggccatgtcaccaatgtttgtttttaagggagtttggtggttgccatgttatcannnnnnnnnnnnnnnnnnnnnnnnnnnnnnnnnnnnnnnnnnnnnnnnnnnnnnnnnnnnnnnnnnnnnnnnnnnnnnnngcaaataatttacaggcatatgtaaaatacagtaagaatactgggtcatagtttcatccagtgaaactctgtgacaatccttcactagaaggagagtacttttttcacacagtcaggggatgaggatctgatccgaattacattttgtcgagtcactcattcccacagatttgagtttgaatgcagcttgtggggtacatcatcaggaacattgcacacttattttatgtcatttaaaagaatgatggaaaggaatgttag

SEQ ID NO: 123074 - DNA, 657 bp, Homo Sapiens
  misc_feature (148)..(157): n is a, c, g, or t
  misc_feature (185)..(197): n is a, c, g, or t
  misc_feature (356)..(456): n is a, c, g, or t
gcgattgctttaaagaaagctttatttactacatacatcctaagaatgtactgtaaatggagcaagatctaaataaaagcttttcaaatataaagcagctaaagttaactaaaccactagcaatgtttgaaaacagaactctaaaacnnnnnnnnnnacatttatatagtttgttcttaacactnnnnnnnnnnnnngttcacatttcaagttataaacttacctcagtagtgtacatgaaatggttttgaaacaataggaacagataagtcccagataggaggctcactgatacttaattggccatgtcaccaatgtttgtttttaagggagtttggtggttgccatgttatcannnnnnnnnnnnnnnnnnnnnnnnnnnnnnnnnnnnnnnnnnnnnnnnnnnnnnnnnnnnnnnnnnnnnnnnnnnnnnnnnnnnnnnnnnnnnnnnnnnnngcaaataatttacaggcatatgtaaaatacagtaagaatactgggacatagtttcatccagtgaaactctgtgacaatccttcactagaaggagagtacttttttcacacagtcaggggatgaggatctgatccgaattacattttgtcgagtcactcattcccacagatttgagtttgaatgcagcttgtggggtacatc

SEQ ID NO: 123075 - DNA, 1456 bp, Homo Sapiens
  misc_feature (1173)..(1292): n is a, c, g, or t
aaggttttaatcgagttgcataagacacctttgcatagctatttaattgccccaagtaaacattttaaggccatttctaaggcttttattcatttttgaagtatgagtttgtagggacaaagaatgtatgttatcgtagacaagacccccagagactcttttcagcagaaagttatgcttctagttgccttaccatgtttcttgcaaaactgtccatggtcctcaagggtgttggaaacattatgtttattaaatgggcctctcttcctttgctgtgcacttgatgggtgaactggattggggtgtgcacatccaggaggaggaggagagacctgtagaagtttaaagatagtttgtaaatatcttctaatgcttgtttttagtccttttatgttggagaagttcatggtatgtagtttaatgcaaaatgaaaccattttatttcaatgttattaaaaaggtttgttttattaggaagttaatgtattgttgcagtgttatgtgcctgtttaaaggcttttgtttagcagagtgaatgtaaaatacagtaaaatgttaagattgtcatctactttttaagaaaaaatatcaacttggaattgttttttaaaggctcaatcaaggaagtgaggtgtgcaataaggtagcaagtaaaacgcagttgcgtttttatgtcatgttagagatccatacaattttccactcacgggatttttgttgatggctgaattcttgtggattcataagaggatcatgcccttagcaagtacttttgttttgttttaaattaagagattcccaaatgcctttttccccctcatcttgaaatgagatgagtttttatgtgtaagcaatatttatttaactattctataaaattattgagtgcctactgaggcctttaagcaccgctaacattcctttccatcattcttttaaatgacataaaataattgtgcaatgttcctgatgatgtaccccacaagctgcattcaaactcaaatctgtgggaatgagtgactcgacaaaatgtaattcggatcagatcctcatcccctgactgtgtgaaaaaagtactctccttctagtgaaggattgtcacagagtttcactggatgaaactatgacccagtattcttactgtattttacatatgcctgtaaattatttgcnnnnnnnnnnnnnnnnnnnnnnnnnnnnnnnnnnnnnnnnnnnnnnnnnnnnnnnnnnnnnnnnnnnnnnnnnnnnnnnnnnnnnnnnnnnnnnnnnnnnnnnnnnnnnnnnnnnnnnnnaaaaatgaataacattggcaaccaccaaactcccttaaaaacaaacattggtgacatggccaattaagtatcagtgagcctcctatctgggacttatctgttcctattgtttcaaaaccatttcatgtacacctactgaggtaagttataacttgaaatgtgac

SEQ ID NO: 123076 - DNA, 956 bp, Homo Sapiens
  misc_feature (38)..(38): n is a, c, g, or t
  misc_feature (89)..(89): n is a, c, g, or t
  misc_feature (103)..(103): n is a, c, g, or t
  misc_feature (134)..(134): n is a, c, g, or t
  misc_feature (239)..(270): n is a, c, g, or t
  misc_feature (807)..(835): n is a, c, g, or t
tccagagagagtaccgctctccacccggacttgcgccnacagtccatgcgtcgctactcatgcgctctcctcttctttgctctctagcncaggttcccgcagngagctggcagcaggaggctggctctggctgngactctgagctggactcaggctgctgccatctggctggtccttggtcctcatttcttcctgccagagtgtggacttggtggtgggactttctcagcactggggannnnnnnnnnnnnnnnnnnnnnnnnnnnnnnngtaacagccaccttggcaggcccaggctcctgtggtgtggggggctccactttccgtttcttcttctgattctgcttgttggtccggggatagaccatgagcatctccagccacccactgacgatctccttggtctccgcccggatgaaatgctccttctcaggcgtcagaatacacagggagaacttctggcccgtgcggccctccccatccaccacatctgtgcactggttcatgttgatggtgccctgaggaagggtcgtgggcatctcatccagggcgtagcgcaagaggccgtgctcgtaaaggatgaagaaccgtcgctgccatttccgagaccggtgcactgggttgtcaaagtcggtcccatctggagccaggagcagccaaccgccataaatgggttttgcctgcgtcaggtcctcgtcgttgagcagatgcgactcgcggggcttgaagcagttctgacacttgctcttgttgaagatgttggcctggaatttcctgcacgggttctccttggctgccgacatggtnnnnnnnnnnnnnnnnnnnnnnnnnnnnngcccatggacgcggcctcgggcccgctgcttcccgctgcggcccgcctctcaggctccggtcgccgccgtcccggctcgtccgcgccgccgcagctgccctcggcgccccgcggccgctgc

SEQ ID NO: 123077 - DNA, 501 bp, Homo Sapiens
  misc_feature (416)..(449): n is a, c, g, or t
agattctagaagacaaggatgctttttcatatttattttccacctctgagcccctctgaggcacacagcaaggcagcaatgggtgaatgaatccaagctcccttgtggtttccccaggccccaaggagagtcactgggaagacatcatctcatccagggcgtagcgcaagaggccgtgctcgtaaaggatgaagaaccgtcgctgccatttccgagaccggtgcactgggttgtcaaagtcggtcccatctggagccaggagcagccaaccgccataaatgggttttgcctgcgtcaggtcctcgtcgttgagcagatgcgactcgcggggcttgaagcagttctgacacttgctcttgttgaagatgttggcctggaatttcctgcacgggttctccttggctgccgacatggtnnnnnnnnnnnnnnnnnnnnnnnnnnnnnnnnnncaggcctgaaaggcctggcgctcccggcgggctaggggctcagcgcggccgc

SEQ ID NO: 123078 - DNA, 959 bp, Homo Sapiens
  misc_feature (849)..(883): n is a, c, g, or t
tattatgctttcttggagcaccctcttgtgaagaacccctgtgtgtgccctcgggacgtcccctcgtggagtgtttcagacaaccgctgcgtgtgttccccccgcggctttttttaattcggtgggatcaccccgcccgccttgtttcctgcgccgccgcgtttccctcggggacccgcgtctgttggccccagcgttggacagaaccactattctggggccccgcgcgccccccaacgaaatgggctttcaagaacttttttccagggccccacagcgcggccccacacaatgtttgttttgcgtgctgtgttgacttttttgtgcccattgtatagtgagtttatttgtgctctaaaatagtatcaacggtgcaatcttttccactgaatgacttcatggatcgtggccaacatagaacttggataggaaaatcctttggccttggcgcttctgtttcatggaagaaccgcataacatgtgtccggtgtttccatactttaattgtttcttccagttcgatctttcccttaatgaccagaagatcaaccaccctggggtctgtgacatgggcattcttcataaacatttctcggactttatcccgtcccattttcacagtgatgtccagctggaattggtgcacagtgttcggcacctcccgataccaggcgcggtagagctcgcgcaccctccgcttggcctcgttcatgtcccgactgaaaatgggcttcacgaaggtgctggcggtagaagtagcttggcggacgccgctccccgccatcttgccaagcatcccccggccgtaatggccgaattcccgggcatatgtccggtaccgtcgactgnnnnnnnnnnnnnnnnnnnnnnnnnnnnnnnnnnncgccgcttcctcgctcctgactcgctgcgctcggtcgttcgctgcggagagtgagccctatagtgagtctattaca

SEQ ID NO: 123079 - DNA, 788 bp, Homo Sapiens
ccaatccgttctgactctgtgagccgtggcccggaccccttggaggtttcacgacgtgggtgcccgggccgttttattgggtggggaaccccgcccgtttgcctggcccgggttccctgggccgcgtgggccccgtggtccctatactcttgtgggcccgcggccccaacagtggtctcgaaccctttttctggggcgccgggcgggcgcccgaccaggtggggttgttctggctggtgtgttttggtttgtttgcccattggtataggtgaggtttattttgtgctctaaacatagtatcaaccgtgcatctttccactgaatgacttcatggatcgtggccaacatagaacttggataggaaatcctttggccttggcgcttctgtttcatggaagaaccgcataacatgtgtccgctgcttccatactttaattgtttcttccagttcgatctttcccttaatgaccagaagatcaaccaccctggggtctgtgacatgggcattcttcataaacatttctcggactttatcccgtcccattttcacagtgatgtccagctggaattggtgcacagtgttcggcacctcccgataccaggcgcggtagagctcgcgcaccctccgcttggcctcgttcatgtcccgactgaaaatgggcttcacgaaggtgctggcggtagaagtaacttggcggacgccgctccccgccatcttgccaaagcatccactccacccccggccgtaatggccgaattcccgggcatatgtccggtaccgtcgactg

SEQ ID NO: 123080 - DNA, 1306 bp, Homo Sapiens
ggggggggaattccaaggcccttttgtcattgggcccgggttctccttagggaaaccaggtaggtcccatggttcactttgccttatgggggcccggccggccaaaccgaaaggtgctagaaaagtttttcggagggccgggccggccgacaggggcccgggtgtcgttggtaggatgagtgtgcagttcttgaacctgtgttgatgtttattctgccactgagaggtacaccagggtttccaaagacagtaggaatatttctgttctctgtgtatattgaacagctgtgcacctaagcagggtgcctgagtaggaagttaatttcattttaagggctggagcttgttacaagtagcggagccaagcctttgcacatccattttcttcagaacccaaggaaaactagcccatcttgacagctctacttttgcgcctgttagtgctgccctgatccctgacaggaagagctggctaattttagataatctgtgccctgacactaaagtgtctaatcataggggctatagaaacaactacattaacaagtcgtccagcctcatgcccaatgtcacaatttttgaacagatggcctccttccttcctgtttactgacatgcaaggctctgagaaaaataattcaatccaatttacagcaaacaccacatttcaagaaaagggaaagaacaggtgatgtgtataccaaggtcccacttgctcaggcaaaaagaggctgcagaaaattggttcatcaatggaattctatcacaaagtgaccattgtatagtgagtttatttgtgctctaaaatagtatcaacgtgcatctttccactgaatgacttcatggatcgtggccaacatagaacttggataggaaatcctttggccttggcgcttctgtttcatggaagaaccgcataacatgtgtccgctgcttccatactttaattgtttcttccagttcgatctttcccttaatgaccagaagatcaaccaccctggggtctgtgacatgggcattcttcataaacatttctcggactttatcccgtcccattttcacagtgatgtccagctggaattggtgcacagtgttcggcacctcccgataccaggcgcggtagagctcgcgcaccctccgcttggcctcgttcatgtcccgactgaaaatgggcttcacgaaggtgctggcggtagaagtagcttggcggacgccgctccccgccatcttgccaaagcatccactccacaaccccacccctttgcaagcagcgcgtgcggaccgcgggcgaatgtcttttcccccc

SEQ ID NO: 123081 - DNA, 1136 bp, Homo Sapiens
  misc_feature (670)..(722): n is a, c, g, or t
ctcttttatggtaggatgatgagctaccagtctctttaatatttgctaaactgtaagtgctttggatgggtagcaaatgggttgttttagctttcatttcctgaattcgctcataagagggcttccaaggtttctgtccaggcttccatcttgaaggggggggactgtcactcagtggtattacaggaatattttctgctacaactggttgtactactacattttcattttgtgccatggttgctcttaaaggttctgttttaactggtttattttcacttaactgagaagctgtttttcttggtgattttgatgctctctttcggtgcccagacttggaactagatctggactttgatctacttcgagaatgtgatgaggactttgacgcagtccttgatcttgagcttcctctagaataagactgtgagtgagattttgatctgtatgagtctctgctggaatgggttaaagagctctggacatccttatcagatttagaccagtctctctttgatgagtgatgagatgacaatgaggaagaacgagaactcctttctctatcacaagaggatttcattcttcgagtggaagattttgaggattctatgtcagacggtataagaatccctctcctctttgtttgtttgtgtcctctgcaagtgttctnnnnnnnnnnnnnnnnnnnnnnnnnnnnnnnnnnnnnnnnnnnnnnnnnnnnnaatgtggccagagtgtcttgctgtactaaggtctgaataatatccattataggaccatgatctggatctctgagacaagcttctttcatcccatcggcttgaacaggggtcacttaacttatctcctttactccatttttctccactaggtggtctatatgctcttaatctctgcatttcctctttccagtgaggaggagtttcactgctgtcatcatcatctgactcagaacaggatcttgatcttggaggtgtgtgatagcgctttaaaaacaaaaacaatagtattttaaaaaatgcctctccacgacagtctgctatgtgacagagttaagtaaaagacccaatctcagatcatggtcctataatggatattattcagaccttagtacagcaagacactctggccaccat

SEQ ID NO: 123082 - DNA, 1179 bp, Homo Sapiens
  misc_feature (759)..(779): n is a, c, g, or t
tggtaattaattgggttatgtgcatggcccgttgcaagacttgggtgttctgttataatgccgtctggtattgtgtgagagacattgagcgtagtttaatcttacttaaggatacagttccgttgtgatttgactcgtgttagaattcttccatcttactggagtgtgataacccgtggtctgaatccacaactaggctgtccctggtcccattactagagtgtccaggagactttggttaaaatagtgaggacaaatttgaaagtggtcaaaggaacgtaaacatgttgtcccaatgtgggctaacaatttgatgaggcagaaattaaagatttttagtaatctattaactatccaatcttaatccccagtacaaattcatttatctagtattactaatacactaatatacaatatacctgcttacaaacacataggtagccataaataaaactttattctttatttcatttacaagctaccaaatattatgtatcgtacacagtgctgaacacttaaatggctgtagtcatggaaggatccagactgaatggaaagctgttgagaaagaaaagataaaagcaaagtaatactgcaacaggaaggtggcaaaagcatagttttgccataataaaatcaattagatttgtgattatacatcagttccggttaaaatgtctgagcgccatgcgattttcagctttattgtctgcagtctgactaaagtctgtatagtcattttgtcttttgcagttattnnnnnnnnnnnnnnnnnnnnnctatagcagcagcaagcaaaccctgtgacaggaaggcaagggttaagaactaaaaagagtttatacagtgtgttcagggaaagtgtgcagtttatcttccatcagcaggagttcgactgagggacaacatgattcgggcaaatcgctcacagagttcatgcgtggaatatgaaggtaacttcggtggctcatggaaacttttaatctccatagaacaatcaagcagttttggcaaaaaatctgtcagcttttcttggaggtgtggttccatttcttgaccaaggtaggaacaccatcgatttctcatcttctacagctagtatatccttttcttccatttcatccaccagtaataatggcaaaaatgggacaataaactcattcatgataatcaaaccat

SEQ ID NO: 123083 - DNA, 642 bp, Homo Sapiens
  misc_feature (583)..(583): n is a, c, g, or t
  misc_feature (619)..(619): n is a, c, g, or t
ctagttctttaaaaatattttaatcgtgcaaaatcaccataatgtactctagcacaatgctaaaatgttatctaagatggagtggcttttattagttttacaggatgtatatttggcaatagttcttaaaaataattactcaaaaggaactctaactctattattttagaaacaatattttaaaatacagcagtaagcaacaaaaactattgctctttatacatttttggcataacactgccatacggttacagaattataaaataagtattttatagtaccatacagatccagaaactggttacaacttctaccacatacacatggtattggtactaacgaacatgcacagcattctgtaattcatactgcagttgaatacagagcacagagaaggcccagtggccactggagaatcagagcttatgttataagtaaaacacacatctttgtaacaatcgtaggcattttcctgaaatatttaaaatacaagggacacaatagtttccaaaatgacataatctaccatccttcttagataatactaaaaaagaaagattaccttacataggaaacaacttanagcccttttttaaaacaggaggaaaatgcttgtcanaggacctaacattttgctctcat

SEQ ID NO: 123084 - DNA, 768 bp, Homo Sapiens
  misc_feature (48)..(48): n is a, c, g, or t
gcggccgcaagtgcttactttttacggggcaccatatgcatcccaggngaaggtcactgtgtttacagtagggagacaatgtaacatcctggcttccacacaattcacaattacagtccctgggatgcatatggtgcacctagaaaggaagtattgtccacagttgttggggatccccaaatgggacatcagctaggggcacaggttgattgggtccaatatggcctctccatgggtggtaagacttagggttttcagtgccaataatggagtccctgttttcaaagattctgcctgagggctgtctgtccaacttgtcctgtctgtctacactcctagtcgggtgacattctcttgccccatggaatgattgagcaaatagtatgagaatgtggttgggaaagttatccagaggtgctggcaggtgctttgcatgggaagtgcaggagctggggttaaggggagtggggaccaagccatggttggagccagtgggaggggccagcagagacagcaagcagttacatgaaggcacttgaacagtttgacagagcagcaccagtgccttgctcttgggaggaagactccagaagcggttctgaaagacaaatttcatcagtgtccctcccttccctgtacctctaagtacaagtacaggctaaggtattccctctgtgggtgccatggtcaatgtccttcctcaactgcccttccaataaatgtaacatcacccttttcccaataatctcctactcatatgtacatctt

SEQ ID NO: 123085 - DNA, 1802 bp, Homo Sapiens
  misc_feature (1502)..(1502): n is a, c, g, or t
  misc_feature (1514)..(1514): n is a, c, g, or t
  misc_feature (1529)..(1529): n is a, c, g, or t
  misc_feature (1665)..(1665): n is a, c, g, or t
  misc_feature (1696)..(1696): n is a, c, g, or t
  misc_feature (1723)..(1723): n is a, c, g, or t
  misc_feature (1737)..(1737): n is a, c, g, or t
  misc_feature (1756)..(1756): n is a, c, g, or t
aaaagggatcttggcaagtgggaaactgctcgccactgcagaatttcttcagaccaaggaagggactgaaacggacttggaaaactaaagcaaaaccatgactgccgggatggtctcgtgtggtgattctgcaagaaataatcaccagagcgaggggacaggtacttgagagacatgtgggcctggctgccactctgccctctgagtttctgtagggtgcccggctgccactctgccctctgagaagtgtaagaaggccacagagcatgggggtgttggcgatgaggagcggtaaagcagtgctagtgatctaatagccaaatacattaacacggacactggaagagattaagcggattttaagtcatctcctttgccaaatgacaaccaaactaggtgtcccctttttctctgcccatcttcccctagccttgtttcataaatgctgaagagtgaaccagcagctcaggctagccagttttgtttttttgaaatgtcagtctcattgtgttcctggtctgtctgctgcagtggctggtctgttccaccaagagttctggtttgcacctagtgtactcaggatcttctcagccccctgaacaagcttgcatttcttaagattctccaatatgtccctcaagagtccagtctaggacttatttctgaaggcattttacaacagcaatattttagggatggggtttcagccccacaaacaggctggagggctttgtataaaatgaattacaaacaagcaacaaaagcaaccacaagaactctctccaggatttgagaaaactgttttaaggcactgtgacatgaaaagggctgccagggatgtgttcctccccccacttcacagccagcacataatcgcccctctccttgacgacgtatgtgacgttgtattgctggttgcctacatgcttcatggagacctcctcgcagggggtggtgggcccatggaccccgatcagcagcatgttggagccagctttgctgcagtccaccaggaaggaactcttctggcccacaaaggcctttgagagccctgcccccttagaggtcaccttgctggcgtccgaggatgccttgggaatggcgctatagcaggtctctgtagacgacctggtcactgactccaccaggatggatgaggtctcgttggctgagccagggctaactagacgctggcctgtcaccttggccttgaagggactgcccacgatgtggttgggcccaccgtatttgacgctgatcaggtagttaccaggagccatgggggtgtacatgactttgtacccttcaggtgtttcctggcaatccattttaaccttggatgggccttcgatggtgacggataatgtccctggacctgctcgggtggtgttaataaagaattccgactggatacctgtggtgcccccttcgagtccccgtggcataggcgggcaccagggcagggttccccgcttgtccaggctccccaacgcgcactttgnaggggcttccancacgtggctccattngactgacatcgatggtgtggacacattctcatgagggatgaagcgacagcatactatctggctcagctcaacacgtggactcctcacggctccagagggctgtgcactttgcatcaatctgcctttgcgccatcancttatagcaaggatgctggctgggtactttnatcccgatccctgaggtcatacagtanggcgcggcgtctcngaggtgcgatgacggacangtagggcttcgggagtgctcacatgactgaggaactcgtattcaag

SEQ ID NO: 123086 - DNA, 701 bp, Homo Sapiens
gagctcgctaccttaagagagagacgagatgtcaagagaagagacgagatgatatcatttacgggggaaggcgctttgtgaagtaggccttatttctcttgtcctttcgtacagggaggaatttgaagtagatagaaaccgacctggattactccggtctgaactcagatcacgtaggactttaatcgttgaacaaacgaacctttaatagcggctgcaccattgggatgtcctgatccaacatcgaggtcgtaaaccctattgttgatatggactctagaataggattgcgctgttatccctagggtaacttgttccgttggtcaagttattggatcaattgagtatagtagttcgctttgactggtgaagtcttagcatgtactgctcggaggttgggttctgctccgaggtcgccccaaccgaaatttttaatgcaggtttggtagtttaggacctgtgggtttgttaggtactgtttgcattaataaattaaagctccatagggtcatctcgtcttgctgtgttaaaagtaagagacagctgaaccctccgtggagccattcatacaggtccctatttaaggaacaagtgattatgctacctttgcacggttagggtaccgcggccgttaaacatgtgtcactgggcaggcggtgcctctaatactggtgatgctagaggtgatgtttttggtaaca

SEQ ID NO: 123087 - DNA, 819 bp, Homo Sapiens
acgggggaaggcgcttgtgaagtaggccttatttctcttgtcctttcgtacagggaggaatttgaagtagatagaaaccgacctggattactccggtctgaactcagatcacgtaggactttaatcgttgaacaaacgaacctttaatagcggctgcaccatcgggatgtcctgatccaacatcgaggtcgtaaaccctattgttgatatggactctagaataggattgcgctgttatccctagggtaacttgttccgttggtcaagttattggatcaattgagtatagtagttcgctttgactggtgaggtcttagcatgtactgctcggaggttgggttctgctccgaggtcgccccaacccgaaattttagaagggcagtgtttgtgtacgtcaaaggacgctgtgggttggcaagagtactggggggcgattcaataaattaaagctccatagggtctactcgtcctggcggtgtcatggccgactcttcagggcaaggtcaattgcagtggttaaaagtaagagacagtgaaccctcgggaaagcgggggtctgacgaacatcccgggaattccggagcgggaccagcctgatttatgtggacacaagtggtcgctaatagtgtgccgctaaaatagggctaagtggtcaaagatggaccctgtgttgaaaatggttattctggcccgagggctaatgtaaaaaccgaaggattgatacgggcccggtggtactactaggggggcacaaaaaacgcgtgagtcggtcccaaggagaccgccgtcacaaagagggcggtataacgggcaaagagg

SEQ ID NO: 123088 - DNA, 1152 bp, Homo Sapiens
ttcctcatattgccccttctttctcctctttttatatcctctctacctttaacttcctctctttatctcccctacatatttactatcttcctaacccccatattggcccattcttttctcccttctatataacctatgttacataaagtaaccattgaaaacattcttcctccgcattatctctgcgtcagatttaaacatctgtactgaccacttaaccagccccaatatctgaccattcttccctactagtcattattaccctcactggtctacccaacacaggcatgctcataaggcaaaggctctcttaagtaaaaggaactcggcaaatcttaccccgcctgtttaccatatacatcacctctagcatcaccagtattagaggcaccgcctgcccagtgacacatgtttaacggccgcggtaccctaaccgtgcaaaggtagcataatcacttgttccttaattagggacctgtatgaatggctccacgagggttcagctgtctcttacttttaaccagtgaaattgacctgcccgtgaagaggcgggcatgacacagcaagacgagaagaccctatggagctttaatttattaatgcaaacagtacctaacaaacccacaggtcctaaactaccaaacctgcattaaaaatttcggttggggcgacctcggagcagaacccaacctccgagcagtacatgctaagacttcaccagtcaaagcgaactactatactcaattgatccaataacttgaccaacggaacaagttaccctagggataacagcgcaatcctattctagagtccatatcaacaatagggtttacgacctcgatgttggatcaggacatcccaatggtgcagccgctattaaaggttcgtttgttcaacgattaaagtcctacgtgatctgagttcagaccggagtaatccaggtcggtttctatctacttcaaattcctccctgtacgaaaggacaagagaaataaggcctacttcacaaagcgccttcccccgtaaatgatatcatctcaacttagtattatacccacacccacccaagaacagggtttgttaagatggcagagcccggtaatcgcataaaacttaaaacctttaccgtcagaggttccattcctcttcgta

SEQ ID NO: 123089 - DNA, 427 bp, Homo Sapiens
tacctaacaaacccacaggtcctaaactaccaaacctgcattaaaaatttcggttggggcgacctcggagcagaacccaacctccgagcagtacatgctaagacttcaccagtcaaagcgaactactatactcaattgatccaataacttgaccaacggaacaagataccctagggattacagcgcaatcctattcttgagtccatatcaacaatagggtttcgggccctggttctcatttgtagtcctcagctgagcttggcactgcattcaacagatggcactctgctctgagacccaggcaggtgcgtttccaactctggattttaaatgaaacatcacatttcagctcccaccgatggtgcccaaggttgcagatgcagacacactggtaacaactagaccgggcccctcatatacgcccggc

SEQ ID NO: 123090 - DNA, 2061 bp, Homo Sapiens
  misc_feature (49)..(49): n is a, c, g, or t
  misc_feature (91)..(91): n is a, c, g, or t
  misc_feature (365)..(423): n is a, c, g, or t
  misc_feature (779)..(779): n is a, c, g, or t
  misc_feature (812)..(812): n is a, c, g, or t
ccaacgcacgagtcgggtataatagggtcatcaaatcataactccgttnagcccaacttctccagccgccagcataatgcatctagggttnacaccccgtatacagcgtgaaaagtgtgtaaaatgttaccctagagcttttatatctctgtagggtagtttggtcgcaaagtatggtcacacgcacagaagtaagggtccttcaccaagatccccagctagcagtgttttccagtcacgacgttgtaaacgacggcgcagtgcctagcttattatacgactcactatagggggcaccttgtacaagaaaactgggtacgcgtaaacttgggcccctcgagggatactcttaaccggccgccccnnnnnnnnnnnnnnnnnnnnnnnnnnnnnnnnnnnnnnnnnnnnnnnnnnnnnnnnnnnctgtaaaatgtcccggttcttccataacttataaacatgatttataccgaggagatgggaaagtggacggggcagggtggactgaccggggatggggaagctcctctcgctgccccctcggggcgggcccaggccctttggaggatggggacgccaggacactcctccctgaggttgtctggccgcctctgcccctggtgctcagaatcctgcgtgcccctcaattccggaatccctcccgggaccccaggcccactgggcatgctgcccctgctactcagaatcccgaagcgccattcagttccagaatcccctcctcagctgctggggtggcggggtccctcctttccaatgtncccccccgacccccaggggacgggaagggaggngggggctcaggtctcccctctgtggcagggggaggtggaggtggaggtggaatcggaagggcgtggaaggcgggggccaggagggctcagccgatggtgaggccaaagccacactgaaacttgttcttgcggtgattcaggaaggccccaagggccagtgtcaggggcaggggtgggagcttcttctccagcgtggcacccacgatccagttgctatccacagagcctttgaagaggaggttggccttgggcaggtccagctggtacccgaaggagacgctggtgtcctgcatccttgtgctggcctcaaactccacacccacctgcagctggtcactggctttgtggtagtatgttgcgtgcatgcccgcctggcccaacgttaccgttgccaaccagttgttcaatgtgtatttcccagctagagacatgacagtgccctcctctccaggccgccggtggtagaccagctctccacccagggccaggcaaggcgtgatgctctggaggtagtgggctacgaggattcctgaacccacgaggacgtctgggttccccagggtgacggctgctgtgaagtcagagccccgatactccccgtccacctgccagttcacaaactttgactgctgggtctggatggccatcttggacctgagaccggggcccagctggtgaatgacctgagcgttgagactgccactgttgtccatgtcacccaccagtacagggaacgcctctgtgggactcagctgctttgtccccacatatgtgaccccgaagtggtagttggactccccgattgtgctgagggctactgtgtggttgacctggaaatggttactcaaccctttgttgactgtgagcttgacaccctccatctgaatgggaaacagctccttgcacttccggtggcactcctcgaatgtgcccgggttgggcaggcagccgcaggccccatcctcggcggcccctgaggcgctggcggttgcagccccgggggtccgttccgaacttcgactcgtactggtgccggcgcccaggctgcctcccagcggcggcagcgtgaagcccggcggcgagggcggaggtggcggcagccccacgagggccggcgcaggcggcggtggcggccctgcgggcggcgagctggcagccaacacgttccccatggtcgcctgtggcggcggcgcctgctcccggcctgggctccgctcccaccccgtgcgccacgcgcaaccgaacccgc

SEQ ID NO: 123091 - DNA, 1286 bp, Homo Sapiens
  misc_feature (1112)..(1112): n is a, c, g, or t
ctgcatacagacagctttatgtaaaatatataaacatttgtccaaattggtacacagattgcataaatatggcaattaagattgcatttacagatgtgcatgtacaatgctgtgcaaattatcacaatattacaatttcagaaattattcaaattggtatccaagtaaagcaattagtgaaaaaatacccatgcagaatttaaatatctcagaacaaaatttaaaatgtcttcattaaaagttcacacatttaaaatagttttattcattttatttgtatatgtcaaaatacatttttatttccaaaatagtgggttttgcaactagtttcatgcagaaacaaggtctgctcaatactaccaataaaatcaatatagcacagtagctgttcagttttagatacaaagaataaataacctaaatacaaaacactaaaatattagaaacatgtatttaatcattcttcacaggcatccaaacttcacaaatataaaccatagcatgcctaactgttgtgcaaccagaacatgttgcagtcactcaaactgatcagttatctgtatattttacctccacataagaccatggaaattctcaatattcagacctaccattcatacagttcaaatataaccaaaaataaaactcccacaactatccttgtacctttaaaatcaagaatcctgagcttggtagtaagagcataaccttatatcttcataaaaccaatcgagagagagaggacttaaaatcctgcttaccaaaacacccttccccaaccccaaagtaatctaaaataggcagtagaacacaatgaccttttaaaatgaaggggtacaaattcacatttaatatagtatacaatacaatcaataatacaatcagctactataagctttacaatgtacaatttattcaaatggctgaactgttcagtggttaaggagacagttatgtgccagaaagatgtagtattttttgcatggtttaatgaaaatataaaagctatttgtccaaataaaagccatcgtcactatgtacttgtttttgcgcttttttttcttaatatatataatataaaagctacagtgtggtcgtccactatataatgntctcgttccgattcttggctccaggtcaattcctataggttctcttaattcctatcatgcacactgtttctgttgtagtgtcttcgccacaatcatacatatatttctgagtatagtgtaactcggggtctatgtggactattacctatgggtgtgcatgctgcttcatcggag

SEQ ID NO: 123092 - DNA, 1299 bp, Homo Sapiens
actgttgaccatgtagttttatttcatcagtactcccatttttaatggattcaggcagcaccccagagtacaggactgagttcctaggggtggcctgacccagcagctgtcttctgttccaggaggaaaaagctttttattaaaaaacagaaacgaaactttagaaaatatgaaaaatcagagggaggacagaggtcatttcataaaatcgttatttgaaaacagtgcagtgtgcaaataacactcagttgggaatcgggagaccggggactagtctaactggctcaaactagctgtgaccttaggcgtgtcattcaccacttggggatcatttcctcatctaaagcattcagcacagttaccctgtaaggcactttacaggtgcaaaatcttaaggtgcccccagtgtttgctatcaagtccattctgcggacatatttggtgtcatttccttcctgatgaaaaccaggaaaggccaggaggaaatctcaggaatatattttaggcaagtccagcatctctggccatcccgtagaagatgcctctagctgcaatgaggttggctggagaatcaaattcagctactactcctttgtccaggaccaggaccctggtgtagtccatgatagtgttaagccggtgtgcgatggtcaggacagtgcaggtatcacactgggtgcggatggtagcctggatgaggttgtcagtctccaggtcgatggcagctgtggcctcgtctaaaaccaggatgcggctcttgcggagcagggctcgggccaggcacacgagctgcctctggcccacgctgagattctccccgccctctgagcactggaagtccaggcctgccggctgggagctcacaaacgtgtgcaggtgggacagctccaaagcccaccaaatgtcctcctctgagtagctgccgaaggggtccaggttcatgcgcagggtccccgagaacaggatggggtcctgcgggatgatggtcagctgagagcgcaggtcatggaggccgatgtctgccacattgaggccatcaatgcggatttcaccctttgccgcctccaggatgcggaacaggcaaagggtcatggaagacttgccagccccagtgcggcccacgatccccaccttctcgccaccgtgcacatgcagactcaggtctctcagcaccaggtctaggcccggccggtagcgcacagaataattccggaactccacctccccacgtgggggccaaccttcgggagggcggctgccttccaccacccagggcgcctctgtctctgtcttggatat

SEQ ID NO: 123093 - DNA, 674 bp, Homo Sapiens
tttgattgggtaaaatatatacaagataatgctatacttttaaaagagaaaaagcactttacattgtttaggtctttggatctgcatatgtccctgaggtaagtattccagccatgggaaactgaagcacagagaggtagtcacccaccaaagctcagggctggcctccagagcttgaacccttgcctgagctggggtcaccagcctgggtgggccacggagcgatcatcatttctccatctgatcggaaagtcacccaccactctgttctggggcccagcccgcctggctccaggcaggctcggaggccgtgctctcctggacctggtgcatctggctgcagccagcactgggcaggaaaataccgctggagcagtgccaggtgcaggacgtccccactacctgcttcctcctgggtctggagggccaccatgagcccacaatcccggccaggcccaagccggtggctgaagtgggcagctgtgtctagaagtaaggcaatgaggtaggcggcttcctggggctctgggtcttccgctaggtactcttctaggccgtcgagcagcagaagggagggggctggccccggggcctcatgggcagagcacaggagccggaaaagctctcgggttgagggtgggtactggaagcggatcttctggagtcgcattggg

SEQ ID NO: 123094 - DNA, 515 bp, Homo Sapiens
  misc_feature (456)..(474): n is a, c, g, or t
actctcagatattttatttttcttagtctgacattaggttatgagaagtacaaaagatccacaagtacaaaaaaatctgtatagctttgcggtagttgaaaaaaatgcaagagaacaaaaaaattttttgagtaatattcatctctgcagatctgagtgacagtccgcttgaaacaccgctgtaaaagtggtaaaaaatgatttcattgtgattatgttaaaatttttgatgtctcttttacttgtttaggaaatctgtcttctgacatttatactggatagttcttttcctgtattttgctgaagctcaattccctgcctcttcagggcttcaatgatgacacttttgtttttatagtcagctagtgatgttttgtccaaaggaagattctgacaacagcttcagcagaaagaaaatctggatataggtttatagttattgtcctttccaaagtnnnnnnnnnnnnnnnnnnngttgaaaaatattgatgactttttcttagtgttaatttccc

SEQ ID NO: 123095 - DNA, 1026 bp, Homo Sapiens
ctttaaaaaaatcagtttattaatgtttaaaagttgataaagctatgtgcaaaatgatccacaaaagtcagaaacctattaaatactattctttttaaaaaaacaagacatctctcggtttaattgcactgaaaaccatactaaagagacagtaatatatttttattctttgtaatatttatacatatcttcaattactatctaatgaatagctggactgaaaagtttctggcgttccctaccagttaaagtaatgcttttaagggcacaagagggtggtattttcttaagaaatacacattcaatggtgttaacacgggttagaaaaatccaataaaatgacttctgctgaaacaaatacattcaaaaatcaagaaaagtacttttaacacaacaaaatacaaccatgttgttgcttgaaatgaatcacacaacattctgaaataaacatcaacaaaagtgccaaagacagatgtcatatttgttagactcatttgctaagaaatctcccttggtttgcaaaagttaatccattcggttttcactttgttttgcttgtctgtttctcctaggacaccaaggatcctggctaatatcatttagataaagtgggcttccttatgcagatttcggcttcaatggatatgaaatggtaacacatttcattgaaaagatgttttttaaagaaatcaaagtgacttcaaccaaattccaaaaaacggatcccgcttacatggaaactttggcctcagcgaaggacattgttttacacctccaaaccatcttcatcttcccacagcctacgtactcaacatagcctatttgctatagatgatcgatcattccacaaccccagctctgataactctcaggtagttaaagtataaagtaaaagaacgttgaggaggggtatgaagggaagggagggtggggtgtgggatgtacagggcatccctaaagaagcagaagtgcacacactcacttgggtttgaaactaaagtgaaggaaaacatctcctcaaagctc

SEQ ID NO: 123096 - DNA, 676 bp, Homo Sapiens
  misc_feature (119)..(347): n is a, c, g, or t
tctggccattgtacattctttattaaacatcaatactgaaaacagatttactgacatatgtatataaatataatcaaactgagaaaaagggacaagaaatagtaatctctctctctcannnnnnnnnnnnnnnnnnnnnnnnnnnnnnnnnnnnnnnnnnnnnnnnnnnnnnnnnnnnnnnnnnnnnnnnnnnnnnnnnnnnnnnnnnnnnnnnnnnnnnnnnnnnnnnnnnnnnnnnnnnnnnnnnnnnnnnnnnnnnnnnnnnnnnnnnnnnnnnnnnnnnnnnnnnnnnnnnnnnnnnnnnnnnnnnnnnnnnnnnnnnnnnnnnnnnnnnnnnnnnnnnnnnntgagccatgcatggcgcctggccttcgctttctttttctatgtcctctccttcactatcgtcttcataataaaagatgtctcgaaatgggaaaacttgcttgggtgctgcaggagtctggattttagtgcctttttttctccatcattttttctaacttttccttcagcaaaggtagagtcgtctcataaaggtagtcgatgatctctggaaaagtctttttctgccaaaatggaacatagacagctttcagcctagaaaatttagtttgaacgtaagatggaggaacatcacctatggcactagcaagatcttcccagtctatttcat

SEQ ID NO: 123097 - DNA, 430 bp, Homo Sapiens
tttccttgactcccatgccctttaaagcaattattcctcactatgaatccagggagtatgccctagtccaggatatggttccagggcccttgcggggagtacagtttcttgacataggaggtgctaccctacctaacggaagtgcatatatgtctatcacctaataggaacagcactattactaacatatgttaagtgcatatcatatacttcatgctttacattctttgagtcctcacaaccactgaggaataagtatccatattatctattaaagattatacattatttatctgtattttacagttgacaaagctagagacacttaagtgacctgccaaatagcatactgccagcaaatggcagaccaggatttgaatttttgtctgactttaaaaaattcacgcccttagccaggcgcagtagctca

SEQ ID NO: 123098 - DNA, 901 bp, Homo Sapiens
  misc_feature (794)..(834): n is a, c, g, or t
ttttttgtcaatattcaattattaactttaatgtgcaaataaatagaaaaggaaaactacattcaaaacagctgcaaaggaaggacaagccccagaacagaaattcctcaagaacggaaaagaggcgctccctagaagcatgcggggatgggaatactgggaggaggggctcggcggggtctccggctgcacccggggcccaggtggctctgcccgagacggccgtgggcctggtacaggaatcttgatggcaagttcccttcttagaaaaccaggatgtgtacaaagtgcctgtgtgacacttggggagcgggggtggggagcccaggaggacgggtcagcatcggaatcgcccagcctggagtcaaaggcgtcaggagcctccaggttccacaggaaacttctagaaacacatctccacttcctggaaacttgagtccagctgttgcaggatggcaagggtggcggttattctgggcccactggtgtgcaggggccagggccaggggctctcatggtcggggagagaggcctggagaagtggtccccagccccagtcacttgggattcttggcacagaaagccttggatgcctccatgggacagtcgcctcagcccctcacaaaaggacaacaatgatccctggagtggccgcgtgggtcccagggtgggtgggcggatggggctccttgggtggcggctgggactgtcagggcggctctcggagttccacaaagggagatctcagccccagggagccgcaggacttggctgctacagaaataacacccccnnnnnnnnnnnnnnnnnnnnnnnnnnnnnnnnnnnnnnnnnggccgcgtatgcggccgcaagcttattccctatagtgaggataattttcgcaaacagtggccgtggt

SEQ ID NO: 123099 - DNA, 1363 bp, Homo Sapiens
  misc_feature (479)..(517): n is a, c, g, or t
  misc_feature (672)..(672): n is a, c, g, or t
  misc_feature (677)..(677): n is a, c, g, or t
  misc_feature (1242)..(1242): n is a, c, g, or t
ttttgctttaaagtctttattatcccgaatataaaagacagagtcctctaggatataacagagttctttacgtggaaacattatttttttacaagtgaaaaaataaatacctcttggaataaaggcttatatgctaatatgtgccataaaaaagtagagttttaatatttgacaaaatgtctgtgcaaagaaacaaatgcataaacacattactgctacattaaggcaatatgaaaagtatactcagaaatctcagtaaagtgacagtgtaggtttctagctttaccttagctagtattgcacccgataaggtcatctaggtctcccgacatcccagaaaacctgctagctgaccagcttccaaaatgcccaagtgggagtggaaaacatgtttaagaaaacagaagcaaaaagaaccaaaaccccttcgaaacatacagaggggacaacccaaagttaatacttaagcacttactttnnnnnnnnnnnnnnnnnnnnnnnnnnnnnnnnnnnnnnnggacaccatatctaaatacttatggtaaggctataaaaggcttgaacagttcaagcaaagcaacaccagtgggtgaagctgggatcgagtgcttgggagaagtgatgagttaactaccctcagttgtacaccatgaggctccatctctcactcangcaanccgctttcccttcccaaggagagtgctctctgttttcagtctgaaataaaatattccaccagctcagaaggcccggggagtacttgactactccacagtaatcttataacaagattggtagtattttataatcgaaaggcttgtggggtagggatagggggagcgtaaaggaatagggagccacccacattgagtgagctgctttttactagccacactggtttaaatctgacaacattgtcaactttttaaaagtcacagaattgatttgtaaacctgtttgccttccaatcattcttgatcaagttataaagacagaaatgacattaaaacgacaacaatttacaaaagactttcctattaaaaatggttggagctccatgaccatacaaaaagaatgaaattcttaaaagtaattcttacaaaatctgctgccagtaggaaacttacctcaggatacattaaggagacttacaacatcatttcctaaaaggtacccaactttttggctatgttgccacttcactgacatcaaagactttacctattcctttactagatcatnaaaaaaatcaacatccaaggaatgtgtctgcgtcccagagctcctcctggtcccatgactggagttgttgattctacgcatggatatgtttttgcagtgaggagtagctgtgttatttttc

SEQ ID NO: 123100 - DNA, 963 bp, Homo Sapiens
  misc_feature (294)..(294): n is a, c, g, or t
tcggtattttatttcggctgccttgggccccgtttgatagagcccccgtgctgtgcctcccgtgcctccctcctggatgtggttcaacagaacggtgctgtgcgttcccgccccggcggctttttttatacttcgggcgagaatcccacacgcgctgagtgttgcggtcccccgtttttctctttggggacctccttatggcccgcggtgtccacttcgacattctgggggcccgcgcccaccaacccaattggggttacagaagccttctttagtgcggcgccaatggctgcnccaaccagttgttgtggtctctgtgttgtccgcgttgtcgtgtttttccaatgaaaataaatgttttttattaggcagaatccagatgctcaaggcccttcataatatcccccagtttagtagttggacttagggaacaaaggaacctttaatagaaattggacagcaagaaagcgagcttagtgatacttgtgggccagggcattagccacaccagccaccactttctgataggcagcctgcactggtggggtgaattctttgccaaagtgatgggccagcacacagaccagcacgttgcccaggagcctgaagttctcaggatccacgtgcagcttgtcacagtgcagctcactcagtgtggcaaaggtgcccttgaggttgtccaggtgagccaggccatcactaaaggcaccgagcactttcttgccatgagccttcaccttagggttgcccataacagcatcaggagtggacagatccccaaaggactcaaagaacctctgggtccaagggtagaccaccagcagcctgcccagggcctcaccaccaacttcatccacgttcaccttgccccacagggcagtaacggcagacttctcctcaggagtcaggtgcaccatggtgtctgtttgaggttgctagtgaacacagcctcgtgccgaattc

SEQ ID NO: 123101 - DNA, 388 bp, Homo Sapiens
caatgaaaataaatgttttttattaggcagaatccagatgctcaaggcccttcataatatcccccagtttagtagttggacttagggaacaaaggaacctttaatagaaattggacagcaagaaagcgagcttagtgatacttgtgggccagggcattagccacaccagccaccactttctgataggcagcctgcactggtggggtgaattctttgccatgagccttcaccttagggttgcccataacagcatcaggagtggacagatccccaaaggactcaaagaacctctgggtccaagggtagaccaccagcagcctgcccagggcctcaccaccaacttcattcacgttcaccttgccccacaaggcagtaacggcagacttct

SEQ ID NO: 123102 - DNA, 3198 bp, Homo Sapiens
  misc_feature (3002)..(3002): n is a, c, g, or t
tttttttaaaagtcaagaacttattttattttattttaaaataaacattgaagatcccccatttcccaccaccctacaaaacttttgaatgtggaatgttcaacagcctatccattttggtaggttacaaaaccagcaaaaactccagttgtctaatgatgaatgtttgagaatagttttgtttttaaatagctgagcacctactggaagaattcctgggctaaatgctgaaaataaaatttaatttctgcacagaaaataccattaacttagtagcctttgcttaaaggtgggattaattctccatgaagtcagaatgagacaataagcagcattaacttcataggcacacagaactagtgctcaaactgctagcacaaattccaacagagtacataaggctaagtcactactcaagtgtccatttccatcaaatttagagactctccctatgcatctaagggaaggaattatcactgaatataaatgcctccaggagaaacggagaattcagttaaggttaaattagacaaaagataataagtgcaagtactagagaaatgttgctggagataaaccataaaatttgtgacactaacgtggcatggggtgaatcacataagctgctagctgttgaacaccagtgtttcaagatacaacttttataaacgttttatttgttttgcttataccatcagaactgaaactactgtccgtgatttccctgaaacagggaaatcaatctaaaacacatactggtgcctttcaaaagatagcaattgaaaagggtggtagcagcaggcatttggtatcttttccttttaaaaaaaagctttcaagctgaaggaaaaacatgtgaccgagagtgttatgattatccactagagattttcatcagtacctgtaccaatttaggtgacaatacagcaaaatccaaggattagtgacagacaatgtacatgtcataaggaatgatagatagtaccaatccttacaaaagtcattgtctcaaagaaactgttaagtgttcaaaaaggtatctaaatatttcacattaagtacagaagcggccatccggattacatcccatatttgttgcatatttttcaaaaagtgccaatcaaagcctaattttgcatcttggctttgtcttatacagtatcagctgttaaaaagcattttacatgtgtttttaaccacagttgtttggccagatgaacagtgctgtgtcaaagctggtagccagccttatatgtgtgattaggacccatgcataatttggtatgcatctgaacgttcagtgctccaatttaactggaaaagctgtgaaatgcagttgttctgccaaaccacactccactcctttcatcttcctttctagggaaataatttagtttgtcagttatcattgaataactcgagggctgatttgtagattttatccaatgtcataaaagtcaatcttgcctttttcaagccacttcaaataactatggagattattatcaccctgtaaagtatattgttttactcctaagcaagggtgaggaatctgagtatcatgtgcaaggctcaagatgacgcttaggacagaacatgcagagtaaaaatagtttccttccatatccaggtaatagaaagctgacaattgtagtcctgtctttatgggatgaaaacagtccctttacaataagtttcctgaaagggagaacaaatagataataactcttctggtaacatattatggtacactggccagtgtgtttttggcgattaaacataatcctgtgaatcagattaattcacttgctgagtgttcatttgcggcatccctctgttgggtcttgggggccctccacgacctcgtggggctccccgtggtccactctgcccagagcctcgcttgaaattctgctgatatccatcccgttgatagccagagtaatcccggggagcactgaactgagactgtgtataaccactgtttggagtgttagagaatgaagggcggtaaccatcatatcctcctctgaatccattggcagggccccggtatccattcatcaagcctctagcaccacgggagcctccacgagacacaccacgactattgtaatagggctgattgctacgtggaaatccagtgttctgctgaggaggctgctggtggttaccagtcacttgatgggactggtctggggaaccatggtaagtgccaaccactgtttgaagctgttcttgctgaagctctgtttgttctacttggtgaggctgactagaaaagctctggttataactggcctggtactgattttgctgttttaaagtttctggttcattaacaggaggaactggggcattcatattgaacaccgtttgcatggattggaatggagctgcatttacattgattccactgctatgtaaaggtttgcttgtcccagcctgaaatacttgaggctgagacgcagcaggaagggatgatgatgctgtagtctggtctgtatttaaagagattgttgcctgaatctgatcaattggttccttctgtggtcgttgctctgtagcatgagaaggctggtacaagggttgagatgctgtgtacccctcacttgtggatgataccaaaggaacctgtgtcgcttctggttgtacaggaacttgattaggctgagcaagtctagattcagaatgaactggagggcaaaccagctggggcatgtccatgttttgtgttggattcataggctgtgcagatacaatggcaggatcaagtgtctgattttcaaaatccagcatcgaatcctgtatgaaattatagggaccctgcatttgtgccataaggtcttgtactcgctgtcttctcacaaggggatctgcctgagccactggagtcaaagagtggggctctggtactgaaggggatgcagcctgaggttgctgctggagtgaatttaccacctcaaccgtttcaactgtccactcatctacctgctccgttnttcaccactggtgaactgtgtttctgccatgaactgtctatttacatactctgttgattcaacttcactttgctccagtgtactcttctgctggctcaggttcagcttcaggtacctggtcttcaactgcaggtgctgaggctgcccctcgtgccggaatcgccacccaggcctcgctacttaggacgttttgggg

SEQ ID NO: 123103 - DNA, 459 bp, Homo Sapiens
tgccggaaaggcagttctaccttaagattctaaacacacttctctcctacggaagaagaggggacgctcgacaggtctcgagtgcatggtaaccgagcggacagaccccaaggctgcaggacgcaggccgccccaactccacgaggcggtcggttgaacccggagccccccgcgcagggacctcttcattttgggccctcgtcagagaaatcgggcctcagagacggaaagaagggcaccatacagtgaagtcctgacgacaggcccccaccctcacatgtcccactcctaaaggccaaaaagccggacccacagcggaagagtaataaagaggcctggggtacagtgccgcgtccgagtcaggttccgaagtttcttgtcgatcaccccgagaatctgcttcatggcctcggtctggacagcgccggtgccggttgcggggtgctgagaagccggcgc

SEQ ID NO: 123104 - DNA, 1307 bp, Homo Sapiens
ctgggagcccttaaccctccgggagcccttaaccctccgggagcccttaaccctccgggagcccttaaccctgcatttgtgccataaggtcttgtactcgctgtcttctcacaaggggatctgcctgagccactggagtcaaagagtggggctctggtactgaaggggatgcagcctgaggttgctgctggagtgaatttaccacctcaaccgtttcaactgtccactcatctacctgctccttttcaccactggtgaactgtgtttctgccatgaactgtctatttacatactctgttgattcaacttcactttgctcagtgtactcttctgctggctcaggttcagcttcaggtacctggtcttcaactgcaggtgctgaggctgcctcttcttcctcacacagcccattctggtggttgtgggtgctgtcaaagtagtttgactgaaaaacacgctcaacaatttcctttagaactttataggtggttccacatacaggtttttccttcccttccagcaggtcccacaggtgaatggaggcatgttcatactgttcattcaacctcaagctcatgtcccgttcagggtctactagcttatagaattcatccaacaatgacaactcctcttcggacaatattggcactccattcaaaccttgtttcaggtcagtccgcacttcatcatctcccaatttgtccaaaacatactgtagctcaagtacagtttttaaacgtttctgttcagcttcttctctcataagctgctcccgacgtgctgtcttctttattgttttctgaatatcttgacttagtgccatgaaactcctctgtaattcttttgcaaactccaaattatttgtgacttcctggtacttagaaacggcatccagctgatcttgattaagcctttcccctttgttcattcgttcctggtaatcatcaagcttaccctttttcttctccaggttccgaagtttcttgtcgatcaccccgagaatctgcttcatggcctcggtctggacagcgccggtgccggttgcggggtgctgagaagccggcgcggcggccccggctcccgcggccgcctcactcccggaggagcccgacggcggtggcggtccggacgacttgctgccgctcccgctgtggctggtggccgagggcatcgtgcgcgcgcggaggccgctgagaaatcacgagtgggcagctgagggggcaagggtggcggtcccttccgggcagtgtcgcgcgctccgtgggcagagcgacttcgccctgtcccgctgcaccgagagccgctcc

SEQ ID NO: 123105 - DNA, 299 bp, Homo Sapiens
cctgatggcctgtcgagagatagagaatgggcgggtaggtgccctctgcccccaggtttcatgtccttgtgggaggagggaggagggatcttgctagctcctccttgaccccaggacccgagggtccagctcttggagtgaccttattgtagctctgtgggaagccccactgttcctctaagtttttgttgatatgttattcatcccccagggttaagggctcccggagggttaagggctcccggagggttaagggctcccggagggttaagggctcccggagggttaagggctcccgg

SEQ ID NO: 123106 - DNA, 362 bp, Homo Sapiens
ggtcactattgaagttggctaatgtcactattgaagtcaagtgagagagagggccctcttggagtcaggccacctaggttcgaattctggatcctgcttccggctcctttcctctgtcccccttctcccctcggtgccctccaaccagtgggcctgggaaagcgtgttcatgctggaaatgcctgcccagcccttgcccagtcacacagggttaagggctcccggagggttaagggctccggggggctcccggagggttaagggctcccggagggttaagggctcccggagggttaagggctcccggagggttaagggctcccggagggttaagggctcccggaccggttaagggctcccgg

SEQ ID NO: 123107 - DNA, 470 bp, Homo Sapiens
acagcattggccttgttcatttcgtgaagatgcagtacttaactcatggggcctggagtctctgttttggtgatggcatcactgctgagaaatttaagtttgcctgattctgttgtccacttctggtgtcctgggactgtctacagttgggaccaagcaaatccaagggttaagtgctcccggagggttaagggctcccggagggttaagggctcccggagggttaagggctcccggagggttaagggctcccggagggttaagggctcccggagggttaagggctcccggagggttaagggctcccggagggttaagggctcccggagggttaagggctcccggagggttaagggctcccgggggttaagggctcccggagggttaagggctcccggagggttaagggctcccggcgggttaagggctcccggagggttaagggctcccggagggttaagggctcccgg

SEQ ID NO: 123108 - DNA, 798 bp, Homo Sapiens
ttttcctgaatgacacccataacagctttattttcaaaggcgggatccctccccgggcttgtgatgggacggcgctgtgggcccgagcagcagagccgtgcaggacaggcatgggcaggggtggggcagctggcccgggaggccggcaggtcccagaagacacctcacacgggttccatctgcagctcctccccgtccacagcctcaatctggtggaaggcagcgtgggagccgatgaccaccagggtggctcccagcacccagaagacggccgagcccgcaccagccagccagaagaaggggaaggagatgcctccagccagagcatactgatgcgctgggctcacctctcggccaaagagcacaagcttggactccaaggtgcgcagatagagaatgtaacaggcgccgaaaaagacagccagagccaccagcaacataggggacgtcaccacacagtacaggatgaggcccaggaacacgaacacatagttgctctggtagtactccacgttgcgtacgaggcgctggcacagctctcccaggttgcggggccgtgagaagcgctgctggtccacgaaggtgctccagggccggatggtcgcgcggcgccgctccagccactcccggcctgcaccggagggaatcagcttcggcagcagggtcgtgccgctcagcccttccgcctcggcatctttctgctggtccttctgcgctgccatgtttgcgtcgtgaggggtagagctgctgtaaccagcccggtaccctcgacgcgtgggtcgacgatatcccggctac

SEQ ID NO: 123109 - DNA, 489 bp, Homo Sapiens
  misc_feature (479)..(479): n is a, c, g, or t
gctcgctgactcttgaggatcccccgatatttgtggatctggctgtctttttcggcgcctgttacattctctatctgcgcaccttggagtccaagcttgtgctctttggggagaaaccccctgcccagatgaatccttggtccctcaaatcttggtcttttggaatgcagacagacctcagaccccaaatccaagtccttcaaaacccaagtccgcccaagcctagatgtacactagatcccccaaacctgatcccttaaaatctcagacacaaccgatccttctatcgagtctcagccccctcaaattgctattcctcaaacccaggatccacctggctgctgtgccttaaacctactccttttcaaaccacatgactcctcccctctctctcctccccttgccgctctctgcggccaacatcagctgcaggtgcccacactggacaccaggttgccaccttacacttgcctagatcntgtcccgttt

SEQ ID NO: 123110 - DNA, 499 bp, Homo Sapiens
tttatttgtccaacaaatatttattgagcaactatcatttgccagtgactatcccaggtgttagagatacaaccacaaacaaaatagatgcaagtccctgccctcatgggacttacattctagtggaaggaaacaggtaacagacaaaatatatatgcaaaacagataaataaagtgcatgacatattattggatgataagtgctatggagaaaaacagagtaagaaagaggatagaggggatggatgtgcaggttgtaattgaagacctaaagatgaacaatcaaactgcaaaactattacagaaactatctttacatcaaacaagacacacaacacagccaaaaagattaactttacttctgccaacattaaaaacttatatattataaaagatatcacaaacaaaaaacattgactaggagaagataatggcacccaaatagttttcgataaatgattaatattgataagatgtagagttcctacaagtcagctgg

SEQ ID NO: 123111 - DNA, 1358 bp, Homo Sapiens
  misc_feature (292)..(306): n is a, c, g, or t
ttttcaggaggatcacaaagttgtttattttcccacctataagaaaagatggatgatgcagagtgccgagaaatcccagccattcccctggtgaacatactggaggcccacacgagcctaacaggctgtgtctttaccaagggattttcctctatttcaacagaactgcaatttcccttccaagtgctccccgaggcattctgtcatgctgcttctggggataatttatcatccacgtctgtgctattctacagcagccatgtccttagaacatagaaaatctgattggccnnnnnnnnnnnnnnngtgccaaaatgtcaaatttcatacaatcagggcaagaactggtcttcttttggcatttggactggctgccccctaaaaaatgtctttctttccttggcccttagcaaggcccagccagaggcagagaaagggggtgacacttagccttcgcattaaaaaatgagcaaggttttcaaccaaacagttgagcaactgggctcattttttaaacaccgaaaatacatcagatggacttattcatctggctcagcttaatacatgttggcctaatgctacaaatacctaacattaaaaaaagtctgagggtataaacaagtacagaccacagtcactggcagcaatgatttggcctggaggtgcacctgcggctgtgcggcagaccagccctcagaaccagtaatcagagacgaagatgtggacgttgacaacatttcggtgggagaccacgcccccgaccacatagttcatctccagcttcaggacggcatgaaatgggcccacgacgggccgcacctggcgcacgacacccacggtcatgccgtccatgtaacgcttgatgatgtcaaaagagtcccgcaggttcccttccgtgatgtcgaagatgatgttagcctggctggcaggatgcggtggcgtgatggcccggaggaagatgatctcttcagggcgggtgaactcgcggaaggtaggcagcgagatgacggtgtgggagatggtgtgcacggggtcgaacacgcatgtgacatcgttggggcggcaggacttgatgcagcggaccgtgtctgtcttctcctgctggagcgtggctgcggagcggcggtagttctcagggcactcgaaggccaggcagcggaagccgccctggatgttgaagcaggtctcgttgatggagcagttgtggatgccagtcacacactcatcaatgtcttggcagttgcggccattgggggccagcctgtagccagacgaggggcagctgcactggaagcttccagggatgttgatgcagcggtaggagcagatgtggcccccggtgggcagggcgcactccc

SEQ ID NO: 123112 - DNA, 1439 bp, Homo Sapiens
ccattcacacgcctgtcataaactcttcctggacagccgaggctccaggcttcggctgatgcagcagcccagcaccggggtacgtggtatgtcagacgtagctatgctctcaagcttattgaacatttctgactctgtgccccccttccatgcccgttcagcaaccacctcccacgttcttccactgtgacttccttgcagtttctctctggaccttgcgcagatcctgcagggaaatccagccaccctcagtcctgtccactgggaggttcaactccctcaccagccactcgccctcatccgacagccgataccagcggaggcccttggtggcagcgtacatctgctgggccttctcagctgcctcctgctgtgtgagccggtggttaaactgcattagtaagcgctcagcaaagggctgcccagcaccatagatgcggccgtagttgaagattttggcatgctcacggctgatgcccacagtagtggctgtcttactgtgtagatcagtgcgcctgctcttcctgccctgcagtgtcatccacccaaaggctgtgcagccatgcatgccggcaaagtgggcgtctccaagcacagctgcaatccacagctcttgggagtccacatcagcacccaccagggtgtagccaggtggggcctgcaccatggctttcaactcactgcctactcggtcaggccgggcattgctggcgttgagccatgttggctccacagcccggcgagtgattgtgccggcagtccccacttggggcaggatggccccatagaggccttcctcatcatagtcggggtgcctgatcacagcacggggcagagctgacctgggcagccacaccaccatctgggagctgatacgtttatgggcgttcctccagaaagaaatcattttgttgatttccagagcacggggcccactggcacctcctgggccagcctgcagggtgccatcctccatcttgggcaggaagtccttggcaaaggggcttcccacattacagctattaccatccttgtgaggcagcttgaaaaaccagcagccagggatgtccacgtcgttgtaaggtccattgccatggtgatagctgggctgggtgtccttggggccaccacgggcagtcagagctaggggttgacctggcactgcagctcgcaagttctccatcttggcctcagcctccacttctaagtaatccagttcttctaccgtttgccatatggcactattgtcagtgagcaggaactcctccgccaggccggcctcctggggcatcagctgctgcttcccctgttcgagacagtgcttcctgtacagggactcgatggctctgtaggggcagaccaccccagctgactccagggtggtacctgtcggcctcgtgccgaattcggcgcgccgtgacttcatactctttcgcact

SEQ ID NO: 123113 - DNA, 2376 bp, Homo Sapiens
  misc_feature (67)..(76): n is a, c, g, or t
  misc_feature (78)..(100): n is a, c, g, or t
  misc_feature (102)..(102): n is a, c, g, or t
  misc_feature (104)..(118): n is a, c, g, or t
  misc_feature (120)..(142): n is a, c, g, or t
  misc_feature (144)..(145): n is a, c, g, or t
  misc_feature (147)..(169): n is a, c, g, or t
  misc_feature (171)..(182): n is a, c, g, or t
  misc_feature (184)..(209): n is a, c, g, or t
  misc_feature (213)..(244): n is a, c, g, or t
  misc_feature (247)..(247): n is a, c, g, or t
aaaaaaaaggggcggtttttttaaacaaattcccccgccccctcctaaagagaattacttaccaggnnnnnnnnnncnnnnnnnnnnnnnnnnnnnnnnnangnnnnnnnnnnnnnnncnnnnnnnnnnnnnnnnnnnnnnnanncnnnnnnnnnnnnnnnnnnnnnnntnnnnnnnnnnnncnnnnnnnnnnnnnnnnnnnnnnnnnnaaannnnnnnnnnnnnnnnnnnnnnnnnnnnnnnnttncactgtgtgggacgcttgctaagactttattaacgccccggagggcagggttaggaaagcaacaggagggagaccccgcgacgcgaagcgagtgctcagagctctgcagacacaaagatgaaaagcttggccacaaaggagctgacggtgccgtggcgagagagatccatcttgacggtcaggagcaagtccctgggctcggggacaggcttggtgagggccaccaccccactgtgggggctcaccttccgggtggtgaaaaagccctcctcattgccgccggtgatggccagctgcatgctgtccccggggacagcactggaggggcccatgcggaaaaccaccgcgggcgcttggatgttggtggggaaagagaggtggtagtaggttattctcagaggcagcttggagcactcccgattctcatggcaaggcaagcgctcacagcgggtggctgcggagcggcggtagttctcagggcactcgaaggccaggcagcggaagccgccctggatgttgaagcaggtctcgttgatggagcagttgtggatgccagtcacacactcatcaatgtcttggcagttgcggccattgggggccagcctgtagccagacgaggggcagctgcactggaagcttccagggatgttgatgcagcggtaggagcagatgtggcccccggtgggcagggcgcactcgtcgatgtcttcacaggtgactccatccacatcgctgagctggtagcctcgccggcagtaacactggtaggagccgtagacgttggcacactcctggctacaggggctgctgctgcactcattgatgtcttcacatgacctgccatccacagagagccggaagcccacggaacagctgcagaggtaggagcccagcgtgttctcgcacttgtggccacacaggcgcccggggtagcgctggcactcgttgacatcgacacacatcctgctgatgccgtcaaaatagtaacccgtcttgcattcgcagcggaaactgccgggagagttcacgcagcgatgtcccttcccacagggctcagcaggtggcgcgcactcgtccacatcaacacagcgcgttccctcctcgttgagatggtagccacggccacagttgggcacgttcttctggcacgtgtaggagccctctgtgttgatgcatgtatgcccgatagggcacggggcactgatactcaaacactcattgatatcaatacagttgcctagagcatcttgtataaagccactcttgcactgtagcttgggtcggcagcggaaggatcccagagtattctgacagataaaatcggggaggcagttatgaataccactctcacactcgtcaatatctttgcagctattgtcctctgtgagctcatagccagtcccgcagctgctgtcccgctggcagcggaaagagcccactgtgttgatgcaggattctccaagccggcagctgtggctgcccgtgatgcattcattgacatcttcacaggagacaccatcagacagcagctggtagcccacgaagcaggagcagaccacctcgtcacccgtgtctcggcactgctgcttgcagggcccgcctcctcggcagcggtcattcagatatgggtcctcttgttcctcctcaacctcaatgatcttatccgtttcttggaggcccccgacatccaaatctccggtctcctggctcttgacacagcatgcccggaagacctgtccacactggtagccaaccatgaggctgtactcgcagctctggccctgggcctgggccgccctccccagcagacagcaatggcagcacctcttcacaaatgtggcctccaggctggcgttgtcaccgtggggcgtggcacagcggtcctgctcgttggccaggctgatgcccgtggcacagtgcagctcctccagctggctgtggcagcactgctcctgcaccatcctgcattctttggattccgtagcatatggcagcgagcagtccttctgatgagtggccatccggtgtccgtccgcacagcaggcctccaggaggacatccgcgtccactccggccgccagcagcgcaaggccgccgagcagcagcagcggaagcgggacccggcgcga

SEQ ID NO: 123114 - DNA, 677 bp, Homo Sapiens
  misc_feature (654)..(654): n is a, c, g, or t
gtcactgtaactatttttattacattacaataattaggagtagtacagttcatgacaaaaatattacaaattttagatcacttcacagcacatactcctataaacatttaaaagttaatttcaattaaaagagtggtcatttttaatgtttgatatgaccaacattcctaggtcagcgcaaccaaatgatggaaaacaactggatcacactgcatatgtcccacaaaagaaagcacaatgtacaaaatgtgcatgtttcagtttacactatacaaaaatagttaaaatacattccaggtaaacatgttacattaagaaatagtactagtaagaaattggcactcaaaggaaaaatgcaaaagtattttcaacatgaaaacacaagacagtggaattggaaactttcggataaaacactgtaacccagttagctctgtgggggtgtggggggagagatgggccctcaacatttctgcagataacttttttcccctaaattcatctaaattacctatcattatcccaaacaggcacttcaaactattaaactaaaacacagatcttaatctagttatgactattcttcaagaactcatgtgagtatctttctttagaaagaaagtttcattttatgacagctattcaggttctcantgcagaattcatgctatccagta

SEQ ID NO: 123115 - DNA, 1190 bp, Homo Sapiens
  misc_feature (348)..(349): n is a, c, g, or t
  misc_feature (352)..(354): n is a, c, g, or t
  misc_feature (356)..(364): n is a, c, g, or t
  misc_feature (366)..(370): n is a, c, g, or t
  misc_feature (1067)..(1101): n is a, c, g, or t
  misc_feature (1105)..(1148): n is a, c, g, or t
cccctttaaattttttgaattattcggaaggcctttcggcctttggggacttccccctgttttgaattaggattccccagttatattggacccttccaagaaacttcccattttgggaattttggtttcaagaacacgcctccgggtttggccgcccgggggcggtttttttaatttgggggaggaaatcccaaggcccttagttcattggcccagggatttcccttagggaaaacaggctattgacccatgtttcactttaccctaactgggccccgcggcgcccaaaacgaaatggttttaggaaagccttcttcgaggggcggagggcggccggacaattttttnnttnnntnnnnnnnnngnnnnnttgaaagtatcacaccagaagtttattatggaacaatcacatatgttgactctcctttgaccctcactgcagtgcactttcattacttatcaatctgggggcgggaaaaaggggtgcagccagacaagagaatatacaggaaagaagcattgtatataagcctatgtatttcagtaatgctgctacagggggatacaaaatcaggtgccagcctccagaaaaaaagagattttttttcttccctcagtctcatttggcccctcggcgcttcctgaagtagcgattataggcagcattgtatccataaaccatggcgtagcgttcgcaaagtctgtagtcatcacaggcttccctattgagctcgtggacaggcttagagcgttctcggatcctctcttggactttagctctccatctctgctgaggggatatgaaggtatttgcatttctcctgttaatgaagggattaagttcataagattccatgctttcatgtgattcataacacaaagttactaccgctaaggcggccaggatggcaagaaggatcaggctcttcatggtttcgtcctgcaggtcagtctcagggtcttgtgtagcagcagtagggagagaggctcctatgggatgttagtggaaggctgtccccggccgtaatggccgaattcccgggcatatgtccggtaccgtcgactgnnnnnnnnnnnnnnnnnnnnnnnnnnnnnnnnnnncggnnnnnnnnnnnnnnnnnnnnnnnnnnnnnnnnnnnnnnnnnnnnattaagggagcgccctatagtgattctatacccaatgtcttt

SEQ ID NO: 123116 - DNA, 971 bp, Homo Sapiens
cgcaatgaatggattctgcgggaaccctgtgaagacccgtggtctctccgtaccttcatggatttggtcgaaaactcgacttgcgcccggggctttttactccgtggaaggcccgccaccttctggaagccacggaggctctccatggacagcgtgttggccgctgtgccaaggaaagggggcgccccggccctcccggagtgggtttaaacaactttgtggagagcacgagtcgcccgaaaaagttccgatttatgaccatcttgtcggactgttcttataatgtgtcaggtgtttaatcatcattgtggggggctctggttgtagaagaaagcttggcaaggtggggttatacaggagagagattatacaggagagagttggtctgaggccagaacagttcaagggaaaaagaaaagggagctgatggatgggatctgtctgtgggcccctcaaggccctccagtactactctcgcctgcctcaggttcctccgactgattcagttctgcacgctcctcctcttcctcctggttttctggggccttcctctcctctcctcggcgttgccgcctttgccacaagatgaccccaatgagcagggcggctgtccccaggcctcccaggatccccagggccagggctagagttcccagccctgatcctcccacagagcctgcagttggcccctcctcgcctggttcgatgatgctgatgctgacagcacggctttcctggggcccgtggctggaatgggtggccacacagctgtaggttccctggtcctgaggccctatctcagggaggatcagcacagggctggggggaaggggcaagggcacaccatccttcatccagtggatttgaggagagggctgggcagggacttcacaggtcagggttacggttccaccaggagctactgctccaccttctggctccaccaccaattggacctcctccagaggcac

SEQ ID NO: 123117 - DNA, 909 bp, Homo Sapiens
  misc_feature (789)..(823): n is a, c, g, or t
  misc_feature (827)..(867): n is a, c, g, or t
accgccaatttggactcctccagatgccaggctccagacacggggctggactggggctgtgcgcaaggcccggtgtcggggaaggcctgggctgaagctacaggagaaggtgggacggggatctcctccccgggctggggtcaccattagctccgactgcagtgtgaagagccctgtctcagggtgtctcctggtctgttccttcacagatactcccttctcattaggcaaccaggggcttcccatccaagtgccagctaagagtccctgcagggtagcttccctctgacacacatgtccccaccttattgggaacaccagccgtgagttcagaggcagaatctacaatttctggcttcccaggaatctggtagacacggactcggtagttggacttggtctccttttccattcctgttcattgcctggcaccggaaaatcccctcatcctggatcccgacagccggaaggaagagggagccgtttgggaaggacacgagccacactgtcccaggggcctcctccctggggagacaggaccttccaagcttctgtccggcctgtgttcagtttccattccagccgctggggtggtttcttgggggcccccttacacttcagcaccagtggctcgccaatccgggctgtgatgttttgagcacctactactgccccccacagactgaggaccagcacccaggctccaactgctgttccggctgccatcctgcttccttccccggccgtaatggccgaattcccgggcatatgtccggtaccgtcgactgnnnnnnnnnnnnnnnnnnnnnnnnnnnnnnnnnnncggnnnnnnnnnnnnnnnnnnnnnnnnnnnnnnnnnnnnnnnnnctaacagacgagctagcgccctatagtgatcgataagttctt

SEQ ID NO: 123118 - DNA, 1140 bp, Homo Sapiens
  misc_feature (44)..(84): n is a, c, g, or t
  misc_feature (88)..(122): n is a, c, g, or t
ccacatcgtatagactcactatagggcgctacgtctttgaagannnnnnnnnnnnnnnnnnnnnnnnnnnnnnnnnnnnnnnnnccgnnnnnnnnnnnnnnnnnnnnnnnnnnnnnnnnnnncagtcgacggtaccggacatatgcccgggaattcggccattacggccggggagacagagccaggaccctggaaggaagcaggatggcagccggaacagcagttggagcctgggtgctggtcctcagtctgtggggggcagtagtaggtgctcaaaacatcacagcccggattggcgagccactggtgctgaagtgtaagggggcccccaagaaaccaccccagcggctggaatggaaactgaacacaggccggacagaagcttggaaggtcctgtctccccagggaggaggcccctgggacagtgtggctcgtgtccttcccaacggctccctcttccttccggctgtcgggatccaggatgaggggattttccggtgccaggcaatgaacaggaatggaaaggagaccaagtccaactaccgagtccgtgtctaccagattcctgggaagccagaaattgtagattctgcctctgaactcacggctggtgttcccaataaggtggggacatgtgtgtcagagggaagctaccctgcagggactcttagctggcacttggatgggaagcccctggtgcctaatgagaagggagtatctgtgaaggaacagaccaggagacaccctgagacagggctcttcacactgcagtcggagctaatggtgaccccagcccggggaggagatccccgtcccaccttctcctgtagcttcagcccaggccttccccgacaccgggccttgcgcacaggccccatccagccccgtgtctgggagcctgtgcctctggaggaggtccaattggtggtggagccagaaggtggagcagtagctcctgggtggaacctggtaaccctgacctgttgaagtcccctgcccagccctctcctcaaatccactggatgaaggatgggtgttgcccttgccctttccccccagccctgtgctgatcctcccctgagatagggcctcaggaccgggaactacaggtgtgtggccacccattccagcaggggccca

SEQ ID NO: 123119 - DNA, 1041 bp, Homo Sapiens
  misc_feature (263)..(263): n is a, c, g, or t
  misc_feature (957)..(991): n is a, c, g, or t
cggcggtgatactgtatacgaagcgtgtgttctgtccgttcgttttgttactcttctttgtggcgatttgtctctgaccttggagcacctcttggtggcagccacacttctctttgtggggctccggcctccatctggtggtcccgaagatgggccccttgggcccgccagtggcctctccagggacagttccaacccggcctgatgggctttgcaggcccgtttccgggaagcctggtctgagctacaagagaggtggacgnggatctccctcccggctggggtaccattagctccgactgcagtgtgaaaacctgtctcgggtgttctccggttctgtccttcacagatactcccttctcaattaggcaccaggggcttcccatccaagttccagctaagagtccttgcagggtagcttccctcttgacacacatgtccccaccgttattgggtacaccagtccgtgagttcagaggcagaatctacaatttcgtggcttccccaggaatctggtagacacggactcggtagttggacttggtctcctttccattcctgttcattgccgtggcaccggaaaatcccctcatcctggatcccgacagtccggtaaggaagagggagccgttgtggaaggacacgagccacactgtctccagggtcctcctcctggggagacaggaccttccaagcttctgtccggcctgtgttcagtttccattccagccgctggggtggtttcttgggggcccccttacacttcagcaccagtggctcgccaatccgggctgtgatgttttgagcacctactacgtgccccccacagactgaggaccagcacccaggctccaactgctgttccgtctgccatcactgcttccttccagggtcctggctctgtctcccggccgtaatggccgaattcccgggcatatgtccggtaccgtcgactgnnnnnnnnnnnnnnnnnnnnnnnnnnnnnnnnnnncgcacgcttcctcgtctaaaatctctctctgcgctcggtcgttttgcaga

SEQ ID NO: 123120 - DNA, 1169 bp, Homo Sapiens
ggttagaagttttcccaagcccctttattcctttccccccaaaagccctgccagttgggccccctcccttgggctttgtttcgaatgatgctgaaatgctgaacagccagggcttttccttgggggccccgtggctggaaatgggggggcccacacaaggcgttagggttcccctggtcctgaaggcccctattttcagggaaggattcagcccccgggcctggggggaaagggggaaagggccaccccattcctttcatcccagtggatttgagggagaggggctgggccagggacttccacaggtccagggttacggttccaccagggaggctactgctccacctttctggctccaccaccaattgggacttcttccagaaggcacaggctcccagacacgggggctggatgggggctgtgccgcaaaggcccggtgtcggggaaggcctgggctgaagctacaggagaaggtgggacggggatctcctccccgggctgggtcaccattagctccgactgcagtgtgaagagccctgtctcagggtgtctcctggtctgttccttcacagatactcccttctcattaggcaccaggggcttcccatccaagtgccagctaagagtccctgcagggtagcttccctctgacacacatgtccccaccttattgggaacaccagccgtgagttcagaggcagaatctacaatttctggcttcccaggaatctggtagacacggactcggtagttggacttggtctcctttccattcctgttcattgcctggcaccggaaaatcccctcatcctggatcccgacagccggaaggaagagggagccgttgggaaggacacgagccacactgtcccaggggcctcctccctggggagacaggaccttccaagcttctgtccggcctgtgttcagtttccattccagccgctggggtggtttcttgggggcccccttacacttcagcaccagtggctcgccaatccgggctgtgatgttttgagcacctactactgccccccacagactgaggaccagcacccaggctccaactgctgttccggctgccatcctgcttccttccagggtcctggctctgtctgcccctctccctgctgtggcctccgccctaggtggggcctgcaccctctctc

SEQ ID NO: 123121 - DNA, 795 bp, Homo Sapiens
  misc_feature (740)..(740): n is a, c, g, or t
tttggaagagggacggattgtgaaactttattgataaagaattccgttccaaaggtgtattccagtcacatttaccctacataaaataccaacatcttcttattgcaaaaacagaaactccggccgttgtattgatgctgacttaagagaaatagaagcctctatataaggcaagagtccataccagaagaattcgaccaatatgagatacctccaaaaaaatcaactcaatgacctactttatatgtaagagacccaaaaaagtcagcttttgtgggaagttgatatgcagtttattgaacaaacagagtgtacagtaactaaacgaactgtgtatttccaaaggaattaagaccgcatatctggattcacacctaaaagcacatagaaaattaaaccaaagaagggcaagttttgtactaaaatcacttgggcccaggttattctataagaagattctcactggcatttgatagtaacttatcaccttctgtgcgagcttgggaaccagctgactcagtgaactgcttcctgtcttcagtgcgtgatgacacagatgtgtcaagcttaatagatcttatatgtaaatttaagaataagaagttttatacccaccctggttttattccaaagttactgctctgcaattttgggctccatccttaggaagatactggaaaagcaagagaactttctcagctgcctgtgtgaagtgacgttgttctagaacggtgccctgnggcctcatgcacgatttcacaagtatagctgcataatctgtggatgtcactgaaa

SEQ ID NO: 123122 - DNA, 492 bp, Homo Sapiens
gtagcattaaaagtatgttacaggtgtaagatacttcagagttcagaaagaagggatcttgggtctttatagcaaatactaaatagtaagtgaagctttgttttccaccatggactgccacacatccaaccatccaatgtttatgtctcaacaatccttcacagttgtctattcataagaaccccaacacatcggagccccaacacctgttggtgatgaagggcgccccagaaaggatcctagaccgttgcagctctatcctcctccacggcaaggagcagcccctggatgaggagctgaaagacgcctttcagaacgcctatttggagctggggggcctcggagaacgagtcctaggtatgcagataacctggtaacagagtgcctgggcacgtttttatccagtaacctagtctggtagacagttaacaagtgatcctatgaacctctatgtcttgttgaccttcctctacatcttttaggggcaatcct

SEQ ID NO: 123123 - DNA, 1458 bp, Homo Sapiens
  misc_feature (24)..(24): n is a, c, g, or t
  misc_feature (28)..(28): n is a, c, g, or t
  misc_feature (1071)..(1094): n is a, c, g, or t
tgtgtcaacacatggcacgtctcngtcngatcgagtccagttatcgacagatgtgacgtgacccaagtctcacagctctagttctcactagcagtttccttgccatgcgttgcagtaagtgtcagacagacggtgacagtggccagcaaaccttccggcacattggctacgatgataccgatgaggaagatgacagcctcaagccaggtgtactcaaggatgagagaaaggatgaagaaagacacacccaggaacacagccacacccgtgatgatgtggataaaatgttcaatttctgcagcaatgggggtctggcctccttccagcccagaagcaagtgtggcaattcttcccatcacagtgcgatccccagtgtagacaacaataccacgtgcggtgccttcaacacaattggttgaaaagaaggcaatgttcctcgtctccagggggttttcatttgtgaaatctggagacctagtctggggttctgattcaccagtgagcgaggagttatccaccttgcagccatttgcagatatgattctgaggtcagcaggaattcggtctcctccttttacttccaccagatccccaaccacaacttcctccgcatttatgctcattttctcaccatttcgaatcacaagggcttgctgagggaccatgtttttgaaggattccatgatctttgaacttttagcttcttgatagtaggagaagcaaccagttatgattacaacggctgatagcaccacacccaggtacagattatcgttttgaggttcctcttctgtagcagcttggatgctataagccaagaaacaaagaatcgctccaatccacagtaacattgagaaccccccaaagagctgccgacaaaacttgatccattcaggagtagtgggagggggagtgagggcgttgggaccatctcgcgccaggatctcagctgcacgagcagatgttaatccccggctcaagtctgttccatatttacgatgaagttcatcaaggctaagtttatgatcatccatagaaacttctttcttcagttcatccatgtccctgtcnnnnnnnnnnnnnnnnnnnnnnnnatcaccttgttctgaaacagctgcaggctcatacttatcacgtccaacccccttccccatggtggcggtgctcagtgcccggcgccgggtcctgtcgctggagaatcagagagaaaagcacagagcagctcccggccgagcgagcgggaccaggggagccaagtggagggagctagggctgccgcggggcgggagggtgggagggcggccggcggctcgggccgatgccgccgccgctgttgctgccgccgcccgggctgctaccgctgttgccacgtgtccgcctcctcccgccgctgctctgcgccccagaccccgcccacgcgtccgcggacgcgtgggtcgacgatatcccgggaattcc

SEQ ID NO: 123124 - DNA, 3038 bp, Homo Sapiens
cccctttttgttgtgtgtctcagtcttgtttttttttccattataatagccatctttatttgtaaaaatccagatataaaatgtattctttcagtctttccgggtgttccttttttacaaaaacaaaaaggcacataaaaaccttccccgctgtcatttccacagatggatggttttcaggcagcctcccccctgccccccatagagctacatgcttcattccaggacgtcttgcttccccacatgctgcggtgctttcctaccagggtagagttccaaactccaagactgaagtacacaaagagggggtgggtgtcggatgcagagtgtgtggcctgatgctccacggcgtgcaggacggggggctaatagtaggtttccttctccacccagccgccagggcgtcgcctgatgatgagttttctgacttcgtcatatacgaagatgagaagagagtaggggaaggcacagaaccaccaggtaggtttgaggggatacatcctaagagcaacacccattccagggcagtaggaaaggaaagcagccagggctgtctcttcaaagaggccaaatatcaagatcttgttcttcatcccctgctggaagaccgaattcctcctggtcttacagatgaccaagtcggcccactgcaccaccacgatactgacgaagaaggctgtgtggcaggtgaactccacgattttcctctgctcataggtccactgctgcccgtagctgtcttccacatcgttgatccagcggtcatcccagtccactcggaggcccaacaggtgaattgggaggaagccgttctcagccagaatcacaaagtaagtaaagaagcctcccagggcctggatcattccaatctgcccataggccatgctgatcagccgctcattcacaagtttgtctgttttgggatttctgggctgtctcttcatgatgtcactctcagcctgctcataagccagggagatggcaggaaccatgtcagtgcccaagtcaatgcagaggatggtgacagtccccagtggtagtggaatgtttgcaataataaatatcaggaacggggtgatctcgggaatgttactggttaaggtataagcaatggatttcttcaagttatcaaagatcagacgaccttcctctactccagtcacaattgaggcaaagttgtcatccagaagaatcatgtcagcagcttgcttggacacatctgagccagcaatccccatagcaaccccaatgtctgctttcttcaaagctggagagtcattcacaccgtcaccagtcacagccacgatagcaccctgtctttggcagccttccacaatgatgagcttctgctgaggggaggtcctggcaaacactatctcagtgtggtacttcaaaatgtcatccagctgctcggaggtcatgtcctttagatcactgccgtgtactacgcaggccttggcatccctggggttcacctggctgactgggatgttgaggcgggcagcaatgtcttccacggtctcattgccttctgagatgatgcccacacctttggcaatagctttagctgtgattggatggtctcctgtgaccatgatgaccttaattccagcacttcgacatttgcccacggcatcaggaacggccgcccgtggagggtcaatcatggagatgagcccaacaaagcacagattatcgatagggaaattcacatcgtcagtgtcaaactggaacccttcaggaaactgttcatctggcagaaagaggtggcagaaacctaggactcgttctccgaggccccccagctccaaataggcgttctgaaaggcgtctttcagctcctcatccaggggctgctccttgccgtggaggaggatagagctgcaacggtctaggatcctttctggggcgcccttcatcaccaacaggtgttggggctccgatgtgttggggttcttatgaatagacaactggtacttgttggtggagttgaagggtatctcgacgattttggcgtatctttctctcatctccttcacggaaccacagcacagctctatgcactttaagagtgctgactcagaggcatctcctgcaactgcccgcttaagaataggtaggttttcctggttagcctgaaacactgccctgttacaaagacctgcaattctggacagagcaagccaggtagctgaagtcttgtcaaaagagacaccactctgattctctgtcgtatcagcttcatggatttgattgtcaaaccacatgtgggccactgtcatccggttctgagtcagagttccagttttatcagagcagatggtggacgtggaccccaaggtctccacagcttctaagttcttcactaagcagtttttccttgccatgcgtttggcagtaagtgtcagacagaccgtgacagtggccagcaaaccttccggcacattggctacgatgataccgatgaggaagatgacagcctcaagccaggtgtactcaaggatgagagaaaggatgaagaaagacacacccaggaacacagccacacccgtgatgatgtggataaaatgttcaatttctgcagcaatgggggtctggcctccttccagcccagaagcaagtgtggcaattcttcccatcacagtgcgatccccagtgtagacaacaataccacgtgcggtgccttcaacacaattggttgaaaagaaggcaatgttcctcgtctccagggggttttcatttgtgaaatctggagacctagtctggggttctgattcaccagtgagcgaggagttatccaccttgcagccatttgcagatatgattctgaggtcagcaggaattcggtctcctccttttacttccaccagatccccaaccacaacttcctccgcatttatgctcattttctcaccatttcgaatcacaagggcttgctgagggaccatgtttttgaaggattccatgatctttgaacttttagcttcttgcctcgtgccgaattcggcgcgccgtcgacttcatactcttccccctta

SEQ ID NO: 123125 - DNA, 877 bp, Homo Sapiens
tgatgaatttctgaggaagctaaactgatgtagtgaagcagctggagccagttaaagtagcagcatataatcagtgctagaatgactaggaggcttggaaatgaggacctgatagtgaccaacaaactcaatgtcaagggctggtgtctcatttagttactattcaaaccaaaagaagcacacagattagtataaatactatatttattaaatatctttacagtttatttaaatgtatttacagaactattcctgcataagttataattcagacatccaaattcaggtaattgcctcttgggtaataagacaaataatgatagtctcaacagaaaaaaagcagctcattagtatacacacagattctaatttgcttcattatttagccatctttgccacaaactacctgctaacagttaaaattctgacatggacacgttttagttgagaagttcaattttgcaaagaatttaattttaaataaatagaatccaaatatgtcctgcttcatgttttgtttcataagcagattttggttttttgatactgtaaaatttttaaaatgcaaaaatgtgatacagtttccagagaaactgaatgctgtagcttctaccaaagatagctggtattaaggtgacctaaagaaccatgaactcatccaaagtacaaacgtttacaattcgagccaatcttgtttacattctctcaaacactcaaagctgactcaataaattcccacgattcctgcctaacttgttacttggtatggtgggctaatggtactgaaggtggtttccatctccgggctactgtcctatccagaacacacgcagctgatagaggagaggacgctctcccatcatgcaaagcttgaaac

SEQ ID NO: 123126 - DNA, 2998 bp, Homo Sapiens
  misc_feature (835)..(836): n is a, c, g, or t
  misc_feature (1032)..(1046): n is a, c, g, or t
gcaccagcccgggttttatttgggtgccccggccacggtcggtcccccttgtttcccctcccttctttgtggggttactttttagagagtttcgtgggtctaaaatctccattttgtcccaggaaagccgttaccgttacccccggaattcctctcccttgggggttttctccaattccctaaacccgcagcccgtaattcccattataaccccctgtcagctcatttgctctcttctctaagctattaaagtccaagacgggcagagcctctatcatgtttaaccctgtaccccaaaaacctacaggggtctagtacagaatagcacagtaaatctttgttgaaagaactcttttattctacctttttgcacaccacctctcatgaaaatggttcttgacaatgccttccgtctctcatctaccaagtgtcttacctagagaaggtatttaggacttttgaataaattcaagactttgctcactagtcagaccgtaatttttagaaggaataggagcatcctgactagaagcgtgataaaacctggctatccagaaaataaagaatggctgctaactataaaagctgttggaagaaagggccttaaaatcttaaaagtctttgtattttaaccaaataccttcatagtgcaaatatgataaattcacatgcattttacttttacatactcataacaagatagtaacacagactaaagctgcagtgttttcccaagtgaatcttcattttaaccaaactcacaaagcatttatggaaattaatacatctggcaaagcaccagacttgaatcaagcagtctcaatgctacagtgtnnaaaaaaagtaaattaaaactcaagatgtagaagcagtagccatatcagcaaccattcttctagggaagggacccacatatacgatccttccccaagaactttgatgctaccccgctgaagagtttaagcacaaaacacagtgcttgtatcatataagtaaggactttcatagaggaaaactgtaatataaatgcannnnnnnnnnnnnnngcttttaaaggatactgcaatataaatatattaagcatggcctcaaatatccaacattttcctatcttacattttaaaccaaagttaaaagaacctacaggctttataaagaactctcttcacagcacagctgtagttcactttaaacaaaaaatgttccctttgtgctatatccttagaagtaaacataatatacagataaatgagaagtttcgattctgcatcaagcattattcaatctcaccttctgatataaacctgcatacagtcaaacttgcaaagcattcacttaatattttagttgaaacaaacttaaaaggtatatgggttttcggtgaaggagacctttgtgagttccagtggtgtccttggcactcagaggttcagctgaagtcccgactggtgaggacaagtggagccacaagggtccagacgtaaagcaggaggcagacccagctggagctgatcttgacccacacagctggccacttgctggtcatgctctgaaactttgcatcagggctgtaccagctggtcagggtcatcatgatgtacaaggaagccaagcagagcatgaggtggaataaggagtagctatactgcactccctctttctcgttgtccacagcccgccgaggctgtccatcttcttcatcactggcaccactggtagttgtatcaccaaggatgacgctgtcactccctgacagggtcagcttgtctacttggctattagtggaagtgcggatgctagaatacaagaggcagagaacaaagacaaacagtccaataaaattatctgaatccagtaaagacccactctttgatggtggagtaggggtagggaccacagcagttgaatttccaggagccagggttggtgcagttatgcgtgtaataaagctcatcaggttgggattgcaggaacgatcaggttcattggacatggctgaccaggtgaggtacatagtgtagagggtgatgagggaggactgcaagaggccggagcgaggctggtgttcctgaatttttgggtggatcgatataatagaagccacaacgcaaaggatcaggttaatactgatgaagaacttgttttctgtgcagccatctggtttggtgtaatatgtatagagcagcccgacacagatgattgacaggatataaaaggcgcttgtgaaagacagtaaagcagcataccacaaccttgggtttccttcttccattcgatttacccatgattcattccaagaatgagcaaaatctaccagcagcaccagctgaatgaggatgaagagggcggcccctatcatgccaacaacaaaccagactgagctgaaatagcccccagggatgtagaaagagccaaccatgattccaataagggcagcaattttgaagaaccaaaacccattgtgtactgccgctcggagatctttacttgtttttactttgaacatgagcagagaaaagacaaagaaaaagatggccatggcaaagctgatccgatacacagctttataaccaaccagcacatcacaatctttatctgcatttatatcagcctcatggattttaaatcccccttcacaaaatccaggaatcttcttcaagtaagtttccatctcttttctctgcatgatataggatacgacagtgctcaggaggagaatgaaagcataaatgaggcgagtcaccgtggaattcttactgttaggacagcaactacacagcaaacatgaggcaccgctgcagaggcatggaacccagctggcgagggagaagacacccagcacagcccccatggtgacgccagtgatggaggtggccggtcctgaggctgctttctaacacggtggtaactgccagctgaggtgactccccagaaacatgacggtttctcaggccggaaaccagcctcggtgccgacttcaccgcgctctactcgccct

SEQ ID NO: 123127 - DNA, 1141 bp, Homo Sapiens
  misc_feature (435)..(475): n is a, c, g, or t
  misc_feature (479)..(505): n is a, c, g, or t
gcacggtgtttctttaatggaaagacagccaccgacctcagaagcagcccctccttgcgctggaccagaaggataaggggagacctagccaccagtgggccagtgggggtgaggggcttctaggaaaaccggtgtctgggactctggcggttgatggtgtcatctgcgcgggatgctgggcctccacctcccaacctcctccgggacagtacaggtttgggggcaaggcctgagcagggcaggctggggagaccgctgtccctggggttttgtgggcaggggctgggtgcaggccggacagacagaaagcagtcccagctcaaggcagaaggccagagggtgtggagtgaaagggacaggcgaagccaggttcggagagatggagggaacaggccaccaagctcagaagcgagaaaggtctgaggaagcacaagnnnnnnnnnnnnnnnnnnnnnnnnnnnnnnnnnnnnnnnnngaannnnnnnnnnnnnnnnnnnnnnnnnnnacagaagggaggactggtcgaagggccagtggagcaggggtcttggagggacaggccatgaacttgcaagggggctgaggggagccgcagagtcggggagggttgaaaggctggaaatgcatgaggaggaggaacagaacatgtgtgtctggacaggtgcggcagccctggcagagcccactgtccccattcttatggaccgcctcctggctgctgacccagggactgttctcctaggactggagccttggacacttgggtttgggagtgaacgagaaaaaagcttcatggggtgcctctgggtggctgtggtgggagagcaggggcagctctgaggccaagggaacatgtgatgggggccgggccttgcgcccacctgcacccttgggagccagggagaggcggtgatggggcatcgagctggggtcagggacctgaggtggggggctgggttggacgcagctgggccctggcttagcttcctggctctgcctccccatcaggatgtctggctgtgttccccagagacccccactgaggccccgcggtggctgcagcttgctctactttttgtagttgccaaactggatggccaggcggtcagtgacgcagcggaacagtggccggcttgcacct

SEQ ID NO: 123128 - DNA, 1098 bp, Homo Sapiens
  misc_feature (417)..(471): n is a, c, g, or t
  misc_feature (912)..(956): n is a, c, g, or t
  misc_feature (960)..(989): n is a, c, g, or t
agctagtatgatgatagtgctcgtattacaatgaatgtcccgcgagaaaaatgtgctcgtacaatcatatagctctggtgcgaagttgtttcacgccgcaagaattgcgccgttgggtgacaccaccattagacacctccaagttgttaatttgccccgggggcttttaatttctcctgatgggtggttggtgcccaccattattgtgtccccccccggaggttgtggggggttccttctccacaagagttcgacctgcaggtacgcaggttctttcccaattagagcgcctgttttttaaagcgcggggccggtctgtgtgctgtttataaagcagctcctctatggggggccccttttttcaaaaaaactgggtgacgcttaaattggggcccctcaggggatttgggccccccnnnnnnnnnnnnnnnnnnnnnnnnnnnnnnnnnnnnnnnnnnnnnnnnnnnnnnncacgttgcacggtgtttctttaatggaaagacagccaccgacctcagaagcagcccctccttgcgctggaccagaaggataaggggagacctagccaccagtgggccagtgggggtgaggggcttctaggaaaaccggtgtctgggactctggcggttgatggtgtcatctgcgcgggatgctgggcctccacctcccaacctcctccgggacagtacaggtttgggggcaaggcctgagcagggcaggctggggagaccgctgtccctggggttttgtgggcaggggctgggtgcaggccggacagacagaaagcagtcccagctcaaggcagaaggccagagggtgtggagtgaaagggacaggcgaagccaggttcggagagatggagggaacaggccaccaagctcagaagcgagaaaggtctgaggaagcacaagnnnnnnnnnnnnnnnnnnnnnnnnnnnnnnnnnnnnnnnnnnnnngaannnnnnnnnnnnnnnnnnnnnnnnnnnnnngaaggacggggaaagagagaacaaaagggaggactggtcgaagggccagtggagcaggggtcttggagggacaggccatgaacttgcaagggggctgaggggagccgca

SEQ ID NO: 123129 - DNA, 417 bp, Homo Sapiens
ttcacgttgcacggtgtttctttaatggaaagacagccaccgacctcagaagcagcccctccttgcgctggaccagaaggataaggggagacctagccaccagtgggccagtgggggtgaggggcttctaggaaaaccggtgtcatctgcgcgggatgctgggcctccacctcccaacctcctccgggacagtacaggtttgggggcaaggcctgagcagggcaggctggggagaccgctgtccctggggttttgtgggcaggggctgggtgcaggccggacagacagaaagcagtcccagctcaaggcagaaggccagagggtgtggagtgaaagggacaggcgaagcctggttcggagagatggagggaacaggccaccaagctcagaagcgagaaaggtctgaggaagcacaag

SEQ ID NO: 123130 - DNA, 920 bp, Homo Sapiens
  misc_feature (435)..(479): n is a, c, g, or t
  misc_feature (483)..(512): n is a, c, g, or t
gcacggtgtttctttaatggaaagacagccaccgacctcagaagcagcccctccttgcgctggaccagaaggataaggggagacctagccaccagtgggccagtgggggtgaggggcttctaggaaaaccggtgtctgggactctggcggttgatggtgtcatctgcgcgggatgctgggcctccacctcccaacctcctccgggacagtacaggtttgggggcaaggcctgagcagggcaggctggggagaccgctgtccctggggttttgtgggcaggggctgggtgcaggccggacagacagaaagcagtcccagctcaaggcagaaggccagagggtgtggagtgaaagggacaggcgaagccaggttcggagagatggagggaacaggccaccaagctcagaagcgagaaaggtctgaggaagcacaagnnnnnnnnnnnnnnnnnnnnnnnnnnnnnnnnnnnnnnnnnnnnngaannnnnnnnnnnnnnnnnnnnnnnnnnnnnngaaggacggggaaagagagaacagaagggaggactggtcgaagggccagtggagcaggggtcttggagggacaggccatgaacttgcaagggggctgaggggagccgcagagtcggggagggttgaaaggctggaaatgcatgaggaggaggaacagaacatgtgtgtctggacaggtgcggcagccctggcagagcccactgtccccattcttatggaccgcctcctggctgctgacccagggactgttctcctaggactggagacttggacacttgggttagggagtgaacgagaaaaaaagcttcatggggttggctctgggtggcttgtggagggaagagcagggggcagcttctgaaggccaagggaaacattgtgatggggcgccgggcccttagcgcccaa

SEQ ID NO: 123131 - DNA, 280 bp, Homo Sapiens
actcgccggaggccaagtgttccaaggctccagtcctaggagaacagtccctgggtcagcagccaggaggcggtccataagaatggggacagtgggctctgccatgggctgccgcacactgtccagacacacatgttctgttcctcctcctcatgcatttccagcctttcaaccctccccgactctgcggctcccctcagcccccttgcaagttcatgcctgtccctccaagacccctatccactgcccacagtgtcctgcctcccaagatcctctaata

SEQ ID NO: 123132 - DNA, 1789 bp, Homo Sapiens
  misc_feature (1692)..(1726): n is a, c, g, or t
aggtctggccaaagttcacggccactcagtaatcggacatttatttcatcttgtggattcattcaaaaagatctgaaagacgctatgttgaggggtctatttctagaatgggacacctcagatagtgtcttgtgatcattttggtagggttgaaattaggactcccataaagaaagcacatgctgaaatttattctaaaggggaaggcccctttttattaaacttgtacattttactttccttctttcagaatgctaataaaaaacttttgtttatacttaaaaaaaccataaatcagacaaacaaaagaaacgattccaacatcacttctgtgatgagaaaagaggcaatggaattcaacataagcaaagaaaactctacctggaggaaagaaatcgatcagcgaggaaacaactcggggctgctgccagactgcaggccatgcgaggaggagcctcctagaggatttccaaagcaaacccatccctgccagaccaggaagcagccgtcctacctcccagagaaacagacctcagccctaatgatcactcaaatccgagtcaatccctctatttaaaaaaagctcacacatagtctcccctcccttccccagtcctcttggcgacagggcggtcacaggacatatgtgttcttcaccagctgctccttgtcatctccggagctccagacggtgcgcagggcacgctcctggttcctccgtgccacccggatcaggtagaccatggaggctcccaggaagaggatcaacaccatcacgaacagccccgccagaaccaccacctttgagccaaggggcaggggaggattctcctgctggcggaagcagcggagcatgcaggcctcctcagagcggtagctgttcttattgccccggcagcctccatagatgaagttattgcaggagttcctctccacgtcaaagtaccagcgtgggaaggatgcacggcaaggcccagtgactgcgttggcggtgcagtattcttcatagttgaacatatcgctggagtggtcttcagaatcctgccttctgggagcacttgggacagaggaatccgctgcattcctgctggtggccaggtcacccgtggcattctctgtgacagtggcacatttcttgaggcactcctccttggtcaggtaattattgctgtttccgtcacagcccccatacacaaacagctggcaggatccgtcagtgacattgtaccaccacctaggcatggaggcccggcatctgcccaccaccttcgacaccaggcagaagtcgtggatgctgcgttctcggtcggccgccaggaccccagagaggagcagcgatcccagcagggcgagaaacgcccggctccgcctcagcccgcacagctgcgccatggccagctcagccgagacgcgcaggcgacgccaccagccgttggggtctcgcgatcaggtgcgggaagcccctcaacgcgcacgcgcaatggagcgcctcgcgttcaggtgccgacgctccgggagggtccgccaggtgccaaagcccccggaagtcgcctttccggaccttcagtgtggggacgcccggccttctcggcgcgcgatgcctgggtctgctcctcactcgcgccctcgccgcctgcgacccccggccgtaatggccgaattcccgggcatatgtccggtaccgtcgactgnnnnnnnnnnnnnnnnnnnnnnnnnnnnnnnnnnncggccgcttcctcgctcactacttcgctgcgctcgtcgttcgctcgacggagctagcgcccat

SEQ ID NO: 123133 - DNA, 889 bp, Homo Sapiens
gatttttctggcgggcggaaagcagggggagcatgccaggcttccttcagagcgggtaactgtttcttattgcccggggcagcttccatagatgaagttattgcaggagttccttttcccacgtcaaagttcccagcgtgggaagggatgcacggcaaggcccagtgactgcgttggcggtgcagtattcttcatagttgaacatatcgctggagtggtcttcagaatcctgccttctgggagcacttgggacagaggaatccgctgcattcctgctggtggccaggtcacccgtggcattctctgtgacagtggcacatttcttgaggcactcctccttggtcaggtaattattgctgtttccgtcacagcccccatacacaaacagctggcaggatccgtcagtgacattgtaccaccacctaggcatggaggcccggcatctgcccaccaccttcgacaccaggcagaagtcgtggatgctgcgttctcggtcggccgccaggaccccagagaggagcagcgatcccagcagggcgagaaacgcccggctccgcctcagcccgcacagctgcgccatggccagctcagccgagacgcgcaggcgacgccaccagccgttggggtctcgcgatcaggtgcgggaagcccctcaacgcgcacgcgcaatggagcgcctcgcgttcaggtgccgacgctccgggagggtccgccaggtgccaaagcccccggaagtcgcctttccggaccttcagtgtggggacgcccggccttctcggcgcgcgatgcctgggtctgctcctcactcgcgccctcgccgcctgcgacactcaacggccctcagcgcgttcagagccgcgctacacctcccaacgcgcggagtcgccag

SEQ ID NO: 123134 - DNA, 1100 bp, Homo Sapiens
  misc_feature (144)..(144): n is a, c, g, or t
  misc_feature (189)..(189): n is a, c, g, or t
gcttcccaaaccggtgccgccaaggcccccctttcctgggttccctcccgtggccccccccggtttcggggtaggcccatggagggctccccaggaaagggggatcaaaccccccttccgggaacagccccccccagaaccccnccacctttggaaccaaggggcagggggagaattctccttgctggncggaggcagcggaggcatgcaggcttcctcagagccggtagctgttctttattgccccgggcagccttccatagatgaagttattgcaggagttcctctccacgtcaaagtaccagcgtgggaaggatgcacggcaaggccccagtgactgcgttggcggtgcagtattcttcatagttgaacatatcgctggagtggtcttcagaatcctgccttctgggagcacttgggacagaggaatccgctgcattcctgctggtggccaggtcacccgtggcattctctgtgacagtggcacatttcttgaggcactcctccttggtcaggtaattattgctgtttccgtcacagcccccatacacaaacagctggcaggatccgtcagtgacattgtaccaccacctaggcatggaggcccggcatctgcccaccaccttcgacaccaggcagaagtcgtggatgctgcgttctcggtcggccgccaggaccccagagaggagcagcgatcccagcagggcgagaaacgcccggctccgcctcagcccgcacagctgcgccatggccagctcagccgagacgcgcaggcgacgccaccagccgttggggtctcgcgatcaggtgcgggaagcccctcaacgcgcacgcgcaatggagcgcctcgcgttcaggtgccgacgctccgggagggtccgccaggtgccaaagcccccggaagtcgcctttccggaccttcagtgtggggacgcccggccttctcggcgcgcgatgcctgggtctgctcctcactcgcgccctcgccgcctgcgacactcaacggccctcagcgcgttcagagccgcgctacacctcccaacgcgcggaggtcgccagagccaatggcgaacgcctattggaagcggctcccgaaggtg

SEQ ID NO: 123135 - DNA, 918 bp, Homo Sapiens
  misc_feature (155)..(155): n is a, c, g, or t
  misc_feature (157)..(157): n is a, c, g, or t
ttttttcatctgacattctgtaatgctgggtccttgatctacaagctataaaatgctgtacacaggtaacaggcggtttttcattgagacgggcagggatgtgggcagtggcattgataggtgggacctccccccaccccaccctccaccgcagnanacctgccgctgctcaccctgagccagcccctgctgttgggcatcgcgaaatgagaccagtgctggccgagccagtgccgagttctatgtccagtgagtaggctcgggtacatgatcctgggtcttgggaaggtgggtggtgaggagtgggctgaggcagctgtggctccacaggtaccccgcaggggtggtcacccactaagccacccttgtttcttgtccaggtgcagcctgacttctgagcaggtgaggaagcactacctgagtgggggacccgaggcccacgagtctacaggaatcttctttgtggagacacaggtgcagagtgacaaaccatcttgcttggaggccagggctggggcctgcagaggcctggcaatgcatatcttgtaggggaggtgttggctgggtcacaattccctccagagtcacaagatttgccctcagtgcaagggaaaggtccagggacatgttcagccccttaacatgcctccctaaggacagtgcagaggtctctgaggctcaggaattctgggcacagccctggcaggagaagtggcaagcttgaatgcctgggtctcgttgtctccccacagaacgtgcggagattgcccgagacggagatgtgggctgaactctgcccctcggccaaaggcgccatcatcctctacaaccgggttcagggaagtcccactggagcggccctagggtccccagccctactcccgccgctctgaaaataataaacgactttattcttgg

SEQ ID NO: 123136 - DNA, 1086 bp, Homo Sapiens
ttttccaagaataaagtcgtttattattttcagagcggcgggagtagggctggggaccctagggccgctccagtgggacttccctgaacccggttgtagaggatgatggcgcctttggccgaggggcagagttcagcccacatctccgtctcgggcaatctccgcacgttctgtgtctccacaaagaagattcctgtagactcgtgggcctcgggtcccccactcaggtagtgcttcctcacctgctcagaagtcaggctgcactggacatagaactcggcactggctcggccagcactggtctcatttcgggcgatgcccaacagcaggggctggctcagggtgagcagcggcaggttcacctcatcacagatctcctgaaggacactggaaaagagttcatgtaccaccagctgcccagcgaggtcctggtgctgggggctgccaccagggcacagggcctgaggctcagggtgcccaccaggtacgtccaccagcccaggggcctcagccacctgccgggagcggcgcaggaagacaaggaagtcatcggctgtggctagtgcagcgcccacccccagtgggtccgccagataggcctgcgtgtcaccccagtcggtggcaccctgctgtcgcagccaggcagctgagctggaccagttggtgcccaggaagtctcggtaggaagtaaggcccaggcgcaggagcagctgtggcccccgagagccaataggcgccagggtggctgagtgcaggcggaacttgggggcgtcgaagagccagggttgggcctttagccgggtctcccagatggcagtgatggcctcgtccccacctggcagtgggcgacggtcatgggcggggctcagctcggcctgtatctgctcctggggcaggcccccgccagggcactgcagcagcaaggtcacctcaggatccatggtctgaacggggcagctcatccagaggtcttgggttcaggcgccccaaatgcccatgtcccccaaacccaggggtctgcctccgacccggggcgcgcggggacccctttccagggcccggaagctccagcctccagcggatccc

SEQ ID NO: 123137 - DNA, 1025 bp, Homo Sapiens
  misc_feature (493)..(495): n is a, c, g, or t
  misc_feature (901)..(979): n is a, c, g, or t
  misc_feature (1013)..(1013): n is a, c, g, or t
aagatattgagattagactgcgctgctgtgcggccgccgcaggacacttttcatatccctgtttctcaggctgtagatgaaggggttcagcatgggggtgaccaccgtgtacatcactgaggccactgcacgctttctgggggaagatgacacatctgaactgaggtaccctccaacgcctgttccataaaatcagcaaacaactgacaggtgagacccacaggtggtgagggctttatagttcccacctgatgatgaaaccctcagaatggaggaaacaattttatagtaagagaaaagggtccccgaggtgggaagaaaaccaaatatggcagcagggaaatacatgattatgttattggtgaaggtgtcacaacaggcatggtgggggagttgagaagggtcacagaagaaattaggaatttccacatccttgaagcaggtcatttgtaaggcaatcaagttgtgcagctgggagtctaaaagactgagnnnacaacaagacaacaaaactagaaagccacagaaacacgggttcatgatggctgaatgatatagagggtgacagatggctacaaaccggtcataggccatcacactcaggagcatgtctctcttccatgcctccaaaaatggcaaagagagacatctgagtcaggcagcctgcataggagatgactctgctgtgagactggatgtccacaatcatcttggggaccgtggtggaggtgaaaccgatgtcaggcaaggacaggttggagaggaagaagtacatgggggtgtggaggtgggagtcagggctgatggccaggatgatgagcaggttccccagcaccgtgaccaggcacatggacaggaacagcccagcaaggactggctgcagttctggatcctctgaggnnnnnnnnnnnnnnnnnnnnnnnnnnnnnnnnnnnnnnnnnnnnnnnnnnnnnnnnnnnnnnnnnnnnnnnnnnnnnnngtgtggggcgcgccgcttcgggtaaggggtcggngacgcagcaagc

SEQ ID NO: 123138 - DNA, 878 bp, Homo Sapiens
ctgagaattctctcgcctgcctttggcccttaggctctggtagattgcaaataacatcctttctttctgttcccgggtggcttcggacccctgtcggatcggaaatcccaaggaggcgtcggaccccgtccgatagtaaatcccaagtaaggtacctgccgtcggcagatttgagctttctgcctggacacctaatacccacagtcctccagtcaatcccaagtaaggtacccgccgtcggcagatttgagctttcttcttggacacctaatacccactgtcctccaggctctggtagattgtaaatgacctgcttactttctgttcccgggctgcgttctgacacctgtcggatagtaaatcccaagtaaggtaccagccgtcggcagatttgagctttcttcttggacacctatacccacagtcctccaggagggtcctaagtgttttagacgcccagctgcacaacttgattgccttacaaatgacctgcttccaggatgcggaaattcctaatttcttctgtgacccttctcaactcccccatcttgcatgttgtgacaccttcaccaataacataatcatgtatttccctgctgtcatatttggttttcttcccatctctgggacccttttctcttactataaaattgtttcctccattctgagtgtttcatcatcacgtgggcagtataaggccttctccacctgtgggtctcacctgtcagttgtttgctgattttacggaacgggcattggaggatacttcagttcagatgtgtcatcttccccgagaaaggctgcagtggcctcagtgatgtacacggtgatcaccccatgctgaaccccttcatctacagcctgagaaacaggcatat

SEQ ID NO: 123139 - DNA, 2530 bp, Homo Sapiens
  misc_feature (711)..(711): n is a, c, g, or t
ttttttactccaaagggtttattgagacaagttttcacatacaagatggggacagaggggttggggcttataaacaggaacctggaaggggaccgagggtgcagggtagaaccaaacaagagagtgaaataaatagagggaaagagtggagacagggaggagactgactgagaccatcacacagtgataatgcgggtggggcggcgccatgaaaatcccgttatttatacagatatacagggagttcagggggacccgaggcccactccaccctccatgccccagggaggggcacaagaaagccgtctctacccatgggcgaccccatggggcgctgggagggctgccctaggagtgttgggcaatccctggcctggaagccttggttagtgtctggaaagcagtggagagggccggaggggaggggcagccaggccggggctcagctctgaggctcccggctgccaccctttctcccagcacagctcctgcccaggtctgggaggatgggggatgggggagcaggagctcaaggggagaacctggcaccttctggagtcttggaaaaactgatccctaaagacacccggccctggctgtgctgccctctggaaagcagctctgataccaggagcggctgtcagggcacagggggaaaccccgaggccatcctcgggggtgattcctgaaaggggcccatccccaggctgngatgcttggggaaggcagccgttggggagggattcctggggaaagggccgttagcaccaccaggctccacggcaaacagacagaggccaggcctctgcacctccagcgaggctgggagtcccctcagccccacctgcccggccctacaccccagccagcgtggcggccagggcagggccaggtgggcatcatacgaagaccttggccagggcatcagcgccagcactggcaatgagggccttgctggggtggcaggcaacagcgtggatggcctcctcgtgcttcttgcggtgggccgtgatctcctgcacgcacgttttgttgtccaggctccagagacgcagggagcagtcatggcttcctgacatcaggaatgcgccgttggggtccacggctaggcaggtgactgcgtccaggtgtgcaaccatggagtgcaccggcttacctgtccgattgtccaggaagcggatgcccctgtcgtcgtggctggtgatggtgagaggctggtttggatgactcaccacttggttgatctgggttggaccgctgctgccccgggactccagcgtgaggagggcactgccaacctccatgtcatacaagacggtgtcgccagagcggaaggaggccacgatgtgggcaggctcggtgctggtgaaggccactgaggtggggaccccgtgctcgctggctgtggggaaggtgcagaggcaggccgggctgctgctgctggggtcccagatgcggacggtgccatcagcagaacaggaggccaggcgctgggaggtgggactgaaggccaggccccacacggcgtccccgtggccctccaggacgtggctcagcacgcttgggtcgtagccatcatagggatccatgctgaggtctggaatcttccaactatggatgcaggcatctgccccgccactgtagcagtattcactgttgctgcccatagccacagccaacactgggccccctgtgagcccggaaagcatgtataggttccacatctagcgccgcattcttcttggccgtgaccgccttctgcaggttccagagcttgagcgtgccgtcctcggaggcggtgagcagagccgactggctgtggtggaaggccagggaacgaatgccgtcgtagtgcgagcgcagggtgaacttggggttccacgtcttcttaaaagcatctttgctgtcagacagatcgcagctgaggtcgttgtcgttggtgacggtgagatctgccaagtcccccaggctcacctccccgcccccgatagtgtccatgatgaagacgtcttcatgtggccggggctggggtgtgccaggaggcgggccagtcacttttgggggcagcccatccacatcccgcaggtcagccagaatgccttggagtttgacccgacggctttccagctcatgggggctcccatccacagtgcaccgccgagggtctggagccccttccccatcctctcctgagcccaggaaatcaaactcattgatagcatcctcagagtcgtcttcctcatcctcgtcttccatttcgggcaccagagccttggatgggagcttcacacgctgcttcttgtgctgcacgctgtccagctcatcgtcctcgtcgctgtcttcgtcctcgcagttctgcaggaaggggatctgccccagcactgagccgcccaagcgctctttgccatctttgcctgccgcgttcctctttatctgctcctcgatctgtttcaccagcagcgactccccaccactgagccctgcagggcctggtggagccctgcctcgtgccgaattcgcctcccaggcc

SEQ ID NO: 123140 - DNA, 800 bp, Homo Sapiens
  misc_feature (574)..(618): n is a, c, g, or t
  misc_feature (622)..(629): n is a, c, g, or t
  misc_feature (631)..(646): n is a, c, g, or t
aataaaaaattaggttattactttttttataaccagatttttaaagcactaggttttaaatcagtgggtatcataaaagccatatataaaagatcctttcttatagtaagacttgtgcttgttagcaggtttttctgttagtttttcccccataacatttaattattactaaaattgtatttacaatagtggtgccaaatcaaatggtaatttaaataaaatctattctgtgtttatgtagggtggtataaaaaagaggtcttcatttagacatgtgatttctaaaattccagaaagcaaaattgataagatgttagaaatttggaccgttatttataatcagggtagcattaaaatggagaaaagaaagttttctgaaaaaatgcagtaaatataagccacatttctaaagtttatttttatgaaagcttcttttaagattttgaaatctattctgcattcccaagagtttatgtttattgtattttatatgatctacaacatataaaattgtgtatttttctttggttgtccctattaacaaaaaagtattttaataaaaaattgaaatgannnnnnnnnnnnnnnnnnnnnnnnnnnnnnnnnnnnnnnnnnnnncccnnnnnnnnannnnnnnnnnnnnnnngaaaattgggggccccctccgcccctcaaaaacttttttaaccttttctttggccgccgggcccccaaagggaaagggaaacgggggccatacttgttttcccaaggaaaaccccgggcccagagaataagggctttgggattccccaccccat

SEQ ID NO: 123141 - DNA, 735 bp, Homo Sapiens
ttctttgtattataaactgacttttaataataataaaaaatctatcaagaatttaacgagaagaatctgtacattttaaagtaaaccagtgcacaatgcgctggccctgggccctcccccatttcccgcagcagggctaaagcgggtcctcctttgtctctgatgcaagatacagtgacaaggccactgcctgccctcgtgtatgctgcggcaagagagggaagcgcaccctggagggcgggaggctcggatgccagatgccgggagggcttcaagctcccaggcctgggggcagcagggagcccccacctgaactcaccacctgccaggggtgacaggcgtccccccgcttcctccccagctgtgacctttccctgaaggcataccgaagctggggggacaaactgccgagggggcttgtgtgggtccctcctccccagcaggcagggtggcttcctgtgctctggctggtgatgtcccaatcgccctgctctgagaagttaccatcaagaaaataaatcacagaagccaccgcccggtgtttcccagtgaccctctaacccgtgtgacacggcacctcaggtggggctccatcccctccagctccaaccctggctggccacctctcaggcccttgtagccagtcactcaaagagagcgagttctaacaccggccaaccgctggagaatggagggtgggggaaggatcacagtcgatacctcaaacgacactta

SEQ ID NO: 123142 - DNA, 1953 bp, Homo Sapiens
  misc_feature (562)..(598): n is a, c, g, or t
  misc_feature (604)..(669): n is a, c, g, or t
atgaccctcatgtcctttttatcattcgatatctagcgccccgcggggttatatatttgttacgtacgaggcaggaaatgtcagatctgccgcgtcgcagcgaccaaggtgttgctattgcgccgcgcggcgtggcaataaggatggccggtggggggtgtgggcggcgccctgctgccatcctactacctggcccatcggcggtgtggttatattttcgacttctccctgggcgagggcggcaaaatttgactctcttcgctgcgggcggtggtgttcctccaccattatgttgccgctccactcaacgacgctagaggggggtgtcgctctctccgacaacacaatcagaacgcacccgcgacgtgcgagcttttgtcttccgcgctacgactgatctgtgtagttgtggagctgatgccttcggtccctcctgctccgcataaaatcacggcccatctctgtgtgggtgccgcctggtgcgcaacatgcagctgggggggcgtaatagtgggcgccccccccgtgggagagagagatgtatgggctcgggccccccccnnnnnnnnnnnnnnnnnnnnnnnnnnnnnnnnnnnnntgttgnnnnnnnnnnnnnnnnnnnnnnnnnnnnnnnnnnnnnnnnnnnnnnnnnnnnnnnnnnnnnnnnnnagcacttggttattttatttcctcaaaaataaaacagaaaggaggcggggccccagctcagcaccaggtgggcagctcggagttgtggcctccctcctccagggctcgcctccgcctttcctcccgcccctactggcagccaacaagtcaacggaattcctggcctttgagatgtcaccccaaatgccacctgagttgagtgaagaaacactctcttggtgaaagcagaagcggagctaccaggccaggcattgctggtggccggcatcacctgagctcgcctgtgtcctgcccagcttcagtgggtcttcccccggccctctgagatgacatcctcgggccgggcgcgcatgtaccactccacccaggagccatcgtagatgggcacgtctggcttgccgcagaggtaggcccctagtgccacgtggcaggctgtgacgccagagccacacgtggccaccagtggcttagacaggtccactttcttctcctggaacagatggcggatctcctcagggctcttctccagcccctcctggctcaggaagtctgtgaaggggatgttcacggtacctgggatgtggccaggttcaatgccgtctcggggctcgggctcggtgccgcggaacctgccagtggctcgggagtccaccacctggaagcgccgggattccaggttctccttgatgtcctcgtaggtcttgatgaaggcggggtcgagctgagcgcggaactcggcgggagcaggttggctcttgccggagctgagcgggaggttctggcgcagccagtggcggaggccgccatcaagcagtgacacggcgtggtggccgaaggcgcggaacatccaccagacgcgcggggcggagtagaggccctggtcgctggcgtcgtagatcacgacgtgggtggccgcgcccacgcccaggcggcctgcgtactccgcgaaatgctcggccccgggcagcatgtggtcgtagggcgaggtgcggtcgctgcactggtcgatgtcgaagaaagcggcgcccgggatgtggcgctcctcgaactcgcgtcgcgcgtcgcgccccagcttcggcaggtaccaggaggcgtccagcagctgcagaggctgcccagcgcgcggggcccgcagcgcctccgccacccattgcgccgacaccagcgcgcggcagagctgcggcgaagccatggcggcgacactcgggctgcgggcctgcagcggaccaaaggccccggccgtaatggccgaattcccgggcatatgtccggcaccgtcgactg

SEQ ID NO: 123143 - DNA, 882 bp, Homo Sapiens
ttttatttacaaaggatcatttattaaacacattttaaaaacaaaatacaaagatagttgttctgcatgaatacatcacatatgaaaaaataatgtgtttttaccgaatttaatttgaagatattcagaattttgttttctatcaacttgagcaaccagtttcgctttgcaccttgtctaacactgttgtcaatcaggaagaaatgttttcttgttaattaaatcatattcatacagctaatattttacagaaataaaataagacaatgtctgtcatacaaagctctttctgcaaggtaactgatttgcctatgatcctaatttttttaagctataagataggaagaattcaggagctaggtaagttttataataacgtattagcagcagttgatagtaaatgcaacataagatttgttttgtctgtggtacaagaatatgtcctatcagactctactgtatttttctctacttgaacacaggtaagcacatactgattgtctctgggatgacaaaatgtataaaaaagacaagaaactggctctggttgtcattgtgagtgcctattttcatcagctaatatgaatgcattgctaaattagtgaagacaggaaaatgacttaagggtaatatatacagagttaaaatacactttttatccacttgagtgaattcaggcactgtggctgttcaggataaaatgtttcatggtttattcttgatagcaatttaattttcagtgcaagcaaaagcaaatacctgcccactgtaatacacatgatctcacacatctggaatgttcaatgcaagttcatcctcggcatcttcactctggagacatctggaataaaaaaccggtcatagtttggtcttgatagcaac

SEQ ID NO: 123144 - DNA, 608 bp, Homo Sapiens
cagtttattgtatacacacacatttcactggtggttgttttttttaaaaagtctgtacaattgacaagacaatacaaactagctacgatctgctagctacacattaggacattaacatagcccatggtttctgccctaaaacaggcaattgtgctactccaactctctaagagagattttccagctcatgtcgtgtggcccaggtacctcctcttctgtaacttccacctctggaactgggcccgcaagcccaagctctatcttgtttacttttattttaggttcggctcaaagagggtaactctgaggcttcactttttcatcttcatatctgcttcaatggcacagcggcgtcccctggttcctccatccttctctgaagcatcctgtttgcgggtagaatctctccctcgaagacttttagcactgatcccagactcggatgtttgcataatcaactgcgtggccaagaattgctggatctgttccaagacatctcgctgcatctccactgccatgtgatagacatcatggtctgagctattgtacattacagcattctgaaacatcagcataatgtcacgctgaaattcagctgtgcttcggat

SEQ ID NO: 123145 - DNA, 1432 bp, Homo Sapiens
cagtttattgtatacacacacatttcactggtggttgttttttttaaaaagtctgtacaattgacaagacaatacaaactagctacgatctgctagctacacattaggacattaacatagcccatggtttctgccctaaaacaggcaattgtgctactccaactctctaagagagattttccagctcatgtcgtgtggcccaggtacctcctcttctgtaacttccacctctggaactgggcccgcaagcccaagctctatcttgtttacttttattttaggttcggctcaaagagggtaactctgaggcttcactttttcatcttcatatctgcttcaatggcacagcggcgtcccctggttcctccatcaaagagagagagaaggaaggcaggagagcccattgggacactgtccttctctgaagcatcctgtttgcgggtagaatctctccctcgaagacttttagcactgatcccagactcggatgtttgcataatcaactgcgtggccaagaattgctggatctgttccaagacatctcgctgcatctccactgccatgtgatagacatcatggtctgagctattgtacattacagcattctgaaacatcagcataatgtcacgctgaaattcagctgtgcttcggatcagtccattttctatgtttttcttaatagttgacaaatccataggcctctgcacaatgctgtggtagccaggtgctatgtcatctgtaacaggctgcaggaagacattggcatacctatgattagctgcagctctccatacaagcatgatggctttcttccaaattttctgtgcctgaatagcttcctgatcctcactacagacagagaactgtgaagaagcagggctgctggggatggagtctgccagtgtgtgtgactgcagtgtagcattgtgtatgctgaagccatcatcactctcgctcacaggaggttcattatccatttctgacaagtagccttctccttgatcctcttccttaggctcctctaggctggccgcttcactgacaccatcttcctcctcatcctcacctggggcatcctttatatggcttccaaaaatagtccctgattcttctttcaatgagtctgacatttcaaacttgtgctgagtctctgcctctaaaggatcttcaatgggatttgagccatgtgatggagacaacatgctttcaggggatgcctctgtcttcacatttgtaagtggagtctcatcgcctttcccaatggcaacatctgcttcaacaatctctccagctgcagtacttcccagttcctcatctaagtcctgactcctgagttctggtggctccatacttgtggctggaacaactccagctactatttcggctcctgaaatgactggctctggttctgcaggttccaccttgatctctg

SEQ ID NO: 123146 - DNA, 1270 bp, Homo Sapiens
tttagaattttaaactatttttattttaaagttatggcataacatataacataaaaatattttatatacgtttgaaaaatctataccgttcttttttatcatcaaagtttctcaatggccagtagaagcaaaaagacaacaccacctctgatctacgggacataatgttcccaggaaaaaaatcttcaagtgggtgtgagggtgtttctaattcaaaatatgtagatttctccgcatggaagaagtagtaaagattttcttaacatgctcctgtgttcatgcttggagacaagaataagatggtttagaagctttaccctttcttggaacaagtagaatcccggtctgagacctctcaggaatttcagagcttagcagtctggcctggaggtttttcagccttttagtataataaacagtagttgcttcctagagttgagtttttaaggattcacaaaaaggagcctgtacaaaatatacatacagttctttattaaacaactgtaaacacttcactgtaaaaatccataaaactttataaacaaacattttgtaaatagaatctatgctacagtaaaataattaacacaattatttacatgcaatactgacaaatttggcactttttgaaaagaaatgtacaaaacacttgctttaaaagaaatttaaaattataaaaactccgagcattactatcatgcactttgcaaatacctcacaagcacttatggcacagctatcagagagcatcaggctctctggtaatatttatgtaacttttaatgtgcttccataagtttgttgtaaaaccacctggacattgtcaagaataaagtcaaatgccatattccaaaccgattccaccgattgctgcatcagccttttcatgtattttataactagatccagtttttccaaatctttttcttctattagatcagtacagtatttcacaacttggagaatgtcttcttccattggatctgaaattgtagttatccattctctgagcaaggtcttcacatcattgaattcaacagctccagctagattgggtgctggaggtctcacacagccagctgggtcagactgcaaactagaaaggcctggcacacctgaagtagaagcagagagttcttccaggggtttctctgcaggaggtccttcatgttttagaaacccatcaattaacttctggggactgccacaggcccctggcagagtttttgcaggactgttaagcagcttgttattcaaaggactctgaatc

SEQ ID NO: 123147 - DNA, 1007 bp, Homo Sapiens
  misc_feature (141)..(149): n is a, c, g, or t
  misc_feature (171)..(186): n is a, c, g, or t
  misc_feature (259)..(273): n is a, c, g, or t
  misc_feature (905)..(905): n is a, c, g, or t
  misc_feature (924)..(924): n is a, c, g, or t
  misc_feature (990)..(990): n is a, c, g, or t
aaatctgtaattgatttacatttgattttaagaagacactgtttacatcaggtcaccacaaagcagatttacatacaaccttcaattgcggaaaaacaaagtttctttttgatccaaacacaaagaaaaacttctttgtgnnnnnnnnnaatgatcttttccttgatcatnnnnnnnnnnnnnnnntgcagtacttttagaaggtaaagctagtaagtttacagaagtgcaaaacaccaaaacacttgaagcaaaaacnnnnnnnnnnnnnnnaagaaaaaggtatgacttcttgttttctgttcttggcataaattttaattctttccagtggaaccaaaacctcctgaacccctttcggtgtcatccaaggcttgaacttcttctatttctggataaaaaatccgttcgcaaatgagctgtgcaattcgatcaccttttttgacttcaaacttttctttgccaaaattaaacagtacaacaccaacatttcctctataatcttcatctatgacaccagctcctacatcaataaagtgttttgcagccaagcctgaccgtggagccactcttccataacacccagaagggagcgctatctgaatgtccgttttcacaacagctttctccataggtggtattgtgtaatcataggcactgtacaggtcgtagcccgcggcgcgcgcggagccccgggtgggggccgtggcgtgctcggagagccgggcaaagcggagctgcatgccgcccacctccgcaggccgggcccgcttactgggtgaaatggcgggtgtctcttcagagcagggcatggcagagccagaaggcgagcgaggagaccaccgggggaagaggagagcgcacgatgagcgtcgccgcagggagcgcctcgtgccgaatcttgnctcgagggcaaatccctanatgagtcgataaatcgtatcagtctagctgttctgtgtgaatggtatcgtcaaattcaacaaatcnagcgggagctaatgaaa

SEQ ID NO: 123148 - DNA, 1724 bp, Homo Sapiens
  misc_feature (520)..(530): n is a, c, g, or t
  misc_feature (670)..(679): n is a, c, g, or t
  misc_feature (701)..(716): n is a, c, g, or t
  misc_feature (789)..(804): n is a, c, g, or t
gctatgtgcgggaggatagacttagcggaagaagcgatgcagatagtagagggtgggtgaggagggcgtgcgcgaattgtgaatggaggaagaaggcggctgggcatgactggcgagggcggggggtgcgctgtataggatggggggtcgatcaatccatatggagaggggcgggggagttctcttaatcggggcacgtatgacgcgccctcacgcccgctaactcatgagagggaggcgggcgtaaaaaatggagaggggtgtaggaaagtgcttagagggtggggaaagaaatggagaaaggaaggagggattgggtatggataagagtgtgtgagagggtgtggggagggttacaaagacgggttgtacgggtaagggagggtatggtgtatcagcgtgagagggtgggcgaaggaaaaagtgtagagtaatgagggcggatagtggggacgagggggatatgggtcaggtaaggcgatcaaatgggatttgggtttccttgagttaaatacaggcnnnnnnnnnnnaatctgtaattgatttacatttgattttaagaagacactgtttacatcaggtcaccacaaagcagatttacatacaaccttcaattgcggaaaaacaaagtttctttttgatccaaacacaaagaaaaacttctttgtgnnnnnnnnnnaatgatcttttccttgatcatnnnnnnnnnnnnnnnntgcagtacttttagaaggtaaagctagtaagtttacagaagtgccaaacacccaaacacttgaagccaaaacnnnnnnnnnnnnnnnnaagaaaaaggtatgacttcttgttttctgttcttggcataaattttaattctttccagtggaaccaaaacctcctgaacccctttcggtgtcatccaaggcttgaacttcttctatttctggataaaaaatccgttcgcaaatgagctgtgcaattcgatcaccttttttgacttcaaacttttctttgccaaaattaaacagtacaacaccaacatttcctctataatcttcatctatgacaccagctcctacatcaataaagtgttttgcagccaagcctgaccgtggagccactcttccataacacccagaagggagcgctatctgaatgtccgttttcacaacagctttctccataggtggtattgtgtaatcataggcactgtacaggtcgtagcccgcggcgcgcgcggagccccgggtgggggccgtggcgtgctcggagagccgggcaaagcggagctgcatgccgcccacctccgcaggccgggcccgcttactgggtgaaatggcgggtgtctccggccccggcgccgggcttccccccgccttaggaagctcgcccttccagccagcggccccgactgtactggctccgcggcagccttggctcaggcggccagcgctggacagcggccggggaatcccgtgctgcgcggcgcggccgaggggcgggcctggcccggagagtaccgcggcttcggccctctgccgtgcgcctcgcgcgttttgcatcgctgagcgaagcagagacgtaaggaaatggtagcagagcgcggggcgagggcagaggggagtcatttcccccagagtttgggctggttgggtcctcggcacctccgggcgtgcgccaggcttccaccctgaagacgcggacgcgtgggtcgacgatatcccgggaatccggaccggtccagc

SEQ ID NO: 123149 - DNA, 635 bp, Homo Sapiens
  misc_feature (528)..(528): n is a, c, g, or t
  misc_feature (574)..(574): n is a, c, g, or t
  misc_feature (590)..(590): n is a, c, g, or t
ggattatacattttatttacctgatgaaagcatttaggactcaaatctttagagaatatataataatagccatatccttttaattaataaaataacactttaaagacaggcatattaccattgtatatgacacctaatacacattgtcagataccacataaacatatttatcttccaataccaatgtttgttttattaaaacaataattaattaataggctcaatagtgaccctcaagttaatcccatgactttcccaggctctgcatgcataaagaaatcattgtgacagaaaaatatcaaccacatactgaagcatagcttgctagaacaaatcctgtacatatgaatgccagcaactggggacacatttagtattcacattttatgcaaacttacttggtcaattatttcttttttaagcacaggtttattttggaattcagataagaactgacacatcatagacagtcattgttaaggtaaccctgttatttcaattgcaaacaaacaataaacgttttttctntcaagacagttaccactttttaagatcttagtactaccctatgcanaaacagttttttttanaagcctgaacaggttaagatagataatagccaactatgttttctc

SEQ ID NO: 123150 - DNA, 1801 bp, Homo Sapiens
  misc_feature (435)..(497): n is a, c, g, or t
  misc_feature (1082)..(1097): n is a, c, g, or t
cttgagtactataaacagtgtgtaaaaaagcaggctggtacggtccggaattcccgggatatcgtcgaccacgcgtcggattactgcttgactgactagctaggttaggcctaagagtgtttaccgaataatctgcactcactcagtagcccttcttcaggattaaaaacgatgatgacctcatcttagagccctaaagggaaatgcttatgtgggaacaagaaaagtcggtggtactgtcttctgctactactacttagtgctttgctgtgtatagggtgtgttcacatatatctcaattgaatgtcacaagaatccctgaagtgattaaaagtcttgagaggtcaggcaatttttgtaaggctagaaggaaaagtgaggttttagacttcatttcttttaaagttggcaaacaaacattttctgtaatggacnnnnnnnnnnnnnnnnnnnnnnnnnnnnnnnnnnnnnnnnnnnnnnnnnnnnnnnnnnnnnnnagtaaattatttcaggctttgcaggctataaagtgctgcagctccttagctttgctgttgttatagtgtagctggagccatagacagttagttagttagttatgagtgagcacagctgggtgccagtacaattttaatgatcaagactcgtggcaggcagaacaaaccatcatttgttgatcctctgcttgaaagcacgaataagtgagaacagagcagtcatatggtttcagaaagtgttattctgggatttcaggataaattttgtaaaactactaacaaacaacacacaggaaactaatttggtataagaaacgacatatccctaaatagtgcttatttaacttcattataaatacatctacttaacaaaaaaatatattttgtgatcttgaggtcacttcgtttaggtcattatctcaacccaacctccccaaactctggtttgagccaatatgtgttctattgttctcagagcaccagccgactgtacaacaattgttataaaaatgtttattgtttaccaaaaccagtggacctcttatcaaatgctgcttggtaacaaaatctatcacagttttaatnnnnnnnnnnnnnnnngaagctaactatttgtctcattgtcattagttagactttctgcaaggtcacttaatccagacttattcagtgcattaatcagattctcaggtgttgcatgaactccctcttgatcttgccaggcaaccaggagctgcttagctctcatcttcatgtcttcactgtcacactcaatctgcctaatttctgagtctttcatttccaagtagggagccagaatcttccattgttcacccagcttgttggcaaatacctctatttgttctcctgttacaggtttgtctcgccgaacatcaggactttcattttccttcagtagagcatcattatcttcctcatcttcatcctcacctgtttttatttcttcagaaggaggcggtaattccttggctagctttattaccatattttcaagatattctggtaaacttttaaactgctggttggttggctggaagaagtgagggcttctccgtgctaatagtctcagggctctccaaccataatttgaattgttcacagccttatattcattttccaccatattttcagggtctgcctgttcaatggcttcttcaaagaattcctccaaagtgggcatgtgttcccttgtctctgatttacaggcttccatattatcagggcaaagattccaagccttgtttcagagacaaggtagaccgaggggatcctctagtgcgccg

SEQ ID NO: 123151 - DNA, 689 bp, Homo Sapiens
tcatggttaagctgcttggtttaattttttagcacttgaaaaaaaatgtacagtagtttgaacactcagtctttgcaaacctccattgaggtcaaagatatcattcatacgtacaaaattagtttataaatttttttggcaatttcatcttagtaacccgttttgtcctattgccattgtcccaaccattgaaaaagtttacaataatttacatagaaatattttcaaagtgcttaagaatagtgattgttctctgggatatttacagatggcctatacaatgtatgtacaggtggtatacactatagcacaagtttcactgctggaatatggctttctagggaaagtgcatatttggccagaggtggcaatactgtctagaaattcaagggttacagatactcggtaaccacatccaaagctgaagtagaatgtggacaagaatatttacaaaagtaatataaaaacggtcaagtacacaagcttgatccacgcaaaggtatcttgatgttcttccagccgagaggaagaaaaagagacttcagctgctggctcggttaccattccgacgggggtattatttgtttagacctcaaaggtcaacatttgtcacagaagtcaagctagatcatcatctgtgcttacaactgatattgctgggtacgtgtgtccaacagaagcactgtgtc

SEQ ID NO: 123152 - DNA, 3621 bp, Homo Sapiens
  misc_feature (893)..(893): n is a, c, g, or t
gaaatcaagttttgtttttatatgaacagaagtagaccatctagaaatatttcagtttatttaaattgttaagtagaatatgaaaccgaatttgtagctagtaccagagaatggacttaactgtttggtgtttaatgagaacagcttctacacaggatcccaagagacttacagaaaaggggcaaagccctaatattaagcaaataaaactcatgtttcaaacagattatacaaaaattgatttatacttcatttcccttttttgatatttagaaagtgcagatttaacaaaaggtagccatatcctttctatgtacaatgccgattataattatgcaaaactgtcagtctgttatccaaaaatcccagtgtttagctctccaaccttaagtcatggaattgaataagaattaaagagggttaaaataaaaaagctaatgccacattccagataaagggaagcaacaaatacattaatctaacaacagtaggtttaacctaaacttttcaaaaagcttaacatcatttcattatatttttagtggaaaattagggattatttggcaatgctgctttttactagtagtaaacaatgataaagtcaagtgtgggaataacctaagaataacaaccagtgaggcatataaaattgtttttagggcactatctgaaaaatttgtggattttcatagcagatacgtccctatgttgtttgcttatgtgagccaagaggtcattaaaatgctattcacgacacagaaagacttctcaatggaagctgctgtcctaaactcagcctctgctagaaatgaatcatgctattcacaattctttcaacaaaggtatcatcttaggatgctagcagcatagcaaacttcacttaccctatcctnaatgataagcaatgaagcaacactagaaaaaatgcacgtgaaaaaaggacaagggttagagatagctaaagatcttatcgtttacatgaaaagcctttcgttgtcctgtttttccgaactcatggtaatacaagtttttccgaaagggatgtaaagacaggacttaaaaatttaataatattctaaagtatttctgaatcttaaggtaaagaaacttaacactgaaaaagtgttcttcagaggccaaatctcaatacatttggcaaacatgttaataaaattcactcctccttcctgcttttccttttttaaaaaaacaacctgtactaggctaccaagctgctagaggagttgccaaaatgcagactactcaaatttaggttaagagatttattctaggaaagtgaataggctatacacctaattagaaagacaaaccacaacaccctccaaacactagtgcatgcagttaactcttccatttcataaactcaatggatagacaggaagggaacaaagagaggaggaaaagcagaacatagaagtaaaacagcaaatgaaggcatctgggacacattttagggaagagagcaaatgaggggggaagacaccaattaactgacattggatagtaggcagttagaacttatctttccgtttacctagcaagttacatcagtgctttatattaaacttgacaaacctactagtttgtccctttcactcttaaatataccatgaggtggttggggagggagaagcaaataaagcagcatgcagggagacgcaaggaagaagtggccaaggagaagaaatggtggcaggaatagttttaaatatcaaggccacttaaaacaagactcagcaaaccaaagctatcacttctgcattaccctttgtcctcaattaactactttgaaaattacagccaagcaaaccacaaacattttaatggtttatgtttggatgatatgtctcctgcacatgcttccaccagaacaaaaaaggaaaaccagagaagttcctttccacataaggcacaggacaaaattaatcccatttacatattcaaggcgaaaatgagtgttttcctggcttttgtttgtttcttttgctatcacatgtctatagattatagggactcaaagcacattattccatgccagaaaattcccactgttgtacaaaattaaaattgttaattctaactttattcttatacaatttgcagaatagatttgaaatgattgctataggttttaatgttgataagaactggactataatacaactgaaatgcagttgagctgagcaagtacatttaaaaatgaagtcacagacatgatttttctatacatttttttgtttgaagaaaattatgataaagtcagcaagcagtcacagatgaaagaacaaataaaataggtggcttggatagttaagatgagaaacaaaaatatctgtttagagttaaaaatggacagagtggtttattttgcagcaagaagagaaaacggggtagtggatggcaactgatggaacaggagaatgctcagcagcatttgctcttccagcctgtcacgcctcctccactgctgatatctacattttcactgttgggctcttttacaggggtctttcgaaggatatcttcagctaacgtgaggaacgccttttcgatgtttatatttgcttttgcactagtctcaaaaaacctaataccatgctcccttgcaatctgttctccttttcctttaggtacaactcttttgtcgtccatatcacacttgtttcctagtaacattctttccacatcttcattggcatgctcatctatgtttctaagccatttgctgatgttttcaaaacttttaccattggtgatgtcatatactagcatgatacccattgcgcctctgtagtaggaggttgtgatggtgtgaaatcgctcctggcctgctgtatcccatatctgtagcttgatcttctttccttgtaattcaactgttttgatcttgaagtctattcctatggtggaaataaaggtagtattgaaggcatcatccgaaaaacgaaaaaggacgcaggtcttccccactccggaatccccgatcaggagcagcttgaaaagcaggtcgtacgtcttcttcgccattgggaggagcggctcgggctctcgccgccggcggccccaagggatcggtccctctcactacggccaactcctcactcgggcgttctcaggccggaggaccggggaagcgtgggaaaaaggctcgagacggcgcgggcgacctacgaacagctttgaggaagccccgacagtggcggcgtccagtgcctccgagggcggcgaccgcggctccgcagcctctcccagccgctccgcccggttccggggagtcggtcgggacaaaatggcctcccctcccccctcagggcttctcggccgggacgctcccacgggcgagcaagcctgctctgccgtcgaggaggcgcagcgggcgtgaggacagtctctctcccgagcggaaactccctgctagcacgcggcgagggcagcgaagaaggacccctaagtcgacgagctcagttacatagccccaggaaaccgagccaccccggccagagccaccttttccccgtgccctctcacgccggcgtgcgcggacgcgtgggcggacgcgtgggcggacgcgtgggtcgacgatatcccgggaattccgga

SEQ ID NO: 123153 - DNA, 2116 bp, Homo Sapiens
  misc_feature (434)..(454): n is a, c, g, or t
  misc_feature (1797)..(2043): n is a, c, g, or t
ggtggcagcttagttatgctccccggtgaggcccgaaagcttcgtgccgaagggcggggcgagggacacttagtggcaggcttcagggtctgtgtagacaccgcgggtatagaagcacccgttagaaaggggtgttaatagtgtttacgcccttaggaggggctttaaaatgtctccctgtagggtagagttgtggtgccccaagtaagtggtcaccacccgccgagagtataagggttcctttacgccaaggagtccccaggctagcacgtttttccccagtcaacgaacggttgttaaacgcgcggcccagtgcctagcttataaatacgagctcacctaataaggggccacaccttgtaacacagagaaagctgggtaacgcgtaaactttgggccccttcgaggggaaatctttaagaccggcccccccnnnnnnnnnnnnnnnnnnnnnctccgtacaagtattttatttccattacaatagtgccacgccaaaactacagtagctcaaaacataatacaaaaaatagattcccagctcccaaccccacgtccacgcacccacagagaagccagccctatggctccccaggcctaaggggaggggtctcacttcattttccttaaagctctggagcgggtagtggcagtggcaggggcttccacccctgctgggcctgagccctcttcttccccaaccccctgccggccccggcagacctgagccatgagtgtggtctccattccctcgggctgcacccccagccctaggacacctgcctgtgtccagggagggggtccaagcccatggtgctggtgctgacactacaggaccaccaccctccacgcggaaggcaggagggtcgggggaggggaggcagaggggacaccatggctgggagaagcccgcctctatgtggcaaggggactgcggctggcttctgcttcagctacttctcgggttcctgtctcctctgcagagctaccaggactgctgcgtgctgggaccaggacctccatctggaatccactctcgataccctgcaccagcttggaggcagatcccaaggtggcaggggtgtccctgtgccgtctgcttcctctcgggcaggaggattccagcttcccgggtgaggggagagcactgtccaggcagggctgggccaggaggcctgggctgctgaggcgggaaagcggtggctgtggagggcacgtgctgcccccacctccgtctcggggcctggcttccccactggatggcagaggccgctccaggtgcttccacttggtggcgcccatgagtctgctactggagaagctgtggtctcagggaggagacagacaccacaggccagactgggtggaggaatcttcccctcacaatgtcccctggctaaaagcatccatctagctgcaagtactatcttgattcaacccaggggccgacaatggactgcagcccagggtaagtccagcagttttgcagtcttccgatgccccgtgccatggacctgccggccagagctcctgggctcccgtggaggttagccctgcaggcaccggggaaatggggctatggcctgtgcttcagtcaggacacctgggggctgcactgcggaggccaagggcatctaggagcaggggctgtctccttggggtggagactggcggctgcagcctcagataaggcactagaggactggactggtcctgggagccaggcccagccatgtggtggatgacggtgctcagagagaggatttgggtcctgcgggaggtgacagctgtttctcnnnnnnnnnnnnnnnnnnnnnnnnnnnnnnnnnnnnnnnnnnnnnnnnnnnnnnnnnnnnnnnnnnnnnnnnnnnnnnnnnnnnnnnnnnnnnnnnnnnnnnnnnnnnnnnnnnnnnnnnnnnnnnnnnnnnnnnnnnnnnnnnnnnnnnnnnnnnnnnnnnnnnnnnnnnnnnnnnnnnnnnnnnnnnnnnnnnnnnnnnnnnnnnnnnnnnnnnnnnnnnnnnnnnnnnnnnnnnnnnnnnnnnngacgcgtggtcgacgatatcccgggattccgaccgtaccagcctgctttttaccactgtctatattcacatgc

SEQ ID NO: 123154 - DNA, 2734 bp, Homo Sapiens
  misc_feature (80)..(80): n is a, c, g, or t
  misc_feature (98)..(98): n is a, c, g, or t
  misc_feature (142)..(718): n is a, c, g, or t
  misc_feature (749)..(768): n is a, c, g, or t
  misc_feature (1883)..(1893): n is a, c, g, or t
  misc_feature (2283)..(2299): n is a, c, g, or t
cggtgaccagcgtataccgtagccagcgtggttgacggggttgtccacagccagctggcgacgactacacgactggtacnacgctgagcttggaagcncacgctcccgaggagaagcggacagtatccgtagcgcagggtcnnnnnnnnnnnnnnnnnnnnnnnnnnnnnnnnnnnnnnnnnnnnnnnnnnnnnnnnnnnnnnnnnnnnnnnnnnnnnnnnnnnnnnnnnnnnnnnnnnnnnnnnnnnnnnnnnnnnnnnnnnnnnnnnnnnnnnnnnnnnnnnnnnnnnnnnnnnnnnnnnnnnnnnnnnnnnnnnnnnnnnnnnnnnnnnnnnnnnnnnnnnnnnnnnnnnnnnnnnnnnnnnnnnnnnnnnnnnnnnnnnnnnnnnnnnnnnnnnnnnnnnnnnnnnnnnnnnnnnnnnnnnnnnnnnnnnnnnnnnnnnnnnnnnnnnnnnnnnnnnnnnnnnnnnnnnnnnnnnnnnnnnnnnnnnnnnnnnnnnnnnnnnnnnnnnnnnnnnnnnnnnnnnnnnnnnnnnnnnnnnnnnnnnnnnnnnnnnnnnnnnnnnnnnnnnnnnnnnnnnnnnnnnnnnnnnnnnnnnnnnnnnnnnnnnnnnnnnnnnnnnnnnnnnnnnnnnnnnnnnnnnnnnnnnnnnnnnnnnnnnnnnnnnnnnnnnnnnnnnnnnnnnnnnnnnnnnnnnnnnnnnnnnnnnnnnnnnnnaagaattcggcacgaggcgcggctgtaggcnnnnnnnnnnnnnnnnnnnnaggttggtattataacatttattaaaataatgctgtgggttaatagaaacagcaaagaaccaaagaattaaaatgcaagctatgtaaaatcccaactaaaacccaaaagtgtctaatgtattcattcattagctaactaaaagcccaaaaaagacaagacacccaatataataaagtactgcaaaacaattggcaattttcagttatcaaaattgtggattttgcattttgtatccttttctcaatcaagaaaaaaattctttttgaatgttatataacatacatataaaacaagatagaaaaatacattataaacttgtaacaatggctgtaaatacattatcttacatgtttctcataggcaataggttggttatggtacatacatagcatgaaactaagataataaagaatagacaaaaatacatgtcagctgtacgataacatacaagcgacactcccatctacccacgctaaaaaattacataatactgtcagaaaaaaagtcttaaaaactacatattttaataagaaataaattcaataaagaatgataatactgagaaccaaggcattcagagatttcaaaagtcatgcttttttcagttgatccaaaattttgtcaaccaagttttcaaaagtttgttcagagccaacattccctataaatgtcacacatttattatttcatacatttactttcttccccataaaagacctttgataaacatctaaaatgtccaggtataacatagttgagatgaaactggatcaaatactggtattgtttttaacaactatcacctcaagtgtttgagtgtcgcaaatttattcaaccaaccaaacaatataaaaatcaaaatggcacagcatatattgtaaataaatcaaaactgtatgtgtaacagaaagacaaagcagtggcatattaaaccaaagctagctggatacaaaacaatgaatgtctattgcatagtaaataaactgacaacggtttccaagtgagacaagatggtgggggaggtcaccaagaaggtaatgactcagcttcctgctgacctctgactgtgatgctgggaaggtgtggaagaggggacgagttgataagctgggcnnnnnnnnnnntccactgtcacttgagatttgccacgtctggtactgagcagttaatgattattcactcaagtgtttagatgtaggctttgcacacaaattgcttcaactacataactaactgtttcaactttttgagaaattagaagcttaagctgaaatgtggttgagtatttatatgcactgtgatgctagtttttcacattcttttaaagttaaggggtgggggaggcagagtttatttaaaccgtaaaaggatacactcacgcccgttttctggtttgttataaagacatgtgattaaatttgggtgatttacaacattgttttctagaatgaaaatcccaaagattcacttttgtgaaaacatttgctaggtatcctcttatattcaattaattnnnnnnnnnnnnnnnnntcaaatgattgcatcccccttttccaaataaaacaaagctctaattttgtctgtaaactgaagtttggatgacacctaatttttatttccgaatcccttgggttaacattgaaggttggaataaccaaaagtcttaaacttttcttttaaagaatgatgttttaaaacttactagtccggccttagaaaagttatcaaatcttttcacagtttcagatttggcaaatttgcatcaaggtaccgtggcaaaaatcctttaattcaaacttatcaactcatttgtctccctcatatcttctttcacatactgggcgactgggtaacatgcatttaacttgtattttgaggggggagcttatctttttgggacacttgactgaatgaccctgaaggaaaataaggcactttcttttctttagactttttccaatactt

SEQ ID NO: 123155 - DNA, 2673 bp, Homo Sapiens
gggtaatgttctcacgactttatttggccttaattgggggaaaggaaaccaataaaactatcactttaatttctttattcatcaatagtatccgaaaaggaagaatcaggagttacaaaaacaagttaaatgcaatatagaagcctactaaatacaaatacaagttcacaaacacatatgcaacagaaacttgtttagattgtttcttgaagtttgactacttaaaaacataggtgtaaaggaaagacattcagactggtccacgtgggcttgttagcaggcagaggaaccctgctttccaaaaactgatatagtccagagtcacggcatgtgggaatgtttccatggacactggatcttaacagatgctatagtgtttacaaaactacacacacagagaaagcccaaggaagcctgcaggctaagccctatgcttttagagggctgaaggaaccaaacctagtttaatcctgtttgtttgctccatgcaaaactttatggaagactccccagactaggctatttagcagcttccatgaatggtcctcagatcatgtgattctacggcatagacgacagctgccctatttacacagaagctgcagaactcaagaggaatgtggatttgctcttgggagttcaatgttgcagggtagagtagtcttggatgataccatgttctaaatgactagtgaagagacactgtggtttcttgcttttaacaaattggtgtactcttgccctcctcccatagtgtccaagggctggtaaaacctttgattaaggcgtgctgctgtgagttctccaaggcacttggacagggagctgcatttcagactgaacaagtggagtttgaagagtttttagatgggatggatacataaaagcttgaaatgctaaacaaagtggaattttctcctttcaaatgagaacaagaaaaactagaaggaattctatttttggcacaacagtttctcacagttgcctgtgcattacaacctaaataatttccttctgatggtctttaatctgctttctgcaaatgagatcttatgtcaaggatttaatctttggtattccaaatgcatctgaaacagggtagtgagtggggttaataatcacagaagtcgaaagacacaggactaactgtaaatgactgacctccccaagtcacagttttaggattaaatctccattttcttccccctgttgaatctgaaactttcttttatcctcatctctaagggaatgctttctatttccagccggaggttaaacatgaaatgcaaatatgaagacagagtggggtggttctctttcccactctcttcctgctttacccatgaggactccatatcatagcacgacctgtagggtcatcaggctgagatcaaatctggtcatcttgtttttggccatctgacatttcttgttctagtaacaagatttcatttattctatagagaagaaggaaaaatcacaggaacctatctcccctctggaccaatgatcagaaccacagaatttataacttatcaaatcaaaaggttagtgcattcttaccagctcactgaggaaactgaggtccagaaaaaagaagagacagggccaactcaccctcctagttagtcgaatgagcatattggtaggctgggatatcctaagccctgcttggctgcccttgtcgccatccttgggaatactgatttgcctcaacttctcagaataaataaaaacaaattaatgtttggatcttgaaagttttttatgaagatgcttcttcccctggcttcggtctaaggcacccttgctcctctggcagatagtggactgctggaagctaggggggccaactatgggctgcatctagtatgtggcagggtgggggcatctgggttatttcagcccctgcaccaggaagaaccccaaactccttccacctatgaagtggtgggactactgaaaaataattacaaaagcttaatacctagtcaagaaaataaaatattaaaaaacaataatataatgataataattgaagaataaagtcaacttgccaaaaaaaagtgttttacagagaaatagcacctttggtaaaaagtatttttaacatttggttaggtcgctaaggggctcaaagtatacaagtatctgcatcatttgggtgtaccctcccagaaactccatccaagtctgagggacactgggttaactagcagtatggctatgtatctagaggcagttattgggaccaagagatgcgtggatgctggaggtctgtcatgctgacggcaatggaaagaggctggaagcagagagcgttcctctccgtggagcttcccaaacctctcctccggggacaccctgctaagttctctctggcatcgtgtgcactccctgcagcctgctgacagatgcagtaaactcaaaagaggttcagatttgggtctgttcctctttcaatcgtgatgcagtttccttactagcctccagccccagagcaccatttacagtttctcttaaagcactcctagaaatgaaggctgtggcccttcccttcctagccagccaccttcatatcctttattgcaaaacaaataaacaaaataaaactcattgctatataagcaaatactcctcgtgccggaatcgccacccaggcctcgctacctt

SEQ ID NO: 123156 - DNA, 659 bp, Homo Sapiens
  misc_feature (111)..(196): n is a, c, g, or t
  misc_feature (613)..(613): n is a, c, g, or t
gactatgggctgcatctagtatgtggcagggtgggggcatctgggttatttcagcccctgcaccaggaagaaccccaaactccttccacctatgaagtggtgggactactnnnnnnnnnnnnnnnnnnnnnnnnnnnnnnnnnnnnnnnnnnnnnnnnnnnnnnnnnnnnnnnnnnnnnnnnnnnnnnnnnnnnnngtcaacttgccaaaaaaaagtgttttacagagaaatagcacctttggtaaaaagtatttttaaaatttggttaggtcgctaaggggctcaaagtatacaagtatctgcattcatttgggtgtaccctcccagaaactccatccaagtctgagggacactgggttaactagcagtatggctatgtatctagaggcagttattgggaccaagagatgcgtggatgctggaggtctgtcatgctgacggcaatggaaagaggctggaagcagagagcgttcctctccgtggagcttcccaaacctctcctccggggacaccctgctaagttctctctggcatcgtgtgcactccctgcagcctgctgacagatgcagtaaactcaaaagaggttcagatttgggtctgttcctctttcantcgtgatgcagtttccttactagcctccagccccagagcacattta

SEQ ID NO: 123157 - DNA, 1351 bp, Homo Sapiens
gggggctccctgctgcagttcgccgtacttccatctgctgggtgcctccatcgttggttgggtggggatggggcattttctgagctaagctttgtcattagtttgtgaagcacctggtcagcaacctgccccagacctggagggtctttgtggactgaaggtagacaccagccagcatggtggccctgttctgggggagcagggtaaggcaggaggaagtgggtgagctccgagatgatgagcacatgaagcctgtggccccttcgtacctgcaatatgtcaggagcctcacgctcacccaagatcctgcaggggccaggctccatctcactggctctgagggcaggacagggtatcacacatttctcaccaggcctcctttcctatgggcattggtgcctcccagaggtttcttgggctgctggctggtgagagaggacccttaaagaagatcaagccaagctgaccttggaccctgtccagcacagcttctggcacaggatgcttggtgaatgtaccctttctttccctccctgcagctctgagggagcccctgaccttgtagtgggtggaggaggtaaggggcctccctccctaaatctgcctcttctgcaagctacttggagacttgcctagttgtacccacccctccaggtccctggtgctagagcttctgagaaggcctttccctttcctctttgcctgctatataaggcaggttcctgtggctctgctggctcagtgtgggctgcaggaggactgcagactcagctgcaattctgaggggggtttgggaggcttgtgcgaggtctcaggcctgtgtggggagctggtgcctcttcctgcccgtatctttctcttccaagggcagtgctccaaggcagggactggagaagccaaggggagagtctaaaagggctagagcatttttaaaaatagacacagggtcttgggactggggtttcggattgagttgcaagcagggagaaaacctgaaggtcggtgcccctatggggctgaccagtagagaatttcctttactgtatttttgtgtctggtcttccctttctggcttctaggacatccatgccaggtgaggtgcctgggtccctgttacaagtcaggagccctgtagggagacccctccttttgtacaagtacctgaatgctgcgacaagcagatttttgtaaaattttatattagtttttaatgtcagtggcgactcggttcctggggctgcagccagcctgggacttttgtaagaatttttgggtgactcacttagatgtcgtttccttcttgccccctcttcctctctgtaatctaagtgcattaaacatctttgcagaa

SEQ ID NO: 123158 - DNA, 846 bp, Homo Sapiens
  misc_feature (799)..(799): n is a, c, g, or t
taaggctaggtacgaggctgggtggtgaatcggcacgaggttggcatcgatgaccaacagcacaaggatgacaatgagaaccacaaagaaggtgttgccatccttgtgctgttggtcatcgagtgccgtgcgcgaaattcggaagtatgatgatgtgacggaaaaggtgaacctccagaacaatcccggggccatggagcacttccacatgaagcttttccgtgcccagaggaatctctacatgctggcttttccttgctgctgtccttcctgcttagacgcctggtgactctcatttcgcagcaggccacgctgctggcctccaatgaagcctttaaaaagcaggcggagagtgctagtgaggcggccaagaagtacatggaggagaatgaccagctcaagaagggagctgctgttgacggaggcaagttggatgtcgggaatgctgaggtgaagttggaggaagagaacaggagcctgaaggctgacctgcagaagctaaaggacgagctggccagcactaagcaaaaactagagaaagctgaaaaccaggttctggccatgcggaagcagtctgagggcctcaccaaggagtacgaccgcttgctggaggagcacgcaaagctgcaggctgcagtagatggtcccatggacaagaaggaagagtaagggcctccttcctcccctgcctgcagctggcttccacctggcacgtgctgctgcttctgagagcccggcctctccctccagtacttctgtttgtgcccttctgcttccccattcctttcacagctcatantcgtcatctggccttgtcacatctcaagcacattcaggggactgatt

SEQ ID NO: 123159 - DNA, 904 bp, Homo Sapiens
cttacttggaaggaatgggaccgccaccgggagctgacactccaccttgcgggtcctccaacaacgttcgtatcccttgttgagccctcgactgcttccgcatggccgcacctgttttcacctttctcttatttttgcttagtgctggccagctcgtccctttacttctccagtcacctttaaggctcctgttctcttcccccaacttcaccttcagcattcccgacatccaaacgtgccctccggtcaacagcagctcccttcttgagctggtcattctccctccatgtacttcttggccgcctcactagcactctccgcctgctttttaaaggcttcattggaggccagcagcgtggcctgctgcgaaatgagagtcaccaggcgtctaagcaggaaggacagcagcaaggaaaagccagcaatgtagagattcctctgggcacggaaaagcttcatgtggaagtgctccatggccccgggattgttctggaggttcaccttgttccgtcacatcatcatacttccgaatttcgcgcacggcatcgatgaccagacagcacaaggatgacaatgagaaccacaaagaaggtgttgccataggacactaacaactccaccagccgggacttgaaaatcttctgccatcttttaggagaaatgaagggaatgcagagaagcaacacaacaaagacctccgcatagaggaaggtggcaactgcagtccactgcagactcatcctgttgctagaaggtttcccacaggaagatgtgagcttgtttccgagtttcccacagtcaacgtgcaggccccgccgcagcaaccgaactctcccacagcagccccggccccccccggccgtaatggccgaattcccgggcatatgtccggtaccgtcgactg

SEQ ID NO: 123160 - DNA, 1039 bp, Homo Sapiens
  misc_feature (919)..(953): n is a, c, g, or t
  misc_feature (957)..(997): n is a, c, g, or t
gtgaagcagtgagcagggtagtaagagccttactgctccttctgtggcctgggaccatctacgcacctgcatctttgctggctcttccagtcaatcggttcgactcctttgtgaggccctcagactgcgttccgcatggccagaacctggttctcagctttctctagtttttgcttagtgctgccagctcgtcctttagcttctgcaggtcagcccttcaggctcctgtttctcttcctccaacttcacctcagcattcccgacatccaacttgcctccgtcaacagcagctcccttcttgagctggtcattctcctccatgtacttcttggccgcctcactagcactctccgcctgctttttaaaggcttcattggaggccagcagcgtggcctgctgcgaaatgagagtcaccaggcgtctaagcaggaaggacagcagcaaggaaaagccagcaatgtagagattcctctgggcacggaaaagcttcatgtggaagtgctccatggccccgggattgttctggaggttcaccttttccgtcacatcatcatacttccgaatttcgcgcacggcatcgatgaccaacagcacaaggatgacaatgagaaccacaaagaaggtgttgccataggacactaacaactccaccagccgggacttgaaaatcttctgccatcttttaggagaaatgaagggaatgcagagaagcaacacaacaaagacctccgcatagaggaaggtggcaactgcagtccactgcagactcatcctgttgctagaaggtttcccacaggaagatgtgagcttgtttccgagtttcccacagtcaacgtgcaggccccgccgcagcaaccgaactctcccccccggccgtaatggccgaattcccgggcatatgtccggtaccgtcgactgnnnnnnnnnnnnnnnnnnnnnnnnnnnnnnnnnnncggnnnnnnnnnnnnnnnnnnnnnnnnnnnnnnnnnnnnnnnnnaaataaccgcgctagcgccctataggtgatcaagttttcttt

SEQ ID NO: 123161 - DNA, 1862 bp, Homo Sapiens
  misc_feature (466)..(466): n is a, c, g, or t
  misc_feature (477)..(482): n is a, c, g, or t
  misc_feature (485)..(516): n is a, c, g, or t
aataaaacccaaatcttgggagggcaccggaggggccccttaaaaatgagcccctgggggctcgggggattttaaaatttcccccaaccccatttgggactcccctaggctcccggggtataatttttttcaaaaaatccattcccccgtaaggcaaaacttttcaagccaggcaaagcatttgcaagttagtttaaccccctttatcccccttaaaaatttttatattttccctaagagcttttaaatctcggtagggtagtttgtcccaatttatgtcccccccacagaaggtaaaggtcctttcacaaagattcccaaagctagcagtttttcccagtccacgacgttgtaaaaacgacggccagtgccctagcttataatacgactcactattaggggccactttgtaccaagaaagctgggtacgcgtaagcttgggcccctcgaggggatactctagagncggccgccctnnnnnnttnnnnnnnnnnnnnnnnnnnnnnnnnnnnnnnnacacaccatgacaacttttattgccctcaagagaaactccagtccacctgctccacccaccctcctgcgggaccaaagaaaacacccagagggcaaaacaaaaaggggctcaaaccaacaggaagtcagccccaccgcaagccggactacaactaactcgtgctctccacgctcaggcgtggaagccaaggctgtgccaggcctggccaggccaagcaggatgacagcaaacgcattctgaacgtgtagcaatcaggtcccctgtaatgtgcttggagagtgtggacaagggccgagatgacgagctatgagctgtggaagggaatgggggaagcagaagggcacaaacagaagtactggagggagaggccgggctctcaggaagcagcaggcacgtgccaggtggaagccagctgcaggcaggggaggaaggaggcccttactcttccttcttgtccatgggaccatctactgcagcctgcagctttgcgtgctcctccagcaagcggtcgtactccttggtgaggccctcagactgcttccgcatggccagaacctggttttcagctttctctagtttttgcttagtgctggccagctcgtcctttagcttctgcaggtcagccttcaggctcctgttctcttcctccaacttcacctcagcattcccgacatccaacttgcctccgtcaacagcagctcccttcttgagctggtcattctcctccatgtacttcttggccgcctcactagcactctccgcctgctttttaaaggcttcattggaggccagcagcgtggcctgctgcgaaatgagagtcaccaggcgtctaagcaggaaggacagcagcaaggaaaagccagcaatgtagagattcctctgggcacggaaaagcttcatgtggaagtgctccatggccccgggattgttctggaggttcaccttttccgtcacatcatcatacttccgaatttcgcgcacggcatcgatgaccaacagcacaaggatgacaatgagaaccacaaagaaggtgttgccataggacactaacaactccaccagccgggacttgaaaatcttctgccatcttttaggagaaatgaagggaatgcagagaagcaacacaacaaagacctccgcatagaggaaggtggcaactgcagtccactgcagactcatcctgttgctagaaggtttcccacaggaagatgtgagcttgtttccgagtttcccacagtcaacgtgcaggccccgccgccggacgcgtgggtcgacgatatcccgggaattccggaccgtaccagcctgcttttttgtaacccacttgttcatagtgtacaaagct

SEQ ID NO: 123162 - DNA, 1113 bp, Homo Sapiens
  misc_feature (998)..(998): n is a, c, g, or t
ggatcctcgagggaggtgccggtttctctccgcgggcgccgtggggacggtgggaggcgggggcgtcggcagcgcttggactaggtgcggccttgggcctgcctggtagcggggatttgggcccgcagagcgcccgcctctgcggctgagttctgcctggcggggaagggagcgcccgatgggtgccgaggcgtcctcctcttggtgccctggcactgctcttcccgaagaacgcctttcagttaaacgggcgtcggaaatctcgggcttcctggggcagggatcgtcgggagaggccgctctggacgtgttgacacacgtgctggagggggcaggaaacaagctcacatcttcctgtgggaaaccttctagcaacaggatgagtctgcagtggactgcagttgccaccttcctctatgcggaggtctttgttgtgttgcttctctgcattcccttcatttctcctaaaagatggcagaagattttcaagtcccggctggtggagttgttagtgtcctatggcaacaccttctttgtggttctcattgtcatccttgtgctgttggtcatcgatgccgtgcgcgaaattcggaagtatgatgatgtgacggaaaaggtgaacctccagaacaatcccggggccatggagcacttccacatgaagcttttccgtgcccagaggaatctctacattgctggcttttccttgctgctgtccttcctgcttagacgcctggtgactctcatttcgcagcaggccacgctgctggcctccaatgaagcctttaaaaagcaggcggagagtgctagtgaggcggccaagaagtacatggaggagaatgaccagctcaagaagggagctgctgttgacggaggcaagttggatgtcgggaatgctgaggtgaagttggaggaagagaacaggagcctgaaggctgacctgcagaagctaaaggacgagctggccagcactaagcaaaaactagagaaagctgaanaaccaggttctgggccatgcggaagcagtctgagggccctcaccaagggagtacgaacgttgctggaggagcccgcaagtgcaggctggagtagatgggcccagggccaaaggga

SEQ ID NO: 123163 - DNA, 941 bp, Homo Sapiens
cttcaaaaatccgaaaccttaaattaggtaccttaaccattagcaacctgggtctgaacaatccgtgaaacggggagtattggattttgtagatttggttaacatcttacgatcagttaggttattgataccattaatactgtggttggcctcaaaccaatcagttgaacctcaagaggaaaacagattttcctgaagaaatcccaccagtgtcagctcttgtttcatgaattttaggcttgcctaaccagccctcataattgtgtgatccaattccttgccacatataaaagcaagcagacgaaatgacttaacccggttcacaggcctttgtcactggctaccacagcaatggcataatgggcacatgagcacagcagccacgatggctgagatggaggccaagaggcaatagcatgaactgcttatgatggctgatgtagcagggctcctctgacaggtgactctggctcaactcactttggtctagctgaaaccatcttagaactgcacaagacttttcctacccacccctccttcctatttcttctccagaggttagatctgtatcatagtctgacagctttcccagactcctcgaccctcccctactacatcccccacaaactctccaactctcctgcatgtctaaccgagggtccaaattaacacaaagggaagtccacttagtgcactcactattaaagctctggtctttcattttgcagggtcagaaattcaacctttcataatttaccagggagtatttattaaaggtcctgtgacctagttcctaccaactcgttaagagactgatagataaaggagaaagctaaaactcaaagaagaaggaaccggacgcgtgggtcgacgatatcccgggattccggaccgtaccagcctgcttttttgtaacccacttggttctaatagtcacatac

SEQ ID NO: 123164 - DNA, 830 bp, Homo Sapiens
cactttaaattattttattcaagaagtgggggaggacagacaaggggactgagctgagccctgagtccctgaacctcccagctcagcccccacagcaggactggactcaaagtcagagggtggagactccagccccacccagacacggttggggacagacaggacccaggaataccgtctgactgtcgtgcaggggatggcggccgcagcacacagggcccggcccgtggaccgcccgggtggggctatttgggggtgccgccgcccttcttgggagtggtgggtttcttgccctgccagaggtgtccctggatggtgaaggcatcgacgctcatggacatggtcttggcggggatctgggtgaagcgcttgcggtccgagttgtacttgtagatgccttccaccatggcgggcgtgacggtccggggcccataccctgccagccgcgacagctcctctgtctcccccgacagcgtgtagagcgcccggaactggcagctcgagtcgcgaaagaggatcaggaagtggttggccttgcttttctcaatttcctccagaatgcgattcttctgcggttcgttcaccttgcccgccaggcagcagtgtgatagggcattgtggatgatgaacttgttggacttggcgctgggttctttgtacagccgtggacctgtgtactcgggcactgacgctggggaggaggcattgctgccattttcccagtcccgttcgcggcttccaggcaggcggcttggggacatgagacctgacggggagggagcccgagacgtggcctcttcaccccgaggttattgtgggccatcccggga

SEQ ID NO: 123165 - DNA, 1286 bp, Homo Sapiens
ggtgtaattctgaattcgctatcactttaatcagcatctgtatgaaggcagcagacagcgtttccctcagagcagccccattcttcagcggcagggacacaaggacccacaggccccgctttccgtccgagcacagcatgcccagagggaccagcgggggctcctcagcagaatcttagatttagaaggtgctccagtcaggaccctcacaggctgggtgacgaaggctgtcatgccgtgagaggtcgggccacgaccacgcagcaattggagaggaactgcacaccacggacactgctcttgaaaagaggatgatttacttgcttctaaaactgacaggctgcacttgtcctctccaagcagaggtgtgaagcaggggcagctggttctcactggtctttgaagttggcctttctcttttccacaaacgcggtcatcccttctttccggtcatcagtggcaaaggttgaataaaagagtttcttctccaacttacttccttctgttaatgtcatttcaaaagctgcattcactgattctttggccatcgctactacaattttagaattgctggcaattttttctgcacactggatggcttcttccaccagtgtctcaacaggacaaatcttgctgacaagacctgcttgcttggcgtcctgggctgagatccggtcaccggtgaggaccatctccatcgccagcgacttcccaacagcacgggtgagtctctgggtgccgcccgcacctgggatggttcctattaagatctccggctgtgcaaactgggccttctcaccggcatagatgatatcacacatcatggcaagctcacagcccccgccaaaggcatagccattgacagcagcgatgactggcttcttgacctgggtgaggtggtcccagtgcttcaagaacttgctggagtaacagtcctggaaactcaggttctgcatttccttgatatcagctccagctgcaaaggccttatccccgccggtgaggacaatggcccccacggccgggtcctcctcgaaggtcttcagggcctggttgagctcgtcaatcaggccatcgcaaagtgcattgagggccttggggcggttcagttggatcaaccccacggtgttattcttccctcttttttctgcgatgatgtactcaaagttagcacccgaggcgaagggacgccaggcgggacagcgaaccgggggcctcagcgggccgcgggcgcaggacagcaggacacgcagggcggccatggctctctggactcctcgcccccc

SEQ ID NO: 123166 - DNA, 1554 bp, Homo Sapiens
  misc_feature (110)..(110): n is a, c, g, or t
  misc_feature (134)..(142): n is a, c, g, or t
  misc_feature (252)..(264): n is a, c, g, or t
  misc_feature (294)..(294): n is a, c, g, or t
  misc_feature (300)..(300): n is a, c, g, or t
gtgtgttgggggggaggtttcccccaccccctttttttctgtgttcccccgggttttgttcttctggggggacccggcctttgttgccccccgttgtccgtttaacccantaaggggccccgccgcgcgccccnnnnnnnnngtgtgtttgaaaaattttttttgaggaggccgagggggccccccccaattttctgacagtggggtgacgggttggggggctgggggtgtcattattttgtgtgaataaannnnnnnnnnnnnagtattgaggtggggtggtggttggcggtngtgtgngtgtggttttctcagagaattatttaataatagaattaccatacttttggcgcaaatgtgtccaacaccaatgtgacaagtacatatatcagaatcactctttcctcagagaatcacaccttcccttggctctgcctgtggatccaaatcaagcctgggtgtgtctgacaataccagggcacggtttgcttcccggccctccatctctactgtttggctacagcttgagttcactaggcatcggctcccctctcaggccagccagcaagttgttagctgccaacaaggacatggtgttgcgggttctgtgggtggcactgccaatgtggggcagaatcacacagttcttcagggtcaggagagggtggtttgtaggcagtggttctgggctcgtcacatccagtccagcagctgcaatcttaccactggccaaggcctggtacaggtcgtcctggtttacgacgtcgcccctgctgatgttgatgaacacagctgtttccttcatcttctggaagaagtccttgttgcagagtccctcggttgcaggtgttaaggagcaggccacgacgatgaaatcagattgggcagccagctcaggggtagacacaaactctgcctggaattccgctgcttcctcaggcctgggctggcgccctgtgtacagaaatctctggacaccgaatggtttcagacgccgagcaatggcctggcctatgcgccccagcccgatgatgccgacagtgctctgcgtgagtccatagccacacagccagaggggcttccacgaggtccagccaccattcttcacttcctcgatggcctccggcaaccggcggcaggtggtaagtagcagggagactgcgagttcggcggtggtatctgtcaggacatctggggtgtagccaactcggatcccacgcttcttgatttcatccaaagccaagtggtcgatgcccacagacatggtgctgatgactttgagattggcccctgcagcatccaggatcctcttgtccacgtggtcggagaggaggcagagcaggccgtgggcccccgccacacctcgctctagctccttggcagggatgggctcatccgagtcccactgctccacctcacagtctgccgcccgggcgagcgcgaccctaccctcggcgggtatcctgcgggtgacgaacaccttcatgagtcgcaccggtctcatccgcagtgcagccgccgacccggacctggcagtacagaagccctcgtgcc

SEQ ID NO: 123167 - DNA, 1280 bp, Homo Sapiens
tcagctgtctttcagttctccgttctgatagttctgttccctgcctcgctcttctggcctttatgttgcttcacaccgacgtagtgtaatacaccatgattgagatgtaagtcatgtgtcatgtgtcgttaggagggaccgtctccccaaggttgttgtcgacaggatataagacctggggtcggaccaccgtggataaatgactcctttctacatacacctccctgatcgcatgacccaacacccggggttacaacaaccggggctgttcctcccgccactctacgttgaaacctggtttcatagcatctggtcccttacagccaccccgcatgtgttacctccaccaagaccatggttttccgttcgtggtggcaccgcccattgggcagatcacacattcttcaggttcagaaaggttgtttttaaccatgttcctggctcgtcaacaaccagtccagcactcgcatcttaccactggcccaagccctggtaccagttcgtccctgtgttacgacgtcgccctgctgatgttgatgaacacagctgtttccgtcatcttctggaaagaagtccttgttgcagagtccctcggttgcagctgttaaggagcaggccacgacgatgaaatcagattggcagccagctcaggggtagacacgaactctgcctggaattccgctgcttcctcaggcctgggctggcgccctgtgtacagaaatctctggacaccgaatggtttcagacgccgagcaatggcctggcctatgcgccccagcccgatgatgccgacagtgctctgcgtgagtccatagccacacagccagaggggcttccacgaggtccagccaccattcttcacttcctcgatggcctccggcaaccggcggcaggtggtaagtagcagggagactgcgagttcggcggtggtatctgtcaggacatctggggtgtagccaactcggatcccacgcttcttgatttcatccaaagccaagtggtcgatgcccacagacatggtgctgatgactttgagattggcccctgcagcatccaggatcctcttgtccacgtggtcggagaggaggcagagcaggccgtgggcccccgccacacctcgctctagctccttggcagggatgggctcatccgagtcccactgctccacctcacagcctcggcgggtatcctgcgggtgacgaacaccttcatgagtcgcaccggtctcatccgcgtgccctcgtgccgattaaccccgggcctctcctgccatttttttt

SEQ ID NO: 123168 - DNA, 1393 bp, Homo Sapiens
  misc_feature (1376)..(1376): n is a, c, g, or t
ggcccaggcagcaagttggttagctgccaaccaaggaacatggtgtgccgggttctgtgggtggcactgccaatgtggggcagaatcaacccagttcttcagggtcaggagagggtggttgtaaggcagtggttctgggctcgtcacatccagtccagcagctgcaatttttaccactggccaagggcctggtacaggtcgtccctggttttacgacgtcgcccctgctgatgttgatgaacacagctgtttccttcatcttctggaagaagtccttgttgcagagtccctcggttgcaggtgttaaggagcaggccacgacgatgaaatcagattgggcagccagctcaggggtagacacaaactctgcctggaattctgctgcttcctcaggcctgggctggcgccctgtgtacagaaatctctggacaccgaatggtttcagacgccgagcaatggcctggccttccagaacgcaagccggagtaggtgtcgggggaatgggctctctcacggtaaccactcctaacggccccaacacatttgtagtcttcatctgttctttatggagccggaatcatgaagccccctgacccttaggcaacttgcttttatcacctggtgagttcttaaggaatcctgctttgggtttatttatgtatttgcctgtgttttacaaagctgtattccctcattagagatatctctactgcaagcaaagtgccctgacagcatgtgggtcttctcagccttcagacacgtggtgccagggatgcaaaccacgctgtgagagccggggcgggcaagcgggccggtgggagcctcacctatgcgccccagcccgatgatgccgacagtgctctgcgtgagtccatagccacacagccagaggggcttccacgaggtccagccaccattcttcacttcctcgatggcctccggcaaccggcggcaggtggtaagtagcagggagactgcgagttcggcggtggtatctgtcaggacatctggggtgtagccaactcggatcccacgcttcttgatttcatccaaagccaagtggtcgatgcccacagacatggtgctgatgactttgagattggcccctgcagcatccaggatcctcttgtccacgtggtcggagaggaggcagagcaggccgtgggcccccgccacacctcgctctagctccttggcagggatgggctcatccgagtcccactgctccacctcacagtctgccgcccgggcgagcgcgaccctacccctcggcgggtatcctgcgggtgacgaacaccttcatgagtcgcaccggtctcatccgcagtgcagccgccgacccggacctggcagtaccctcgtggagaatcgccacncaggctcgctcttagac

SEQ ID NO: 123169 - DNA, 689 bp, Homo Sapiens
tttgagtaaaagtgatcgtcatttgagagttatttggctgctttgggcttcaaggctggagaagcaggtaatggcacagtatctcactcactgttcttcctgccctggggttggcagcaccatcagaatgcccagaccactgagttggaattgtcttcccagatttccaactcaggtaaaagaacaaaagccaacaggaaccaatggctaaggaggagcaacatgtaaaacagtggtgtaaaagaagaaatgcaacgtaagagggcaggagagaagtcaagataatggagccgagtggtggccagaaatgtgagtagctctgtgctgactagcgtcagtgtaaaacaaatttaaggaaagcagcattatgaggtctcaagataatgggagccacctgaaaacggagataaaagacttgtctaaagcttgagggctccacatgaagatatgagatggaaagactataattcaggcaggaactcctgcacggcccaccaaaagccaggacaatgcacttacaaacatggtgtcattttaccagtgccagacaccctgcatgccagcttcctgttctctgcctggcagaaggctggcctagaggcagtcaccgttacacagcccctctcccctcagtatcttcctcaggttagtttatggtttcacatagggaagtccaacttgatgaccag

SEQ ID NO: 123170 - DNA, 685 bp, Homo Sapiens
tttttttggtttggcatagtttattacaattagtgtgcgcataaaaccatgtaaactctacaaagtaaaccatttcccctccacactaaccagcagctagtctgccatgaccttccagcacccccattattttaacatatatacatttcacaggatgtaataaccacacaaatagggttataatacattcttcagggaaaaaaatttttggtccatattttctattaaaaaaacacacacacttccctctttggcaaaagaggttaaatctcccatagttaactcacaaaagaaactcaaataaaaactactgagcatgaggtacagctgatgtctggactgttctggaattacagacgcctccttgaggggaaaatcatttcttataaaatgagatcagtttccaacagtttcatgtcagtagaaaagctcgatttagacttggtcagaatcacttttgcatgaacatgttccaaataactttgtttttcagaggacagcggaagtcacgaaaatgtgctacttctgaagaaagtcatgaaaattgtggcgtctgacctcagcaatatttttaatctgaggtacgaaaacatctgacacagccattcacactgtaattcctgtgccaccttcatggtcaccggagctgggccgacctcttcgcatcccctctgaagtggagact

SEQ ID NO: 123171 - DNA, 1290 bp, Homo Sapiens
  misc_feature (1094)..(1112): n is a, c, g, or t
  misc_feature (1164)..(1198): n is a, c, g, or t
  misc_feature (1202)..(1245): n is a, c, g, or t
tttttaatgatgtagttgtttattttgaatataatcatgaagtggggaaaaattttaatacaagagtagaaagaggattccagagaaaaacattccagtgtatcatggttctttgtgagtgagtagagaggggtagtgaggatgctgtccacaatgtattcatctagttaatgaattgtatggcccacaagctcaaacgagagatacattacagatggttgtattataaacctaatcttaagaaaccttaccaagcaaatgcttaaagactgatttttttgtgatctgataaaaagcctgcaaatcgtgaatcacttttaaactgtacagaatggactacacaccagtatggtaaagttcttgtaaaacaccaaacacaatggctcatagatatatacctctctcactcttaaatggcatttcctaattatagaaaatgtttacaacaaaagaacaagagggatcaaactaacaatcaataaggagaactgatgtgaagtcccatacactgttactccatttttcagcaactctttataactccttcattgacttgactcctttacaacatacagctgaattgtagaactagttcttcaagtgtggttcctatagtagaacagcagcatcactggggaacttaataaaatgcatcttcttatatcccataacaaacttattgaataaacagggtggagcctagcgatgttttaacaagcccttaaggtaactgatgcatgctcaactcagagagcccctggagcagagctggctttcattcagcccctgcatcatttttaccccgtctcttctattgaaaaaaaaggtctggagccagtaagctctgacagtgttttttcttcccaataaaactcttaatactatagttgcataaaactacctaatgcgcccagagtagcaggttctgctaggatttttctccccagtaaaaaagcactcaacactgtagttgccattaaaactacttgatgtccttggtgtattgataacctgttttgcttttgcccaagccatttcagatgccctactggaaaatttatccagagtaggtttgatgtaataccagccaacannnnnnnnnnnnnnnnnnnccccggccgtaatggccgaattcccgggcatatgtccggtaccgtcgactgnnnnnnnnnnnnnnnnnnnnnnnnnnnnnnnnnnncggnnnnnnnnnnnnnnnnnnnnnnnnnnnnnnnnnnnnnnnnnnnncaaaccgagctagcgcccttagtggtattcagttttcctccccct

SEQ ID NO: 123172 - DNA, 557 bp, Homo Sapiens
ttttttcaatgtgtgttaagtcacttgtttatttctcaagatgtgcacactcaagtatgaagctggccgggacaactcatggctcctaggtatgtgttgtgtcttgccaagcaagtggcaaaagctgattcagggacatgaggtccccagaccggaaggagcccgttgcacttggtgttggcattctgcagggcggcactctcccactcttcccggcctcgagccaacctgacggcagccagatggcagtcgtagtgcacaatgttgaagtgggacacggtgctgtagccctgctgtttccggggcttattctccaactcctccaaggctacccgcttcgtgaaggtataaatgcccaggacctttgtgggctggaacttgtatccctccctgcagatgcagcacgtgaggccaggctcctcgatcagctcttccatctgcttcaggagtgctgtcttggtcacgacctggcccttttcatttgtcggtatgcccagggtgcccagggccttctgcctcattggcatggccatgcgtttcttctctgccagggtctc

SEQ ID NO: 123173 - DNA, 877 bp, Homo Sapiens
  misc_feature (35)..(35): n is a, c, g, or t
ttgaatcaggtagctgtacagtgaccagtctgttngtagtaagcagtagggtccagcgagtcagtgtcattcagtgacagtgtgcgtgactttccttcacgcgtactgacatttcatagcatgtagaaggtgggtcttgctgaaatcttgatcttgcgagtctgtaagcatgcattccaggcccccacactgggccatcacaccagccatttattcacttcttcttcatcttcttcttcatcggtagtagagtccagggactcaatgaattcttctgtggcatcgcccagcagcccccgcatacgataaacaatcttcatgggctctccttcattcgtggtacaccagactttcttgtaaacttcagccacaggaaggtccaaactaatgattttattgttcactagaagctccatgccactgtcatcttccaggagggccactaagtcacagtcctggcaaatcttgttctttatatccctcatcagcggcccgatgcctggctcattgctgctatacgggttcccaggcatcctgccctgtaagaagtcttcttgttggggatccttctccagggtcacaaagaactcagtgacttcattctcctcaggataaatgatgctgcagagcctctcgaagatgaacaccggggtccggtagtcatccagattgtagcgcttggctgtctcaatgcacacagccatgaaggccttggtttctgattctgtacctgtggtcatgtcctccagcatctccagcagcatgtcctgcgtctcatcgatcagcttggtcctctgcaccaccagcttccgcaagcacaggtatccattcagccctcgtgccgaattcggcgcgccgtcgacttcatactctctcc

SEQ ID NO: 123174 - DNA, 3108 bp, Homo Sapiens
ttttttccttttcaatgtgtgttaagtcacttgtttatttctcaagatgtgcacactcaagtatgaagctggccgggacaactcatggctcctaggtatgtacaggccctttgatggcttgggttacagacaacctcatagctggtgcaccacacacacgagataaaacaggaagcctaaaaaccccaagccacaccaagaaaaatgagagaggggagggcggggtaacaatgcagcatcccgcggagggaacttaatgcacaaggagggagaacagagggtggaaggcaagccagcttcgtcttcgccgccgcagctgctgtgtggtggtcaggggactgagttcaacaggtccttcaggaagctctctggatcggtgatttctgataaaagaccggccacatcgaggaactctgagaaggtctccactggcatgaactcctcctggaaggttttcagggctttgtcggcagcttcgtagatgggcatgtcgttgtggcggatgtactcagcgagagagcaggaccagcctccctctgtgttactggtaggcaccttcttaaacatgttgtaaatgagatcgacgagggcccaaaagagaagggaagaacggtaagcggaatagtccttcactgccttatctgtcagcctggtggctccacctggagccactgcccgagcctgcgaggtcaccaacagcctccgcaagatttccacacgtgtggctctccactgctcagggggcaggatgtgaagggccaagactgtgaaatagtagggcccgtccacttcaaaggcactctccacccacttctccttgggctgttccagaaagccttggaggttcttctcttctcgggaagttgctcgggttgtgttcaggacgtaaagcacagtgtgaatgatgtacgggatcaggtggatgttgctctccccggccgcccccgccagtgtctgcgctgaacgactgctccatggcgaagcgcaggaagagcagtttgatgtcgtggatgttgagctgatacgtgggctcccgctggcctgtacattcctggaggtaagtgttgtgtcttgccaagcaagtggcaaaagctgattcagggacatgaggtccccagaccggaaggagcccgttgcacttggtgttggcattctgcagggcggcactctcccactcttcccggcctcgagccaacctgacggcagccagatggcagtcgtagtgcacaatgttgaagtgggacacggtgctgtagccctgctgtttccggggcttattctccaactcctccaaggctacccgcttcgtgaaggtataaatgcccaggacctttgtgggctggaacttgtatccctccctgcagatgcagcacgtgaggccaggctcctcgatcagctcttccatctgcttcaggagtgctgtcttggtcacgacctggcccttttcatttgtcgtcatgcccagggtgcccagggccttctgcctcattgccatggccatgcgtttcttctctgcccgggtctccctgcgggctgcgtcaatcttcttgtttacgtcagggtgttcccgcagggcttccagcaggttctctgccaaggtcccaatgccctcatcactggacacctgctccagcttatgcaggttcgggatggaatcagttccaatcagaacctgggtgccagggtgctggatgccaggccccgaagcagccttaggataaatggcaaggctgggcgagacaaaaactttttccagatgtcggcatccaaattcttggcgctaggggatgtgctttttcatgtagtcaagtgcattctgggtgatccccttctgggagaatcagatccttcagctggtgcccattgctgttgttcttgatgccagcagctattttacagaagcagtccaggaagactttatcatcaccactgtgatcttcatcatatttatcaaagttgcagtatggtttgaatcgctccaccaagatctgcattttctccacctctccaaaggaaaggtacgggatgatgcgaagcaggccctggagcacactggggttggagcgaacaaaggtgctgttgatctggtccaagagcatcaccagttgatccttgtcacctgtcaggaggaggttgcccttgtcctcactcaggggctcagcattggactcatctagaatgatctccatgatgctaagcacctgctcagccacagctgcacccccactgtccttgctttcttgttcagctacaagggccaggtttagggtccccagcatgacgttcaaggtgttcatttccagtttgaccagttgctgccggttgactttcaccttcacgcagtaactgaacaatttcagtagcactgttagaaggtggcgtccctgcttgaaatctctgatccctgcgagtctgttaagcatgcattccaggcccccacactgggccatcacaccagccattttatacacttcttcttcatcttcttcttcatctgtagtagagtccagggactcaatgaactcctctgtggcatcgcccagcagcccccgcatacgataaacaatcctcatgggctctccctcattcgtggtacaccagactttcttgtaaacttcagccacaggaaggtccaaactaatgattttattgttcactagaagctccatgccactgtcatcttccaggagggccactaagtcacagtcctggcaaatcttgttctttatatccctcatcagcggcccgatgcctggctcattgctgctatacgggttcccaggcatcctgccctgtaagaagtcttcttgttggggatccttctccagggtcacaaagaactcagtgacttcattctcctcaggataaatgatgctgcagagcctctcgaagatgaacaccggggtccggtagtcatccagattgtagcgcttggctgtctcaatgcacacagccatgaaggccttggtttgtgattctgtacctgtggtcatgtcctccagcatctccagcagcatgtcctgcgtctcatcgatcagcttggtcctctgcaccaccagcttccgcaagcacaggtatccacctcgtgccggattcgccactcaggcc

SEQ ID NO: 123175 - DNA, 1469 bp, Homo Sapiens
  misc_feature (83)..(99): n is a, c, g, or t
  misc_feature (151)..(153): n is a, c, g, or t
  misc_feature (155)..(155): n is a, c, g, or t
  misc_feature (157)..(159): n is a, c, g, or t
  misc_feature (161)..(161): n is a, c, g, or t
  misc_feature (164)..(165): n is a, c, g, or t
  misc_feature (182)..(266): n is a, c, g, or t
ccccacgcccctagtctttggtcccggggtttcccttggaaacaaccggaaagccacccggttcccctttcctcctcgggggnnnnnnnnnnnnnnnnnaaatgtctttaagaaaatttttttggggccggaggggcgcccccacgggggnnngngnnntnaanngtttggtgttttggagnnnnnnnnnnnnnnnnnnnnnnnnnnnnnnnnnnnnnnnnnnnnnnnnnnnnnnnnnnnnnnnnnnnnnnnnnnnnnnnnnnnnncactccttatccaattttatcaaaaatagagattagggcaatatgacataacagcattaagcactaaaccatttgacagggattcctttcaaaagtgaaaaccagtgtacgattatacagcttctccactaatctttgttaccaacagccacttaatctaatcctaaagactgagtacaatattccttctacaatactttgaacactcacttcaatttattgcatattttctaaatgcacctctctctctcttctgaaagagagaacatttcatcagaaaacgaacggggtcttttgcctatctgatggtctcacaccttcacaacagctacaaatccttggaccagccagggacagaccaactccagggttctctgacaacagaagtcctggaaaggctctgcactcaaaacaaacccctacaccaccccaagggagggggattgtttcaggttcggggagacgctaaaagaaattgaacctaaactcttcatcaggcatgtccagagtggctttggctctccatatagagcgaggcctgcagaccctttggctcttctttctggtggctccatctacaggttgcacctgggctgaataagcagcagctctgagagcccgcagggcctcacgccattcggcttccatctgagccctatagtctccaaacaaggagtgcatcagctgcctcttccggggcaagggcgttcttttgctgcgcagggttcggattgctccaatagcctgctctttctgtttcggggtgggtttctgcctcttgaggcccagctccagttgctccacacaccaagccaattcctgggccaactgttgtgcctgggcctcagcgcttaggggaacttcttctggggcgagtttctctgaggccttctcgcctccatttgccacagaggccctgttccgcgttttcttcttattcttttgttttttcgacgctgtgccgccttcatcgcccaacgggtgcgctctggagtcagcgttactgcacgtaggttgctctgggcagagacagacagtggaaggattccgggcgctggaaactgggccgggaagccgggctccgcgggacgcgcagggagtacccgggcctggggccgccgctgcctccccagcaagatgtcccagggccgccatgcgccgcagcctcgtgccgaattcaccacccaggcctcgctacctagc

SEQ ID NO: 123176 - DNA, 1671 bp, Homo Sapiens
  misc_feature (515)..(526): n is a, c, g, or t
tgctgtatttttgttttatttcagaaagttcaagtctttccatcataattgaaggaattgcatgatcaattaaatattatcagcattattttccattaatgtttttaaatgcattcacacacctgagtgtttggaattatataaacatatccattagagtctagtctcatcaacatttatgttatgctttttcaacagaattggagatgaatcactagataaataggttacaagattatttggattttatgatgagttggtttgccgaactttagaattcataggaagaattaaatctttgaatttgatttttaacaaaagaaaattgtgcattgtgctaatctacttttgcatattacatagaaaatggctattaaggctttattgtaagggattacagtaaaagatattctattgtgcaccatgcaagatgcagaaaataatggtttacaaataatgttaagcaaccaaggcaataatggttttcctttcattctggttttcccaaattaaannnnnnnnnnnncagattaaaatcaggtttggagttaacagaaaattgcattcctaacttaaaaacttcaacttctctagattcctttagaaaaggaataaatatagtttaaaaaaatgttgctttgggtagaagtcttgattcattgcttcattcttacagctttttctttgcttccttactataaaataatccaatgttattgtgaggacaatctctgattcagttccaatgctcttgtatctccatgagttttggcattgtttaccagcacgtcaataagctcatagtcatctttggcatataagtgtctcagtaggtaccaacgtgcagttgatgcaatagatttgggatacccaggctgatataccactctttccaaaagacgccgtgtctctcttgcccccattttgcgtttgaattgtaacaaagcttgtaaaagaacagccagtggacaaaagcaaagctttcaaggcctcagttgtagcctcttgaaccaaagatggccagtgatcattggaaatgttagccatacagacttttaatgcaagtagtgctagtctcaacagacttgagagcttcccactccaactgccccgttgggatgccaattgtagactctttctgtaacacatctctgcagctctcatcattccttgggattgatacacatgtgccagccactgccaagctggaacagaggttgagttggacatgactgttttttgtagttcttcaagtacagcatctgggagtggcttttgtgactccaggagtggtttacactgaacttggtctcacaagtaagataacggctggctgatcagggttactttttaaattctttgtgcagagagtttcagcttcagatattcttcctgtgtctattagaccagtgacagcttgtgagagagaccacttttcaagggactggttgtaattttcaaagaatttttcgtctttaattgaagcagaaacagcagataacagtgccaagtataaatctatcctctttggctgagtgttgttcactaaggccagtttatcatcagcgtgacaggctgccattagcccagcccagatagcaggatcacctggagaaaggagagctgccttctgaatggtctttagtgcagtatttttttcatcttctgctg

SEQ ID NO: 123177 - DNA, 857 bp, Homo Sapiens
  misc_feature (145)..(145): n is a, c, g, or t
atgctgattttccagagccctggaaaggcatctctttggcagccttgtgaggatcttcatcccttttcatgttgtgctccaaaaaacagggcaagagcttggtaagacaattcttccagtgtctgacacaccagtgaaactcagngggcttggccagcagtccacgtttccagaacacccctcctcctgccgtcccttgaagggggcacttggctggttcctggcctcgggaccgcttctcccactgtgacccctgagcatcctggattattatagccacgaggcggctgcgggctgggttgggaatctgatcccaccattctttcttaatcttggtgatgctgacatagcacaacaggcagacggccaggatgacaatgcaggaaacgctgacgcccagcagcaggtgctgctcgaagggctccctgtaggagttgtgccacttggtgctggggctccactcactccaggtggtgttatagcactgagcccaggccctcacccgtgccctgtaggaaatcccagacttcagggtgctggctgcgatgcggagggagggttctaggtaggtcacgttatagattctgaactggtagagaaaagggagatgttagggcaccagccgggggcgaggggcaccagtgcccaccctggttgctgtcgttagctgaccccaccatgtttaagagccaccagcctgggtatttggttgttcgtcctgttcaggccattgcttgccacctctgtaactgtgaccaggctagagcaacatgcgtcaggctcctcgactaattagctgtatgttacttaggcaagttgtttaacctttctgagttttcgtgagataatggggatcc

SEQ ID NO: 123178 - DNA, 2367 bp, Homo Sapiens
ttttgcattggtaactatgaattttattatgtggacatctactgtggcatgcatctgtacaaacctttcaggcagtggtccacagctgggttatgaataaaaaggcataaatttttctctcattttattacaatgaagtttaacagtacagaaaagtcacatgaccttggtgggtcagatttcttaaaccctgcaacatgaggaactctaaatacattaaatattgttacacattcagacttccaatgtacaagtacttggaaacagttacagccctcaccaagctaggttggggacatgaagtccaacagcatctgaaatgctgtgaaggcaaactttacaaatagcaatgtaagcttacagaacttgcctttactagggtggtatgttcatgtaattccagcgccttcacaatttaacgaaccaaatttactatacttcacttctaaaaacctagatgaaacatgaaaaagaagccatacagtataaattgcaacttcaggaaaagttcctgctttattattccaaataatttttcccatgtaaaataaatgtccaatagttcctggtatgtgggaagataatgtttgttaaagtcacaatgaagccttattgacggaagcttggctatataaacagcacaagttgagaaaaggtttaatctccaaacctattagactggatgaagtaagatcagtaacggccaccttgcgacattacaggaggtctcattcccatcggaggtcgaggaggcccaccctggtaagggggcaccattggcggtccctgcccatacgggggcatagcaccaggaaggtatcctggcatgccttgatgatgaccaccatactgaccatgaggtggcattgggggtctcattccttgttgctgtgggatgcctggctgtggtggcatcatacctccaattggtccaactggtggattaccgatgggggcctgtcctggccgaggaagattacgttgatacttaggtaactgtgcccttctctcttccagggatatatcctcatctggatggatcaacttactggttgcactagttgttgtaagtgtagcaggcttacttgttattgaagccgctggtttagctgcagtactatttgttgtactagttgttgaagctgtagactgtgtataagcagggaatgtaggctttgggggttctgtagttgttgcaggggtactatttaagggtttgaaatctgtaccaacaggtccttggacagctgcctgagcttgtgctgtgctaggaaacagagctttagaagatgcagacagactttcggaattggatgaagctgtacttgagcttgtaccaggtgtccccatctgtccagcactggggaaaagaggcttagtaactggaggctgtggggcaggtacagttgctgttggtgcaggtggtctattaagaatacctggcgctgaaacagcctgtgcttgagtcattggaggaattccaggacgtggaacaggtgggggcatacctggtggcattccaggcatcagaggtggtattcctggtccaggtggcatcattcccacccattggcatcattatgttttcaccgcaaaatgactgggtgtattttctctgatgatgcaatccaggtggcatgcctggcataactggtggcattcctggcatcagaggaggaacacctggcattaatggaggtatgcctggaggcattcctggtgctcctggtactggtggcagtcctggctgtgccattggaggaatataaccttgctgaggttgaacaggctgtggctgaaatgaagttgaggctgcagagtcgtcatcatcatattcatcagaatcatcttgttgcttctttttttgactttcttgtgttttctgttcaagaagtcgtcgtctttcatccatgtctttttctggaataccttccataccatatatttccaactctatgtctgttcttccaggtattgcatttggtacggcatctattgtttctttatgtacctgcatgcaatgaatagctaagccaggtcctgtatacaatttcttgtgacatatatggcatttaaaatgctttgctttttggtgctgaataaggatcttctcatcatcaaaatctctattacaataccagcaccacggcttcagctgcttcttcttcttgcgacccataactgtgttctaccggcaaagtaaaagggaggagaaaagaagcaggagaaacgaggccaaaaatccctcactttcccaacccaacggctaccaccacgtcccacaggaagcagacacaaaatggccgacggcctcgttccccgctccgcctcgtgccgaattcacccccggcctcgctacctagccta

SEQ ID NO: 123179 - DNA, 1857 bp, Homo Sapiens
gtttcatctaggtttttagaagtgaagtatagtaaatttggttcgttaaattgtgaaggcgctggaattacatgaaggtctccgactacatgagcatctctacttgcgagtggaagatgaatggtcccaccaattgcagcaccgagctccgcctgttgtaccagctggtttttctgctctccgaagcccacacgtgtgtccctgagaacaacggaggcgcggggtgcgtgtgccacctgctcatggatgacgtggtcagtgcggataactatacactggacctgtgggctgggcagcagctgctgtggaatggctccttcaagcccagcgagcatgtgaaacccagggccccaggaaacctgacagttcacaccaatgtctccgacactctgctgctgacctggagcaacccgtatccccctgacaattacctgtataatcatctcacctatgcagtcaacatttggagtgaaaacgacccggcagatttcagaatctataacgtgacctacctagaaccctccctccgcatcgcagccagcaccctgaagtctgggatttcctacagggcacgggtgagggcctgggctcagtgctataacaccacctggagtgagtggagccccagcaccaagtggcacaactccttacagggagcccttcgagcagcacctcctgctgggcgtcagcgtttcctgcattgtcatcctggccgtctgcctgttgtgctatgtcagcatcaccaagattaagaaagaatggtgggatcagattcccaacccagcccgcagccgcctcgtggctataataatccaggatgctcaggggtcacagtgggagaagcggtcccgaggccaggaaccagccaagtgcccacactggaagaattgtcttaccaagctcttgccctgttttctggagcacaacatgaaaagggatgaagatcctcacaaggctgccaaagagatgcctttccagggctctggaaaatcagcatggtgcccagtggagatcagcaagacagtcctctggccagagagcatcagcgtggtgcgatgtgtggagttgtttgaggccccggtggagtgtgaggaggaggaggaggtagaggaagaaaaagggagcttctgtgcatcgcctgagagcagcagggatgacttccaggagggaagggcgggcattgtggcccggctaacagagagcctgttcctggaccttctcggagaggagaatgggggcttttgccagcaggacatgggggagtcacgccttctcccaccttcgggaagtacgagtgctcacatgccctgggatgagttcccaagtgcagggcccaaggaggcacctccctggggcaaggagcagcctctccacctggagccaagtcctcctgccagcccgacccagagtccagacaacctgacttgcacagagacgcccctcgtcatcgcaggcaaccctgcttaccgcagcttcagcaactccctgagccagtcaccgtgtcccagagagctgggtccagacccactgctggccagacacctggaggaagtagaacccgagatgccctgtgtcccccagctctctgagccaaccactgtgccccaacctgagccagaaacctgggagcagatcctccgccgaaatgtcctccagcatggggcagctgcagcccccgtctcggcccccaccagtggctatcaggagtttgtacatgcggtggagcagggtggcacccaggccagtgcggtggtgggcttgggtccccaggagaggctggttacaaggccttctcaagcctgcttgccagcagtgctgtgtccccagagaaatgtgggtttggggctagcagtgggg

SEQ ID NO: 123180 - DNA, 908 bp, Homo Sapiens
atctgaggcgtttgttgcagctacctgcacttctagatgctccccaggttcatcctgtgtcgtctcccccacctaccaggtcatcttcttgtgagccctgggcttaggagtcaccatggcaactgaagagttcatcatccgcatccccccataccactatatccatgtgctggaccagaacagcaacgtgtcccgtgtggaggtcgggccaaagacctacatccggcaggacaatgagagggtactgtttgcccccatgcgcatggtgaccgtccccccacgtcactactgcacagtggccaaccctgtgtctcgggatgcccagggcttggtgctgtttgatgtcacagggcaagttcggcttcgccacgctgacctcgagatccggctggcccaggaccccttccccctgtacccaggggaggtgctggaaaaggacatcacacccctgcaggtggttctgcccaacactgccctccatctaaaggcgctgcttgattttgaggataaagatggagacaaggtggtggcaggagatgagtggcttttcgagggacctggcacgtacatcccccggaaggaagtggaggtcgtggagatcattcaggccaccatcatcaggcagaaccaggctctgcggctcagggcccgcaaggagtgctgggaccgggacggcaaggagagggtgacaggggaagaatggctggtcaccacagtaggggcgtacctcccagcggtgtttgaggaggttctggatttggtggacgccgtcatccttacggaaaagacagcctgcacctccgggctcggcggaacttccgggacttcaggggagtgtcccgccgcactggggaggagtggctggtaacagtgcaggacacagaggcccacgtgccagatgtccacga

SEQ ID NO: 123181 - DNA, 1882 bp, Homo Sapiens
cggtccaaggtagcgaggcctgggtggcgattccggcacgaggtgcacttctagatgctccccaggttcatcctgtgtcgtctcccccacctaccagtcatcttcttgtgagccctgggcttaggagtcaccatggcaactgaagagttcatcatccgcatcccccctggaggagggggaggatgaggagaaggtctcacaccaggctggggaccactggctcatccgcggacccctggagtatgtgccatctgccaaagtggaggtggtggaggagcgccaggccatccctctagacgagaacgagggcatctatgtgcaggatgtcaagaccggaaaggtgcgcgctgtgattggaagcacctacatgctgacccaggacgaagtcctgtgggagaaagagctgcctcccggggtggaggagctgctgaacaaggggcaggaccctctggcagacaggggtgagaaggacacagctaagagcctccagcccttggcgccccggaacaagacccgtgtggtcagctaccgcgtgccccacaacgctgcggtgcaggtgtacgactaccgagagaagcgagcccgcgtggtcttcgggcctgagctggtgtcgctgggtcctgaggagcagttcacagtgttgtccctctcagctgggcggcccaagcgtccccatgcccgccgtgcgctctgcctgctgctggggcctgacttcttcacagacgtcatcaccatcgaaacggcggatcatgccaggctgcaactgcagctggcctacaactggcactttgaggtgaatgaccggaaggacccccaagagacggccaagctccttttcagtgccagactttgtaggtgatgcctgcaaagccatcgcatcccgggtgcggggggccgtggcctctgtcactttcgatgacttccataagaactcagcccgcatcattcgcactgctgtctttggctttgagacctcggaagcgaagggccccgatggcatggccctgcccaggccccgggaccaggctgtcttcccccaaaacgggctggtggtcagcagtgtggacgtgcagtcagtggagcctgtggatcagaggacccgggacgccctgcaacgcagcgtccagctggccatcgagatcaccaccaactcccaggaagcggcggccaagcatgaggctcagagactggagcaggaagcccgcggccggcttgagcggcagaagatcctggaccagtcagaagccgagaaagctcgcaaggaacttttggagctggaggctctgagcatggccgtggagagcaccgggactgccaaggcggaggccgagtcccgtgcggaggcagcccggattgagggagaagggtccgtgctgcaggccaagctaaaagcacaggccttggccattgaaacggaggctgagctccagagggtccagaaggtccgagagctggaactggtctatgcccgggcccagctggagctggaggtgagcaaggctcagcagctggctgaggtggaggtgaagaagttcaagcagatgacagaggccataggccccagcaccatcagggaccttgctgtggctgggcctgagatgcaggtaaaactgctccagtccctgggcctgaaatcaaccctcatcaccgatggctccactcccatcaacctcttcaacacagcctttgggctgctggggatggggcccgagggtcagcccctgggcagaagggtggccagtgggcccagccctggggaggggatatccccccagtctgctcaggcccctcaagctcctggagacaaccacgtggtgcctgtactgcgctaactcctgattaatacaatggaagtttctgggcatttacaatttcaacactt

SEQ ID NO: 123182 - DNA, 1136 bp, Homo Sapiens
  misc_feature (192)..(216): n is a, c, g, or t
aaatggggggaaagggtagaaaatgtgggggaacaggtgatacattgtcggtaagagggaagggaaaaaaggaaggaggtgtggatgatacaaaggtggaacacacaaagacttatgggggggccaaaattggatattataggcccaaacaggtaccgaaacagggatgggagggaaacaacgacagggatnnnnnnnnnnnnnnnnnnnnnnnnnaaaaagggaaggagcgcccggagggagcctcctgggtgaaacattctagccacatgggccatcagtgtacgtgccgctgttaaccaggcactccctcccacagatgcggcggggacactcccctgaaatccccggaagttccggccgagccccgaggtgcagggctgtcttttccgtaaggatgacggcgtccaccaattccagaacctcttcaaacaccgctgggaggtacgcccgtactgtggtgaccagccattcttcccctgtcacccttctccttgccgtcccggtcccagcactccttgcgggaccctgagccgcagagcctggttctgcctgatgatggtggcctgaatgatctccacgacctccacttccttccgggggatgtacgtgccaggtccctcgaaaagccactcatctcctgccaccaccttgtctccatctttatcctcaaaatcaagcagcgcctttagatggagggcagtgttgggcagaaccacctgcaggggtgtgatgtccttttccagcacctcccctgggtacagggggaaggggtcctgggccagccggatctcgaggtcagcgtggcgaagccgaacttgccctgtgacatcaaacagcaccaagccctgggcatcccgagacacagggttggccactgtgcagtagtgacgtggggggacggtcaccatgcgcatgggggcaaacagtaccctctcattgtcctgccggatgtaggtctttggcccgacctccacacgggacacgttgctgttctggtccagcacatggatatagtggtatggggggatgcggatgatgaactcttcagttgccatggtgactcctaagcccagggctcacaagaagatgaatctagaagtgcaggtagctgcaacaacgcctcagatggggac

SEQ ID NO: 123183 - DNA, 703 bp, Homo Sapiens
  misc_feature (677)..(677): n is a, c, g, or t
acatctcactactaattttatataaatatataaaagtgaatagccccatcctctcttgacctcaggggcagagtctttgaagtaccttcttccctgctattaagcactgggtggatctgactgcccagagagggcactgcctttccccaaggtcacacagcaatgaagggagacagatgcaggagaggggacctagatgggcaggcagccctgcaccgtctccttggagtcctgaggggcccgggcctcggctgcatgggagaactgaaagaaaggagagggggttgtggggcctgctggacacacagagaaaagttggttccgcaagcaggggggtgggtcccgagccccagcaccctgagctgcaggcacagccaagcagaggcaacatgctgcacagagcccaccacatgggtgcccccagcctctccccacaagtcctcctgagccatcagaggctggtgtctcggtggcagctgcggtgtacaagccagcaacccgcagtcctgggcagtgttggtggctgcagcaggccccagcgttcagatgagccgctcttccggcggcaacttgaggttgggggtcggtggcacgcgggcacccacctgctcctcgctactgggccggtaggtgccctccgtctgccgcttctcccgaagcttccgcaccaacagtgncagccccacagccaggagcaaggcag

SEQ ID NO: 123184 - DNA, 727 bp, Homo Sapiens
acatctcactactaattttatataaatatataaaagtgaatagccccatcctctcttgacctcaggggcagagtctttgaagtaccttcttccctgctattaagcactgggtggatctgactgcccagagagggcactgcctttccccaaggtcacacagcaatgaagggagacagatgcaggagaggggacctagatgggcaggcagccctgcaccgtctccttggagtcctgaggggcccgggcctcggctgcatgggagaactgctcctcgctactgggccggtaggtgccctccgtctgccgcttctcccgaagcttccgcaccaacagtgccagccccacagccaggagcaaggcagccaagagggagaagaccacgatgatagcagtgatggcttccggacgcaggttgccatcggagctggagctggtggatgaaggcaaaacagtgctattctcatttgcagaagtggtctgtatttgcccccaggctcggccccagcgggccagcaggaacggcaggcccagcgccagaagcagccccagcccggggttcgccatgggctgggtggcgggttggcagcgccgaggaaggggcttctcgcgctcgcccctcctaccgcatctccggccaggggcacctgcgacggggcacctggcccgggcgtctttgacctagctcaggttcctggtccgtgtccctccctcgaaccctcggtccgtc

SEQ ID NO: 123185 - DNA, 754 bp, Homo Sapiens
  misc_feature (41)..(41): n is a, c, g, or t
gatcaataggaattttattacttagcacaagtaaattcttntaggggccaggatcagaaagcgttcttctgtaacttcttcatgttgaccagggacactgtatccagagatgttagaggagtgaaaatctctaggcactaaaactaaatatgttttagggtctcccaggataggttgcaaaggcacctacagttgaaatttttctaatctttcttctactagactgtgactctccagcttcccagtaaagacaagagagttatcaaggaatggggaaagagaaggacaggatgaatactggccattttcttctctttattttagaagaaagtggatgatcagctcactaccacatcaaaggtgccaactctctaaaacgtagactctgtgcagctttgaagcctggaagacaatacctgtattttattgaaatactgtccagcttcaaatggaacaatattgtatgtagaaattccaattactggtttgtcagtaggattcttagctctgtaaaacgccagtgcagtctctcctggcaccacatatatttctgtttgctgaggtctaaagttccactggagacttgcatgcacatctgcattaaagctaattttaatgattcgatctttaacaggcaccatgttttcaatcttgtctgaggcatgacctgcaactgctgatcctccaagtccagtagtctggcaatagagcccgataaggggtacggcagcgtaggacgccccagcatgccacg

SEQ ID NO: 123186 - DNA, 751 bp, Homo Sapiens
tttgttttaatagtgatttatttgtcatcaaatgtacaacttattctaaatattttcattttctgtgttctaaatagaaatattaagttgcagtaaaaagagaaaaaaaggctatttagcattacaaagaatcatatttaaaggctgcccaatgtagagtctagtgacctgttcaggacacctgaaatataattaaatgacaattatcaaggttttaacaatttataattctaaaccagaggattataaagaagtgcaaattgacttttacattcaactttagttaaatgaaggcactcagtattcttcctgaataatacattcagtttctcacattttatgctttcatctattcagaattatttcatagtaaaataatctactcttatcacagctgtgtgacgatttctaaatgtaggaaggcctgtgaaacatgacactgcagttaaattggttggcctaaggactaagtaatttttcttctgctgaagttttaagtgagtatttgttccaaacaagttctgttgaaatctcacgctgttgtcaggaatcagtgttatcctggaactgttattctatttaatcttcattatagcagaaatgtgccaccatggctttgacatgttggtaggtattgtcttccaggcttcaaagctgcacagagtctacgttttagagagttggcacctttgatgtggtagtgagctgatcatccactttcttctaaaataaagagaagaaaatggccagt

SEQ ID NO: 123187 - DNA, 1045 bp, Homo Sapiens
  misc_feature (565)..(936): n is a, c, g, or t
  misc_feature (948)..(948): n is a, c, g, or t
  misc_feature (976)..(977): n is a, c, g, or t
  misc_feature (1008)..(1008): n is a, c, g, or t
  misc_feature (1010)..(1010): n is a, c, g, or t
aaattgttttaatagtgatttatttgtcatcaaatgtacaacttattctaaatattttcattttctgtgttctaaatagaaatattaagttgcagtaaaaagagaaaaaaaggctatttagcattacaaagaatcatatttaaaggctgcccaatgtagagtctagtgacctgttcaggacacctgaaatataattaaatgacaattatcaaggttttaacaatttataattctaaaccagaggattataaagaagtgcaaattgacttttacattcaactttagttaaatgaaggcactcagtattcttcctgaataatacattcagtttctcacatttctgctataatgaagattaaatagaataacagttccaggataacactgattcctgacaacagcgtgagatttcaacagaacttgtttggaacaaatactcacttaaaacttcagcagaagaaaaattacttagtccttaggccaaccaatttaactgcagtgtcatgtttcacaggccttcctacatttagaaatcgtcacacagcctcgtgccgaattcttgggnnnnnnnnnnnnnnnnnnnnnnnnnnnnnnnnnnnnnnnnnnnnnnnnnnnnnnnnnnnnnnnnnnnnnnnnnnnnnnnnnnnnnnnnnnnnnnnnnnnnnnnnnnnnnnnnnnnnnnnnnnnnnnnnnnnnnnnnnnnnnnnnnnnnnnnnnnnnnnnnnnnnnnnnnnnnnnnnnnnnnnnnnnnnnnnnnnnnnnnnnnnnnnnnnnnnnnnnnnnnnnnnnnnnnnnnnnnnnnnnnnnnnnnnnnnnnnnnnnnnnnnnnnnnnnnnnnnnnnnnnnnnnnnnnnnnnnnnnnnnnnnnnnnnnnnnnnnnnnnnnnnnnnnnnnnnnnnnnnnnnnnnnnnnnnnnnnnnnnnnnnnnnnnnnnnnatacgcaggaangacatgtgagcaaaaggcaacaaaggcnnagacgtaaaaggcgcgtgctggcgttttcanangtcccgcccttgacgacacaaaaatcgagctagtc

SEQ ID NO: 123188 - DNA, 1666 bp, Homo Sapiens
aacaaaggtttgtttccagaagaacttttgatgtcagtaaatcttcacaatcccacctgtacattttaacattcatggacttgtaatggtgatgctttggctaacagcctagtagatgtattttatttcaattttatgatactacaatttcaaagtaattattcagaactctgaatataaaatagccctaaaccttaaaggacaaatcaaatttgaaataagaatttaaatctttggacaagctgttagggcttagtgactcctcttctactttgagcttttaaaatactgactattcataatgaaggaaaatagcaaccaactcttttagacacaataaacatggttagaagttctggcctatgacttgaaacaaataaccctgagcatacatttttgaaaaacattgtcagattcattgctgtaagtatgaagagttaataatctggaagggaattatggaattaagctgaacccatgcctgcatatttaaaaaacaaagcggcttattttaatagtatcaaactcttcagtatggtattgaatagtcagtcatatattctagctaggcatatgagtttcttatgataaaagctgaacttgttctctcaagtttaagtgaaaaaaattagttgagaaaaaataattatttaaaatataagccttcatattattgtacaatatttctcctttgagaagataggatatatgattttcccaaaaatcacaactttgaaggaagacttagttgctgacttcaattatatcctggaactggcaacttgtgcccttcctttgcttcaaaaaaagtgtaagaaagagtgataagatcaactttaatcattcttggatcttcagcaaattcaggatcaatgtagaaaaacactggcatatctacttcctcttggggattaagcctttgttcttcaaaacagaagcactgtattttattgaaatactgtccagcttcaaatggaacaatattgtatgtagaaattccaattactggtttgtcagtaggattcttagctctgtaaaacgccagtgcagtctctcctggcaccacatatatttctgtttgctgaggtctaaagttccactggagacttgcatgcacatctgcattaaagctaattttaatgattcgatctttaacaggcaccatgttttcaatcttgtctgaggcatgacctgcaactgctgatcctccaagtccagtagtctggcaatagagccgataaaggggtacggcagcgtaggacgcccccagcatgcccacggcgacagcggccacgtaagtgagggtcgtcttgttctgccgccgccgctcctcctcctgcgcgcgtgtgaaagggttcgagctcttaggccgccgcggcggctgcaatgctggatgccgggctcgaaggctgcagcgcttccatgtcccaagccacctcagtcctctctcggcacctcctgtcccactccactctggcctaagaaacggctctaccctctctgcagccctggttggagacccagggtggatccagcgccagccacagaaaggaacgcacctccatccaggacgccagagccctcccataaccctctgaactaacacccacccgcctctcggacgcgtgggtcgacgatatcccgggaattccggaccggtaccagc

SEQ ID NO: 123189 - DNA, 537 bp, Homo Sapiens
tttttaagattttaataacatttctattctcgtattacataacagaaactatacagttcttttatcttagcattccagtacacttcgtgattttaataagcatactattaaatacacagttctgtgataaattaagagcatcttttcatctcaatgagttctgctttaaggatgaagaacaaattctaatcttaaaagcagatatccatttggtttggttctcaatctctgcatagcaggtatagatagtgaagaaaaatagcttgatgtttagaagaaattcgttttcagaaatcacaagatctactaaaacactaagtttcatactaaaccgtttcatgtatctttatcatattctgtaaagtttacactttgatgtacctgtattttattgaaatactgtccagcttcaaatggaacaatattgtatgtagaaattccaattacttgtttgtcagtaggattcttagctctgtaaaacgccagtgcagtctctcctggcaccacatatatttctgtttgctgaggtctaaagtt

SEQ ID NO: 123190 - DNA, 983 bp, Homo Sapiens
  misc_feature (680)..(680): n is a, c, g, or t
  misc_feature (683)..(683): n is a, c, g, or t
acctccgagccacctctgctgcgcaccgcagcctcggacctacagcccaggatactttgggacttgccggcgctcagaaacgcgcccagacggcccctccaccttttgtttgcctagggtcgccgagagcgcccggagggaaccgcctggccttcggggaccaccaattttgtctggaaccaccctcccggcgtatcctactccctgtgccgcgaggccatcgcttcactggaggggtcgatttgtgtgtagtttggtgacaagatttgcattcacctggcccaaaccctttttgtctctttgggtgaccggaaaactccacctcaagttttcttttgtggggctgccccccaagtgtcgtttgttttactgtagggtctcccgcccggcgcccccagtgttttctgagggcggaaatggccaattcgggcctgcagttgctgggcttctccatggccctgctgggctgggtgggtctggtggcctgcaccgccatcccgcagtggcagatgagctcctatgcgggtgacaacatcatcacggcccaggccatgtacaagggggctgtggatggactgcgtcacgcagagcacggggatgatgagctgcaaaatgtacgactcggtgctcgccctgtccgcggccttgcaggccactcgagcccctaatggtggtctccnctnggtgctgggcttcctggccatgtttgtggccacgatgggcatgaagtgcacgcggctgtgggggagacgaccaagtgaagaaggcccgtatagcccatggggtggaggcataattttcatcggtggcaggtctttgccgcctttggtagcttggctccttggtatggggcatcaggattgtcacaagactttttataaccccttttgattccctaccaacttttaattaatgagtttgggccctgccattctttattgggctggggccagggttctggccctatgtcattcccggggggg

SEQ ID NO: 123191 - DNA, 1535 bp, Homo Sapiens
ttttacctaataaaaatctttatttttttattaaaaaagaagtactttggtagctatttaaataagaggggggtgggaatgaatgtcgagatacgagcacctgcatcttttagtcaattgtcagtggagtcagtggggtgctaagtgttctgaactgaagtaggtgcactaaggttccaagctccctgcaaggatctggacgggaggaaagcagaggccctgaagggaaaaaagcctgcttcccaatacttattttttattactgtacaaaaagcacactctccctctttttgtctctcccaccaacggcacccccgcacccccaacccaagaggactatacatggagtgcagggacagagtgaccaggaggcctttgtccggcaccctgcccacaggctgagctcagccccaggccctttcaggcatctagacactcccatagcctgtcaggctggggcaaggagatcccaggtcacacatactccttggaagagttggacttagggtaagagcggggtgcacggtacccagccttgctctcattcccaggacaggaacaggagagcagtgcacctcccaggatgactagggcagaccctgcccagccaataaagatggcagggccaaactcatacttaatgttggtagggatcaaagggttataaaagtctgtgacaatctgatggccataccaggagcaagctaccaaggcggcaagacctgccacgatgaaaattatgcctccacccatggctatacgggccttcttcactttgtcgtctcccccacagcgcgtgcacttcatgcccatcgtggccacaaacatggccaggaagcccagcaccagggagaccaccattagggctcgagtggcctgcaaggccgcggacagggcgagcaccgagtcgtacattttgcagctcatcatccccgtgctctgcgtgacgcagtccatccacagccccttgtacatggcctgggccgtgatgatgttgtcacccgcataggagctcatctgccactgcgggatggcggtgcaggccaccagacccacccagcccagcagggccatggagaagcccagcaactgcaggcccgaattggccatttccgccctcagaaaacactgggggcgccgggcgggagaccctacagtaaaacaaacgacacttggggggcagccccacaaaagaaaacttgaggtggagttttccggtcacccaaagagacaaaaagggtttgggccaggtgaatgcaaatcttgtcaccaaactacacacaaatcgacccctccagtgaagcgatggcctcgcggcacagggagtaggatacgccgggagggtggttccagacaaaattggtggtccccgaaggccaggcggttccctccgggcgctctcggcgaccctaggcaaacaaaaggtggaggggccgtctgggcgcgtttctgagcgccggcaagtcccaaagtatcctgggctgtaggtccgaggctgcggtgcgcagcagaggtggctcggaggtgagccagca

SEQ ID NO: 123192 - DNA, 1388 bp, Homo Sapiens
  misc_feature (150)..(160): n is a, c, g, or t
  misc_feature (1315)..(1336): n is a, c, g, or t
tgaacaggacgctcgcagggccctgcccgtccagaatgcacgtggagtcctctgaggttcgggggtgtgggttgcacttgagggaccatcttccctggagatcccgtagggagttccctacaggcaggacctgaggcccagccccaggannnnnnnnnnnaccttcccggggcttgggaatgttctgagcccagcttcctgtcgaagaccgccatcttgctcctacgactcctggtcaccgtggtcccgggcccttctctgaaaaggggcatccccagcccggagcgtgatggaccaatgcgagggcctgagcccgagggtgcggacagtaaaccgtttattactgtgtggacacagacaccgtggtgcatgacagacagtttcaacaccatgagcgctggggacggagctgtgcctggacagctctgcggtgtgtggtggcgccacgctgggccggctgtcaccgccagctgaggcgctaacagcgtcacctgggagaaaacctggaaaccgtctaatgaagcaggtgacttaggggcgtctctagaaacccaaagaaatgtaccttaaataagcaaatataaaacacaaaaaagacgagcagacctggtgttccgtgtcaggcagaatctaaaaaaacccaggagttgcacttggtttcctcactgtcatgtgtgatcacaggtcaggacgtttcacagcagcgcgcccaggctcctgtgcgtgctctggtgcactggagtctggggctggctgggcttctggctgtcctctgtcgccggatgggctcgacgaatcagcgcagcgaggccggccccttacgtggtgctgatcccactcagctcctgcctgatggcgtcgatgatctcctccttcaccttgtggagctctctcaccacctcctctaggatctcctgcttcatccggtccaagtcgaaggcatccagggccatgtcattcacgctcccagcaggcttcatcctgggagagaaagggcctgtgggtgccctggctggagacaggtgtgggggaaagctggctgtgcagaggccccgctcaggctgggcccacctgctcccctcgctccatagaggctgcttgcttcagactctggccacctcagactgcctgagaaggatttaacgcccgtctccacctcaagaggtctccatggataccgtgactgtatttcccaacccgagagccaaggctggctggggtcaacaaagaaactgctttctgatcagagagctcttatgcagaggtggcaacttaagtgacaacatcgcacccacccgttgcctccctggaaagnnnnnnnnnnnnnnnnnnnnnngaccgcgtatgcggccgcaagcttattccctttaagtgaggttaatttcgca

SEQ ID NO: 123193 - DNA, 1362 bp, Homo Sapiens
  misc_feature (67)..(130): n is a, c, g, or t
  misc_feature (312)..(312): n is a, c, g, or t
gtgttgttctgttgttgccgtgcatcgtttggggtgccttgcgttgctgtgcctgacggcgctggtnnnnnnnnnnnnnnnnnnnnnnnnnnnnnnnnnnnnnnnnnnnnnnnnnnnnnnnnnnnnnnnnctggtgtggttgttggggttgctatccggtggttttggcgggaccaggttaaaccccggtttaattacctgttgtgggacacagacaccgtggtgcatgacagaccagtttcaacaccatgagcgctgggggacggagctgtgcctggacagctctgcggtgttggtggcgccacgctggcncggctgtcaccgccagctgaggcgctaacagcgtcacgtgggagaaaacctggaaacggtctaatgaagcaggtgacttaggggcgtctctagaaacccaaagaaatgtaccttaaataagcaaatataagcacataaagacgagcagacctggtgttccgtgtcaggcagaaatctaaaaaaacccaggagttgcacttggtttcctcactgtcatgtgtgatcacaggtcaggacgtttcacagcagcgcgcccaggctcctgtgcgtgctctggtgcactggagtctggggctggctgggcttctggctgtcctctgtcgccggatgggctcgacgaatcagcgcagcgaggccggccccttacgtggtgctgatcccactcagctcctgcctgatggcgtcgatgatctcctccttcaccttgtggagctctctcaccacctcctctaggatctcctgcttcatccggtccaagtcgaaggcatccagggccatgtcattcacgctcccagcaggcttcatcctagagtgaggctgcgactgaagggggctcttagcttcggggctctttgccacagacggggttctggacagaatcgaggacacaggcttctccaccgagttgctccgctcccagggcttccggccagcctctgaggagttaggtggctggctggctgctcgggtccccggagagggggaggtactaggatcttccatttggctttcatcttccttcttctcggctggcttgtctgactgggaggctgcttttctcctcttggccagcagtttgttcatttcctccatgaggcctcctccgccacccccgctgcttgcccggttggcatcggactttgaggtcccactgggactggagcctccagatgcgtcttttggccgttggactcttctcagcttggccccagctatggcagcggccagtcctgacatgaagctctcgtcgtggctggacccctgggctcctccggctggcagtgggggtgggggaggtggggtagccccagtgggtggaggcctcgtgcc

SEQ ID NO: 123194 - DNA, 2780 bp, Homo Sapiens
  misc_feature (77)..(270): n is a, c, g, or t
  misc_feature (278)..(400): n is a, c, g, or t
  misc_feature (453)..(525): n is a, c, g, or t
  misc_feature (572)..(610): n is a, c, g, or t
  misc_feature (619)..(636): n is a, c, g, or t
ttctcaagttccggtgtaggtcgtttcgttcccaagctggggctgtgttgccaggaccccccccgttacagcccgcnnnnnnnnnnnnnnnnnnnnnnnnnnnnnnnnnnnnnnnnnnnnnnnnnnnnnnnnnnnnnnnnnnnnnnnnnnnnnnnnnnnnnnnnnnnnnnnnnnnnnnnnnnnnnnnnnnnnnnnnnnnnnnnnnnnnnnnnnnnnnnnnnnnnnnnnnnnnnnnnnnnnnnnnnnnnnnnnnnnnnnnnnnnnnnnnnngccagttnnnnnnnnnnnnnnnnnnnnnnnnnnnnnnnnnnnnnnnnnnnnnnnnnnnnnnnnnnnnnnnnnnnnnnnnnnnnnnnnnnnnnnnnnnnnnnnnnnnnnnnnnnnnnnnnnnnnnnnnnnngatcacaaaaaaaagcccgctcattaggcgggttaaattcccgggtactgcannnnnnnnnnnnnnnnnnnnnnnnnnnnnnnnnnnnnnnnnnnnnnnnnnnnnnnnnnnnnnnnnnnnnnnnnaccactttgtacaagaaagctgggtcaggaaacagctatgaccatgnnnnnnnnnnnnnnnnnnnnnnnnnnnnnnnnnnnnnnngcctcgagnnnnnnnnnnnnnnnnnnacatttgcaaaacaacatttattcttttaaaaaaatctatatacattgccatacaaagataccacattgaagcagttctcaggaaccttccagtgagccttctcttataattgcccgagcaagatttcgtgccagagaaagtctcagcatttccaccttggtggtctctatgtcatcatcctggagctgctcggtatcagattctccatgcacaggtcttcttgacgtcaagtcctccagacaccgcatcaactcataagtctgttctgctgagaaaatcacctgtttctgttccaaaaggggcaaggcgtctgtcagcagagtcatccagaaagaccgaggggcaatccgagacgtcatcaaggacagaaggagagaagctgcgtcggcaaaacgcttctccccgtacatacggtggaactcgcgatactttcccaggaatgtcagtcggtcactgagcatcatgggtggccccaggttgtcaatgagatccaaatcagaaaagcagcctcgctcacagtaatccctgaggaacctgtctgacacgagcgtggcaaaggcgggcatccttagcacggatgctccaagagagggcagaacccaggcgattgttgcggacggctttcatggctaagatcttacaaatgctgcgaacttgttcagtcatctgccgctgctcacagatccgcagcaccttcagggctttctgctcggtgttcagaggtatccgctcaatgtgcagctccagggagactcggcccagctcggggcagtaatcaaagtaatcgacccccagctgccacaggctgggatgagcaaacagtcccgaggcgtactccagcaggaggaactctctcatgttggaaccgaaatagaggttgtgtgactggaggagcttgcagtggtccagcaggtctgtcaggtgggccacaaaccaccagttgctcagggcgatgctgcactctttgattacttgatggatgtcaaactcaaaggctgccaacaagatgttgtccaggggttctgggctgctctcacctcccagaaacaggtccaggctggactgggcatagtagtgcagatcaatgggttttactgtgggattggagtacaagagccgagtcactaggaaatgataccaattactcagaagttccttctgctctaacaaggcagcttcgtctcccagcataatcttcaagagagactccaggtgagggctggtggcgaatgtgctgtcctggaggtaccgctcacattcctcgtgccagtgctgccacttcagctccagctctgtcagtgtctgggtgttcccaggactaagaatgggcattgtcctcatcaggtccccccatgattcggcatatgcctgcagaggcggggctggcatcggcttccttggagagcatctgtcgggcctcatccagccggccctgcagcaccaagatggtcaccaagttccagaagctgtcatgtttgcttggattctcactgcccagaacatctgccgacaaactgtccacctcgcacacatggagccggacccagtcaaggagatggaggaggagagggccagctggggccacttcaataaaaagaatctcacacaggttccagatgagctccattgctgacaaaatggagacctggctgctgaactggcggccattggctggatctttagcagcaattgcaacctggtgcatttcctccatacatgctctgatgactgatcggtagtttttactcactcgaaccaattgagattttctggattttccagtcaactcttcgtcaattctctggaggcccagaaagattccatgggattcattgaagagttttctcaagatttgagagtaaacatctacatccttacggatgatatagataaaggggcaacttggcaccatctctgatttttcttttttgttgaaggaggtttcacataccagcatctcccctggaccccagtcaaaatacatttggttcttcttggaattcacgcctggaatcaaagtgactgttggctcgccatcgagctcctccatagcgccgaaccccaggctcctagaagtcgctcggacgccaatgcttcccgctcaggcctcccgctcagagctggctgcgagacaagactccgc

SEQ ID NO: 123195 - DNA, 885 bp, Homo Sapiens
ctttctcttcttctctcggtggatctttgcttttgctcgaaggcctatcgggtggtttaacttctaaagtaggcagaggcctgcctccagtcagtagagggcagggcgtagtgctggattcctcgacactgaaaggactctcctcaattttcccagcttctgcttccggcagaggatttttgagggtctgtaaaaataacgccgctttccttttacgttctgcttgaagctgtttctcttttgactccttagacgcctgggcgagcttttcccgggcagcagctgcgaggcgatcttccagcttttgctttgcttgctttgcttctagctcctcctgggtaagttgaggcttcttctcctcaacaactacacagggtggggcaactgctgggttagtgtttgcagcactactagaactttcttggccttctttgctttcttcatcatcatcactgtcatcatctagcttaacacgatttttttccaggggaagcagatcattttctttggccttgattgcaaagcttattggagcaaaggaagctttcaccagcttcccgtccgggacggtcttactggacgatgcctccttcttcccgcctgagcctgcccgtgctcccacctcggctgcgtcttcaggcgcgccatcctccccagcatcacttggcttctcgggagcagagtctgtgggagcctcttctggtgcagacacagcctgcatgctatcgcccccttctttctggaggaagaactgcttcttaaactcataataagcattatactggtgccacggctgcaggaactcaaatctttgatcattcttggcacgaacactggtctcgaacttcaggccgttcctggcgacatactcggccagcttgtccc

SEQ ID NO: 123196 - DNA, 952 bp, Homo Sapiens
gatggatctcttctaacttgtcatagagattgttccagtcagcagtcaacaatgtgcctgataatcttcaactgtggtggactcttatctcagcattgtcttttctcagctttcaactcgagctcgacattcaaaagggcaatcttgggattgtggtactttttgggttgcatttcaaacccagcgtaagagaaagtcttcttgaatgcaacaccagctaccagctgagaatcctcgagggctccaccctgtaccttcttgattccaatcattttaagctgcagcaaatcatcgagcatcatcactgcatccaccaccatcttagcaaagaaagctttctgctgggagatcagcttggagctcagagcggtcatggcacacttttccagcagcttcctctgctccactttatctgccttcttcacggtcacagcaatctctttgatcttgttaactgccagctgggtggctgtgcggaaagctcgaatgatgatctgggggtgtaaaccttcctccacatagggtttcacctgcttcagaaactctgcagccagcaaggtcactgaggtggtgccatcacccacctcagcatcttgggatttggcaatgtctaccaaagtctttgctgcaggatggacaacatcaagaagtttcagaattgtggccccatcattagaaattgttgctttgcctctgccatctacaataagcttgtccatgccacggggacccagggtagttcttacagcctcagcaatcacctggcaggcactgatgttactcacaagctgggggatgccttgggagctatcagtcccctctttcaataggataactggtgtgggcatcattttggaagcttattcagcggcccgccactctcccctcttctccgaggacgcgtgggtcgacgatatcccgggatatccggaccggtaccagcctgcttttt

SEQ ID NO: 123197 - DNA, 954 bp, Homo Sapiens
caactgtgtcatagagatgttccactcaggcatccacaatgcctgaatatcctcaactgtggtggactcgttatctcagcattgtctttcttcagctttcaactcgagctcgacattcaaaaggccatcttgggattgtggtactttttgggttgcatttcaaacccagcgtaagagaaagtcttcttgaatgcaacaccagctaccagctgagaatcctcgagggctccacccctgtaccttcttgattccaatcattttaagctgcagcaaatcatcgagcatcatcactgcatccaccaccatcttagcaaagaaagctttctgctgggagatcagcttggagctcagagcggtcatggcacacttttccagcagcttcctctgctccactttatctgccttcttcacggtcacagcaatctctttgatcttgttaactgccagctgggtggctgtgcggaaagctcgaatgatgatctgggggtgtaaaccttcctccacatagggtttcacctgcttcagaaactctgcagccagcaaggtcactgaggtggtgccatcacccacctcagcatcttgggatttggcaatgtctaccaaagtctttgctgcaggatggacaacatcaagaagtttcagaattgtggccccatcattagaaattgttgctttgcctctgccatctacaataagcttgtccatgccacggggacccagggtagttcttacagcctcagcaatcacctggcaggcactgatgttactcacaagctgggggatgccttgggagctatcagtcccctctttcaataggataactggtgtgggcatcattttggaagcttattcagcggccctccactctcccctcttctccgagaccggccgcccacctcgtgccgaattcgccacccagcctcgctaccttagaaccgttagagttactgccgt

SEQ ID NO: 123198 - DNA, 739 bp, Homo Sapiens
aagggtggcacatccccaatggggagtttggacaagacaactttggctccagaatgatggatcttctctaacttgtcatagagaatgttccactcagcatcaacaattgcctgataatcctcaactgtgtggactcttatctcagcattgtctttctcagctttcaactcgagctcgacattcaaaagggcaatcttgggattgtggtactttttgggttgcatttcaaacccagcgtaagagaaagtcttcttgaatgcaacaccagctaccagctgagaatcctcgagggctccaccctgtaccttcttgattccaatcattttaagctgcagcaaatcatcgagcatcatcactgcatccaccaccatcttagcaaagaaagctttctgctgggagatcagcttggagctcagagcggtcatggcacacttttccagcagcttcctctgctccactttatctgccttcttcacggtcacagcaatctctttgatcttgttaactgccagctgggtggctgtgcggaaagctcgaatgatgatctgggggtgtaaaccttcctccacatagggtttcacctgcttcagaaactctgcagccagcaaggtcactgaggtggtgccatcacccaccatcattttggaagcttattcagcggccctccactctcccctcttccctcgtgccgaattcgccacccaggcctcgctaccttaggaccgttatagttactgcc

SEQ ID NO: 123199 - DNA, 2699 bp, Homo Sapiens
  misc_feature (126)..(126): n is a, c, g, or t
  misc_feature (275)..(275): n is a, c, g, or t
  misc_feature (376)..(376): n is a, c, g, or t
  misc_feature (386)..(386): n is a, c, g, or t
tgggcacaccgcatagagggggggagtacatgggtgtgttgtgtgcgccaccccaccgcgtttggtgccggcccccacatggtggacagacgacggttatgttgtgttgcccgcccacacaggtgnggtcgcccaaaaggagcggcgtgttggaaagtatccccgaacttctgggcgcaatattgtccgcaggggattgttacactctcacaatgttagcggcgtatctgcgcgggcatcgttacgcgcggtcgcccccaagtgtttgtccgggnagccagagagagattggcgctattcgaataggggcatatagtattagccaataacacacaggtctgttctcgtgtgcggaaaataagaaaaatacatgggncccaataggntaccggcgacgcgtgacacctttataaatatatatgtgagggttagtgcgggcgaagaaaattctgcggccgtgttggagaacgttcccactaagggtggagaatacggaaataaacccgcggttgaaaatggagccctctccaagagaagcttaaccacatccagggggaattttggttttccaaaaaaccccccttcggtttgttccccgccccgcgggacgtattcttttaatgtggggggaggaaattcccaaggccccttagtccaattagccaggtgattctccttaaggaaaacaggctatgggcccatctttcactttgccctggctggggcccgtcgtcgctctaacgagatggctctaggaaagctttttcgagggccgacggcggccgacatgtttttgcaaagcatgggcttcattctttttgaagtcttacattttatttaaatagcctccagtaagaagagagtgggccaattactaccccttccttgtaaaatgaagtaaccaagccaaggagggtaagtgcacccagcagccagccagccatgtgatgggtggggtgcctctcagtgggggcggccacgaccacggccccggcctgctgctgtgggagcatccacagtcgagcgggggttcttgatggtttcatctacagacacgatcaggcacgcagcctcagaggctgctgtcagcgcattgatccgcaccatagctggctcccacacgaaagcttcaaagttgtcagcaatgtcctcgttgttgatgtctactccataccatgtacccccctgggcatgccgagcccgcagcttgttgagaatgtttgtggcatcaaagccagcattgtcacacagctggcgtgggataatctccaaggccttggcatatgccccaatcaacagctgctgttttcctggaatagtccttgagtaatcccgcaggtacttggagagttccatctcaatggccccgccaccagccaccactgaatcattcttgatggccctcctgacgatcatgatggcatcatgcagggaccgctctgtctcctccataaactgctcggcgccgccacggagaatgaaggtgcatgtcttggccttggggcagccagtaaaaaaattgtacctctcgcctccaatctgggtctcttcaaacacctggcatcgacccagcacatctgctgacagagcattcacactggtctggattgagcctccacaggccatcattgtcctcttcagatcctcctcaggtactcggccagcacagaacatgtccctgtcagcaaagtactgggtggccacatccccaatggggagtttggacaagacaactttggctccagaatgatggatcttctctaacttgtcatagagaatgttccactcagcatcaacaattgcctgataatcctcaactgtgtggactcttatctcagcattgtctttctcagctttcaactcgagctcgacattcaaaagggcaatcttgggattgtggtactttttgggttgcatttcaaacccagcgtaagagaaagtcttcttgaatgcaacaccagctaccagctgagaatcctcgagggctccaccctgtaccttcttgattccaatcattttaagctgcagcaaatcatcgagcatcatcactgcatccaccaccatcttagcaaagaaagctttctgctgggagatcagcttggagctcagagcggtcatggcacacttttccagcagcttcctctgctccactttatctgccttcttcacggtcacagcaatctctttgatcttgttaactgccagctgggtggctgtgcggaaagctcgaatgatgatctgggggtgtaaaccttcctccacatagggtttcacctgcttcagaaactctgcagccagcaaggtcactgaggtggtgccatcacccacctcagcatcttgggatttggcaatgtctaccaaagtctttgctgcaggatggacaacatcaagaagtttcagaattgtggccccatcattagaaattgttgctttgcctctgccatctacaataagcttgtccatgccacggggacccagggtagttcttacagcctcagcaatcacctggcaggcactgatgttactcacaagctgggggatgccttgggagctatcagtcccctctttcaataggataactggtgtgggcatcattttggaagcttattcagcggccctccactctcccctcttctccgcctcgtgccgaattcgccacccaggcctcgctaccttaggaccgttatagttactgccgt

SEQ ID NO: 123200 - DNA, 493 bp, Homo Sapiens
ctctcggtggatctttgcttttgctcgaaggcctatcgggtggtttaacttctaaagtaggcagaggcctgcctccagtcagtagagggcagggcgtagtgctggattcctcgacactgaaaggactctcctcaattttcccagcttctgcttccggcagaggatttttgagggtctgtaaaaataacgccgctttccttttacgttctgcttgaagctgtttctcttttgactccttagacgcctgggccagcttttcccgggcagcagctgcgaggcgatcttccagcttttgctttgctttcaccagcttcccgtccgggacggtcttactggacgatgcctccttcttcccgcctgagcctgcccgtgctcccacctcggctgcgtcttcaggcgcgccatcctccccagcatcacttggcttctccgcctcgtgccgaattcgccacccaggcctcgctaccttagaaccgttatagttactgccgtt

SEQ ID NO: 123201 - DNA, 724 bp, Homo Sapiens
gaaaaagcaatagtgaatatagaacacgtggtttaaaacaagcaggctggtaccggtccggaattctcgggatatcgtcgacccacgcgttcggtgggttgctgggcggcccggtctcggagaagaggggagagtggcgggccgctgaataagcttccaaaatgatgcccacaccagttatcctattcgaaagaggggactgatagctcccaagggatcccccagcttgtgagtaacatcagtgcctggcaggtgattgctgaggctgtaagaactaccctgggtccccgtggcatggacaagcttattgtagatggcagaggcaaagcaacaatttctaatgatggggccacaattctgaaacttcttgatgttgtccatcctgcagcaaagactttggtagacattgccaaatcccaagatgctgaggtgggtgatggcaccagctcagtgaccttgctggctgcagagtttctgaagcaggtgaaaccctatgtggaggaaggtttacagccctggatcattattcgagctttccggacagacacccaggtggcagttaacaagatcaaagagattgctgtgaccgtgaagaaggcagataaagtggagcagaggaagctgctggaaaagtgtggcatgaccggtctgagctccaagctgatctcccagcagaaagctttctttggtaagatggaggtggatgcagtgatgatgctcgatc

SEQ ID NO: 123202 - DNA, 696 bp, Homo Sapiens
tttttctcaggaaactttttaatgaaagtgtcggccacggtggtgtgtaggtggctgagctcagattgcagctgctaagacaccagccacttaccaagagaaagccaggctgcttcaaacccagggcccgaggcaaaaaagcatcacttccggccggggagtctggaagccacgccttgtgggaggtcacactggcatctaggccttcgcctgcattgcagaaggagagccaggtccccctcctggagaacgctgcgttccccagccccacaccggctttgccaccacacaggctgttgaggcaggaggcgggtaagacgtagctgtagacccaaagcaaccaccagccctgggaccctgcaggagaggagcacttttagaacatggaaaagtgtggtcatcccatcattagacagcacacatcctacataaataaaaagtcgtatggggaaggaggttggggagggaataaaaaattggcacagacattgatagactggtttccagtttcaaggtaacagatgcacatcatgagaccagaggaggcagagacaaggctggatttggcttttctaagcaacatgtgttcctgcgcagggctgaatggtcgctgagacagagatggaagccaggacaagggagcccaccgggcccagataggtacagagagcagaggtcctgttctgtcctcgccac

SEQ ID NO: 123203 - DNA, 1711 bp, Homo Sapiens
  misc_feature (1614)..(1648): n is a, c, g, or t
tttaaaaacccaaaatttctttctgtttattcaaaataaaaatacacatagaattatgaaaatataggtttactatttccaccacgtaggttgatgctgctgttgaaaggcttacaaactgtttttcaagtttttaaagctcatctcgatccctcaatagagtatacctatattcactgggtgctagtttctggaaggagctctcaggtggactgcttgctacatcttgggcttgctctcctggggctgtatcagttgggtcaggtccatgatggaattctctgtgcagttttccagaatgtaagtcaaatacgaattgcttgagttttccaggaattaatacatctttgaagtctccaaacacatacatatgcctaaagctgtcaatagcgattacaggacaatctgctggagttttctgtatgtgcagaagaggatgtctaaatttgtcacaatcggcatgtaaaaagtttattgtacctttttcacttattaattgccgagctacttcattctggaatatttctaaactttctgtatcttctttcatgtgaaagagtatgagaaaaggcagtccttcttctgtcaattcctctccattttcaaatgttatttctcggacaagaggaacacatttatcttgaatccaattgtaagtcacatcaaaatttgtcatagctcccaagtacaccatatccggagcagaatgccctggtggtttgtagattatgttgtcgccactatatctttccggttttgaaacatccccaaatgcagaaagaaaggcacagtcatcatgcaaaatattcgctactcgttcaaaaactctatagttgtccgagtccttttgctcaaaatatccaatgatatttcttttgctgcgatcaagagtggtgatttctgctaagtcccgaatttcttgaatggggtcacttttttgttgcctgatgtaatctgccaatgctttcactgatcgctgacccctgtattctctcttcatcatcatcccattacgaaacaatttgagggttgggtatttgcttatcctgtatctctgggctatgtcagagtgctgatcacaatcaactctggcaaacactacttgattttcatttggaaattcttccttaatgacatcggaagcttcctcaaaaattggatgcaacatctgactgaaacgacaccagtcagcataaaaatttactaaagcaacatcagcattgtttaaaatttcatctatattctctgtatcaagacttgttatttcagttgttacaggagtgaaaacccaagttaccaggagcagaagggagcatctgaggtcgggtaaggataggaagacggcaggatgcatggtaacgctggggtccgtgacagggacaggcgctggcggctgggactgggctaggttgggttgggttaggaaagggctgggctccgggagccgacggcagcggaggattctccaggcagcggcacctcgtcctctcgacccgggctccagcggcgaacacccgggacaacttccagagaggcctctcacaccctcacttccgggtcctccccggccgtaatggccgaattcccgggcatatgtccggtaccgtcgactgnnnnnnnnnnnnnnnnnnnnnnnnnnnnnnnnnnncggccgcttcctcgctcactactcgctgcgctcgtcgttcgctactacgacggagcgcccata

SEQ ID NO: 123204 - DNA, 548 bp, Homo Sapiens
acgtggcttttattttccagtggagcacttgcttccaagatgctggaatctttacctgcgcagtactagaccagggacgctcgatttctctggtagtacaggtgacgtctgcctcagcctgctcggctcctccctcctggccccggcctccctgcgcgtcctgtcctgcagctgccgggccacagctctgaccatcttcttcacagaggccaccttccacctctcctgggcaaagtctgtggccatccactgcatctcctccagcagatagtcccagtgggacttgggtcgtggggcctcctgcagctttggcagacgcctctgggaccacagacctgctttcctcagctccgcaatgcgctgatgcacctggttctccagagttatttgttctgtcagcgtatcctgagaactgtcttgggacgaggtggcattctgagcaggactctgtggtttggtgggggcagatgccaccacccctggggtccgggaagtgactggagatagtgccttattggtggctgaggaaggtctatttactggagagg

SEQ ID NO: 123205 - DNA, 1762 bp, Homo Sapiens
  misc_feature (56)..(65): n is a, c, g, or t
  misc_feature (220)..(232): n is a, c, g, or t
ttttacaaaaaagggtcctggaacacattcccctgccccttttaatcctttgtttnnnnnnnnnnaaaaaaccgccccccatttttttcttcgtcttatttccgtccttcttcagttcatcgtttcttgctttttgttcaccacctaaagggacgacatttattccttttccaaatgttacagtaaaaccaggtggaagagaatggttttagcagttagnnnnnnnnnnnnngtacaaatctggggtttggccattaaaagttatttacaacagtgggagaaaaaaagacaagaagttgtttcacattacagacctccccccaccccaaagcctaatacttgcttaccaagtcaaaaaagagacacagttgattcacaggctggaggtttgaacttgagtaagacatttataaaaacctagacggggcagtgtcctccccagcccaggtgccactaggcacagcacaagagactaaaaacaacaggggaaggctggacactcaaggtttgggagtataagcaccccacttctggctcagggatttggggagtagggtaaacaaaacctacttggaaaagaattggggaagaaaaccaacaactgccttatgcaggggtggggacagggaaggaggtagggccagggacaggagcatttcacatcactaacctaacttgggaagctgtaagggaccatcttcaactggccttaagaggagaaccagatggctgatgggagaatccacaggagggagaggaggaaagggaacgtggctgggaggaggcaatagccccttcctttctgggcacaggaaggcagccagggcaccaggtccaggcagtgacctcacaaggacagcacagtttttgcagcttagagatcacccacctgcccctacctagctactcattctgctcagcgctggctggtgtagggccactctccggccccgagggagtggatggctctgtagcctggggccctgcctcttcttctgaggctgcactagcctctgcccccttggcctggggttcctggctctcaggggtggctgcggccttcccttcctgagcagtgccctcgtcgctgcaggcaccgatctccccctgctcctgctcttcctctgtgggtgaggaggcagaagaatcacccccaccctccttccgatttctcttgaaggacaggccgctcaatttgaaaggcttcttgaaagagaatttcttcttcttcttgggggtctccttgggggggacctcccccttggcctcagcaccctggctagggggtgctggctcgatggcatcgccagtggccccggctgcctcatctgttccgttcacagggggcgactccccttcacccttgggggataagtctccattgcttttcacgtggccattctcctggccgttggccttcgcgggggaagcgcctgctgcctcctcggcggtcacgtcgccccggggagccttggagctctggctgcccatgatgggggtctgctggggggcgcttggagccgccccgggctcgcgccgcaggggatagtacggcggggtcggcccggccggcggaggggtggggctggcgcccgagggggaggggtgccgggggaagccgagctgcacctccgctccgcggccgacccgctagctgcgcccgccgccgctccgctccgcgcccggacgcgtgggtcgacgaatcccggaatccggaccgtcccagcggtttttacaaccgtatatgttggtgtataaagag

SEQ ID NO: 123206 - DNA, 1065 bp, Homo Sapiens
tagagcttaatggaattttattttgaaaatatggcaagagtctaaggcacttcaaacatttaaatacatagaggaccaaagtaaatgtgacacggtaaaaaggaatccataaatacaaagagaacactgtgtttctctagaggcaaatacagagccgattcctctaacacaatccaacctttagcattggagttgtgcaattaatacaaatgatgatgttacgtgtagttcttcatggctttagtatggaatacaaaagctgaaaatactgtgtcaagttcatatagataccctttttataaaaagtcatatattacatctacctagttaagaccaaatgagaatattcttttgtaagttttatactttgtctggcccaggcccaagttaccaatgatcaaagtcatctcgacttccttattttaaaataagacaaaagaaaaatccaaaactatgctggaatgagattttggaagaactttctaatggttccacatttagtacatataaatatttgtggaaaaatcttaaaacgtctcagtgagaaccagacaccactttgtgggagtgaacagaaggtgccccttcagatcagaattccctgtgactgtacaaaacggagcagagactcaacagcaacagagactgggttaaagtgtgccctacacagaagacggccagaaaggaggtgtgtgtgcccaggctagcagtctctgcactgtgaaagcttcagcctttacccctgggcttgatgcttctgtttgctggtgagctcaggcacaatacgtatacattcagtatctgtcaccccaacaggaacaattagcagcttaatagtggcatgtaaataaagggctatttgcatacaatcaatcaaatgaacctcggtgggtggggccaggagacgtcttccttccaagcctaggggtgcccggagactgggcttttgcaaagttgacatgggcatacagaagaacagcgatgtccttgtgtcctgcttccagggcgattgagagcgcagtgctgccatcgtcggacgcgtgggtcgacgatatcccgggaatt

SEQ ID NO: 123207 - DNA, 435 bp, Homo Sapiens
tttcaactgataagtaatttattatgatattatagacaaatgcaaaattactgatatatagggaggttcattgcacagaaatttggtgctaacataaatatctatgagtgagaaatgcttaaaacatttaattatattttatctacaaaacattcatgtcgtcattcaacaaatgacacagatgtgtatgtactactgaaaaagaaaaaggccattgaataagggctgttaaatgaaagaggtgatttgcagaaaaatgtgttacaatatggccacacacgtggatccttccccataatggcttgtgtgtttgtgtgcatctatccactaaaagaatgcatgtagttcacttaatagaggaaaactatagggacagaattggaagagaggagggcatttaatttatatattatttaaatatgctttgaatttttg

SEQ ID NO: 123208 - DNA, 1330 bp, Homo Sapiens
  misc_feature (71)..(105): n is a, c, g, or t
ggatcactatagggcgtagctcgcttgtatccgaagacgagcgcagcgagtagtgagcgaggaagcggcgnnnnnnnnnnnnnnnnnnnnnnnnnnnnnnnnnnncagtcgacggtaccggacatatgcccgggaattcggccattacggccggggggcctctcacaaacgctgagccccgccccgctgaggcctgtctgcagaatccacagcaaccagcaccatgcccatgacactggggtactggaacatccgcgggctggcccattccatccgcctgctcctggaatacacagactcaagctacgaggaaaagaagtacacgatgggggacgctcctgattatgacagaagccagtggctgaatgaaaaattcaagctgggcctggactttcccaatctgccctacttgattgatgggactcacaagatcacccagagcaacgccatcctgcggtacattgcccgcaagcacaacctgtgcggggaatcagaaaaggagcagattcgcgaagacattttggagaaccagtttatggacagccgtatgcagctggccaaactctgctatgacccagattttgagaaactgaaaccagaatacctgcaggcactccctgaaatgctgaagctctactcacagtttctggggaagcagccatggtttcttggggacaagatcacctttgtggatttcatcgcttatgatgtccttgagagaaaccaagtatttgagcccagctgcctggatgccttcccaaacctgaaggacttcatctcccgatttgagggcttggagaagatctctgcctacatgaagtccagccgcttcctcccaagacctgtgttcacaaagatggctgtctggggcaacaagtagggccttgaaggccaggaggtgggagtgaggagcccatactcagcctgctgcccaggctgtgcagcgcagctggactctgcatcccagcacctgcctcctcgttcctttctcctgtttattcccatctttactcccaagacttcattgtccctcttcactccccctaaacccctgtcccatgcaggccctttgaagcctcagctacccactatccttcgtgaacatcccctcccatcattacccttccctgcactaaagccagcctgaccttccttcctgttagtggttgtgtctgctttaaagggcctgcctggcccctcgcctgtggagctcagccccgagctgtccccgtgttgcatgaaggagcagcattgactggtttacaggccctgctcctgcagcatggtcccttccttaggcctacctgatggaagtaaagcctcaaccgac

SEQ ID NO: 123209 - DNA, 907 bp, Homo Sapiens
ctcggaggtggcggtggatcttactccttccagccagtgaggatccagcaacctgctccgtgcctcccgcgcctgttggttggaatgtgacgaccttgaagatcggccggttggaagtgacgaccttgaagatcggcgggcgcagcggggccgagggggcgggtctggcgctaggtccagcccctgcgtgccgggaaccccagaggaggtcgcagttcagcccagctgaggcctgtctgcagaatcgacaccaaccagcatcatgtccatgacactggggtactgggacatccgcgggctggcccacgccatccgcctgctcctggaatacacagactcaagctacgaggaaaagaagtatacgatgggggacgctcctgactatgacagaagccagtggctgaatgaaaaattcaagctgggcctggactttcccaatgtggggagacagaagaggagaagattcgtgtggacatttaggagaaccaggctatggacgtctccaatcagctggccagagtctgctacaggccctgactttgagaaactgaatgccagaatacttggaggaacttcctacaatgatgcagcacttctcacagttcctggggaagaggccatggtttgttggagacaagatcacctttgtagatttcctcgcctatgatgtccttgacctccaccgtatatttgagcccaactgcttggacgcctttccaaatctgaaggacttcatctcccgctttgagggcttggagaagatctctgcctacatgaagtccagccgcttcctcccaaaacctctgtacacaagggtggctgtctggggcaacaagtaatgccttgaaggccaggaggtgggagtgaggagcccatactcagcctgctgcccaggctgtgcagcgca

SEQ ID NO: 123210 - DNA, 1020 bp, Homo Sapiens
  misc_feature (51)..(73): n is a, c, g, or t
gcccgccgccccaaacggggggaagccccggcccttgggtgcagggggtgnnnnnnnnnnnnnnnnnnnnnnngccgcagctaggcccaccccgacggttggggacccctttggcgagatttccccacccaacgggtacccttcaattggaagccccccacattggctcaaatacgtgagttcagacatcatagccagaatcaacaagtgatctggtcccacaaccatggcctcttcccccggaactggtgagaagtgctgcatcattgtagaagttcctcccagtattctggcttcagtttctcaaagtcagggcctgtagcagactctggccagctgattggagacgtccatagcctggttctccaaatgtccacacgaatcttctcctcttctgtctccccacacaggttgtgcttgcgggcaatgtagcacaggatggcgttgctctgggtgatcttgtgagccccatcaatcaagtagggcagattgggaaagtccaggcccagcttgaatttttcattcagccactggcttctgtcatagtcaggagcgtcccccatcgtatacttcttttcctcgtagcttgagtctgtgtattccaggagcaggcggatggcgtgggccagcccgcggatgtcccagtaccccagtgtcatggacatgatgctggttggtgtcgattctgcagacaggcctcagctgggctgaactgcgacctcctctggggttcccggcacgcaggggctggacctagcgccagacccgccccctcggccccgctgcgcccgccgatcttcaaggtcgtcacttccaaccggccgatcttcaaggtcgtcacttccaaccaacaggcgcgggaggcacggagcaggttgctggatcctcactggctggaaggagtaagatccaccgccacctccgagtgttcagggagcacgacgcgtggtcgacaatatcccggaattccggaccggtaccagcctgcttttttgacccactggtcatatgtcacatact

SEQ ID NO: 123211 - DNA, 1149 bp, Homo Sapiens
ttaaatgtggttgaggctttattttgatcaggtaggcctaaggcaggggccatgctgcaggagcagggcctgtaaaccagtcaatgctgctccttcatgcaacacggggacagctcggggctgagctccacaggcgaggggccaggtaggccctttaaagcagatacaaccactaacaggaaggaaggtcaggctggctttagtgcagggaagggtaatgatgggaggggatgttcacgaaggatagtgggtagctgaggcttcaaagggcctgcatgggacaggggtttagggggagtgaagagggacaatgaagtcttgggagtaaagatgggaataaacaggagaaaggaacgaggaggcaggtgctgggatgcagagtccagctgcgctgcacagcctgggcagcaggctgagtatgggctcctcactcccacctcctggccttcaaggccctacttgttgccccagacagccatctttgagaacacaggtcttgggaggaagcggctggacttcatgtaggcagagatcttctccaagccctcaaagcgggagatgaagtccttcagatttgggaaggcgtccaagcacttgggctcaaatatacggtggaggtcaaggacatcatagacgagaaaatctacaaaagtgatcttgtttcctgcaaaccatggccgcttccccagaaactctgagtagagctttagcttttcagggagttcctccaagtactttggcttcagtttctcaaattctggattgtagcagatcatgcccagctgcatatggttgtccatggtctggttctccaaaatgtccacacgaatcttctcctcttctgtctccccacacaggttgtgcttgcgggcaatgtagcacaagatggcgttgctctgggtgatcttgtgagccccatcaatcaagtagggcagattgggaaagtccaggcccagcttgaatttttcattcagccactggcttctgtcataatcaggagcgtcccccatcgtgtacttcttttcctcatagcttgagtctgtgtattccaggagcaggcggatggcgtgggccagcccgcggatgtcccagtaccccagtatcatgggcatggtgctggttggtgcggattccgcagacaggcctaaa

SEQ ID NO: 123212 - DNA, 934 bp, Homo Sapiens
tcctgggcctctcaaagtctgagccccgctccggctgatgcctgtctgcagaatccgcaccaaccagcaccatgcccatgactctggggtactgggacatccgtgggctggcccacgccatccgcttgctcctggaatacacagactcaagctatgtggaaaagaagtacacgctgggggacgctcctgactatgacagaagccagtggctgaatgaaaaattcaagctgggcctggactttcccaatctgccctacttgattgatggggctcacaagatcacccagagcaatgccatcctgcgctacattgcccgcaagcacaacctgtgtggggagacagaagaggagaagattcgtgtggacattttggagaaccaggttatggataaccacatggagctggtcagactgtgctatgacccagattttgagaaactgaagccaaaatacttggaggaactccctgaaaagctaaagctctactcagagtttctggggaagcggccatggtttgcaggagacaagatcacctttgtggatttccttgcctatgatgtccttgacatgaagcgtatatttgagcccaagtgcttggacgccttcctaaacttgaaggacttcatctcccgctttgagggtttgaagaagatctctgcctacatgaagtccagcccaattcctccgaggtctttgttggaaagtcagctacatggaacagcaaatagggcccagtgatgccagaagatgggagggaggagccaaccttgctgcctgcgacctggaggacgagctgagtcgctggagctgacttctacctttatgcgttcttctactcctatactcgtacccaaggctcattggttccgttcttctaacattatacgatcgcgaagtcgaggctctataaagctcaaatcccagatgtcactaca

SEQ ID NO: 123213 - DNA, 1198 bp, Homo Sapiens
  misc_feature (125)..(187): n is a, c, g, or t
caagaaaaatacggctttatagcttttactttacaattaaaggagaaagcagaggccagatataagcccagataataacatttaagtttctcataaaaactcccaaatgtacaaagtccttgccnnnnnnnnnnnnnnnnnnnnnnnnnnnnnnnnnnnnnnnnnnnnnnnnnnnnnnnnnnnnnnngcagggattaccccccacaggccttatccctgtaagtctattaaatgtgaataatacatactttacaacttctcttagtcggcccttggcagattaaatctttgcaaaattccatatgtgctattgaaaaatgaaataaaacctcagatgtctgaattcttatttcaaatacagttatataattattttaaattacaatatacaatttctgttaaatacaactgttaagggattctgagaacaattataagattattataatatatacaaactaacttctgaaatgacatggttgtttccttcccaccctcctaccctctcaaagagtttttgcatttgctgttcctggttgcaaaaggcaaaagaaaatctaaaaatagtctgtgtgtgtccacgacatgctcgctcctttgagaatctcaaacagccagaaccatcccgtcccacggactgccaggcgccaggacggcttcccggtgcctctttctcgaccattttcacttaaaagcactgtgagtagaattagctgtgccgttgctgccacaagggaggcagcctggtcaagaggcgtggtttgggatgcaataaggccactgcttcttggccactttcctggacattttcaatcctgcctttcctgggtcctcggagcagctggtcaggatgggcttcccactcagtccacgagcctggggccggctcagggtggtcccggcgacctcagtcctccgtgtcgggctggacgcccaggatggcgtgcagttcctctggcgtgaaccccagcaagttcttgatgtcgcacacgaagcggtacacgtagcgcttccccgacgtcttgtggatgatgttcttgtcgtaatagtagcgtaagccccggctcagcttctcgtagttcatcttgggcttatttttcctctttccccaccggcgggccgcctcatcggggtcggcgagcttaaactcccatccgtctccagtccagctgatgaatgactggcaggatttgtctgg

SEQ ID NO: 123214 - DNA, 1704 bp, Homo Sapiens
  misc_feature (1304)..(1350): n is a, c, g, or t
ttttttatataaacaaaatactttattattgagagagtaaaggcccaattacaaaatttttatacttaagatctgtttattaccatgccaatggtttataaggactgtagtttccataactgttaggctgaaccccatgaaactccttctttgtagataaaagccagcctaatattggcaatttcacgtggttcaacctcacatacaatgagccactgcctaggattcttttggcagcaagatgttcccagtcacatgtctgtttatattataaacagatgtccaagtgataaatacatccctcttgagaaaaacatcctgtgcttatgtatactgggaatggtcttttgtgggtattgaggcagcgcagctctggctttgctcttcccagcttgcccggccacccgattcctcagtttcatcacaggaggattctttacagatgtcagccacccgtccaaggccacgcagctagtaaacagacaagcctgtcggactttgaaaccaacttgaccgggtcatttataaaggccgggaatacacatgactcaggtgctcttttgaaacgactacaaaagtctccattttgatcaaaacgttttctccgaatgaatggctccgatgctttctctttcccatcttaagtccccgctctgtgcctcagaatagtctgtgtccaagaaaataagaatcacgtcatcttgctgtggacactgagcaaaaaggagcagcatgctattaagatggttgagacacacgagtgaacaaagatgggacaaactgtgcttcgttcaagaggtttcatcaagacccctaccgccccccgtccttcagctctgtacagtaactttaactttacatagagctgagataaaaataaagctttcttacaaattacattttttttcccagtgaattacttttgcagtaaaaatagctgctacataaatccctcctgatctctgaaaaggagttgcatatttccaaaaataatattcttattttaatcacacagaagaacgtggagcacaggaaggaaatggctgggtggtcagagagaggtgagctgtcggagaaacacagttaaactaaaaaataaaatccattttgtgtataaactgacttaaacgcatgcaaagaagtggaaaacatatgccatttgtcaagaaaaatactgctttatagcttttactttacaattaaaggagaaagcagaggccagatataagcccagataataacatttaagtttctcataaaaactcccaaatgtacaaagtccttgccagacaaccaaggcaagnnnnnnnnnnnnnnnnnnnnnnnnnnnnnnnnnnnnnnnnnnnnnnngcagggattaccccccacaggccttatccctgtaagtctattaaatgtaaataatacatactttacaacttctcttagtcggcccttggcagattaaatctttgcaaaattccatatgtgctattgaaaaatgaaataaaacctcagatgtctgaattcttatttcaaatacagttatataattattttaaattacaatatacaatttctgttaaatacaactgttaagggattctgagaacaattataagattataataatatatacaaactaacttctgaaatgacatggttgtttccttcccaccctcctaccctctcaaagagtttttgcatttgctgttcctagttgca

SEQ ID NO: 123215 - DNA, 735 bp, Homo Sapiens
aacagaaaaccggcaattgttatttattttaaataagaagtcataatactattaggaatagagagcaagatataaaatcatatcaacccttttagataaatacaaaggacaaatgaaatacacaaaaaacaatatattttaaaaatccactgttagtttttagaaaaagatttagcagtttccattaagcactacatcccactattccatttttaggaaggacagatgcttgaggccataggttaccagctcttgtttggtctttaaaaatgcaagtaagttgctaacattttcaaataagatttcaacataactctgacaatgccacaggacacacagtttggctccatgtacacgtacctggggacagtggcagtccccaggtctctgccatgccaagatcaggccccaaggccattcagcaccaggcacaatctctgctttcctgacaactggcctgctttgcttatttaccttagtagccttccaggtaactgacactggtgtttgaacgcttaactttcacaaagcttgtttaggcaaataaaatatgttcatactgatgctgggaattttgttactaattttttcccttaagttcaaataaaactaaggagttgataaaagggtattctgaacagaaacgtaaaaccaagagcacagaaacacctgctgtgtttcttctgccagtaacagtgacagagaaccctcaggcccttgctcgtccggctgcag

SEQ ID NO: 123216 - DNA, 890 bp, Homo Sapiens
ggccagggagacctcaagcacccaagctgacctttggaggtccaggagggacccagaatcaggccaggaattgggcaggaacatcagacattgaagggttagatgagactgaacaggtgagaaaactcttagggtccccagacagcattgagatctcacagaggggccccaagggcctgggactccaggagctgagaccccccagggagggaggtacctctagactgagacactcacaaagggaccccagttcagcaagggtcagaggaaggtctggagggagaagagagtaaagggccctgggtgggcaggaggctgaggagggagcctggggagagcaccagggcggggcatcaggccagtgcctggaaggtgtggccaaaggggtctctagctgctgctctgctgctcctgctcatggatgagtttggcgatggggccggtgatgccgcctatcaaggtccagtactcatcgaagctgatgcgcccatcatgattggcatccaggttctggatgagcttatccgcagccttccggttccctgtgtccgacagcatgtggttcagctctttctggagcatctcgcggaagctgctcttgctgatcttgttcttgaccaggctgtacttagacacatatttgtagaagttttccaccaggacaatgactgccttctccagctccgtgtagcagtctgacatctccctgcttcgcctgctggcggggcctaaggcgggggccaagcccagttacagcccagctggagtcggactctggacacagcagcagactgccagagggcacatgcgtcaccctctcaccccaggacaaaagacactttctacggacgcgtgggtcgacgatatcccgggaattccggaccggtacc

SEQ ID NO: 123217 - DNA, 1316 bp, Homo Sapiens
ttcccccagccgagggggttaagggaaaagtggagaggttttttggctgctggtgctggcggctgctggctgcggttgtggttacccactgcccccaaggagcaggggagacttccaagcaccaagctggactttgggaggtcaggaccggacccagaatcaggcagggatttggcaggaacatcagacattggaaggttagatgagactgaacaggtgagaaaactcttagggtccccagacagcattgagatctcacagaggggccccaagggcctgcgactccaggagctgagaccccccagggagggaggtacctctagactgagacactcacaaagggaccccagttcagcaagggtcagaggaaggtctggagggagaagagagtaaagggccctgggtgggcaggaggctgaggagggagcctggggagagcaccagggcggggcatcaggccagtgcctggaaggtgtggccaaaggggtctctagctgctgctctgctgctcctgctcatggatgagtttggcgatggggccggtgatgccgcctatcaaggtccagtactcatcgaagctgatgcgcccatcatgattggcatccaggttctggatgagcttatccgcagccttccggttccctgtgtccgacagcatgtggttcagctctttctggagcatctcgcggaagctgctcttgctgatcttgttcttgaccaggctgtacttagacacatatttgtagaagttttccaccaggacaatgactgccttctccagctccgtgtagcagtctgacatctccctgcttcgcctgctggcggggcctaaggcgggggccaagcccagttacagcccagctggagtcggactctggacacagcagcagactgccagagggcacatgcgtcaccctctcaccccaggacaaaagacactttctaagcggatacagccttctgaataacaggatatgaggggagcaggcggatctggatctactctgtgagtcacggcccatgcccaaaacccccccacatcaaccccaggcaaatcagactcccttcccacccccaagcccaggaatgtgctccagtcaccctcacccggcgggtcctggtgaaaggagatggacaaaacagggtcacagccaccataggggcctgagcaagccacagtcagatttggaaggaaaggctgctcggtcaggccccaccacagcctcctgtcctgccacctgctttccgttggccacttgtggccattcctactccccggacgcgtgggtcgacgatatcccgggaattccggaccg

SEQ ID NO: 123218 - DNA, 1149 bp, Homo Sapiens
  misc_feature (214)..(251): n is a, c, g, or t
tttttttccaaggagtgggaaggttttaatgagcatcccagagggaccaggggatacaaactccaaatccagcctttatatcatcattatttcaagcaacaggaggaggctcagccttgcttagctcattcccagatgaagaggcagctggagggaagtccctgaaagtgcctctctacccagcagaggggctaagggaaagtggagaggtctnnnnnnnnnnnnnnnnnnnnnnnnnnnnnnnnnnnnnnaccactgccaccaagagcagggagacctcaagcaccaagctgacctttggaggtcaggacggacccagaatcaggcaggaatttggcaggaacatcagacattggaaggttagatgagactgaacaggtgagaaaactcttagggtccccagacagcattgagatctcacagaggggccccaagggcctgcgactccaggagctgagaccccccagggagggaggtacctctagactgagacactcacaaagggaccccagttcagcaagggtcagaggaaggtctggagggagaagagagtaaagggccctgggtgggcaggaggctgaggagggagcctggggagagcaccagggcggggcatcaggccagtgcctggaaggtgtggccaaaggggtctctagctgctgctctgctgctcctgctcatggatgagtttggcgatggggccggtgatgccgcctatcaaggtccagtactcatcgaagctgatgcgcccatcatgattggcatccaggttctggatgagcttatccgcagccttccggttccctgtgtccgacagcatgtggttcagctctttctggagcatctcgcggaagctgctcttgctgatcttgttcttgaccaggctgtacttagacacatatttgtagaagttttccaccaggacaatgactgccttctccagctccgtgtagcagtctgacatctccctgcttcgcctgctggcggggcctgctgcctcagtctgcctcctctccagcagggctctggggcctgggctctggcactgccaagcagctccctgcgctcagcccagccgggactcctccccgctgcactcccagaatctgtcccactccctcccagccctgcccgctgagctggctcggt

SEQ ID NO: 123219 - DNA, 444 bp, Homo Sapiens
ttttaattaggataatgcctttattaacgagaatgaaacgttcattcctccttccactccttctcgttggttttctggacacagctcacctgatcctagaaacgttgtcagtctgcttgtggcttccctccttgattgactcacgctgtgtgatgtcttgagaagtatctatccacttcatgtgaatgagcactccaatatcagccaacatcaatcattcttaccttcactatatgcctggcagggccacagtgcacaaaacaaagatcagccttcattcaagttccaggtttttcttcctccctgaatgattactgcaaagggtatatgaagtaagagttccctgttgcacatgtaccatccataagggatactatatcgttttgcattcttccccccattctccacattgtcctatcttaagtccaagcccttttcactctc

SEQ ID NO: 123220 - DNA, 702 bp, Homo Sapiens
  misc_feature (43)..(86): n is a, c, g, or t
  misc_feature (90)..(124): n is a, c, g, or t
  misc_feature (599)..(637): n is a, c, g, or t
aaaagaatgtatagatcatatagggcgctagcgtgctgtttannnnnnnnnnnnnnnnnnnnnnnnnnnnnnnnnnnnnnnnnnnnccgnnnnnnnnnnnnnnnnnnnnnnnnnnnnnnnnnnncagtcgacggtaccggacatatgcccgggaattcggccattacggccgggggaagtctttggatgaaatggaaaaacagcaaagggaacaagttgaaaaaaacatgaaagatgcaaaagacaaattggaaagtgaaatggaagatgcctatcatgaacatcaggcaaatcttttgcgccaagatctgatgagacgacaggaagaattaagacgcatggaagaactccagcaggatatggtagagggagagaagagtacgaaggcccaaacaaaaaaccccgattttagatgtgatatttaggctttcattccagtttgtttagtttttcttgtttagataccaatcttttaaattcttgcattttagtaagaaagctatctttttatggatgttagcagtttattgacctaatatttgtaaatggtctgtttgggcaggtaaaattatgtaatgcagtgtttggaacaggagaannnnnnnnnnnnnnnnnnnnnnnnnnnnnnnnnnnnnnnctgtataatgtccctcaagtttatggcagtgtaccttgtgccactgaatttccaaagtgtaccaa

SEQ ID NO: 123221 - DNA, 1196 bp, Homo Sapiens
aattaggataatgcctttattaacgagaatgaaacgttcattcctccttccactccttctcgttggttttctggacacagctcacctgatcctagaaacgttgtcagtctgcttgtggcttccctccttgattgactcacgctgtgtgatgtcttgagaagtatctatccacttcatgtgaatgagcactccaatatcagccaacatcaatcattcttacctgtatgcagtcggcaatgagaatcttggagcaagcaggaatactacatccgggtcctaatgtccattgccatttgcggtactacgttcctcacagttacgcactgcagaaatgctggctaaatgcagttatgtagcaggccactactttaatagtgcataattgcagtccaagaacaccagaaaacattccgccacaacttagtggcttgcccaagaaaagccaagtatctaaattttaatctgccataatatgccacttaaaaattgcacaggcgtaacattacaatttccccattttttagctgtttatattagtggtacaatacatctataaagattggtgggttttgtagtacttcttatgagtttaatgttctaagcaaagaggattatggtttcactaacatgagccaatgggctatgcttataaaatacctattaaatacactggggtcttaacaatatgcagtttttaaagattaggagaagtataaaaaacaaccagtgttcctcttaaaacaaaattatgagaaagtggagaagaggaaatggggacaagtggtttctttaaatgaaaaaaatggctaaaatacttcaaaaattgctacctcccctttcccaccccaagtttcagatcgacttttaggaaactattaagattatttaaattcacattaggctaaaaactatcatatatacattgaagacttattgaaagtctatttgagtaagcttacaaccctgagtacattgctgttttagtgatgaaagtcaaatgtcatttgaaactaagcaacattatttgctaaacaacgtttagcaactctacagtccacagtaagggtatcaaaagccacaactttcaggagattatccattagcatccttcaccactcttcaaaggtacagtactaccaaaagcttattttagggggtctgtgccagcatcccttataaagaaaggcatgtaatct

SEQ ID NO: 123222 - DNA, 862 bp, Homo Sapiens
aatttggataatgcctttattaacgagaatgaagcgttcattcctccttccactcgttctcgttggttttctggacacagctcacctgatcctgctaattaaagggtatgattactccaaaggatacaagaatcagagttaccaaattctcaaacataacattatataactgtcaagtgaactaataccaaagaaatcttattaatcggcctggcgcagtggctcagttactaaaccttcttactttcaagtattgttttttagactacaccccatctttataaatcacttgaatacatgaaaagacttcatgtttaacatctttaattcaaatgtaaaagttcaatacaagccatttatagggcttgagatttgttggtcttttaaaaacaagaaatggggaaatgcaacaaaatgacctttccacttttcaaaagctttcaagtaaaggatagatcatagggccataaaagatccatttaatcaaacccactttcaccccctaccaattgtcttacacccattccacaatcttaatacatattcctgaagatttacagttcagctttgcttacataaccatttaaaaaatacttagcaccagcgtgcttcctatatgccaaacaaatcatcaaactacttcaatatgcatttcttctttttaaaacaaagggggcaattatttgtagaaagcaatacttagcctccagatgcatttcccagaaatggcatatgccattcaaaggcctagacactctcatgctttcaatgtggaatacgtagcctaatatgcatagaagcatgaatggcaaagttgaagatcaatattataactatttttctatttatttgaagcacagta

SEQ ID NO: 123223 - DNA, 1084 bp, Homo Sapiens
  misc_feature (112)..(112): n is a, c, g, or t
  misc_feature (151)..(151): n is a, c, g, or t
aggccgttcttcctggtccaccagggttacaataatcatcctcccttaatcttcctggtcctaccttgtcctccctcttttccttttccgccttgcacctccattcggccanctggccttgacgttccaaccaccccccttgcctttctcntgggggcccagcaagtggtaggtgacccgtggagccctcgggggctgtggccctctttccccgggcggaggacgacgtggactcgtttgctgacaggtgagatgtcgctgctgctgtggtgttccacggccgcagggctggagggtgacggtgacttgactgggatctgccaggaggggatcttcggggctgatggggatggagggaactgcctccgatttaaaagaagccctttcaaggagttaatttcggacttgagttcgttgatattctgggactccaggatccagttggtggatgtggtggccttggcagcggccagctcgtgggcaagctcctggatcttctgctgctgctgaatcagcagctcctggacggaggcgagggtcgtctgtaactgagtcactgtctgggccacgctgccactcagctcagagagaccggcctccatcctctccagctgctttctgtcctctcggccgcccaggatgagggggagcaggtatttcttgtagagctggtgaaagccaaatgcaatgcctgccatgatgatggccagggcgccgtaatctcgccatcgggagcctgcgggactgtatggctgagatatgaggtgagggggctggacaggaaccacctgtgtggctgggcccaaggacgaaggctcatcggcagcagtgcccgactgctggaaggccatatcaatctcttcatctgtcagccctttcttctttagaaatgctctcctggttgcaagtgggctctggcggacccgggaattctgtagaaacttcactgccgtggcaatcagcggctctcgaggcagcacattttcacttcctggagtagagcttggctggctcggctgctctgcctgctccgaggacgcctcgtgccgaattcaaacccaggcctcgtacctagcctgacttg

SEQ ID NO: 123224 - DNA, 1416 bp, Homo Sapiens
attaggataatgcctttattaacgagaatgaaacgttcattcctccttccactccttctcgttggttttctggacacagctcacctgatcctgctagaaacgttgtcagtctgcttgtggcttccctccttgattgactcacgctgtgtgatgtcttgagaagtatctatccacttcatgtgaatgagcactccaatatcagccaacatcaatcattcttaccatgtcacttcccatcatggaaccactcatggttgctggtggaacgccaggattagcttcataacctatgccaccaccacctcctagaggtggaaatttctggcctcctgaaccatagggatctcccatgttcattgctcctccgccacccattcgcatgtctctttcccgtggatccatgtagcccattcggctgtaactttcctctctttggcgcctcatttgttcttccatctcacgttgacgaatcatcatctcttcctctcttctacgtcgttcctcctcttgcctcaattgcatttctttacgtttctgcatttcttgattgtgaagttcttccatgcgtcttaattcttcctgtcgtctcatcagatcttggcgcaaaagatttgcctgatgttcatgataggcatcttccatttcactttccaatttgtcttttgcatctttcatgtttttttcaacttgttccctttgctgtttttccatttcatccaaagacttccatcgctgagaatattcgtactcaaacgtgccatgctgggcaaaacgaggaggggtttctctctccttttgatacattggattcttctgggcaagtttttcaggaagaccatcttcatcatctagttgttcaagtggttccacaatgactggacgaggagttgtcgtcagtaagaaaacaccttcactgcatcgttcaaatgcctttcttgctgctggcttagaagcaaattcaacaatgcctttccctgtagatcttccacgatcatccactattacaacagccctttcaataggaccaaattggctaaaggcttcttccaacagttcattggaaacataaggtgaaagattacgaacagaaagggcagcagcatgtgtggcaaagcgaactcgaagctgtctacctctcatgggtgtatcatccagttcggctttggcaatttcagccaaagctctagattcaagcttaataaatccgaatcctttgcctttgttgataaaaacttctcctggttctccatatttagcaaatagtcttttgaattcatcctccgtgatatcagcaggtagattcccaacaaacaaccgacatcgctgtgtgtaagttttctctccaggcctcctcaagagagacaaattggctttaaacccctccgagtccgagatcttctcctcgctgcggccgca

SEQ ID NO: 123225 - DNA, 981 bp, Homo Sapiens
  misc_feature (569)..(604): n is a, c, g, or t
  misc_feature (736)..(736): n is a, c, g, or t
aaggtagcgaggcctgggtggcgaattcggcacgaggggcaactggtatttattacaattatatacagtcctatcttccgttctgaggtctatacatgatcacacaaatgaacatgtgtttcctggggggaaggacagagctggctgttggtcaggaaggccctgctgcctggctcctcctccggagtgagcccccatctcgccatgggattagctgaaccattacacggcaagcgggggcatcggaagcgcagcgtggtttcatttgtctgggaggacgacggggcatgagtggggttggggctggggacaggcacctgacgggtccagggccgggcccagggagggagggggatggcagacaccagagggaccgcagctcctcctccactgaggagtcgggaggcagtagggacgctagctctggccatgcgtggtgtcacggtagtcaagacactcagcaaacacaccctgggcaaggcgtctgtccgggagagggggctggggaggggcttgggccccgaggcttcgctgccttcagcctgacttgagatcaaagccaaaggcannnnnnnnnnnnnnnnnnnnnnnnnnnnnnnnnnnnggccaggcgagaggaggccaggtggacagaagtgtgactccccacactgccaccaggccgcagtgcagctgccatgagtggttccatgatgggaagtgacatgcgtactgagcgctttgggcagggaggtgncgggcctgtgggtggacagggtcctagaggaatggggcctggaactccagcaggatatggtagagggagagaagagtacgaaggccccaacaaaaaaccccgattttagatgtgatatttaggctttcattcccggttggttttggttttttgtttagatacccatcttttaaaattcttgcattttaagtaagaaagctatctttttatgggatgttaagcagttttattgaccttaaatattc

SEQ ID NO: 123226 - DNA, 446 bp, Homo Sapiens
ttttttgataattaggataatgcctttattaacgagaatgaaacgttcattcctccttccactccttctcgttggttttctggacacagctcacctgatcctgctagaaacgttgtcagtctgcttgtggcttccctccttgattgactcacgctgtgtgatgtcttgagaagtatctatccacctgttacaaaaaatgttaacttgctcactgcagtctcaacctcccaggatcaagcgatccctcccacctcagcctccaagggagctgggaccacatgcacacaccaccacacctggctatatttttttctgtcgagacatggtctcactattttgcccaggctgggctcaagcaatccttccacttctgcctcccaaagtgctaggaatataggtgtaaagcccccatgcctgaccttctcctacattttcttaagtaaaaa

SEQ ID NO: 123227 - DNA, 1073 bp, Homo Sapiens
  misc_feature (869)..(869): n is a, c, g, or t
ttttttaattaggataatgcctttattaacgagaatgaaacgttcattcctccttccactccttctcgttggttttctggacacagctcacctgatcctgctagaaacgttgtcagtctgcttgtggcttccctccttgattgactcacgctgtgtgatgtcttgagaagtatctatccacttcatgtgaatgagcactccaatatcagccaacatcaatcattcttacctaaagaataataagaaaaagttaatataaaagacaagggtataaaataaaggtttgaaaatgctagtcaacttcaaaatttaaagagtaaaaatccagagataaagattgggggtaagttacagcataaaaaaataggaagaaacttcatggtgggggggaaatctaaaattattcttacataaaataagtagacacctgaattagaatgaaaactgtattttctttaaaatgtaaaagcctgactctcagtttcaccagtctgagcacaagtttgactgcaacccaaaatatactatcccttatgtgaaggtatgtgacaacgttgacctcaccaaatgagttttaacatcagctcttttttcatatgaaagcacataccctgctccccattcaagtatgtcttccattgtcaggcaggctgaccaccttcagcaggagtcctccaagagtgcccaactccccttcccacagtacacaacgctgtagtttttgtcctgcaatcctttgtatttacctcattctttcccatctaagtcctcactgagttttaaagttagggctggaaaagctatgccttactgggacagcaaggaaccaatttttttctgagggagaagacattcaccttcactatatngctgcagggccacagtgcacaaaacaaagatcagccttcattcaagttccaggtttttcttcctccctgaatgattactgcaaagggtatatgaagtaagagttccctgttgcacatgtaccatccataagggatactatatcgttttgcattcttccccccattctccacattgtcctatcttaagtccaagcccttttcact

SEQ ID NO: 123228 - DNA, 1699 bp, Homo Sapiens
  misc_feature (227)..(227): n is a, c, g, or t
  misc_feature (231)..(233): n is a, c, g, or t
  misc_feature (1384)..(1384): n is a, c, g, or t
  misc_feature (1607)..(1609): n is a, c, g, or t
  misc_feature (1614)..(1614): n is a, c, g, or t
  misc_feature (1660)..(1660): n is a, c, g, or t
  misc_feature (1680)..(1680): n is a, c, g, or t
caagaacccgcccggggtttcccgccccggggcggttttttaattggggggggaatcccaaagccctttgttcaatggccccgggtttttccttgggaaaccagttttgggcccaggttcattttacttactgggggcccgggccgccaaacggaatggttttagaaaagctttttgagggggccgaaggcgggccgaccatggtgttttcgggtgggcgggggaangggnnngcattgtaacactcgtttttatataaatattcgcaagtcatgttacagaagaagccccaccagggaaaaaagtcaacgttagggttttgttagattgacccctgccttctaggttgggccccagcctggaggcgcctgctgctttgggaaggctggggttgctgccgtgaggctgccgaagaagctgcctgtgtcgcccacccctgggccgacccccttctttggtgtgtggtacatggtgaccttctctggccacccttagcctggggcagggttttggagaacagggttcagggaagcagggcccaggagtcctgggggcacttggaaatggggtgaaggggactgagccattaagaggtggtggagtctgagatttagaggctgagcctttgggggtgggggcagagtgaacgggaacatgttgggggaaccggggctgtcagccaagtaggaagcttctgcccttccctccagcccaggtccccaggtcctgccccctgttggtcatctcctgctggccccaccttcccagggagaagcctgactgtcccttcccggctcttccccctgcagtcccctttccccacagagaggccagaggctaggaacacagcaccagtctgagggtttaattaaccaggaagggaactgttgggagggcgcacccctgtaaaaatgtacaaaaggtcttggggctatgtgaaaggggtgataaatatgtacatggaaccccccttccttgagcccctcctcccccagccctcggagggcatgaggacttgggtggtaggtgaacgggagggggcactttggcctctggcttagtgagcccttggggaggcaggcccagggcctagaggcccttacaggggcaaaggtgtacctcaggaggccccatggcccccgagatgagccacactcccatgcacacgcccctctcccttctctagaggctgtgacctctgctctcccagtgaccctacactccatgtgatgcttggtcttgtgggggttgaggcttctgttcccaggttccatgacctcagaggtggctggtgaggttatgacctttgccctccagccctggcttaaaacctcagccctaggacctggttaaaggaaggggagatggagctttgccccgaccnccccccgttcccctcacctgtcagcccgagctgggccagggcccctaggtggggaactgggccggggggcgggcacaagcggaggtggtgcccccaaaagggctcccggtggggtcttgctgagaaggtgaggggttcccggggccgcagcaggtggtggtggaggagccaagcggctgtagagcaaggggtgagcaggttccagaccgtagaggcgggcaannncaagntcccgggtccagttagctcctcacccgcctcatagaagcggggtgnttgccaggcgtgggggtgcntccaaccaggttggctcca

SEQ ID NO: 123229 - DNA, 1543 bp, Homo Sapiens
ataattttcagacaattcagcctttattttagaaaataattctgtagcttccactttctttcatgaaactgaggtcaggcaagaaacaaaaatccaccaagtcctctccatcctgccatggcgtcctggcctgtgaggacatggggcgcctgggagcgggcggggaggctgggcagcactgggccagaggcgtcctggtcactgctccacctggtcactgctccacctcatgctgagaggagcctgtgtgtcaaaccccaggggaaaaagggacaggcagatcgaattctgtcttctaccaagccagcaggagcctcctagagcaacagggagggcactgattttcagaaaggaggggtcagggcatagtccctctctgaggtaaggcaagagagaggttgtcccagcacaaggccttcctccctgcacctctctcctgacagctgggcatgggctgaggagaggtcttgcttgcccccttcaactttccatctcagaactataaactgctaggctgcaaggagagaagggctaagtgggggtcagacaggagagaagggcaggaggcagtgagccccgatgacccaccaactccaccaggccctgacaaggaagcccctttggttagtatcattttggccacaaatatgtccccttctcccataactcagtccccactgggggaaggggagcaggtatagaaggagggctcgtgccctggctggaagagccaggtcagggagaaggggtctggtcaagagagcgaacgttgccaaactctctgcacatgctccaggagaaagctcaggacgtggacatttctggccccaacaagcccagtgccccccaccacacagtggtttcctgcttaataccccgcaacataccctagaatagttcccctgatctgactcccttgagaacgggagaataatcctcttgttatcatttgtgcacttaaatgccactcggaaaaatcaaaaagataaatgcacctaagagggaaacacaggcaggccgatgcagcctggggactgtggtcccacctcagctcatgatgtggcaaggaggggcccaggaaggacaggcaggtgctaattccagctaggatcatagccctcccacgtcggtgggggcgccaggtggacacggcggccccggaactggaaggtgacaataccccggtagccagctctcggaacccccgacttaaggtcatccatgacacccagagccttggcgaaagccttgaagctgtccctgcccgtatactgcacccgcacctcccccagctccttccggtcattggtcctcactttctccacctgcagctggggagcaccgtagacgcgggcgaggaaatctcggtcataggcctcccgctgcaggtaagacaggtccagctgggtgaagtgcacaaactgctggttcagcttgataaacttgaggtgctggtcaaagaactgcccgtggctcacacccttgcggccaaaggtcatcgttcttgcctcgtaccgaattcgccacccagtctcgtactgag

SEQ ID NO: 123230 - DNA, 1062 bp, Homo Sapiens
ttttccagaagtaaggtaactttactcagataaaacacagatggtagcagatagaggccacaagctcatgggatgccattccagagggcccctcacccacagaggagcccctgtaggaaggaggcccaggccccatccgcacagcaagtcccggtgaggggctctaacacacccccactccagcctctggtcatggacacagcccatagcgggcacagcatcatgatggaatggactctgcaggccacgcatggctcctgggaacccccaacccctcccttctcctcccagcctttccagctgtcttcccaccaggagggctcggaggtcacagcacggaacgtcttccaagagcccctgcctatctttctgcctggatgtaggcaggagctggggctggtgcaggagccagggcaggaaccagagatggggtcaagcaaggagtcctagtccaagcagggcctagactgcggctaaggctaggctggattctgtgctaagaaacagcatagaaacctgcgggcagaggctccggcccagcctgcggagcacaggatgcagcaggtgatttctgtgcccagcacacaagctctggccttatcacattttcctccactggccctagaatgagcaaagagcttgggcggatagcctgagcctcagccagggagcaggctggcctcgagggagcaggtcagcccaggaagggaggggtctgcccaatgaccaatgctagggctggtgggctcacaagtaagtcttggagggattcggcatgcgagcaccacccgatgatccgcaatccactcaaggtggaacttctagtatacccacgattcgcgcgatgtgtgttgacaccaactgcccatgctcaccgcgcaccgctgtcactatgcatgcgtttcggagcctatcatgagtcacaccacacaagtccagtcaagtggccacagtcagccagactggagtataacgatcagcgggatgagaacctcgtatggtgggatcctccctcggcagtaatggccgaattcccgggcatatgtccggtaccgtcgactg

SEQ ID NO: 123231 - DNA, 999 bp, Homo Sapiens
  misc_feature (96)..(96): n is a, c, g, or t
  misc_feature (647)..(728): n is a, c, g, or t
  misc_feature (849)..(891): n is a, c, g, or t
gggcaccatattggatgtcacctagcacccagcttcactatgtccgctctatttttgaatgtgacgatacattcacacagaacagctagacagatncgattatacgactcatttaggaattgcctcgagccaggattcgcacgaggcgcccagagggcctcagttttccaccatgctttctagtcctttaactcctagaggcaaacttttgggggataagaaagcctgggaggggcctgtgccaaaaccctctctgcctggggactgggcggtgattccgcttctgcctgggctcctgccatggcccccgagaggggctgacactttagctcccggtgcaggtgagaacccgcccggaggaagaaggaaggcgcgggccggggattaggagacggaggcggactcggagccagggaaccaggggtccgggctagagctggagtcgtgagcgcgcgcccgccccgctctgggaggaccgcgagatgcccgtgctgaagcagctgggccccgcgcagcccaagaagcggcctgatcgcggcgccctgtccatctccgcgccgctcggcgacttccggcacacgctgcacgtggggcgcggcggcgacgccttcggggacacctcgttcctgagccgccacggcggcggnnnnnnnnnnnnnnnnnnnnnnnnnnnnnnnnnnnnnnnnnnnnnnnnnnnnnnnnnnnnnnnnnnnnnnnnnnnnnnnnnntcgcctgccgacccgctgctgtccttccacctggatctggggccctccatgctggacgcggtgctgggcgtcatggacgcggcgcgcccggaggcggctgccgccaagcccgacgcggaannnnnnnnnnnnnnnnnnnnnnnnnnnnnnnnnnnnnnnnnnnaacgcggacctcgagctgaacgacgtcatcggcctctaggttccctcattccccgcgcccttcccgcccggcaccccacttctgtatacataaacggccaaggtgtgt

SEQ ID NO: 123232 - DNA, 512 bp, Homo Sapiens
  misc_feature (84)..(84): n is a, c, g, or t
  misc_feature (148)..(148): n is a, c, g, or t
  misc_feature (289)..(365): n is a, c, g, or t
tttttccgggcacacaccttggccgtttatgtatacagaagtggggtgccgggcgggaagggcgcggggaatgagggaacctanaggccgatgacgtcgttcagctcgaggtccgcgttggggcggcagcgggcctgggggggctgcntcccggggcggggttccgcgtcgggcttggcggcagccgcctccgggcgcgccgcgtccatgacgcccagcaccgcgtccagcatggagggccccatatccaggtggaaggacagcaacgggtcggcaggcgagggcgctnnnnnnnnnnnnnnnnnnnnnnnnnnnnnnnnnnnnnnnnnnnnnnnnnnnnnnnnnnnnnnnnnnnnnnnnnnnnngccaccgtggcggctcaggaacgaggtgtccccgaaggcgtagctcgacggccccacgtgcagcgtgtgccggaagtcaccgagcggctcggaaatggacagggcgccgtgtataggccgtttattgggttgccctgggcccagttg

SEQ ID NO: 123233 - DNA, 463 bp, Homo Sapiens
  misc_feature (290)..(381): n is a, c, g, or t
  misc_feature (385)..(385): n is a, c, g, or t
tttttttccgggcacacaccttggccgtttatgtatacagaagtggggtgccgggcgggaagggcgcggggaatgagggaacctagaggccgatgacgtcgttcagctcgaggtccgcgttggggcggcagcgggcctgggggggctgcgtcccggggcggggttccgcgtcgggcttggcggcagccgcctccgggcgcgccgcgtccatgacgcccagcaccgcgtccagcatggagggccccagatccaggtggaaggacagcagcgggtcggcaggcgagggcgcnnnnnnnnnnnnnnnnnnnnnnnnnnnnnnnnnnnnnnnnnnnnnnnnnnnnnnnnnnnnnnnnnnnnnnnnnnnnnnnnnnnnnnnnnnnntcangaacgaggtgtccccgaaggcgtcgccgcccggccccacgtgcagcgtgtgcccgaagtcgccgagcggcgcggagat

SEQ ID NO: 123234 - DNA, 1171 bp, Homo Sapiens
  misc_feature (230)..(230): n is a, c, g, or t
  misc_feature (1062)..(1075): n is a, c, g, or t
  misc_feature (1083)..(1083): n is a, c, g, or t
  misc_feature (1134)..(1134): n is a, c, g, or t
  misc_feature (1158)..(1158): n is a, c, g, or t
gtactgtcaccatggggtgaacatccaccaccaaccagcgagggtcgtggcggaggggagacccataccaaccctctccgggggtgcgatcataatcagtgcagcaggtttccctgtgaacgggctgtgccccacccaatatgtgagtactccctcatagcaccccaggtttcacttatgctccgctcgtatgttgtgaaattgagcgatacaattcacacagaaacagnttgacatgttacgaattaatacgactcactataggaatttggccctcgagcacaagaattcggcacgaggtttttttgtaaggtatgcaaagcttacaaatttattagcagcttgtgcagtaagtttcttttaatgcgtctgtggcaatactagcaacaaattaataaaagcttaatttttatacaaatagttttattacaaatttgaattcttaagaaatacacatttaaagaaattacataaaaggccttagtagtcttagaaatgttttggagacttttagtgaaatgtcatttcaggcctagtggtccgaatctgccctcctgcggtccatgcgatgccctgctgaggtctgtgaacacagctcatgagaaaccacggaaatggcccgaatgtgcttacgtgtgaaaatactgatactgtgattcaacagagctgtttttcaagccaggatgcagaatgaggaatactaatgaaatgacggcctttaaggttgttgcttttgaagtcaagtcattcagtttgtgattagtgtttaaaaccctgaaaatatttaatacagaataaaaacaataagctcaaagtacatgtttcactataatagacaccatattcatgaacctgggtttggttttggcaacacataatttttggtttagaagtgaacaatgaaaacggatgtttcacattcaatatcctagtctttaaaaacctatgttaaaggacagcacagtctttcaaaggaagaaaactatgtaagctttattttaacagtggaagttaaactaaaccttgatctgcctaattgctgacatctatataaattactannnnnnnnnnnnnnttaatttntgactatttttgggacatctttattccacaggaaaattgtgatttctgcanaagcagctgcaaagtacacacatnagcagaagacaga

SEQ ID NO: 123235 - DNA, 2473 bp, Homo Sapiens
  misc_feature (479)..(492): n is a, c, g, or t
  misc_feature (1846)..(1846): n is a, c, g, or t
  misc_feature (1871)..(1871): n is a, c, g, or t
  misc_feature (2025)..(2025): n is a, c, g, or t
taagtctgtgacacactcatgagaaccccggaaatgcccggatgtgcttaccgtgtgaaatactgatactgtgaatcaacgagctgtttttcaagccagatccagaattgaggatactaatgaaatgacggcctttaaggttgttgcttttgaagtcaagtcattcagtttgtgatttatgtgtttaaaaccctgaaaatatttaatacagaataaaaccataagctcaaagtacatgtttcactataatagacaccatattcatgaacctgggtttggttttggcaacacataatttttggtttagaagtgaacaatgaaaacggatgtttcacattcaatatcctagtctttaaaaacctatgttaaaggacagcacagtctttcaaaggaagaaaactatgtaagctttattttaacagtggaagttaaactaaaccttgatctgcctaattgctgacatctatataaattactannnnnnnnnnnnnnttaatttttgactatttttggaccatctttattccacaggaaaattgtgatttctgcaaaagcagctgcaaagtaccacacatagcagaaagacagaaatttatactggggggttggaagatatggctactgagtctgtaattccatttggaggttcaaaaaaccatttttacattgctattatttgtacagaccaagggacctaaattttgaaacagctagacagtgatataaacaaacatttatctctgggggtagaaaattaattataatacaagaatgaaaatgggcaaacagtatggaaggcacccacacctcctagcaccctttggttttctgatggagttctcacttcacacatcagtgcattggattgcagaaaatattgatattttatttcatcaaaagtgccatttggtatgccactattgaaagcttatcgctgtctttttctccttcagcaagtagaggtcaatgaagcagggtgtgttagttacgcaaattcctataaggcactttacggttttcatattggacagtgaggtacacaggatatatttctagggttcgttgctgttaacaaaaagaagaagaagtagcaccatgttgtgacattagctgagtcaggcttcattatgttcttctcatacagacttggcagcggctgacgtgcgtgcgcagctcccctgccttcaaggtggacggcgtaggcttcttgaacatctcgctcctctctatggtggcgagccaaaagctgtaagcgtttgcgtagtaattgcaggtcccacggccgtgacactcgatgaatggcgcacttctaaactcctccaggcaggagccgggggacgccagggcttggccagagccttctgcaccagcgctggtgtgcatcacaaaagagtagccgatccacagcgaggaccacccgctggggcacggtgggatctgaatggtctggctgtgcacggccatcaccatggcaggcgcctcacacacagcacacctactaataaatggtcttatgttttcccccgtgatgggtgccattgacatgggcatgggctcaggggtggacagccagtacgagtagtcatttcgtgatgcaaagttgcacacgttgttaatattgcagaacaggaagggcattgtgctgaacttgcgcaggcagctgccagccgtgcccaagtcctggccatgggcccgttcattgccttgcacgtagagcaaagagtacccgtggtaaagaattttggtcccagaaggacactgtgggtcatctattgtttgactatgcctggtcacaaggaagccgtgatcaacagatggggtgcctgggggccccatggatcctggncaacccatcggggcctggtggaccntggaaatccttcttggaccagtaggcccggcaggtcccatctctcctttctggccaggggcaccgtcaaacccaggaatacctggaggtccaggtatacccaccaatcctgtaacacctttgcttgcctttcggggctggcagtccctgaagancagcctttcagccctggggggccctcaggagccagggagcccgggctcccctttgatgatgtcgtaaggacctggggggccaggaggacccgggagacctttagctcccgggacgccttgatcgccttgatcacctttaattccctggaggccaggaagaccttttggaccttgaaatcctggaactcctggaggccccatatcacccttagagcctgtgattcctggagagccaccaataccaggcatgccctggaatccagggtctcccttgggccctgggacaccgggtgctcctggccagcctggatttcctttgtcacctttaactccatcaatcccaggaagccctggaggccccatgggtcccggaagtcctggcaggccaggctggccctgaggtccgcggtctcctttgggcccctccgatcccgagaattccggaccc

SEQ ID NO: 123236 - DNA, 1117 bp, Homo Sapiens
  misc_feature (935)..(936): n is a, c, g, or t
agaactgactgacatttatatcaatctcttaaaaggatcacaaagaaatgctggtagtctactggcagagcctggtcgcctatgtgtacattgtcttcattcaaagaaagggcaaactaatatttagacaaatgctcagttttattgatttaattttgacactagggaatctcacagcagaagtacaaatcatatgtacaagtatttatatcaatgaaaatttccattggtgattttttggcagaatattggtcttgactctgtggaataaatgacgacgtaaacgtagctgcacaggggtgttcctgtataatgcttgaatcaattgtgtgtgaaagcatcatgcaaatggctaattaaattgggtgatgactgaaaggttataaatccttcattccagctccacgagcagatccccttctccaactgtgtctccagcttgacagtgcacagatttcaccgtgccagttttcccagctgtcatactattctgcattttcatggcttcaatcacacaaatttcttgaccttctgctaccgcgtctccaggcttgacagagacggccaccaccactccgggcatcggggaacgcagaacactgcttgtgtcctcagtcactttttccagcataaatttgttcaattctgcggcaagtctggttaagatattcaccttgtacactgtaccaagaaactgaatgctcatgtttccacctgcttctcgagaaagacactggacagtcctctgagtgccatcaacgctgacagacaataagggcgaagccaggttccacgtgctggtcacatttagtttcgacccatcaacttccaccgagaacactgacccattgtttgatgctactacggtatgaactttatcatgcaattttactgagagctcccagttggctatgtctggtttaatacaggcatcnntgattttctgaaatgtgtgctcttactggatgcacaacatgatgatgcatgccatactgggtctctcactctggtacagttccttgagcatcagaaacatcgagagatttatgcgagttcctttacaacgtgatgactgtgcgattctggctcaggcaatcctaaggatctataatcgtac

SEQ ID NO: 123237 - DNA, 1034 bp, Homo Sapiens
ggggctcctgtcttgtctcagcggctgccaacagatcatgagccatcagctcctctggggccagctataggacaacagaactctcaccaaaggaccagacacagtgagcaccatgggacagtgtcggtcagccaacgcagaggatgctcaggaattcagtgatgtggagagggccattgagaccctcatcaagaactttcaccagtactccgtggagggtgggaaggagacgctgaccccttctgagctacgggacctggtcacccagcagctgccccatctcatgccgagcaactgtggcctggaagagaaaattgccaacctgggcagctgcaatgactctaaactggagttcaggagtttctgggagctgattggagaagcggccaagagtgtgaagctggagaggcctgtccgggggcactgagaactccctctggaattcttggggggtgttggggagagactgtgggcctggagataaaacttgtctcctctaccaccaccctgtaccctagcctgcacctgtcctcatctctgcaaagttcagcttccttccccaggtctctgtgcactctgtcttggatgctctggggagctcatgggtggaggagtctccaccagagggaggctcaggggactggttgggccagggatgaatatttgagggataaaaattgtgtaagagccaaagaattggtagtagggggagaacagagaggagctgggctatgggaaatgatttgaataatggagctgggaatatggctggatatctggtactaaaaaagggtctttaagaacctacttcctaatctcttccccaatccaaaccatagctgtctgtccagtgctctcttcctgcctccagctctgccccaggctcctcctagactctgtccctgggctagggcaggggaggagggagagcagggttgggggagaggctgaggagagtgtgacatgtggggagaggaccagctgggtgcttgggcattgacagaatgatggttgttttgtatcatttgattaat

SEQ ID NO: 123238 - DNA, 1839 bp, Homo Sapiens
cggtgacaggaccgacggcagacacacggacgttcagggccagcagcatccgcacctttatccgcactgtaggctgggctgggcagagcgcgcctggccccggggacaccactgtatcactataaaacccagaggaaacaaggaacaagtgcaagtccggggagagggaccactgtcacgcagagaggtcactgttatcaaaacgctcctggtcgtacacttcagccaccaccttgcggccagcaaaccagcggccattgagggcctggatggccttatgagtctcagaggctatggaaaactccacaaagatcttgacaatgatttctgcatcctcctcctcgccttgtttctcttggtagatgatgacgcggttcacggccccgaacttgccacactcctctgtcacctccccttccaggtcatcatcgatgtccttggggtccaccatgttgcgcagaaccatcactgtagactcctgcttgcggagcagcttctgcatcaccatgtgtcgggcgctactgcccgagatgctcatgtgctcctgctcgctcagcatctctggccgctctgactcgggaaacagctcctcttcttccttctccttcttgggctccaggagacccagcgttggagggctggccaggatggggttcaccactcccaccgaggggatggtgaccgggataggaggacgggctggggtcacacctgtgatgactccaggtgcctgggcagccatgacagcctggggcaaagtgcccaggggctgggccagggtcagtgctggggacaccagtccaggtgtgcccagggtacccagcaccgctgctccggccactgcttcctgagctgtgatcttggcagtggctgcagcagctgccacagcagcggcaggtgggaggcctccaggcgtggctggtgtgagtaggggcatgggcggtgtgacagccttgcccacccgcaagtactggccacccaggtcaaagaggttcatggaagacacagcatcttgggacgactgggccttctcgtactcaatgaagccgtagcccttgtgcttgccagttgtggggtcccgggccagtgtgcaggacttgatcttgccaaaggcctcaaacacgctcttgatgtcatcgtctgagaggtcctggtgcacagaggccacgtagatgcggttgaaggcccgtgcctcctcagccaactggtctatgatgggctgggcctgccctatgttgctgggtctgcccaccttgatgttcctgccccccagcatcaccgagttcatctgctccaaggccagctgtgcagcttcggggacctcatactccacgaaggcaaagcccttgtgcttcatggtgacggagtcccaggacatgtcgatgctcttgatggggccaaagggggcaaaggcctggcggatggtgtcctcccccagctcatagtagatagagcccacgtagacgcggcacatgatggccagcgcccgctgccgctgagccgccatctgcaggttggtgagctgctgctgctggtgcgcgatggtctgcttcaccagcacactcttgatgctctgctccatggcgtacttcttggccttctgaagggcctcctgctgctcgggcgtcaggggaggcagccccagcttggcggctgtgctctgcccgttctccatcttgatggagtctgtgccgagagctatggtcgccgtcgccatcttgcgtccgtcgcggcctccgcgcgcgcctcccactcttgctccttccgctgtctcgcgcgatctgggagccggtgcacggaccctcgtgccgattaacacccggcctcgctacctagcct

SEQ ID NO: 123239 - DNA, 955 bp, Homo Sapiens
ccgaattcccgggatcgggcgagcctggcggggttgcgttcctgtccgctagcaggtcaatggccagcaaggaggggggtccgagccggcggcggcggcggcagtggtggcagcgggagacaaatggaaacctccacagggcacagactccatcaagatggagaacgggcagagcacagccgccaagctggggctgcctcccctgacgcccgagcagcaggaggcccttcagaaggccaagaagtacgccatggagcagagcatcaagagtgtgctggtgaagcagaccatcgcgcaccagcagcagcagctcaccaacctgcagatggcagcagtgacaatgggctttggagatcctctctcacctttgcaatcgatggcggctcagcggcagcgggcgctggccatcatgtgccgcgtctacgtgggctctatctactatgagctgggggaggacaccatccgccaggcctttgccccctttggccccatcaagagcatcgacatgtcctgggactccgtcaccatgaagcacaagggctttgccttcgtggagtatgaggtccccgaagctgcacagctggccttggagcagatgaactcggtgatgctggggggcaggaacatcaaggtgggcagacccagcaacatagggcaggcccagcccatcatagaccagttggctgaggaggcacgggccttcaaccgcatctacgtggcctctgtgcaccaggacctctcagacgatgacatcaagagcgtgtttgaggcctttggcaagatcaagtcctgcacactggcccgggaccccacaactggcaagcacaagggctacggcttcattgagtacgagaaggcccagtcgtcccaagaatgctgtgtcttccatgaacctctttgacttgggtgggcagtacttgcgggtgggcaaggctgtcacaccgaccatgcccta

SEQ ID NO: 123240 - DNA, 669 bp, Homo Sapiens
gcctgccctatgttgctggtctgcccaccttgatgttcctgccccccagcatcaccgagttcatctgctccaaggccagctgtgcagcttcggggacctcatactccacgaaggcaaagcccttgtgcttcatggtgacggagtcccaggacatgtcgatgctcttgatggggccaaagggggcaaaggcctggcggatggtgtcctcccccagctcatagtagatagagcccacgtagacgcggcacatgatggccagcgcccgctgccgctgagccgccatcgattgcaaaggtgagagaggatctccaaagcccattgtcactgctgccatctgcaggttggtgagctgctgctgctggtgcgcgatggtctgcttcaccagcacactcttgatgctctgctccatggcgtacttcttggccttctgaagggcctcctgctgctcgggcgtcaggggaggcagccccagcttggcggctgtgctctgcccgttctccatcttgatggagtctgtgccctgtggaggtttccatttgtctcccgctgccaccactgccgccgccgccgccggctcggacccccctccttgctggccattgacctggagagctatggtcgccgtcgcccctcgtgccgaattcaacacccggcctcgtacctagccta

SEQ ID NO: 123241 - DNA, 1154 bp, Homo Sapiens
tcatctctatgcagtatgtccacgtgtgtcgattatgagcactctacttggtctcgtgcaccgttctttgtggacatgtctgtgtgttctggcgtgtataatacgtatacaacgcgcaggggggtccccaccaggcgttcttttgattaaggactggcgggttacaagcttgcccacccgcatgtcgtgcaccgcaggtcaaagagggttatggaagacacacatctgggacgactgggccttttcgactcgcatggacccgtagcctgtgtgcttcccagatgtggggtcccgcgccaagtgtccaggacttgaattcttgcccaaggccttcaaacacgctcttgatgtcatccgtctgagaggtcctggtgcacagaggccacgtagatgcggttgaaggcccgtgcctcctcagccaactggtctatgatgggctgggcctgccctatgttgctgggtctgcccaccttgatgttcctgccccccagcatcaccgagttcatctgctccaaggccagctgtgcagcttcggggacctcatactccacgaaggcaaagcccttgtgcttcatggtgacggagtcccaggacatgtcgatgctcttgatggggccaaagggggcaaaggcctggcggatggtgtcctcccccagctcatagtagatagagcccacgtagacgcggcacatgatggccagcgcccgctgccgctgagccgccatcgattgcaaaggtgagagaggatctccaaagcccattgtcactgctgccatctgcaggttggtgagctgctgctgctggtgcgcgatggtctgcttcaccagcacactcttgatgctctgctccatggcgtacttcttggccttctgaagggcctcctgctgctcgggcgtcaggggaggcagccccagcttggcggctgtgctctgcccgttctccatcttgatggagtctgtgccctgtggaggtttccatttgtctcccgctgccaccactgccgccgccgccgccggctcggacccccctccttgctggccattgacctggagagctatggtcgccgtcgccatcttgcgtccgtcgcggccatccgcgcgcgcctccccctcgtgccgaattaacacccggcctcgtacctagctctatagttt

SEQ ID NO: 123242 - DNA, 1169 bp, Homo Sapiens
cttcctcgttagttgtgtgtcttgagtagctgtcgtactctggctatgtagggctgtgtgttgtagtctccccctccgtgtgtgtgtgcaagtactcgtgtgatcactagttgcttccggctcggccatcaccatcgtgggcaaataccgcggggttggcacgatctcagtggtggacccaccagcccggggtgcgcggggttcacccactagtgttgcccggcccattccttccttgaacttgatatcgtcgccagggccgcacacaggcgcacacagcacgccaagtgggaccctcccgagcgtgcctggttcgagataagggcccatggccgtggtgaacacccttgccccagccgccagtatggccccacccaggtcaaagagttcatggaaagacacagcatcttgggacgactgggccttctcgtactcaatgaagccgtagcccttgtgcttgccagttgtgggggtcccgggccagtgtgcaggacttgatcttgccaaaggcctcaaacacgctcttgatgtcatcgtctgagaggtcctggtgcacagaggccacgtagatgcggttgaaggcccgtgcctcctcagccaactggtctatgatgggctgggcctgccctatgttgctgggtctgcccaccttgatgttcctgccccccagcatcaccgagttcatctgctccaaggccagctgtgcagcttcggggacctcatactccacgaaggcaaagcccttgtgcttcatggtgacggagtcccaggacatgtcgatgctcttgatggggccaaagggggcaaaggcctggcggatggtgtcctcccccagctcatagtagatagagcccacgtagacgcggcacatgatggccagcgcccgctgccgctgagccgccatcgattgcaaaggtgagagaggatctccaaagcccattgtcactgctgccatctgcaggttggtgagctgctgctgctggtgcgcgatggtctgcttcaccagcacactcttgatgctctgctccatggcgtacttcttggccttctgaagggcctcctgctgctcgggcgtcaggggaggcagccccagcttggcggctgtgctctgcccgttctccatcttgatggagtctgtgccgacctcgtccgatttacccccaacgggt

SEQ ID NO: 123243 - DNA, 924 bp, Homo Sapiens
ccacccagtcaaagaggttcatggaagacacagcattcttgggacgactgggccttctcgtactcaatgaagccgtagcccttgtgcttgccagttgtggggttcccgggccagtgtgcaggacttgatcttgccaaaggcctcaaacacgctcttgatgtcatcgtctgagaggtcctggtgcacagaggccacgtagatgcggttgaaggcccgtgcctcctcagccaactggtctatgatgggctgggcctgccctatgttgctgggtctgcccaccttgatgttcctgccccccagcatcaccgagttcatctgctccaaggccagctgtgcagcttcggggacctcatactccacgaaggcaaagcccttgtgcttcatggtgacggagtcccaggacatgtcgatgctcttgatggggccaaagggggcaaaggcctggcggatggtgtcctcccccagctcatagtagatagagcccacgtagacgcggcacatgatggccagcgcccgctgccgctgagccgccatctgcaggttggtgagctgctgctgctggtgcgcgatggtctgcttcaccagcacactcttgatgctctgctccatggcgtacttcttggccttctgaagggcctcctgctgctcgggcgtcaggggaggcagccccagcttggcggctgtgctctgcccgttctccatcttgatggagtctgtgccctgtggaggtttccatttgtctcccgctgccaccactgccgccgccgccgccggctcggacccccctccttgctggccattgacctggagagctatggtcgccgtcgccatcttgcgtccgtcgcggcctccgcgcgcgcctcccaccctcgtgccgaattcagccacccaggcctcgctaccttagaccgtatagtactgccg

SEQ ID NO: 123244 - DNA, 1543 bp, Homo Sapiens
cccttcccaagggcggggggttgggtgtgaagtaaggggggcattgggccggttgggaacaggcctttgccccaacccgccaaggtttctggccaacccagggtccaaagaggttccatggaagacccacagcatcttggggacgactggggcctcctcgtactcaatgaagcccgtagccctttgtgcttgcccagttgtggggtcccggggccagtgtgcaggacttgatcttgccaaaggcctcaaacacgctcttgatgtcatcgtctgagaggtcctggtgcacagaggccacgtagatgcggttgaaggcccgtgcctcctcagccaactggtctatgatgggctgggcctgccctatgttgctgggtctgcccaccttgatgttcctgccccccagcatcaccgagttcatctgctccaaggccagctgtgcagcttcggggacctcatactccacgaaggcaaagcccttgtgcttcatggtgacggagtcccaggacatgtcgatgctcttgatggggccaaagggggcaaaggcctggcggatggtgtcctcccccagctcatagtagatagagcccacgtagacgcggcacatgatggccagcgcccgctgccgctgagccgccatcgattgcaaaggtgagagaggatctccaaagcccattgtcactgctgccatctgcaggttggtgagctgctgctgctggtgcgcgatggtctgcttcaccagcacactcttgatgctctgctccatggcgtacttcttggccttctgaagggcctcctgctgctcgggcgtcaggggaggcagccccagcttggcggctgtgctctgcccgttctccatcttgatggagtctgtgccctgtggaggtttccatttgtctcccgctgccaccactgccgccgccgccgccggctcggacccccctccttgctggccattgacctggagagctatggtcgccgtcgccatcttgcgtccgtcgcggcctccgcgcgcgcctcccactcttgctccttccgctgtctcgcgcgatctgggtgccggtgcacggaactctcgcgaggaaggaggtaagaacgcgcttccggggcggggaggaacggtaaacgcccccgggaggggcgacggaaggggcgtgctcttggccgggcgaggggcgtggcccgcgcacctcgggcgtctaggggcgtgcgccgcgggactcgagtcgggcgtatctctccgcgtggccgacgcgggcgtgcgtagtacccttcgccgcccgtcgcccttgcggccactgctacgcttctcttctctgccttttttggagaaaacgctgtcgcgtgcgtcgtccagaggctctcccccaggaggcaggcgaaagagcggggccctcctgggctggaggagtctcgggtgatgaaaggcccgcgtgtttcaggctgacgtcgtgagatgcgtcgtccccgcgtcgcgacattcctgggaccgggaggccccgttcaattggcagctttttctccttccagggaaccgatgacccag

SEQ ID NO: 123245 - DNA, 1978 bp, Homo Sapiens
  misc_feature (620)..(671): n is a, c, g, or t
  misc_feature (1251)..(1261): n is a, c, g, or t
gacagttaccttacagcttgcgtatttattgaacaaatactactaaaatagctaaaatacattgggtacttgtcatgagtgcatcagtaaagatcacactgttacaaaagcctgcattttcagcagtacacaactgcaactctacataaatgccacagatgcagaatactgttttcttgctctatttacacagctgatatacctattctaacgaaggagggagaggagtaatgcacaagaaactcaggccaatgggggagcaagaagaaaacgaagaagtgcagtgcatgcgtcatcggtgtttaacagtcagaagcgaaacagttcagaacaaggcctgccctgtcaaaagaagagctaaagacagttatataaaaattaaggtgggctttcagactggctaacacaacaacattccatgagtagatggtaatttatttttgtttatccatttcgttgggagcaaggacaaaaatgtaaatctacaccttgcttatcaaaattgccgaaaaaagaatgctctgccttttaaaaaagtatcatgattttgtagaccttgttttccaatttaatatttggaaaaggtgtcattttcatattcctactcagatgccagtgtnnnnnnnnnnnnnnnnnnnnnnnnnnnnnnnnnnnnnnnnnnnnnnnnnnnncgacaaatatcctttcaaacagaaagaacccaaagaaagagacacctcaaaatgcctgtaaaattattgcttttctttctctaagtaagtcaggcaggcgaggctacggaaaggaagagatttggtaagtaaattacagttttgtgattgctcccgctaccgtgactgcatgtccgtgagcgccagccaacgagacaatggtctctcacactctggtagcattcgctcaacctacaacactgaggaagaaagccacactgaagacacaaggaaaacaagtcaatccagtctagagaacaacattcagggaaacagagtaccaacaccttcttagaacatggaaataaaaaataactccatcagagctacctcgccaaggagcatgttgaaagtccaaaatagcaccattcatcagtgtctcaggtcctgtggcagcatctcggtcacttaccacaaggaaacaatgagtttcaaactacttctatacatcaaaagagtacatggataaaatatagagatatacagacaattgatgaacataaactactaggtttgttacatctaaatgaaaaaaaaggtnnnnnnnnnnnactctcagcctctgcaagaagcagtcgggagctgtgtgagtgaaaaggcaggagtggaccggttgtgtgagcgcggtgggagtttgagttgtggaagacattgttgtagcgaaccaggcctgaaggcccacctgtaagggttgtaaacgtggattcacagtgtgaaattctgagcgttttcacttgagtcagaatgattaaaaactggtttgatgacacctatttgtccactgtaaattctctaaagcaaggctcagagtcccatagtttcttcttatacttgatgatttacacagaaaaaaatcccatatatgataccatgacctcatcaatacccatacaccatatgtaatacaaatggaggtgttacgattaaaaaaagtggaggtaactgattcttggggagcggagttcactgctgcccagtggagtcagggaggcagcgtttgtctcatcgttcttcttgcggttcacttcctttgggacaggaagtcttcccttaggaagccttccctccatgtccttgtttggaaatggttcttgactgacccagacaaagagttctgggtaataaaccattttgagaatcttagtcttgggcttctattctccctctcttcagtccagggagaccaacagacaaaagccccgctccctgttcactctctctcctctctacacctgcagcagagggcatctgaggaaaagaggacggcg

SEQ ID NO: 123246 - DNA, 513 bp, Homo Sapiens
ttttttataattatcaactgacactcctgtgagtatctatcaatcacccagtctaaggttgggccctatctgatactagaaactgtcccaagaaacctgacactggggaatgctgcctcacacatggctggcaccaccgtaacagaagcacttcattctactgaagcaaaggtggcccagtgtttaattacttcatttcctcacagacctaatatttacattcaggtgaactgtgtttaatatgtaaactctgttttgcaaaacagcaagagttcaagggtataatgtgggctgggcaggaaaagcaaaattttaaaaaatggtttcagaagcatgactaatttttcttttatgtgtgtctgtctgtgtgtgggtctgcctgctttgcagggaagacttcctgtcccaaaggaagtgaaccgcaagaagaacgatgggacaaacgctgcctccctgactccactgggcagcagtgaactccgctccccaagaatcagttacctccactttttt

SEQ ID NO: 123247 - DNA, 570 bp, Homo Sapiens
ttaaacaaatagcttaagtattttatttgtttgcaactaagcttgttaacactatataatgaaaatgtacaaagaataatgttgcagtttttggttagatttaagtcaaagacattcattaataaggaatcttcgaatgtgaatattccagaaatttctctaagccatctgatcacaacaactgtctctgaatattaccttactttggaaggtattggcatacatttgaattaaactcagaatttttcaaaataagccctaattaaaaaaactattctatattcaaagtaaaacaatattaatagaactttcctttccagaaacaatgaaggaaacaaggcattttgtaaaatgtggtcctgaacaagtcacagtaaaaaataaatgtatacttaacttccacctcctcaaaacagaggctactttctgttcctcagccttggaaacaaggtgaagaacagcctatatgcgacttcgggcagggggttgccaaaacaaagctgaagcagttgaccatggacacctcaaaagaatttgggagaacccgaccaaaggatccaaattctatgg

SEQ ID NO: 123248 - DNA, 1921 bp, Homo Sapiens
  misc_feature (190)..(203): n is a, c, g, or t
  misc_feature (1808)..(1842): n is a, c, g, or t
tttttaatatccccaaagcagcatttatttacccattgaattccaaaacatttattttagaagtctggcatttcataatcacccatcttgattgacatgggctgacacacatggcgctgtcaggatacacaaggacaatagccaaagagttacaaaaaataaatccatgattcttaaacaattgcaaccnnnnnnnnnnnnnngttacaagtatcaaaactttcagatgcattgcattgaaaagaaggtttgtgcacgtcataatttaaagaggcaaaaccaaggagctactgaaacctcacgttaaacagtttattataaagctgatggaaaggagcaagttgtctctctgtatcagcttcccttaacagttttccattaattgaagaaagaggtgggaggggtgaattcatttttgcatgcacaagatgtactgcttaacgaaacactatcagcttgttttaaatggatcttttaaatatcaactgtagcctggttggctaattctttctaatcttccccattactttcgcctagatttcccatagatcaacaggcatagtaaaatgcctcatcagaacacacttctccacacaattcaaaaagggagctcctgtgggctcaaagcaaccatcagtccagcaatgcccatgatttatctgaaactgcttcccaagagacaggagtgcagatctgagtagctgtgctgccaatacagataggtttagcactagatatttagtgattgtggcaaggaagaatcggtgatgatgggggtggtgggtgaaggaagggccaggggacctgaaggatcttcagttgccttctcctgcttcttcatcctggtggtcggtcgtcccagaggttgaggttgtctcgcagcaactgcatgatcagcgtggagtccttataggaatcctcgtttagtgtgtccagctcagctatggcatcatcgaaggcttgtttggctaagaggcaggcttgctcaggtgcattctggatctcatagtagaacacggagaagttgaggcccaggcccacccggatgggatgcgtgggttgcatctgctctttgctgatttcaaaggcttccttgtaggcagcttcagaagcttcgaccacactgtttttcttctccccagaagcgacctctgctaagtagcggtagtaatcacccttcattttcaggtaaaacaccttgctctcatactggaaatcattgcagttcttgatcaggaacttgtcaagcagagacaggacatcattgcaaactgtctccagctccttctcaatcttctcccggtaagctttaactttctccaatttcttttcgtttccatcagccatggttttctgctcaatgctgctaatgaccctccaggaagatcgcctggcaccaaccacattcttgtaggccacagagaggagatttcgatcttcattggagagaggttcattcagctctgtcaccgccttcatagcggaggccatgtcgtcgtagcgctccgcctgctcggccagccgcgcccgctgcagcagctgctcccggtcccccatgtcgctcgcggctcggcctcgcctcgcgcctcacaccgctggctcgctagccctcccgccggtcagtccgctccccggtcgctgcggaggccgccgccgcgcacgcgcactggctcgccggccggccggaggctgcaggctgcaggctgcaggcagcgccgccgctcgcgccctctcgctggctcgccccgcgcgctgtccccggccgtaatggccgaattcccgggcatatgtccggtaccgtcgactgnnnnnnnnnnnnnnnnnnnnnnnnnnnnnnnnnnncggccgcttcctcgctcacagactcgctgcgctcgtcgttcggctatgaagaggagcgccctatagtgattatcattct

SEQ ID NO: 123249 - DNA, 697 bp, Homo Sapiens
ttttttttctgtacatgaattaaatatattatctgtctctgcactgagtcacacgacgttcacagtaccgtggggaggagtggagggtgggggcctgaggtgggcagggcagggggcctgggtagaaaggcgaggctggcctccccttggcctgtgccattcaggatcagcccagtgttgaggagacctgggggatacagaggggagccttcttcaggggccccggccacccaggcttccagcccccggaggcaagcctctcagcatcagagcctgctcctgttccacgttcctctccctcagatggtggcatctacacctctccctgtcgtggccgccctctggggtggcaggggctgggggaagctggtattgggatcaggtggacagagccacaagggccgggaaggaaggatggggaggctgtgcgagccttcgggagctgaggtcagcccggcaccagtgtcagggtgactctgcatatctgggtgccgtccccaggaccctgaccaggcctggctaatcagagccctgggatgataaggtaagcaggagccacctcgggaaggggtggacaggcaggagccggtcacagctccaagggcagtgagtacggtaccacctgccaatttaaggcaactccattcagactgatgagctgggcggggactggctcagggtgtcggggaatgagggt

SEQ ID NO: 123250 - DNA, 1202 bp, Homo Sapiens
gagaattcagagaatggcactttatttttaagacttgatttttttgccatgattatctaccaattcttccatgatggtgtcatcctcttcaacagtgaccaggaccttcttgcccactagattaaagatgtcttcaggaggatagcctttgggctcacccaccttcacggtgagcatgtccattgttagaatggtgccttccggaattttcactttggccaccacagacttgcccagcttctcattgcaggccatctcacagggcagcagctgcttggttggggagcccagggcacgctccacaagacgcactgaccgcaccagctcggccagttctccaggctccagcgaggccgagtggtcactccccttccaggtcttgtccaaagttatgtgacgttccaacaccttggcccccagagccactgcggccacagatatcgctatgcctgtttcatgcccagaataccctatgggaatgtcaggaaagagcttctgatattccgagatgacccgcaggttgacgtcctcaggctggagcgggtatgcgctggtacactgcaagaagcagaagttggggttgaggggcttcacgatctgataaacttgcttcatggtgtccattgactgcatcccactggagatcaccattgggcgaccttttttggctgtcttttccagataaggaaaattattagtgtctccagatccaactttgaaaaatggaacattcagttcatgcaggaattcaactgccatctcatccatgccagaggcagtgaagaagatcccaacctcctcggcgtacctctgcagctccctgtactggtcatggctgaactccagatgtcgtttgtgctccccgtacgtcttcccccaggaatgcttcgaggtgtatggcctctccaaggctttccgattaaacttgaattctagctcactcttctggaacttggcacaatcagccccacactccttggccatgcggatcatgcgcttggctacgtccaggtcgccctggtggttctggccgatctcggcaatgatgaagcacgggtgttgcccgcccacccagcgcccgggacacagctccagctccagcggcattgcagcggctcggggtccaacgcctcactaccagtctgggtccggccgccgccgccgccgcctctactctgttctgtgagcaacgctgcgagccc

SEQ ID NO: 123251 - DNA, 634 bp, Homo Sapiens
  misc_feature (489)..(581): n is a, c, g, or t
gtcttgtccatctggagatcttatatttatttgaaaaccaagttctgtgaaagagcacactcaacagtcatatatcttctcttcaaccaaagacttggagacagggttcttcaggtcagtgcagaggcaacgatacatgcattgaatagcaggtctcggcatgaatttcctcataagcattcccaatatgagcctggacaatcttcttcagataagcaagtgagatcctctggcccttaatcatcaatatactcaaatggttctgggggttctggctcttgttcctcctcctcgatttttgggccatgtgctgccacaggttccaccagctcctcaatgtcttcactggtatccttcagaatgatgatgcctccaatagagagtggtttgaaaggctggtatctacaggtctccggcatggttaggaccttaagctgggcaggcataactcgggctgggttatccaataactggaagtttggctcaggnnnnnnnnnnnnnnnnnnnnnnnnnnnnnnnnnnnnnnnnnnnnnnnnnnnnnnnnnnnnnnnnnnnnnnnnnnnnnnnnnnnnnnnnnnnnnagccttggcagttatagataatacagcagtagaaccttttccttttctttttc

SEQ ID NO: 123252 - DNA, 1411 bp, Homo Sapiens
  misc_feature (23)..(23): n is a, c, g, or t
  misc_feature (1183)..(1183): n is a, c, g, or t
tatgaattacacccaaactggcntgtagcagtaaattttgcccagttagtggctctggctaaccattccaaattatctctaagaaactggtcactggttgtcccacagtgcataaaagagtttgctataacggttgcagtatgacatacagaattccgtactgcatcctttgtgttttttagaatcatgaggtctgtattattgtttcgtattaagaactgcagatgtaactcaatagccatttcaccacttaaaattttaatcattttcaaagtctggtccttaggctctggactggcttctggtgtctttcctacaaatgcactgcttgtcttttcttctgtttccatcgagtcactgtctttctctgatcccggaacagtacccgtattagtggatccaggcacagaagcaataggggtgccaacagttcgaagattctggattacagatgacaaaaactgctggctagcactttcatacaaatcaaaacaaatctgatatgccatcaggaggttgtcttcctttaccagtttctctaagatatcactcacagcctgaggatcatctaagaaaattaagcactgacaacattgatgaaatcaggtttctccaagttcatgtagattttaactagaactcttagtactttattccgaaactgtttattctgcattaaagacatgcagagcttaaggctataagctaacattcctgggacatcattcgactccagtatggtcttttcaaagacgtccagtcttcgtgtctccagagcaatgccaatagcctgtttatacttgtgatcatctagacatcgctggaacattttatttacgatgccttccaatctctggtcaattggttttttttctccttcaggcaaatctgcattttccacacattgtttggtgtagtgatcaatgcattttgctataatagtttccacatattcagagttatcattgacattgaagaggtcccctgctccaagagcataattcagagactcctcaaaagcccccaggtgataaaatactttagatgccactaaggctgcaaactgccgactccggaaaccttcatcttcgtataaaacctctattttgtctacggactcggaaatttctgccccagaagtcatttaacaactgccattcaaatttgtgtagtgcaaattccnttaagctgtggttcatcttcatccagaagagaaataattccagcggccgaggtgatcatggctgcgcccctcactcgcccgtcggctcgctcgccgttccagctgcgcagtgtatctgtcagctcaggggccgctcagttcaccgcgcctccttgctccccgggtgcgctgctcagtcagtcgcctcctcagcctcgtcggaattcgccacccaggcctcgctacctt

SEQ ID NO: 123253 - DNA, 1241 bp, Homo Sapiens
  misc_feature (59)..(90): n is a, c, g, or t
  misc_feature (731)..(731): n is a, c, g, or t
ttttccaaacaaatttaattctgttccagccccaaagaagaggaaggacctaaagttcnnnnnnnnnnnnnnnnnnnnnnnnnnnnnnnngccattacaaaattaagccccctcctttagcaataaatactgaactgatatatacatatgaggcttaggaaggaggcaacaacaggaaccttggggactctgtcccatggcaagatcccaagacttctaccaattccatgctctttgcttaaaacatagagagcagtggaagagacaggagagatatgccagaagagtatgtggccctgtagagagctggaacatgatgaggacagaggagagagaagagatacgaagtgtaatacaggcagggaaagagaaagtcttcatttaaaacattcctcccatccctgctgaatcactggatgtggctggaccggctgtccagagccttgtctcctctcctccactccctgttgagcatgcaagtcaaaggtcattcacactgtggtcgcgatgccactgtggcaacagcctggctgctggatccctgaggcttcccattcaccactagcaggaggggcgtctccactcgaacactggaaaaggaatagtcctttcctttgtgctgaattcggtgaagccgcaggttgggctcaggaatggctacagagtctccaatgagcactccccagctctgcactatattgtacaccatcactgcatagcaaggtccatcntgaatctaccaggccaaatgtaaaggggactttctcctctgtggtgaggctaaataccacctttcccaggatgacggcaccgctgttcaccccaggctgaagcgtactcagtggcttgagctccagggtcactttctgcccagaggctgactgacagcttcacagcctttgacagaagctcctcagccttagggctatagtcaggagtcacatttagtgctttcccagttagcattagaacttgtgccttgcctggacagaacccactacttcttccatctgctgtagggttttctccatctccttctgcacatcctgttgcttcctcccagcatcctcaacactatgtgtctcgaaatagcagtctcgaaatgagtagagctgatccacgagttcctgcaatttctgcaagatcggcttgacttcttcctcttcatcagccatcatctcccggccactccccggccgtaatggccgaattcccgggcatatgtccggtaccgtcgactg

SEQ ID NO: 123254 - DNA, 1533 bp, Homo Sapiens
  misc_feature (249)..(278): n is a, c, g, or t
actggacttctgtgtccctttgcatctaatattatatgtagctttctctactagcaagtttcccaaataaacatctgatatcatccgagtaacttcttgctactagttgtgttgatacagtttctgtcctgagcatctcctttgtagattcttagggatgacaggtaaattcatcccctttaatccctgaggacccctttcattttgctgaatcacttcttttggacctgccctcctactcatcttatnnnnnnnnnnnnnnnnnnnnnnnnnnnnnnagccttggcagttatagataatacagcagtagaaaccttttccttttctttttcttttggtacttccagaggggcaggatatgcaaatgtggatggtttacagttcgatttatactgaactttcggcatctttaagtccttgttaaggccaatgacacaggtaggggtataagccaatgacaggaagtgtgaaagaggaaaccagaaccaaaactgggtaaatacaaggacgccaaccacagaaggcatatgagtatgcccagtcctggactgcaaggagattgtgacattatgaccacctgcatccagtatgccctgggccagaatagcgccaaacttggccatgacatcatcatgcttatcattgatgactttggaatacagctgtctgaactgattcacctttggacaagtgatttcagtctgctggatcatgatgagagctgaagctatgagtgccccttgcctcacgtagttcacggggtcgtttgtcattggttctagcaaattaatggcttccttgtttcctgtaccagcacagcatatccccaaggccattgcagctccgtagcgcacatgagggttgtaactctctgacaacaaagagacaacacttgggcactgttcaggggttctgaatagaatgaacccaagtgattctactgctgccctcctgacatcatcattaacatcacttacagcaacatgtagcaggcgtcgaattgctttgttgttaccagagccacaataagccatggctacagtatacattccagaccttcgaagaattgggtccttgtcacgacagagagattcaatgagagcatcagcctcttccatcctcccatacattactaaagctatgccaactgcaagaccacgcagaatcttctcatgttgagtttcttgtgcataaccaaccatgtcctcaatagcctgagcatttttagagcccaacataaccaaacctagggccaggccagctgcttcccctgttactgcatcatcctgataaaggtttgtttttagcaaatcataaacatcttgacgtgcagttcccatggctgccaaaccaaggcccagactgccaccgtgtctaacgatatcattgctggcgttcttaagctgattaagcagatagtcaattatatcaccaccatgattggcatgaatcggacgcgtgggtcgacgatatcccgggattccggaccgtaccagccttgctttttgtaccactgttcataggtccactagc

SEQ ID NO: 123255 - DNA, 1368 bp, Homo Sapiens
gtttcgtcggggttccccggtactgcttcggaagagcctccggatggtcgtgacgtgtgttgaaccttacgcgttcccccggtgcgcgccaattatatcagggtcggcataggtttataatccgaatgtctgaagttcatctctaagcaaccgtgtatcatcccgaaaagctaaggcctggagaccccaaattttaaacctctggggctaccgaaccccaaagatggaattgtccttcctaagccgtgtgtctgtgggaaagagtctaaaaaaatacccattgccccggagcaagtagtcttttagcacaggggaacttttagagaatactgcaccatgtttaactgaagagataggaaccacccagggcaaatatttggcattcactccactccttcactgttactgaaaaacgtccaattggcaaagcctgttgttttacttttaaggtaacatgaattaaaattaagaaactagcagtattctactacagtgaagctcctgagttctcagctccaattattcaatattcttgaaaggatgctttaaaaagcaagcctttgtccaataaggtatttaatagcacttagggactattagatgtcccatttctcttctctttcatttctcttgatctcttctcaccccagtgtaacgaatcgctacaggtttttaccaaaatgctgcagcagtagttggaaatgagttattttgcattactaaagtgttcaatcacattatcacgggtcacatttgtatataaccaggagatggccaaataacatctactgcagtgattttgcaaattcagcatagtcaatgtatccatcattgttcttgtcatcatctctcaaaacaccatctattatgttaatcagttcatcttcactcattagtggtgcctgttcactcccttcctccttatggacatgagtgatggctgtggagagttctaagccatcaagcaaattattgccatcataatcatgcattttgaagtaatggagctgcaattcttgtggcgacatctccgcctctggtttgttgatgacaccttctagatgctccatgatatgctcttggtcgtgcactgtgttcttatccaggcccatgctgccgggttgggagaagctggctgcaggctcctcagccctggcgcctggggcacaaaaggcccagagcaggccacacaggaagggggttctgagcagggatctcatggtcatcaatatccttacggtctccgaagcagacgcgaagccctccaacgtgagcctcaccagccccggacgcgtgggtcgacgatatcccgggattccgaccggtaccagcctgctttttttaaccaactcgtctatattccacatg

SEQ ID NO: 123256 - DNA, 1080 bp, Homo Sapiens
  misc_feature (277)..(277): n is a, c, g, or t
aggggttgagaaagggggtactccacaggggggctgggagactcccaagggggtccatttttttggcccacaaagggttgtaattgaattggtgccccacccaccgtccaagggggcctaagatggggttggggggccaaagctttcccaagccatggttttgcagactttttgggttttcccccttttccctttattctcaaagggaggggggttaatctttcccaggaattccaagaagttgttgcttctcgttgcccgggggctctggccaggncagggtcccagggctgcagccccgagagaaggcccttccaggggcttcccccataactttcttccatatttatgcaacgtcgccctgttcagatgaaggtcaggattgctagacgcttttctgtcaactttctctgcttgggcataggcactgagggcttgctgggagatcttagggttctggccagtagagaagtaaagggaaagatatgaattcccaagaatataccaggagcggccatcatggacatccatctgaacagccaacttagcctgtcggacactgtccatgacatggtgagaatgttcatcttcagtgtcagtccgcagctgacgaagcaccattgacaggttttgcaaggagactttgttcctgcaatgggtgagggctcctgagaagcaggtgtgggcagctgcaacatccccttttttccagtacacctcacccagctggttccaggcttccaccagctcgggctccagcttcacagcctttgacagaagctcctcagccttagggctatagtcaggagtcacatttagtgctttcccagttagcattagaacttgtgccttgccctggacagaacccactacttcttccatctgctgtagggttttctccatctccttccgcacatcctgttgcttcctcccagcatcctcaacactatgtgtctcgaaatagcagtctcgaaatgagtagagctgatccacgagttcctgcaatttctgcaagatcggcttgacttcttcctcttcatcagccatcatctcccatcccgggaattccggaccggtcca

SEQ ID NO: 123257 - DNA, 1387 bp, Homo Sapiens
  misc_feature (990)..(1081): n is a, c, g, or t
agaccccctcgggggcccttgatatctcttaaaatgcgccccagaccctatgtgtagataccctctagcctccccgggtgaagaaatttttttccaaaaaattcctgttccccgtaaaggaaaaatttctctcaagccaggccagtcctttttgccagcttagttttcacccccctttattccctcttgaaaaagtttgtatttttaccccttaggggctcttaaaatcccctgtaaggttaggtttggtcccgaattatggtaccccccccaccggaagttaaggtttcccttcaccaaaagttccccaagggctagcaagtttttccccggtccgcggacgtttgtaaaaccgcgcggcccagggccctagctttataattccggcctcgcctttaggggcccacctttgttacaagaaaagccggggtaccgcgtaagcttggggcccctcgaggggatactctaggagcggcccgccctttttgtgtcctcgggtggggttgtttttttggagatcttatatttatttgaaaaccaagttctgtgaaagagcacactcaacagtcatatatcttctcttcaaccaaagacttggagacagggttcttcaggtcagtgcagaggcaacgatacatgcattgaatagcaggtctcggcatgaatttcctcataagcattcccaatatgagcctggacaatcttcttcagataagcaagtgagatcctctggtccttaatcatcaatatactcaaatggttctgggggttctggctcttgttcctcctcctcgatttttgggccatgtgctgccacaggttccaccagctcctcaatgtcttcactggtatccttcagaatgatgatgcctccaatagagagtggtttgaaaggctggtatctacaggtctccggcatggttaggaccttaagctgggcaggcataactcgggctgggttatccaataactggaagtttggctcaggtnnnnnnnnnnnnnnnnnnnnnnnnnnnnnnnnnnnnnnnnnnnnnnnnnnnnnnnnnnnnnnnnnnnnnnnnnnnnnnnnnnnnnnnnnnnnagccttggcagttatagataatacagcagtagaaacctttaagtccttgttaaggccaatgacacaggtcggggtataagccaatgacaggaagtgtgaaagaggaaaccagaaccaaaactgggtaaattcaaggacgccaaccacagaaggcatatgattatgcccagtcctggactgcaaggagattgtgacattatgaccacctgcatccagtatgccctgggccagaatagcgccaaacttggccatgacatcatcatgcttatcattgatgactgtggaatacagctgtctgaactcctc

SEQ ID NO: 123258 - DNA, 421 bp, Homo Sapiens
tcaaaaccgtatcagaacccctgaacagtgcccaagtgttgtctctttgttgtcagagagttacaaccctcatgtgcgctacggagctgcgatggccttggggatatgctgtgctggtacaggaaacaaggtaaagcccacagccaatggggtcagttctttcttggcgccagactgttttccctcgccgcagaatttatgtaacagctgtaaaaatacaagtgccatgtgatctgtaagagtaaacttgccatactaagcttcccagtactccctcattctgcgatgctggattgccccaagctgcttaagaataaatcgtcacattacatggatagctgtaactgaaacagtgcttttgaatttctttttgaaatcctgatttctgggtttcttgtttttgttttctttgctcgtgtat

SEQ ID NO: 123259 - DNA, 848 bp, Homo Sapiens
  misc_feature (809)..(809): n is a, c, g, or t
tttggccaggctcaatgcagggtaatgatgagaagggagaaagaagtctgagtcttgtccctgtcctcaagcttatagggagtaaacaaagttggttataatgaaattaacagagaatacaactgcttccatttattgagcacctgatgccagatgtacaatagttctcaaggtagggtttgtctccatttcacagatgagtaaacaagctgtaataaaattttgtttgaagtacagtgggggcatgcagaagttagctattgccgtgtaataaaccatcccaaaacacagtggcttaagataataaacatttattattgcttctaagtcttagagtcagctggagggttcttctgctttggctgggcttactcatgtgtcggcagtcatctgtgggttgggtgactctcctgatcttgactgggggtaggctgactgtgggctagtctaggatggcttcagctggtatctctggctctttcgcatgtctctcacctacacatctcataaccctccagctgatcagccatgttctcatggcactggcaaagagcaagagggcaggcctcctttaaagcttctgtttgcttcatgtttatcgacatctcattggctaaaacaagtcacatgtctggtcccagcatcagagtgagatgggactacaatgttataggcaaaaagagatggatacaggggagaccatgaatagggatcatcaaaacaatcagcctaacacaggacacattaaccaattttatctggaaaagaaaggctttatagaagaggctacactagaactgagtgttganacatgagagagtattcactaagtgggcagctgttacttg

SEQ ID NO: 123260 - DNA, 449 bp, Homo Sapiens
ttttttttctgccaataaatactttaatgagaaccgaggtctgtaacacatatagcaataaccaccctggcctatgccttctgctctagcccaagtctggggctaaccaattacatttaaccacatttggaaagcaggccgttttcaatgtcacccatcagtatccatcttcatagaagataccaatctggggccagagtctcaatgttaacactttctctcggggaaaagttaacatggtaacacaaacatagaaataactttgaaccaccccactgttcttccatcaggaggcccttaggagaccaacggcttggtaaacacttacaacattgtcaaaatacattagaacacgggaaaagggcaaaggagtagaaaggctggcagggctgggctcacatataattcagttcttagatttgaagcctctttagctgctcgtatgtaat

SEQ ID NO: 123261 - DNA, 1025 bp, Homo Sapiens
  misc_feature (43)..(99): n is a, c, g, or t
  misc_feature (695)..(695): n is a, c, g, or t
  misc_feature (702)..(702): n is a, c, g, or t
  misc_feature (728)..(728): n is a, c, g, or t
  misc_feature (790)..(792): n is a, c, g, or t
  misc_feature (809)..(809): n is a, c, g, or t
  misc_feature (840)..(840): n is a, c, g, or t
  misc_feature (846)..(846): n is a, c, g, or t
  misc_feature (898)..(898): n is a, c, g, or t
  misc_feature (980)..(980): n is a, c, g, or t
aaataaaagtaaactgtttattaaaagatacagcaaaggtacnnnnnnnnnnnnnnnnnnnnnnnnnnnnnnnnnnnnnnnnnnnnnnnnnnnnnnnnngtcttgctgttttcatgtgcactatatttagcagcacattatttaatcaggcggcattttaatggggttgttttgacacttggcattattaagatacaactatagccccgtggaaatttcaacgtttgaattccacttctccgacttttaatagtagcaaagaggggaaggagaagggaatggagtaccaaggctgagcattaggttaaacacaagaatttaaaagggccaaggtagcaaagggaaggaaaaataattaaaattaaaggctatctgacaaacaacccagagaaacagtaagaaaccatcattaagggcaatgggctatgtacccaagatgctcacatcaacctacaatgaccttttccaatccagttcttgtgttgaacctgaggatctgccctctccgatcaatccctccacccgataaatttgctaccaccaaaatctagagctatagagccttgaagcaaatcgggaagctaaatagttgtaccttggactaccttcccacaagtgcagggagggcccaatgttgggtagggatgtgatacactgttctctgcaattcgatgcttttcactttgtggcttggntccacanagtgaattgcatcgagttactgtcanatgagaagctgcgggttgtttcatctgtcgtctaacccggccctgcgtttaccccggcctannngagagtgaacagatccnaatcagacatacatacatgaatggcagatangtatanaaaaggaaatacatatattctcctacttactctgagggcaattgctgctganacatatcatcatcttgtttttctcacattttctccacagaaccattctcataacatatcgcttctttttcgatgtgaatcanatgaacaggaatcttttgttatgtacctgctttttgtgagtggtt

SEQ ID NO: 123262 - DNA, 567 bp, Homo Sapiens
tcctatttagtacaaggtacattatttaggtaatgagtccattaaaagccaacactttccccactacactatatgtgtatgtaacacaactgcccttgtaacttcctaaacctataattaagaaacaataaaaggcaaattaagaatgcttttttaaaaggtgggggcattatgctaataagttactgtggatttcagagtgcagagtagaaagatcccaagaatttagtgtggtaggtgggaacagaaaatgggtgtataaattttattgacgtgggagtactggatattgtagagacagatatcatcagggcaaggagattaaagatttttgcattgacggtttgacactatattgtggtaataacactgtatgtgttgggagatagaacaggaaacatcttccctggaatatgtatactattaaatgttttatcaaacttttgatcaaacaagacagcacaatttataatttcatttctatttctatgttatgagaaactgatcatttattcaaatgtttaacaggcatgttcatgttactataaactcttctgtttctccatc

SEQ ID NO: 123263 - DNA, 1421 bp, Homo Sapiens
ttttttttgagatggacaaatatctttatttacagcaacagatagaacagaccctccctcccttcccttcctttccccttccagtcttttccatactgttccccctcccgccccaccccaggctctcgcctagccctgccctctggggtcactgcgtgggttaggcccccaaaaaagcctaggaaaggagactggagagggctggctgagggtgggtggggcgtctcttcacatttttctgtcctctaagcctggggtggaggagagaggcaggcaccaggagcagggagaggtagagagctacggccccaccggcccaccctccccaagtaactttcacagtgttccccagccctggctgccccctgcggtccccaccccagccctgcccctaggttgtcctgtcaggtcctcagcaatgtatgaacctggtaacccagtaaagagttcaggcttctctgccatgggcccaccacccacggctgaggaggtggcccctctgagtgccccccactattttcaaggctggggttctgagaggacatgggtgggtaggagaggaccagggagagggggcttctcaagccttgtgtgacagtcctgggcctggccccactcagagggaccctgctggaatctgcaggggcgccaggctggcttagcccccgacagaggctcaggaggagaagcagagcccacagcactccatgcagatctccaggcagtccgcggactcgcagcaggcatccaggatgccgcagtccaggtcgcagggcaggtcgcagtcggcacactcgccagagccacagcagcagcagcagaggcacgagtcctccgagctgcaggagccacaggtggcgcagtccaggacgatgttgcacagcgtcaggaactcgcagaacaggcaggacaggatgcagtggacacagcagtcttcctgtgcctggagggggatctgggaggtggtggatttgctgctgctcttactcttcttgctgccctggctggcgagagatgggtgtgtctgcaacttccggtgggccttggggccacccagggcaccattccccgcccgtctggtgccgcccagctctgaggggtggccagagtcattcggcagaagtggggtgcagcccaaggggttcccctgaggctggcctgggcccggggctgcgctgggggctccatagggcgcgtcgcagccagaggggcgctggccgctcacctggtacatcggccccggactcgtgcgagccgtgctacgctctcttccagccggatccccgcgcggggcccgccatgcgcgcctgctccgggcgcccctgcccaggtcccgctggctcccgggtgctcgcctggcgccccttcccctctcactcgctgctttctcccatttcggcgccagctcacgccgttcgccc

SEQ ID NO: 123264 - DNA, 862 bp, Homo Sapiens
gatttgggtgggaggagagtcccaaagccgccctaggttccatggacccgagggtttgttcctaggggaaaccaggctgatgggccccatggttccaaattggcctgaatggggcggcgcgcgccgcaaaccggaatggtctgggagaagctttttcgagggcccgagggcgagccgaacagtgggaggcgggtaaatataggaggggggccccgttagcgttataattttatttcaaagaaaacagaaacagaacaaaaacaacctttgcatttgagggaggagattattttacagttttggaaaagaataagaacaattgtatcaggaaacaaatgattatgacagaaactcgcatccgacagctgcagtgaatccacgaggacacagaccatgctggtggccacagcagggccacaggtgaatccacaaggaaacacagaccatgctggcagccacggcagggccacagggcacggtctccatgtgttaatgtttaatgtcagcattttcatatggacagaaatcacgaagaaatcctgcaaaaatggcatcaatatgaacaaacccttgttataaaaagcaaaatattgataggaacaatatcttccagcgtgtgcgtttcacatttaggctttactgtatgaaactaagtcaaaattagaagcactggctatctccaccgacatatattttaactgaatataaacttcaaggcttttcttaaccataggcttaagaggatttcttttatgcagaatgtgaccagagcaacaaatacacctaaactgtttgaagatgggaaatttatacatgaaatgagctagcaggcttcctttggtatggggacactgttattcta

SEQ ID NO: 123265 - DNA, 1370 bp, Homo Sapiens
  misc_feature (1014)..(1039): n is a, c, g, or t
catcttattttccatttatatctatcaccttttgaaattctgacacgtctgggatggacaatagtacaaaataataaataacatgcattgatttggggttttttttgccaaaatcaaaataattttctgaactggaaagagttttctttacatttcatgtaccatgaaataaagaaaaaataggagcgttataataaaaagtcctcattttgataccagaattcatgtttctgtacaaattaaaataatcccccaaggcagaacgtacacaagctttattgggcaacagcaacgagccacgctggcaaacaatgaaagtagagtcgctcagaaacacgaaagatcatatgtgtgtcatcacagcatcgagaatttaaatcatctggaagttcctgctaaattaaagcatactgtgccagagctcccctctaatcaaaaaacgctgtcctggtgaaaatttgcaatgaggattacagagagagagatcaaccaatgaggaaatcacagactcttacatgagtttacagttaaccccactgcaacaaaataataaattagccataatttgttttttttgcaaataccatgccccccacctgaccccacaaacacaacagtcactgacatggcccagctatattaacagactgcgcctcaaaccatgctgtggcggagaagacagattcacgggtaatgccgctttggcctgagaagatgcttcggagctccaggtggaggagctgctcacgctgcaggatgctttgcaggttcattcaaaaccaaatttttttccaagaagaactggacataattcatgggaatattttaagtatatataagtggcaaaaaagctgtacattaaaagaagggggagaaataaaatgtgttgtatttacaaagctctttgtatatttttttaaatgaaaacaaagctgggagtgatagaattttaatgcaatgaaaaccaaataattcttcaaaaaactttagatgacatcattctctcgctctttnnnnnnnnnnnnnnnnnnnnnnnnnnttcaaacatacagaaaaggttaaagataaaaatagctgataggtgtttaagtaggatggagcagaagaatgtacatgtcccatttgcaattttggcaaaggtttaaaatgctgccctaaaggcacgcacgcatgcccagcctaccccagtaaaaacaagacaaagtataaaaagaaaagtctggcggggggtgggggaggcattagcatatcaatttccaatgagcacaaaattcaaaatacattaaaaagtagcatggcttacattttcagcagagaagaaactgaggaaatgttcataaagagacaatgatttttaagatttactgtca

SEQ ID NO: 123266 - DNA, 1015 bp, Homo Sapiens
  misc_feature (689)..(689): n is a, c, g, or t
  misc_feature (726)..(726): n is a, c, g, or t
  misc_feature (732)..(732): n is a, c, g, or t
  misc_feature (737)..(737): n is a, c, g, or t
  misc_feature (789)..(789): n is a, c, g, or t
  misc_feature (797)..(797): n is a, c, g, or t
  misc_feature (813)..(908): n is a, c, g, or t
  misc_feature (917)..(917): n is a, c, g, or t
  misc_feature (934)..(934): n is a, c, g, or t
  misc_feature (959)..(959): n is a, c, g, or t
cactggaagatttttatttgggtttattaaaaattttttcaaagtaatacatgcacaaggtaaaaaattaaatagtacagaaggacttaaaatgaaaaacacagtttcccatcccaccctttttaaatctaaatcccattccctagaggtaatgcttttaacaatatttattttagatcgtctggtaactttctaactttaaataatatgtttgagcaataatttcttgacttactgactttacaacatctttaataattccccattacaaaagataaggatttaacttacactatcgccactttcctttgtccatctctctccaaatgtctgatagttacatcactttttaatacatctattggtttgattttatagctttgaacaatacactaatcctctagttcttgttccattaactgaagatcttttcatccccactttgaatatataagtatctctacctttgattccacttctcttcctctaattctcaatctctttctgctttctttccctttgtcagcattaattactttcaacttcagttctgaataaaaaatgaaacctttcacactttgttaataggctgatctgaacattgaatactaataaatgatatccacattattttggctatttaaatacttcttactgggagcctagtataagctaggatattttcttcnctacacacccaatatcatcatgcctgtggcatagaanaggaanatgtnactatgaagcctcttcttattcttcatgaataactcaaaatcatcctcgtgncgaattcntgggctcgaggggcannnnnnnnnnnnnnnnnnnnnnnnnnnnnnnnnnnnnnnnnnnnnnnnnnnnnnnnnnnnnnnnnnnnnnnnnnnnnnnnnnnnnnnnnnnnnnnncggagcaanagtgtaaagctggggtngctaatgagtgagctactcacattnaatgcgtgcgctcatggccgctttcagtcgggaaactgtcgtccagctgcataatg

SEQ ID NO: 123267 - DNA, 1626 bp, Homo Sapiens
  misc_feature (68)..(76): n is a, c, g, or t
  misc_feature (134)..(143): n is a, c, g, or t
  misc_feature (249)..(258): n is a, c, g, or t
  misc_feature (316)..(328): n is a, c, g, or t
  misc_feature (369)..(383): n is a, c, g, or t
  misc_feature (432)..(447): n is a, c, g, or t
  misc_feature (457)..(563): n is a, c, g, or t
  misc_feature (1371)..(1371): n is a, c, g, or t
  misc_feature (1526)..(1526): n is a, c, g, or t
cccagcgggggccccggggggtggagaaccccccgcgggggtttaaaggttttatctaacgccttgtnnnnnnnnntcctcttgtgcgggaggatgtttatatttattcccccctcctcccccgaagggccccnnnnnnnnnnagaaaatatataagagccccctggggatcccccgtggaggcaacccaatagtaccccccaggtcccccttgggttgttttaaaatcccggggttttccccgggggnnnnnnnnnngggggttcaccaacctcctttattcccggtgttttttgggaaaacagatgtatccccnnnnnnnnnnnnngggggggcccccgcccccgaaaaggttttaaaagagtttcnnnnnnnnnnnnnnncggaacacaccactttttgtttagcttgctgttgtttgttcacatcaannnnnnnnnnnnnnnnggtcatcaannnnnnnnnnnnnnnnnnnnnnnnnnnnnnnnnnnnnnnnnnnnnnnnnnnnnnnnnnnnnnnnnnnnnnnnnnnnnnnnnnnnnnnnnnnnnnnnnnnnnnnnnnnatataaaaataagtgtttattaacaaatgggctcagagtagaaaatgcagacagatgggttcactttaccatattttgggatcatcatcttattgcgtacagcactgtaggcaagtaaacgaaaccaaaggctggctcccctggccgaggcctgggactgatgcaagacagccagccagtcacctccgcctcccatgaacctcttggaaaacttctcctgtcccacttctgccaccctccagctccttgagagagccagagttgagaagaaaatgagcctgaagttgaaagggaaagttcttgcctgaaacagtgctgggaataagtccagaccatttccctcaagagccacctcttcactccttaagccagaggacaccacaaagacacagttaatggcctctcatgccactcctcaggtggcttgtgagggcagccagtgagggactgcaggatttcagggaagtagctcagatggcccactcagaacttctgtaagaatttgaggacaaggtcccgcagtcgcactctgagcatctcgtcattgtcgcagatgatatgggtcgagtcttcttcaatctggatgagcgtctcagcctcctggagcaggacgatatggcccttggctgtgtcctccaccttaatatcactgaagccatgcttctccagggtctgcacgaactgctccacagggatggaaccgctcaacaaaggcttcaggactttgcagtctggtacgtcatcgctcacccgcttttctcttcttcccgctcgtgggctgggcgggccgaggagggggctgaagcangtgctttgtatctttggtgtgcagcacggcgagacagttgcaagggagatgcaagcttgatctcaatgggcaccaatgatctgcgagtctggcaatgatcccatctcctcgtaccgacgtttgaagggcaaggcgagaactccaacccgccatangacatggcggggggctggattccatcatgaggccatcctgtgggactgggctgggggcggctgaatttactgctcaagaacaccacgtgcaagggttgaa

SEQ ID NO: 123268 - DNA, 1839 bp, Homo Sapiens
  misc_feature (37)..(37): n is a, c, g, or t
gggatgtcagggggaggaggatgacgctcaacctgcncagtttggacacaactacaaagaacagcaggacacagaggtgacctctgtcctgagcttctcaacagatgggaagtggctgtggtctcactggatccccactggcaccagcagtgtgggtgggcctcatgtaacatctgggaggggcttcatccccccacccaggacctagtgcatgccagcagctatctggggccctgggaaaaatgtgcgagtcttgagcgcggagccgctcaagccacagctcccaggcccctggctcaaagacgcagacaaggcctgagcagtgctctcggcatcggaccaaagcctgggcacaccctgcctctctccccagagcagggtccctgccgaggactggcctagagcaagcactggaaaagaggccctgccatacaccctgcgtacccactgccaggaccctctcagacaagcgtggcacagccatgctgaccttccatctggtgaaccaagtggcagccccaggggcctgccctgcaggtcacagctaaacaagtctggcagaagccacgcttgttccccatgtacctctagagaagcagaaaccaaagtccccctgtgccctgggagggtggggccgtctaatttattactgcccagcattccttccaacgggaagtagatgggcgactgctttgttcacacacatttgattaaaaataaacaaacagcatctccccacctgcattctcctctgcctgctctgttcttccggtgggccaagcagagcccaggaatccgtcacagggaagtttcgaaggggggctgggctgccgtctctgcgtgctgtgatgaggactcgggaccagggacgctgcagccccgcatggcccgggccccaccacacacacctgcatgtctccaagtcaggtctttattgaaagtggcaggggcctctcaatgttctatgaaaactaacatattaacctcagaatatttcaggaaacaagtaattcaattttcttaaaaaacaaaacattctggatgacacaagtacttatgagcagacacagtacctgatccaacaccacaaggcaaatctatggccatcatgggccccgggaggacagcggccaggacactcctctgggggctgccctgttgcctctccccacctcatgggaggaggaggcagagctgccctgatagttgctctgcgccttggtctgagcggccatagggctgcatgagtctgcagaagacccaggcgtagctcatgagggccacgccggcggctggagcccccgtgagcaatactgctgggccaggagagggaggagggcagtgggcatagagaacagcgtccctgacgtgcacaacagcacactgcaggggtggaaggagacggtgacctggtgacctggcatgtgaggcccacgggatccgacgtgtccctgcaggcacgacatagcacagggcaccttccaagtcagcacagttcttatggagctcagaacaaaaacaaacgaccttccgtcccctatctgaacagcagtgcgcttcagcgggtggatgtcaggtggtttctgttgtgtgaaaacctctgcactcgctccaccaggtgcaccatcagcttgtctgagatgccggggcaggactcctcggccaggctgaaggcgttctccagctcctccagcgcacccacgctcccgccgctctgcttgtgcttctctttgagctctccgaagacgggccggaccagcgtggacaggcactgggacctcggctgcctcttgacgggctccgcaggcttctgtgaactgtgcaggccgtccccttgtg

SEQ ID NO: 123269 - DNA, 958 bp, Homo Sapiens
  misc_feature (41)..(41): n is a, c, g, or t
tgtgatgaacttgtgctttcaggagctccttgggccgtggncccggaatcgggggtcttttgttgaggcaggcctccacgaactccttgaaagggcttgctgtgctggccctcccagtgtggggtgggctgttcttgggaatcaggaacaggacggcgcatggggtggaggttcagagttttggaggcttccccccttgggccaagctcgatggcctgtgatcccccaggggaccagatgtcagccttgaagtcgtaggccgactgcttgatgacctcaggtgccatccagaagggggtgcccacgaatgtgttcctcttaatctgcgtgtctgtgagctgccctgctaccccaaagtccgccagcttcacgtcaccctgctccgagagtagcacgttggcagctttgatgtctcggtggatcttgcgttcggagtgcagataatccaggcccttcagaatctcccgcaggatcgtggcaatgtatgtctcctccaggggacctggtttaagcaagtccagtgctgagccgccgcccaggtactccatgatgatccatagcttggtgctctgggaccggagacaaacccatcagcatttggcagcaagaggaagggcatgctccagggtgggagtcacaggccggagtcagccagggcccaggccccaccggtcccatccctgccaagaaccctgaacaggaaagggctctctcggccttgcccatcttcccctcctgccacactactgctacagatgctcagaggacaggttgagtacacacagcagtggctgactccacttcaccaagaccccatcaaaaaccaggctgctgatccagtcctacagggctttaggtaggagccaaagtagcgggtgatgtaggggctgtcgcactgaccctcgtgccgaattcgccacccaggcctcgctacttaggaccgtatagggggcggagt

SEQ ID NO: 123270 - DNA, 1603 bp, Homo Sapiens
  misc_feature (284)..(284): n is a, c, g, or t
ccccccaaggtcagggttctttatggaaaagtggcccggggccccctcaatggttttaggaaaaacttaccataataacccttcggaatatttccgggaaaccaagtaatttcatttttcttaaaaaaccaaacccttttgggatgcccccagtacttatggagcagaccccagtccttgatcccacccccacaagggcaaatctatggccatcatgggccccgggaggacaagcggccaggacactccctctgggggctgccctgttgcttctcccccacctncatgggaggaggaggcagagctgccctgatagttgctctgcgccttggtctgagcggccatagggctgcatgagtctgcagaagacccaggcgtagctcatgagggccacgccggcggctggagcccccgtgagcaatactgctgggccaggagagggaggagggcagtgggcatagagaacagcgtccctgacgtgcacaacagcacactgcaggggtggaaggagacggtgacctggtgacctggcatgtgaggcccacgggatccgacgtgtccctgcaggcacgacatagcacagggcaccttccaagtcagcacagttcttatggagctcagaacaaaaacaaacgaccttccgtcccctatctgaacagcagtgcgcttcagcgggtggatgtcaggtggtttctgttgtgtgaaaacctctgcactcgctccaccaggtgcaccatcagcttgtctgagatgccggggcaggactcctcggccaggctgaaggcgttctccagctcctccagcgcacccacgctcccgccgctctgcttgtgcttctctttgagctctccgaagacgggccggaccagcgtggacaggcactgggacctcggctgcctcttgacgggctccgcaggcttctgtgaactgtgcagggccgtccccttgtgaagcttgctgtgtggactcggccggatggtaggggggaacgtccagatggggccctgctccccgtcctccgcctcgccatcaatgtcagagtcctcagagctggactcctcgccatgcccctctgacttccagcgcttatagcggtcgatgagctccgtgaggaaggaggtcttcttggtgtagcgtgtgatgaacttgtgcttcaggagctccttggccgtgggccggaatcgggggtctttgttgaggcaggcctccacgaactccttgaagggcttgctgtgctggccctccagtgtgggtgggctgttcttgggaatcaggaacaggacgcgcatggggtggaggtcagagtttggaggctcccccttggccagctcgatggctgtgatccccagggaccagatgtcagccttgaagtcgtaggccgactgcttgatgacctcaggtgccatccagaagggggtgcccacgaatgtgttcctcttaatctgcgtgtctgtgagctgccctgctaccccaaagtccgccagcttcacgtcaccctgctccgagagtagcacgttggcagctttgatgtctcggtggatcttgcgttcggagtgcagataatccagcctcgtgccgaattcgccacccaggcctcgctacc

SEQ ID NO: 123271 - DNA, 1313 bp, Homo Sapiens
  misc_feature (1157)..(1157): n is a, c, g, or t
  misc_feature (1160)..(1160): n is a, c, g, or t
  misc_feature (1193)..(1193): n is a, c, g, or t
  misc_feature (1263)..(1263): n is a, c, g, or t
cgtcgcctcgggctttctccggtcgctgccgccaccaccgttgcttcgcgggctgggaggcccggggtccccgggcgaacagaggctgcgggtgggagccttcgcgggcgctgcagagcgggccgggggaggccgggatggagccccgcggagtggactgacgccgcaggggcgagctagccggctccgcgcctctccgcgggatccagacgcctcctggggctgctggcggagggtctgaggcggcgcggccatggctcacctccggggatttgccaaccagcactctcgagtggaccctgaggagctcttcaccaagctcgaccgcattggcaagggctcgtttggggaggtctacaagggcatcgataaccacacaaaggaggtggtggccatcaagatcatcgacctggaggaggccgaggatgagatcgaggacatccagcaggagatcactgtcctcagtcagtgcgacagcccctacatcacccgctactttggctcctacctaaagagcaccaagctatggatcatcatggagtacctgggcggcggctcagcactggacttgcttaaaccaggtcccctggaggagacatacattgccacgatcctgcgggagattctgaagggcctggattatctgcactccgaacgcaagatccaccgagacatcaaagctgccaacgtgctactctcggagcagggtgacgtgaagctggcggactttggggtagcagggcagctcacagacacgcagattaagaggaacacattcgtgggcacccccttctggatggcacctgaggtcatcaagcagtcggcctacgacttcaaggctgacatctggtccctggggatcacagccatcgagctggccaagggggagcctccaaactctgacctccaccccatgcgcgtcctgttcctgattcccaagaacagcccacccacactggagggccagcacagcaagcccttcaaggagttcgtggaggcctgcctcaacaaagacccccgattccggcccacggccaaggagctcctgaagcacaagttcatcacacgctacaccaagaagacctccttcctcacggagctcatcgaccgctataagcgctggaagtcagaggggcatggcgaggagtccagctctngangactctgacattgatggcgaggcggaagacggngagcagggccccatctggacgttcccccctacccatcggccgagtccacacagcaagcttcacaaggggnacggcccctgcaccagttcacagaagccctgcgggaggcccgtcaagaag

SEQ ID NO: 123272 - DNA, 734 bp, Homo Sapiens
  misc_feature (613)..(621): n is a, c, g, or t
ttggcagctttgatgtctcggtggatctgcggttcggagtgcagataatccaggcccttcagaatctcccgcaggatcgtggcaatgtatgtctcctccaggggacctggtttaagcaagtccagtgctgagccgccgcccaggtactccatgatgatccatagcttggtgctctttaggtaggagccaaagtagcgggtgatgtaggggctgtcgcactgactgaggacagtgatctcctgctggatgtcctcgatctcatcctcggcctcctccaggtcgatgatcttgatggccaccacctcctttgtgtggttatcgatgcccttgtagacctccccggacgagcccttgccaatgcggtcgagcttggtgaagagctcctcagggtccactcgagagtgctggttggcaaatccccggaggtgagccatggccgcgccgcctcagaccctccgccagcagccccaggaggcgtctggatcccgcggagaggcgcggagccggctagctcgcccctgcggcgtcagtccactgcgagggacaccaggggcgctcggtgcccagttcagtcatctgagaccgacctccggggcggcgggctccatgggtnnnnnnnnncccaggagaccccccaggccgccggggccccgccacgcccgggcgtaacgcccaggctcccgggggctcgccgcccctcccgtcgccgcccccacctcttccaaggcagcttc

SEQ ID NO: 123273 - DNA, 1565 bp, Homo Sapiens
gtggaacggagcccatctgccgccaaccctactcttatgacttccctgaggacgtgggccctgccctgggcacttccttctcccacatgcttggggccaccaatcccacccagaagacaaaggaaagcctgggccgtaaaatccaaatccagcgctctggtcatctgaacctctacctgctcctggactgttcgcagagtgtgtcggaaaatgactttctcatcttcaaggagagcgcctccctcatggtggacaggatcttcagctttgagatcaatgtgagcgttgccattatcacctttgcctcagagcccaaagtcctcatgtctgtcctgaacgacaactcccgggatatgactgaggtgatcagcagcctggaaaatgccaactataaagatcatgaaaatggaactgggactaacacctatgcggccttaaacagtgtctatctcatgatgaacaaccaaatgcgactcctcggcatggaaacgatggcctggcaggaaatccgacatgccatcatccttctgacagatggaaagtccaatatgggtggctctcccaagacagctgttgaccatatcagagagatcctgaacatcaaccagaagaggaatgactatctggacatctatgccatcggggtgggcaagctggatgtggactggagagaactgaatgagctagggtccaagaaggatggtgagaggcatgccttcattctgcaaggacacaaaggcctctgcaccaggtcctttgaacatatgctggatgtctccaagctcacagacaccatctgcggggtggggaacatgtcagcaaacgcctctgaccaggagaggacaccctggcatgtcactattaagcccaagagccaagagacctgccggggggccctcatctccgaccaatgggtcctgacagcagctcattgcttccgcgatggcaacgagcactccctgtggagggtcaatgtgggagaccccaaatcccagtggggcaaagaattccttattgagaaggcggtgatctccccagggtttgatgtctttgccaaaaagaaccagggaatcctggagttctatggtgatgacatagctctgctgaagctggcccagaaagtaaagatgtccacccatgccaggcccatctgccttccctggcacgatggaggccaatcaggtctgcggcagactcagggcagcacctgtaggcaccccatggagaaatgaacctcgtgaacaaacacagaaggattccgcaccatagcagacatggactgggacgacacagcacattaaccatacaacggacaatggatggaaacaaaagagcaaaagatgaacccagcaacaaaacatagtcaccaatgcacacgatccacgcaagggggaccaacacacagccacacacaggagaccagaacgagaaaaaagcgccagcaaagagagaaaaacggggggacgacagaaccacagaacggaccacaaaaggcaaacaacggctaactggcgagacgagcaatccaaccccccgccacgacacagagcacacccccaataggg

SEQ ID NO: 123274 - DNA, 1145 bp, Homo Sapiens
  misc_feature (164)..(230): n is a, c, g, or t
  misc_feature (714)..(714): n is a, c, g, or t
gggagtggggaaacagagagccggttcctctgctgcagaagtcctcggggttccttctcacaactctgcgaaggggaaagggttgtgagacccaaccagaccccaactccagctcccagcaggaggtggctgcgccacactcgggaggcctcttggtttcaggnnnnnnnnnnnnnnnnnnnnnnnnnnnnnnnnnnnnnnnnnnnnnnnnnnnnnnnnnnnnnnnnnnncctcgtccactcccccaaacatgtccaccggctccctcagcgatgtggaggaccttcaagaggtggagatgttggaatgtgacgggttgaaaatggattcgaacaaggaatttgtgacttccaacgagagcaccgaggagagctccaactgcgagaatgggtctccccagaagggccgcggcggcctgggcaagaggaggaaggcgcccaccaagaagagccccctgagcggggtcagccaggaggggaagcaggtccagcgcaacgccgccaacgcgcgagagcgggcccgcatgcgagtgctgagcaaggccttctccagactcaagaccaccctgccctgggtgccccccgacaccaagctctccaagctggacacgctcaggctggcgtccagctacatcgcccacttgaggcagatcctggctaacgacaaatacgagaacgggtacattcacccggtcaacctgacgtggccctttantggtggccgggaaacccgagagtgacctgaaagaagtggtgaccgcgagccgcttatgtggaaccaccgcgtcctgaccttggagtttggtacctggagcgggagcttctccgcccttccaccaaccccacaggcggcttcgcgggtggagccctctgcctggccatggaggaaggatcccgctaggctggtcccgactggagaagctgctctgccaggtgtgctctctgtcagcaatagtgacctcattaccaaggggtggcgaccacattaccaagcgcaattccccattctccaagggctgagaacttcggtgagttcatccacctgtctatttgcacatggaggacttttcaagatgtcaggatgcccttccatcaccccaccaccgccaccccaacttgactttcaagaacacatttcaagctctg

SEQ ID NO: 123275 - DNA, 1332 bp, Homo Sapiens
  misc_feature (67)..(84): n is a, c, g, or t
  misc_feature (1096)..(1162): n is a, c, g, or t
cggccagtgccaagctaaaattaaccctcactaaacgggaataagcttgcggccgcatacgcggtcnnnnnnnnnnnnnnnnnnagcaatataaagaaagatttattttcaaaagtagcaaaacttgtttgaaaaaaatatatatctttaagtgaattactttataaatgtgactgtcaaagtcagctatcctatgatctacattttacaacatattgtacaaaagatacattgataggctcttatctatttatatatttataattacatattgcacttggaccagcaaggcttgcagagtcattcacggtagaagttaataaagttaaatagatgggaatctttgtaagtacaattgatctcctctggtttggaaacgaatctcctcgtcgttgtaaagtgttctcgcggggtgggacagagagaggagcattgcgagggggaagcagagacagagagcactgagggcaggggtcgccttcccggggcccgctccccccgggagcgcgcctttcccagactcgcacctccaaggtcaggacgcggtggttccacataagcggctcgcggtcaccacttctttcaggtcactctcgggtttcccggccaccataaagggccacgtcaggttgaccgggtgaatgtacccgttctcgtatttgtcgttagccaggatctgcctcaagtgggcgatgtagctggacgccagcctgagcgtgtccagcttggagagcttggtgtcggggggcacccagggcagggtggtcttgagtctggagaaggccttgctcagcactcgcatgcgggcccgctctcgcgcgttggcggcgttgcgctggacctgcttcccctcctggctgaccccgctcagggggctcttcttggtgggcgccttcctcctcttgcccaggccgccgcggcccttctggggagacccattctcgcagttggagctctcctcggtgctctcgttggaagtcacaaattccttgttcgaatccattttcaacccgtcacattccaacatctccacctcttgaaggtcctccacatcgctgagggagccggtggacatgtttgggggagtggacgaggnnnnnnnnnnnnnnnnnnnnnnnnnnnnnnnnnnnnnnnnnnnnnnnnnnnnnnnnnnnnnnnnnnncctgaaaccaagaggcctcccgagtgtggcgcagccacctcctgctgggagctggagttggggtctggttgggtctcacaaccctttccccttcgcagagttgtgagaaggaaccccgaggacttctgcagcagaggaaccggctctctgtttccccactcccagagtcg

SEQ ID NO: 123276 - DNA, 786 bp, Homo Sapiens
  misc_feature (121)..(121): n is a, c, g, or t
  misc_feature (557)..(623): n is a, c, g, or t
aggtcagacgcgtgttccacataagcgctcgcgtcaccactctttcaggtcactctcggtttcccggccaccataaagggccacgtcaggttgaccgggtgaatgtacccgttctcgtatntgtcgttagccaggatctgcctcaagtgggcgatgtagctggacgccagcctgagcgtgtccagcttggagagcttggtgtcggggggcacccagggcagggtggtcttgagtctggagaaggccttgctcagcactcgcatgcgggcccgctctcgcgcgttggcggcgttgcgctggacctgcttcccctcctggctgaccccgctcagggggctcttcttggtgggcgccttcctcctcttgcccaggccgccgcggcccttctggggagacccattctcgcagttggagctctcctcggtgctctcgttggaagtcacaaattccttgttcgaatccattttcaacccgtcacattccaacatctccacctcttgaaggtcctccacatcgctgagggagccggtggacatgtttgggggagtggacgaggnnnnnnnnnnnnnnnnnnnnnnnnnnnnnnnnnnnnnnnnnnnnnnnnnnnnnnnnnnnnnnnnnnncctgaaaccaagaggcctcccgagtgtggcgcagccacctcctgctgggagctggagttggggtctggttgggtctcacaaccctttccccttcgcagagttgtgagaaggaaccccgaggacttctgcagcagaggaaccggctctctgtttccccactccc

SEQ ID NO: 123277 - DNA, 738 bp, Homo Sapiens
  misc_feature (496)..(562): n is a, c, g, or t
gttcccggccaccataaaggccacgtcaggtgaccgggtgaatgtacccgttctcgtatgtgtcgtacgccaggatctgcctcaagtgggcgatgtagctggacgccagcctgagcgtgtccagcttggagagcttggtgtcggggggcacccagggcagggtggtcttgagtctggagaaggccttgctcagcactcgcatgcgggcccgctctcgcgcgttggcggcgttgcgctggacctgcttcccctcctggctgaccccgctcagggggctcttcttggtgggcgccttcctcctcttgcccaggccgccgcggcccttctggggagacccattctcgcagttggagctctcctcggtgctctcgttggaagtcacaaattccttgttcgaatccattttcaacccgtcacattccaacatctccacctcttgaaggtcctccacatcgctgagggagccggtggacatgtttgggggagtggacgaggnnnnnnnnnnnnnnnnnnnnnnnnnnnnnnnnnnnnnnnnnnnnnnnnnnnnnnnnnnnnnnnnnnncctgaaaccaagaggcctcccgagtgttgcgcagccacctcctgctgggagctggagttggggtctggttgggtctcacaaccctttccccttcgcagagttgtgagaaggaaccccgaggacttctgcagcagaggaaccggctctctgtttccccactcccagagtcgtgccgt

SEQ ID NO: 123278 - DNA, 1254 bp, Homo Sapiens
ataattgaaacttttcccttcttttcagaaaggattgaatggccattttcggaattttccttgccaggcccattcgttttcccattccggagggagtcggcattttggttgttcatcatgagataggcccttgtttaaggctgcattaggggttagttccagtttccattttcatgttctttatagttggcattttccaggctgctgatcacctcagtcatatcccgggagttgtcgttcaggacagacatgaggactttgggctctgaggcaaaggtgataatggcaacgctcacattgatctcaaagctgaagatcctttgtcttctgggtgggattggtggccccaagcatgtgggagaagggaagtgccccagggcaggggccacgtcttcagggaaagtcataagagtagggttggcggctgatgggctccgttccactccagacccccgttgccctggcactcccgctcggaagaccccgtgagcacaagattcgaggagcagcgatagcggaccttgtccccatgaccaaagcggaagcctgtccgcactgcgcccagtgaaatgcctgggttggggcagtggccagccccattatcacacacagctgtttctccatcccacatgccgttggggcgacactgacgcacaggcgagccccgcaatatgaagccatcctcacactcgaagctcacattgccacccacgggataggaccccagccgtggggtataaatgccattctcaaaggagacaggggctggacagcgcacaggtttgcagaccgccttagacagagaccgggtggctcctggggtctgccactgtccgctgctcttgcacagccgtgatgctggggatgggtacaggccctgggggcaggagtaggtgagaaggctcccaggagcccagccatggctgagggtgaaggtgccacccgagatattcacgttctgagggcaggagggagccgagtctgccagacctgggtacaggaacagcaggcaaaaaagaaccatcagtgggcccatggtgtcctccctaggggcggcgagaggtagagagccgcgggagggaaaaggtcatctgacttcccgaaaactagagctgggtcagcagctgcttcattgctgccagagaagaaaaaccagggagtggcaagggggatggtcttctgttagggaaataataagcagggattggggactgaactgaagggtgaaacctttgatcccgggaattccggacc

SEQ ID NO: 123279 - DNA, 1129 bp, Homo Sapiens
  misc_feature (887)..(953): n is a, c, g, or t
ttggtgccgttgttggggttaatgaagggcatcctagacatcttgaaagtcctcccaggtgcatatagaccaggtggatgaagttcaccgaagttctcagccccttggagaatggggaatgcgcttggtaatgtgtcgccacccccttggtaatgaggtcactattgctgacagagagcacacctggcagagcagcttctccagtcgggaccagcctagcgggatccttcctccatggccaggccagaggggctccacccgcgaagcggcctgtggggttggtggaagggcggagaagctctcgctccaggtaccaaactccaaggtcagacgcggtggttccacataagcggctcgcggtcaccacttctttcaggtcactctcgggtttcccggccaccataaagggccacgtcaggttgaccgggtgaatgtacccgttctcgtatttgtcgttagccaggatctgcctcaagtgggcgatgtagctggacgccacgcctgagcgtgtccacgcttggagagcttggtgtcggggggcacccagggcagggtggtcttgagtctggagaaggccttgctcagcactcgcatgcgggcccgctctcgcgcgttggcggcgttgcgctggacctgcttcccctcctggctgaccccgctcagggggctcttcttggtgggcgccttcctcctcttgcccaggccgccgcggcccttctggggagacccattctcgcagttggagctctcctcggtgctctcgttggaagtcacaattccttgttcgaatccattttcaacccgtcacattccaacatctccacctcttgaaggtcctccacatcgctgagggagccggtggacatgtttgggggagtggacgaggnnnnnnnnnnnnnnnnnnnnnnnnnnnnnnnnnnnnnnnnnnnnnnnnnnnnnnnnnnnnnnnnnnncctgaaaccaagaggcctcccgagtgtggcgcagccacctcctgctgggagctggagttggggtctggttgggtctcacaaccctttccccttcgcagagttgtgagaaggaaccccgaggacttctgcagcagaggaaccggctctctgtttccccactcccagagtcgtggccg

SEQ ID NO: 123280 - DNA, 894 bp, Homo Sapiens
cagaaaacatttttttctactttgggagaaaaagtgaggagatagagataaaaatacaaagaaaaactagcgtaatcccccaacccatacttcatttttaaacaaacaggccaggtcctgccaggccttcttccccattaaatcccaaggccagctccagtcccaaccccaacccctgcatggcgccgaaggaagcttcaggcttcgggcaagagctccagcccaggcaggcaggtcgtggccctactgccagagcacaaccttcctgccctggtccacgctcaccatgtggctcccggagtagcaccaggccacggcgttgacggcagcgcaatggggtccctgtagtctgctctccagtttcccggtgtccacatcccagatgtaaagggccccatcacaggagcctgccagtgcatagcttctgtccgggctgaacacagctttggtccagtcagaaccacacttgaagccatcggccctgaacacctggcggatgttgctgacacgcaggtcgatgaccttgagtgtgttgtctcgggaacagctgagcaggtgcagttggtcgtggctgaggctcagggaggtgacccggccctgcacagggatgacctgggtgcagtggggccccctgctgtcccagaaccggatcttctggtcattgtggccactaatgatgatatggtccccacacaccacgtcattacagtaggaaaggacattgatggtcctggagcaataggcacagacgaggtcccactccttcactgtccggtcgcggctcccagtcactgcctggtgcctcgttagccttgacatttggcaggctgtcaccattatcattgctgtcccgaccagtgtctcccttggcactgtgcctcccccaccttccag

SEQ ID NO: 123281 - DNA, 2581 bp, Homo Sapiens
  misc_feature (537)..(537): n is a, c, g, or t
  misc_feature (686)..(695): n is a, c, g, or t
  misc_feature (759)..(759): n is a, c, g, or t
  misc_feature (853)..(942): n is a, c, g, or t
gggataggacaatgcgcgtttcggctgacagggcgtgtaaatcatataatttcggccgaaggtttgttgtggtgtgtaacaaaagaagaaaacctggttcccctttttccccggaagaggggtttggaataagagatatttttgtgttgtgggggccccaacccctagagccgtgggggtggggaatctctccccccagtttttgagaatgtggagcccgtggggcgcaaaaaataggttatatttgtttcttttggggcttcccgggttgttttgggcgcccagggggcgtctaatattgtttatatttggcggcaaaggagggagccacaagggttgggttccgatatagcaccgcgtatgggcgagagatttccacggggttttcattcccacattgtgccgtgataggtggggtaatggcgcttgtttcccgcgccgttgcggggtcccggagatatgtgtttataattggagaaatttcttcccccccgcttttttttggcgaatacacaagggcccgggggggcgcggggncctgaaatattttggaaaattcggggggttgtgggctttgggggtttcctttttggtgatcgggtttaccaggttaaatgggcctcccccgaattcgcagtttggggtttttatttcaaaaaacggttcgcggttgcccccgggggtgnnnnnnnnnnggtggcgaaacccaaaacccttagtcccgggctccgggatttcgctaggagaaaccggccatgngcccggtttcctctttcgtgtctcggggccgccggcgccgaaaagaaatggtttagataaactttttccggggccgggggcgcccggacaaggnnnnnnnnnnnnnnnnnnnnnnnnnnnnnnnnnnnnnnnnnnnnnnnnnnnnnnnnnnnnnnnnnnnnnnnnnnnnnnnnnnnnnnnnnnctctttccttgggaaacagctttatttacaaaacaggtctaaaataagaacatgaaatgacaagtccttgggaactgcgggagaggtggttcttgtgtgaagcccaggcatccagacgtagggccaaaaaaagggctagtgtgaggggacctaaaacttgaactccttatatttcttgctgcccccacggctgtcctggggctgagctttccgttttttttgcttctgtttggcagcgtgctcagccaccatgtcactgaagtcctccttctctacttgagcctgctgctcccgcacatgctcctcatacttctgggtcatggccataggatccagctccaactcttcaggcgccagcgccacttccacaccttgcagctcaggagccgggcccttccggctcataaccgtggacatgtcataaatgtgggttgatcccatcatggcccctccaacagtggctgttctcttctctggcaacacagtgaagagctgaggtgtctcacttccgtccatcgcctcctcaatcttcttcttcctcagctcaatgagttcaggggtctccattccagcaggcactgatgaaaagcctccaggagtgataaggccactgtctgcaggggtaataaagcctgtctcatctggtttgtcttcatcactttcttcctcttcctcttcttctgaggattcttcatcagatggttccagttccccccaaggggtccgatcaatctcttcttcctcagtcttggtctgaaattcagcagcattggttccaaacacgtccccatagagcggtttcccagtctcatccactggaggtttgccccagccaccagcatggtacccaaaggaacagctctcagggatgggcgagttcagcccagggattttcaggttgggatacgatgggggtggtccatatcgctgcatggcaatcagccatgggggagggaccttgtgggcatttggtcctactggcatccccaaggaaatccttagctcatcagacagatctcctggcttcttctccttcagtcgtgtctcgaactccttcccctcatagtacaggtccccatggatggtcagctttggcttggtctgccacttgaagaaggcatcatgcagtttctggtagtcgatgtcaattttgcccatcttaggccgaactttctctcgcatttttgacttcatggtcttctgttcttccttctcctgcagggcctctcgcatctcctggatgcctgtgcgtttgatgaagtctggcagctcgaaggggggcttctcaatgccccgtttgccctgcaggtatttgcgcttaaaacaccagtggcgtggcacaggcacagagttccgagtggccttgaggtgaaccaagagcttagggtcctgcgctgtcacatcgtgcatctccacgacatcgggccgagccaccagctgcttgagttcagccacagtgaagcggttcattcggcgcaacttcttcttggacagcttgggggcttctggcttcttttcctgctcgtcatcactgctgtcatcatcactgtccttgtgctcctcttcaaatcccttcttcttgggggctgcagagcggacgcgtgggtcgacgatatcccgggaattccggaccggtcca

SEQ ID NO: 123282 - DNA, 987 bp, Homo Sapiens
tttttggacagctcggttttctttatagacattctcatagtttgagtgaagcccaggacgcggctcgtttcattctcttctcctgtgagaataattttccgggggcttcttcaacgcaggatctttccaaggctgggggatctgaggctcacagagggtcatccatctctctgttctcatctccagggggcggtgggggaccccgaggccggggaacaggggttcccatgggcaaaactgtaggagtggggcccactgggcccactggagcagctactcgaggacccagaggagtgcgcacaccaatctggcccatgtcttgtgggggccgagggactggggtgcccatcttggcaatctcctgctgtcgttcctgctccagtaacacagctgcccgcttctgctgctccaagagctcatgttccttcagcgaatgatctccctgctgcttggcacgctcctcctgctgcatcagcaatgccgcctgctgctgagccaacttcagccgctcctcctctgacagtgccactggctcacccacacggagaggaggcgggggccccaaatttggtgggtgggccataggaaagccaaggccaaggcctggtggaggtggtgggggtggcggaggaggctgcagaggggggagtcccaaaggtggtggtggcatgggaattccagggagctgtgccgacatgggaggtggagcggctttgtccccatcttcccctctcaaaaccggccgattcagcacgatgccagtctggcgggtgtagctctgcagccgctccaccagctcctcgcgattaccctggatcggagctccgatctctgccaacttggcctgaagctcctgggcagcccaggcgccatagtggcctggaggtggcggcggcggcagctgcaattctgctttgggaggctcgggatgctccgtcgcccctcgtgccgaattcggcgcgccgtgacttcatactcttcgccctt

SEQ ID NO: 123283 - DNA, 806 bp, Homo Sapiens
tcattcaaggggcggtgggaccaggagccgggaacagggctcccatggcaaaactgtagagttgggcccactgggcccacttgagcagctactcgagaacccagaggagtgcgcacaccaatctggcccatgtcttgtgggggccgagggactggggtgcccatcttggcaatctcctgctgtcgtccctgctccagtaacacagctgcccgcttctgctgctccaagagctcatgttccttcagcgaatgatctccctgctgcttggcacgctcctcctgctgcatctgcaatgccgcctgctgctgagccgacttcagccgctcctcctgtgacagatgccactggctcacccacatggagaggaggcgggggccccaaatttggtgggtgggccataggaaagccaaggccaaggcctggtggaggtggtgggggtggcggaggaggctgcagaggggggagtcccaaaggtggtggtggcatgggaattccagggagctgtgccgacatgggaggtggagcggctttgtccccatcttcccctctcaaaaccggccgattcagcacgatgccagtctggcgggtgtagctctgcagccgctccaccagctcctcgcgattaccctggatcggagctccgatctctgccaacttggcctgaagctcctgggcagcccaggcgccatagtggcctggaggtggcggcggcggcagctgcaattctgctttgggaggctcgggatgctccgtcgccatcttagccgccctcgtgccgaattcggcgcgccgtcgacttcatactc

SEQ ID NO: 123284 - DNA, 2160 bp, Homo Sapiens
gagtcagttccccaggggtcgatcatttctcttctcagtctgtctgaaatcagcagcattgttccaacacgtccccatagagcggtttcccagtctcatccactggaggtttgccccagccaccagcatggtacccaaaggaacagctctcagggatgggcgagttcagcccagggattttcaggttgggatacgatgggggtggtccatatcgctgcatggcaatcagccatgggggagggaccttgtgggcatttggtcctactggcatccccaaggaaatccttagctcatcagacagatctcctggcttcttctccttcagtcgtgtctcgaactccttcccctcatagtacaggtccccatggatggtcagctttggcttggtctgccacttgaagaaggcatcatgcagtttctggtagtcgatgtcaattttgcccatcttaggccgaactttctctcgcatttttgacttcatggtcttctgttcttccttctcctgcagggcctctcgcatctcctggatgcctgtgcgtttgatgaagtctggcagctcgaaggggggcttctcaatgccccgtttgccctgcaggtatttgcgcttaaaacaccagtggcgtggcacaggcacagagttccgagtggccttgaggtgaaccaagagcttagggtcctgcgctgtcacatcgtgcatctccacgacatcgggccgagccaccagctgcttgagttcagccacagtgaagcggttcattcggcgcaacttcttcttggacagcttgggggcttctggcttcttttcctgctcgtcatcactgctgtcatcatcactgtccttgtgctcctcttcaaatcccttcttcttgggggctgcagagttctccagtttgtcaagtttctctggctctttctctttctccttcttcacatcatcagtgagcttaaaagcctcaaagatcctcttaaagaagataaagttgggctcgtaaatttcaggttcttcagtcacatactcaatctcaacatcagctgctggggaatcagagccacgggaccgggttgagtctttctcccggtccccagagctctcagaggacacccctcgcacccgctggggctttttcttcttctttcggttcctacgcttccggtttttctcctttttagatacggacactgtgtcctcctcagtctctgacgctgactggcccagggacgagcgagcatctgtttccatttcctcttcctcctgctgagaattcatctcttcctggcggctctccttcagctgcaggatcttctccaaagcctgggggatcttggggcccacagaggggtcatccatctctctgttctcatctccagggggcggtgggggaccacgaggccggggaacaggggctcccatgggcaaaactgtaggagtggggcccactgggcccactggagcagctactcgaggacccagaggagtgcgcacaccaatctggcccatgtcttgtgggggccgagggactggggtgcccatcttggcaatctcctgctgtcgttcctgctccagtaacacagctgcccgcttctgctgctccaagagctcatgttccttcagcgaatgatctccctgctgcttggcacgctcctcctgctgcatcagcaatgccgcctgctgctgagccaacttcagccgctcctcctctgacagtgccactggctcacccacacggagaggaggcgggggccccaaatttggtgggtgggccataggaaagccaaggccaaggcctggtggaggtggtgggggtggcggaggaggctgcagaggggggagtcccaaaggtggtggtggcatgggaattccagggagctgtgccgacatgggaggtggagcggctttgtccccatcttcccctctcaaaaccggccgattcagcacgatgccagtctggcgggtgtagctctgcagccgctccaccagctcctcgcgattaccctggatcggagctccgatctctgccaacttggcctgaagctcctgggcagcccaggcgccatagtggcctggaggtggcggcggcggcagctgcaattctgctttgggaggctcgggatgccctcgtgccgaattcggcgcgccgtgacttcatactctttcgccct

SEQ ID NO: 123285 - DNA, 857 bp, Homo Sapiens
  misc_feature (69)..(69): n is a, c, g, or t
  misc_feature (78)..(79): n is a, c, g, or t
  misc_feature (172)..(172): n is a, c, g, or t
tctcggagatacttctgcgttctaggcgattctcagctgggatctggccacagaggtctcatcttcgtntatctcagnngcgtggggacacgagccgggacagggtcccatggcaaactgtagagtgggcccactggcccactgagcagctactcgagacccagaggagtgncacaccaatctggcccatgtcttggggggccgagggactggggtgcccatcttggcaatctcctgctgtcgttcctgctccagtaacacagctgcccgcttctgctgctccaagagctcatgttccttcagcgaatgatctccctgctgcttggcacgctcctcctgctgcatcagcaatgccgcctgctgctgagccaacttcagccgctcctcctctgacagtgccactggctcacccacacggagaggaggcgggggccccaaatttggtgggtgggccataggaaagccaaggccaaggcctggtggaggtggtgggggtggcggaggaggctgcagaggggggagtcccaaaggtggtggtggcatgggaattccagggagctgtgccgacatgggaggtggagcggctttgtccccatcttcccctctcaaaaccggccgattcagcacgatgccagtctggcgggtgtagctctgcagccgctccaccagctcctcgcgattaccctggatcggagctccgatctctgccaacttggcctgaagctcctgggcagcccaggcgccatagtggcctggaggtggcggcggcggcagctgcaattctgctttgggaggctcgggatgctccgcctcgtgccgaattcggcgcgccgtcgacttcatactctctcccccct

SEQ ID NO: 123286 - DNA, 958 bp, Homo Sapiens
  misc_feature (259)..(292): n is a, c, g, or t
  misc_feature (707)..(707): n is a, c, g, or t
  misc_feature (739)..(739): n is a, c, g, or t
  misc_feature (820)..(820): n is a, c, g, or t
  misc_feature (827)..(827): n is a, c, g, or t
  misc_feature (834)..(834): n is a, c, g, or t
  misc_feature (945)..(945): n is a, c, g, or t
ccagcttccaggccacttttatttaaacagaagcagcggccccacagccacggggacatgtcttccaaacagtagacacagtgcctgtggctgtaagagcctgacagggaagattcatgcctttctccttggcccccatgaccaaagaagaaaataaaaatcacacaccatacactgccacacccatctccacccctccctttcagtaatatccaagtattcatccttctggccaaagaaactggctacaattctgatnnnnnnnnnnnnnnnnnnnnnnnnnnnnnnnnnngggctctggaggggagaggcttactctgatactttccacatgcactgcccactggcatcaagtttaactccatccaaaaccatcacatggatggccagggacaggactggctacaaaaaaaagccatgaactcagctcaccatgctaagaagactgcctctttccaggcaagattttactggagcaacataaccggagggtgtgattccaaaataccttcctttccaagccccgggttgtggataaggtctggattttggttatatgactaagggcgacagaggctgctggcatctctggccaccgtcccagtggcttagggttggaggcttcactggcacaacaatggcactgtttaactagctcgtgttaccattcatctacagcaagtaaatcatcagttttgactgagcanggagcacatggtctctatgagagctatgcagnatcaatgcttgtaaataaggatgaggttcttcttttctctgcccctcaagcaatggtaggtggtctttgctctgatgctgntgcccancctcaanacctgctaaaccggatgtgcagcctgggggaggtgaacctcatgatctgaagtctgacctgatgaaaaatgctctgcagcagtagactctggataatgactgctgggtgangagttgatgatac

SEQ ID NO: 123287 - DNA, 3491 bp, Homo Sapiens
  misc_feature (76)..(76): n is a, c, g, or t
  misc_feature (87)..(87): n is a, c, g, or t
  misc_feature (283)..(283): n is a, c, g, or t
  misc_feature (305)..(306): n is a, c, g, or t
  misc_feature (329)..(329): n is a, c, g, or t
  misc_feature (341)..(341): n is a, c, g, or t
  misc_feature (372)..(373): n is a, c, g, or t
  misc_feature (384)..(384): n is a, c, g, or t
  misc_feature (387)..(388): n is a, c, g, or t
  misc_feature (403)..(403): n is a, c, g, or t
  misc_feature (405)..(406): n is a, c, g, or t
  misc_feature (412)..(415): n is a, c, g, or t
  misc_feature (419)..(419): n is a, c, g, or t
  misc_feature (422)..(423): n is a, c, g, or t
  misc_feature (1031)..(1047): n is a, c, g, or t
  misc_feature (1072)..(1099): n is a, c, g, or t
gcaggcgcgcgcccatcctgttaatttatgtcccgactaatcaacgccgggggtcggggtgctcatctgaggcaanatgcgtagcangatcccttatattttgtatatccagcttggatctaaggtggcgcgaggactagctagaggccagcgcgtcggagtgagatctcgctcggctcagcgcacggcggggaggagtggggacggatcactacagacgtgtcgctgtggcgggccccccacgaatcacaagccgcggcgcgtgggaaacaaagtacgtcgnccccggcgcccgccccctctcnngagactctttttttgagatgacnctcgagggggangaaaaaagaagggtctcgtcctcgtccccgnnccgggcgtganaanngacgggtcgatattngnncccgtnnnnaggnganngtcgtatgtttatctctgccgcgaagctgcgccgagtaacacgcataacgagtggagtggcagccaagatgatatcaatcggcatccgcgcagtcgctatgcgtttcgagcaggcggagatcgtttgtcggacgctgaggctgtgagcgaccgaccacgggtcacgcgcgtgtccctacacgagatatgatcttctgcacgctccggcgcggcgagtttgcgggggagcgtgcggtataggagcatacaaaggggcggcgggcgcgagcctcacgtgtgtatagattatcccccagacctgccgatccgttgcgcgcacccccccctctttcggatagataagcgcgccgtgccaaaccggcccaccccggtagggccgccgccgttctggggcgtgtcggttttccggcgaaaccccgctgggggtaccccccacccccaatcttcttttttttggcatggtcaagcacaacgcgcaaacgcccatggtggggaggcccccgagggtgtttgtttaggtcagctcactcgctgttcccccaactcaccccctgccacattgggtggggcggcgccgcccccacaaagtggtgtaaacaaggtttttnnnnnnnnnnnnnnnnnccgacaaaaaaatccttcatcgccnnnnnnnnnnnnnnnnnnnnnnnnnnnncaggtacattggcggcggtgccggccgcgggcaaaataaatctactacggtgtgtcgcataaaataagatttctgttccaggccacttttatttaaacagaagcagcggccccacagccacggggacatgtcttccagacagtagacacagtgcctgtggctgtaagagcctgacagggaagattcatgcctttctccttggcccccatgaccaaagaagaaaataaaaatcacacaccatacactgccacacccatctccacccctccctttcagtaatatccaagtattcatccttctggccaaagaaactggctacaattctgattctaaagaaaaccttcatgcagccaagaaactcagggctctggaggggagaggcttactctgatactttccacatgcactgcccactggcatcaagtttaactccatccaaaaccatcacatggatggccagggacaggactggctacaaaaaaaagccatgaactcagctcaccatgctaagaagactgcctctttccaggcaagattttactggagcaacataaccggagggtgtgattccaaaataccttcctttccaagccccgggttgtggataaggtctggattttggttatatgactaagggcgacagaggctgctggcatctctggccaccgtcccagtggcttagggttggaggcttcactggcaaaacaatggcactgtttaactagctcgtgttaaccattcatctacagcaagtagaatcatcagttttgcactgagcaaggaagcacatgggtctcctatgagagctaatgccagaattcacatgctttgtaaaatataggatgaggtttctttctttcttctgccccctccagaggccaaatgggtagggtggttcctttgccttctgagtgcctggatgcccccagccctcacaagaccctgctaagacactggcagtgtgccaagccttgggtgggatgggtgaacacccttcaatgactctgagaggattctggcacctggaatgacaagacagatgcttccctgcaagccaggtatgagcctttctggaaatgagatgggagctggccttggggttgaaggaaggatcttgaatgacagataatccccaagtgtccactggatcattttgtcctcgtgactttccacacaaatgaggctttccgtgggttttgcaaccacagtgtctaagacaatcagaagggttccagggaggtcttgtctgtagcgatgtgacagatgaggaaactgcagctcagaggacaatgacttgcccacgttgcacagctcgctgacagtagagaggggctgaaacctaggtctcctgactcacacgccacaaccatgactggctcagctcccttaattccagcttcccttacatgacgcaattccttctcagattcgggttttcagctgaggctgggcagttcttaagatagagttgcataaacaaccaagctttgcgttataacaagccagggaaggacctagggaggttcccttccctctggaacggaaatggaactttctctgagcttaggatttgtaaggcactgaaattaactacagctggggtggggagtggtggaagaaagaaaaagagggatgagtggttggagaaatcaagtcgatgctcttttcttccagccccacggtgagaatcctacagaaacatgagggtggactccactttcccacctgatgctgtccactccccagcccctgctgcagagcagcgcggacccactcccaccaagacaaagtgggttttgggaaagatgaggcctgcagggttggtgagccaagaagaatgagcccaggtcccctggatccaattcagagcggagaccactctctccacctaggtgtcccaggctgaggctgggacaagattcaaccctggaatgccttctccaggaacacagggcactccgagtggactcagtggtggctggggtgggcctgcaggcccaggcatgaaggaggaaggggcaggacggcaccaaggatggcagggagaactttggcctcggacctggctttggcacagcgcatctggggcctccccactccgtggctgccctcctgagatcccagggtggggaagagctgtccttctcctgtgaggacctcgtctggctgatggaggcgatggcagggcaactccagcgtatccccttcatcattccagccatggctgtgcacaggtgacctaatgtggagccttttcaggctccactgcagatgtgacgctgaacgggaagcaacaagagctaccacttacccagcaccttcaatgtgaccagtgctcaactcagatgacaacaacctgcaagtaggtattactatccctttcaactaatga

SEQ ID NO: 123288 - DNA, 581 bp, Homo Sapiens
  misc_feature (310)..(450): n is a, c, g, or t
tggcctcggacctggctttggcacagcgcatctggggcctccccactccgtggctgccctcctgagatcccagggtggggaagagctgtccttctcctgtgaggacctcgtctggctgatggaggcgatggcagggcaactccagcgtatccccttcatcattccagccatggctgtgcacaggtgacctaatgtggagccttttcaggctccactgcagatgtgacgctgaacgggaagcaacaagagctaccacttacccagcaccttcaatgtgaccagtgctcaactcagatgacaacaacctgcnnnnnnnnnnnnnnnnnnnnnnnnnnnnnnnnnnnnnnnnnnnnnnnnnnnnnnnnnnnnnnnnnnnnnnnnnnnnnnnnnnnnnnnnnnnnnnnnnnnnnnnnnnnnnnnnnnnnnnnnnnnnnnnnnnnnnnnnnnnnntccattccactgggctgccccctggaagccaggatgaaggtggtgttgggctgtcagggtgggagttctggaggggtttctctttgaaagtgtggatctaggaaagcagccaagcttgagtgaagggaaga

SEQ ID NO: 123289 - DNA, 2120 bp, Homo Sapiens
tctcgctctggtgcgtgccccctccctataacgggggccctcttggccccttttgtggggcgcgccacgcccctttagtgcccggggccaccggcacattgggcccttcgggctcccgaaatttctcttccgggcgccccagggtaccggtcccgccccgtcaggccgggctcgctcagtgccccccctgcagtggttctttcttcccggtcgactgatgaagggccggctcagagggttaatggacttcacccagagtcacacagctaatgagttctaaacggggaactggactcaggcttgtctgactccaaatcccacattctttccattccactgggctgccccctggaagccaggaggaaggtggtgttgggctgtcagggtgggagttctggaggggtttctctttgaaagtgtggatctaggaaagcagccaagcttgagtgaagggaagatgcctgaccactcacacgtgtctgtctctccaggcgggctccagctcagtgcctggcggccttgcagatcttgtcgtacacctcggggaaggcgtcctggcaacccagcttctctcgcagcttgtggtacaaggagccatcaaacatctcccagaactcctcccgggttcatgtagcagtcggcatacagcatctggaagccatgcacgctgcggacaaacttctccagctgcctcatgcaggacctggcttcaaagtgtttcacacgcggctccccatatgctccaatgtcgatgtagagctctgcctcatttcctttggggtgcactaggcctggctggctgggcaggatgaacggacacagccagatggggtagacgtggatgtcgttttggaaggtgtgcagggcctgctgcaggcacttcatgggcaccagcatgtcctgcaccacgtggtgctgctcgtacagcttgcgcagggtctcaccctgggtcagcttcaggagggagatcttgggaggcaccatccagccaaagaggtagcggaagatggggttgttgccaaaggggatgatgtcctggagctcccagaagatgctgcgcgtgtggcggtggtagtagtgtctcaagggaatgtactccaggccctctcggtttgtcttcagatagttctccacatgcttaaagaaccacggcttgtagtaattgccaatgctattcagcttgctgggctctgcctcatctgtcatgacccctgtcataatgccagcctcatccagggagtagagcagcccttccacgaaggtggttctcctgccgctgggactcgtgggtgaacttggcacagatagcctccaggccccgcactggctcgaaacgcagcttgacgtacttcttggcagggatgatgcggatctcagcggccaccaggaaacccagcgtcccacaggaccagggtacagcatagaacaggtctgagttttcggacggagtgcatcgcacaaagctgccatcagccaggaccagctcgtaagcagtgcagatgtgttggaacaggccgtacttgtgggatgatgactcgatgcctgtgcccatgattaagccccccactgtgaggtcatcaagctcaggcaacacggggagagtccagccaatggaggtcagcagggcagtcacctggcccatggtcaccaagggctccacacggacaatctgtttcttggtgtccacttccagaatgtccatcaggttgatcatgatgttttttgtgtgtcttcttgtacttcccgacacgtagtgagacagtgagccagccagggcgccccgtgcacatgaaggtcttgctaccctgctccttccattcccgcacctgcttctggatgtcccgcacgcgctgctcgtgcaggcgcggagcgctgctgagcttgaacaccacccaggcgcgcacgtagtagtagatatcgaagataagcgagagcggcaggaggaagaggcacacgaacacccagcgctggtggatgagcacgaactccagccccttcaggcgcacccacagcaggaagagcagcgcgcacacggccagcgacacggcgggctccatggtgcggcgccgcgcggtaagcgctgcgggttcgcgcctcctgtcactgcagccagctccgcg

SEQ ID NO: 123290 - DNA, 1085 bp, Homo Sapiens
  misc_feature (960)..(960): n is a, c, g, or t
gctgagggtggctctggctcgtctgatggcacggatgttcctcccaatcccttgtgtgacttggtacaaatagtcaaacaaggtaagaacattgggtgtgtacccagccacaaacttccttcatcacctttggtacattggtgccgctttggtccaagttgcggggcttgggctcgtgcccgcaaatttgtttactagttctaccacactgcaggtaaatcccagccacagcagctgctgttcccagacccatgccagtgtccaagagcacaaaactgattccttctgtgaaggtgtgccagacccaggccgaggagggtcaggatgccagaggtagtgccaacagagttggacaccacattggcaatggtggtgcctctgtggacctgctcaacctcctctgcaagggcacggagcttccttatgtgatcctcaagctcccttttcaaccgaggaaactctttcaaaaaccactgcctgtgctgctggtctttatcgtggcggtttttgtccttcatgaccatgtgacttgcaagcttgttcagagctttacggagctcatctgcctcatccctgggcagttcagcagcagccacgaatccattccaggcttcatcatcagtcagcagttgtagcagattctctctgctcacttggtcctggaaatacttaaggtaatcctcaataaagatactgctctctgggttcatggtgccagcggctgggttaccgaggggctttccttggagctctccagtcactgtccagactggaaggttttccttaaccctcgttccagcttcctcttccctcactctcacaccaaggcagggtcctcttgtcctgtaggggtatgagaagaagataatcagaggaggggcagccatctgatcattacagaaactacagagtctatacacaggaatagagatgggagggaacattctgacaatgacctgngcctgggaacatgtatgataactagttgatgatagccagtgtgtattgtgtgtctgtgatgtgcatggcctctgacatgtatctcattcgatgatcacacacaggacaggagatgggtacacttt

SEQ ID NO: 123291 - DNA, 667 bp, Homo Sapiens
tttttattttataaatgttctatatttattaggagaaaactttatattgccttttttatcaatcatgtaacaggcttatagctttccaacagagctgcttgccaaacaattttttttgtttattaaacagtgctgaaacaaacaggatcagcatttacttaagatgttaagaatgaggacttttaatcagccgaaccaagatattgttacctgtatgcattcccaaagtctagatgctcagtatgttcagtcatatctttcagaatcagtgaaccgattaccctttttttggtattcactctacatctgccaacctagttcaccttggttttgtgtctgctgtagaagggaaccataacttggttaaaccgtagggattatcattgtatacatgctgtgaacatgtatatgtgcaagttttaatgtattctatgttgtaggcttattatttaattttaccacttcatcacttttgtacagtggccaagcagacacctcaaactccagcatttacattaagtgcatttgtacattttaggccactggatccagattttatattggcagttattgagggcaaaagcaatatattgtaacagaatgtataaatatttttgataaaacagtctatattttattaaaaaatgaattataacactaaagctgt

SEQ ID NO: 123292 - DNA, 1103 bp, Homo Sapiens
  misc_feature (161)..(170): n is a, c, g, or t
  misc_feature (990)..(1001): n is a, c, g, or t
ctaaggcacttcacttagagactggagtcctgcttataatcatgcatataacctttactttgatggatctggccagaggggtgttggagcccagcccacccacataccagtcaagctcttaggggagcagaagaaaagcaggaagaatttaaatgtttaannnnnnnnnnaaattgacttttctagttattaaaagttgcttgtttcagcagtgatattgtataaagaacatcttgtaagatactcctgacatcttgctttagcacatgtacagtacagtttctatgataatgtgtttgctctaacttccctggcttctccttcagcccatccactctcctctagagcagttgggttggaggctcattgaggcaagcagcaacattggagggggagcagggcagtgctgtgtctgctgcctcccatgcccgttctgacctcagccttggaactcctcaagaacctgaagattccagtggtcagtgtcggtggggggtgggaggagagagcggcagagaagctctgagagccccttcccccacaacaaatctagctctagttgttatatttaggcaaaactttgtagtcttctttcccttttatgatggattttgataaaagtacaaaacagggtttttcttttttatcacctttgaatttggaaattttgagcacccaagctcttctgtacctatttaaagtccaccaaggggactgcagctcctagaacatgagaatcaagcctcttaattttaaactgcggaatgtggcctctgcttcctccgtcctcctgcccaaggacgacgaggattgctccagggctgctgggtagtttaccgtcccttctataggcatggagttggcactgacatcacagcttcataaccccaccaccgccagcttcccctgcctcctacatccagtctgttcttgttcatagtgagaatcctgtgttcccacttcagtgacacctgaattgtttgttgttgnnnnnnnnnnnnattgtcttcaaagaggaagggccccattaaagggtgaacttgtaataaattggaatttcaaataaacctcatgtacttgtgtttataaagaagggaaaaaaa

SEQ ID NO: 123293 - DNA, 1615 bp, Homo Sapiens
  misc_feature (59)..(93): n is a, c, g, or t
  misc_feature (339)..(433): n is a, c, g, or t
  misc_feature (927)..(943): n is a, c, g, or t
aaaaatattacatgttttattatcctgtccccagagggtggtttatccagaaaccaagnnnnnnnnnnnnnnnnnnnnnnnnnnnnnnnnnnnggtagggggagcaaaaccatcaaccaccaggcagccaggccatcagcccacctccacctctggagggtccccagagacccacgcccgacgcagacccggaggagcatcagcaaggggcccgggcagagaatcggctatgtcttcattatgagagcaggagagacggcagagatatgttgctaggtgaatatatatttatataataaatccgtaagttaataaagtaaatagtaattctctgaaagnnnnnnnnnnnnnnnnnnnnnnnnnnnnnnnnnnnnnnnnnnnnnnnnnnnnnnnnnnnnnnnnnnnnnnnnnnnnnnnnnnnnnnnnnnnnnnnggttcttagaaaatctgagacacgtgaggccagacaaagcaaggccggggctggtgggatggggtgcggttcaggggggcccggtctgccaactcagctcctctgctgcaaaagcggggtgcttgttggggccatctcctggcaatggcaagtgagtctggagcagagaggggagaggggctgggtgggtccccagccgtcaggtggtggtggcgccctctgctggcccctcgcatggcccaggcagttcctggacaaggcacatggggctttggcctggattggggaggccttgaagggacctcagagcaaaggaagagacctgggtgtggtgaggcatcccagggcatggaagggaccggttgtgctgtgggaatccactggcccctccttggttaaaaaagcacaacacatcatacatatttaccagaccagaagcgctggccccaagtctccccaacctggtcgggggaacctcctggccaacccacaannnnnnnnnnnnnnnnncctgccccagcccctccctgcccacccacccaccccggaggactgcagagagtgctttgcatagatacagagtggaggaatgggactgtggggctgcccaggcccctcctggaggccgtcgggggtgttgggtcaggtctctggggcctcacaggtcgctctcgccatacaaggccgtggagaaggacttgtagtcgagggcaccgggcacggcgtcagggccctggtatggcgccatgcgggcgatgcagtactcggcctggtcggggggcagctctctccgcagctcctcagctgtgatgaagttcttgtcccctgctaagaccttgaaggaagcgatgacctggtcagccgtgtccgtgtcggtggtctcccgcgacatgaagtcgatgaaggcttggaaggtcacaaggccgctatggttggggtcgaccaggctcatgatgcggttgaactcggcctcaccctgccggtcgttctccacgtcgtagcccaggctgatgaggcaggccttgaactcctcgggccccagcgccccgccatgatccttgtcgaagtggttgaaggacgcccggaactcctgcatctgctcctggctgatgcccttggcgtcgcgggtgaggatctggttctccacctcgttgatggtgcgggcaatggtggtgagcagct

SEQ ID NO: 123294 - DNA, 500 bp, Homo Sapiens
  misc_feature (66)..(100): n is a, c, g, or t
  misc_feature (346)..(441): n is a, c, g, or t
ccttcttaaaaatattacatgttttattatcctgtccccagagggtggtttatccagaaaccaagnnnnnnnnnnnnnnnnnnnnnnnnnnnnnnnnnnnggtagggggagcaaaaccatcaaccaccaggcagccaggccatcagcccacctccacctctggagggtccccagagacccacgcccgacgcagacccggaggagcatcagcaaggggcccgggcagagaatcggctatgtcttcattatgagagcaggagagacggcagagatatgttgctaggtgaatatatatttatataataaatccgtaagttaataaagtaaatagtaattctctgaaagnnnnnnnnnnnnnnnnnnnnnnnnnnnnnnnnnnnnnnnnnnnnnnnnnnnnnnnnnnnnnnnnnnnnnnnnnnnnnnnnnnnnnnnnnnnnnnnnggttcttagaaaatctgagacacgtgaggccagacaaagcaaggccggggctggtggga

SEQ ID NO: 123295 - DNA, 487 bp, Homo Sapiens
  misc_feature (91)..(103): n is a, c, g, or t
  misc_feature (349)..(443): n is a, c, g, or t
gcttcttaaaaatattacatgttttattatcctgtccccagagggtggtttatccagaaaccaagaaaaaaaatcaatcagaataaactcnnnnnnnnnnnnnggtagggggagcaaaaccatcaaccaccaggcagccaggccatcagcccacctccacctctggagggtccccagagacccacgcccgacgcagacccggaggagcatcagcaaggggcccgggcagagaatcggctatgtcttcattatgagagcaggagagacggcagagatatgttgctaggtgaatatatatttatataataaatccgtaagttaataaagtaaatagtaattctctgaaagnnnnnnnnnnnnnnnnnnnnnnnnnnnnnnnnnnnnnnnnnnnnnnnnnnnnnnnnnnnnnnnnnnnnnnnnnnnnnnnnnnnnnnnnnnnnnnnggttcttagaaaatctgagacacgtgaggccagacaaagcaagg

SEQ ID NO: 123296 - DNA, 3174 bp, Homo Sapiens
  misc_feature (208)..(218): n is a, c, g, or t
tatagagtgaccgcaggctagagacagatgggggtatcgctacagaagacaaagctgggagggcaggcacaaaacgtggagagcccggagagagcgttgggagaaccccgccgtgggacacgccgcaacaaagttaacgaaaggggcgcagatcaccaacgtgggggagccctccggccaccccactggagaggggagaggctctctnnnnnnnnnnngcccaccaccaccggagctcagaagagccttgaaggaacaagagggaggaatggactttgggctgccaggccccttcctggagccttcggggttttggtcaagttctctgggctccaacagtcgctctcgccatacaagccgtggagaaggacttgtagtcgagggcaccgggcacggcgtcagggccctggtatggcgccatgcgggcgatgcagtactcggcctggtcggggggcagctctctccgcagctcctcagctgtgatgaagttcttgtcccctgctaggaccttgaaggaagcgatgacctggtcagccgtgtccgtgtcggtggtctcccgcgacatgaagtcgatgaaggcttggaaggtcacaaggccgctatggttggggtcgaccaggctcatgatgcggttgaactcggcctcaccctgccggtcgttctccacgtcgtagcccaggctgatgaggcaggccttgaactcctcgggccccagcgccccgccatgatccttgtcgaagtggttgaaggacgcccggaactcctgcatctgctcctggctgatgcccttggcgtcgcgggtgaggatctggttctccacctcgttgatggtgcgggcaatggtggtgagcagctgctcccagcccacgcggatgtgctccatggtatagttggtgtgcttgttgtcgaagatgagggcctcctggatgagctggtgctgctgctccagcaggtccaggttgggcttgtagtccacgatgctgcgttcatactgcttcaggtggctcagctggtcctccagggtcccgttcatctcaatggagatgcgcccgatctcctccatcttggtctggatccagggccccacaacattggcctggctggcgaactggcggcgcaggtgctcgttggactgctgcttgctctgctcctccaggagggcatggtcccgttttggcaccagctgctgcaccttctcccacttggagttgatgatttgcggggtgacggtggtgtaggggttgctgcccgacagcttgatgtggttgctctcagcgatcctctgggcctccttgtggatggccaggatggcctcgcgctccctatcggcgtccggcagggtggacttgaactggtcatgggctgagatcaggccctcaatctcctcgatggtatggacgatgaacatgtcctggaggtcctccatggcgctctccatccagttgttgaagggggccgcgcgcttggcgtattccaggtgcagctggtcgatggcctccagctgcttctctgttttctccagggcttccctgcgactatgtgtcagagagccgagggcgtcccactggtcacagatcttctggcaccgggtgttgacattgtgggagtcgtagtaatccagctcgttgagctcctgggcaatggcggcgatctgctccacgcggtcctggtgcgcagccaggtcgctctcgaaggcctcgtgcttgcgaatgagggctttgatgtccgatagtgtggccgtctcgtagtcccggtgcttcagcatggcttccttcccgtcagtccaggcctcgtggatggaggccttctgccggaacttctctgccaggtggtcgagccgctccagcctgcggatctcattcagcagccactcctcgtagcccttctcagcctgctccaagtgctgccagccattgttgatgtccgagaccatcttgccctcggagggcatgaaggcgggccggttgctgaggcgcagcttggtctgcagcgtgttgaagttgatctccagctggcacttctcctgcaccttgggcggcttgtgcacacgccggtagtcgcggaagtcctccagcttctgctgcatctcctggatagtcttttggggcacacggtcctccagccaggggatggtgcgccggatccactccaggaggtcgctggccagcttctcgtagtcctccatcaggtgctcgttctcttggttgacagccagcaccttacagatccggttggcggcagtttcagccttctgcgctcctgaaaaggcatggtagaagctggacacataggtcattatggccttctcgtcgggccgggccgtgttcacgatgtcctctgcatccagcatcttggggatgtcgaggtatttctcagccacttcgaaggcattgttcaggttggtgacagggtcgtccttcctcagcttgtcatactcaatcagctctggtctgtgccggtggatcagggcattgaaggcaagaccatccttccagctgatgtggaagttctgcacattgacgttcttatacggggctgtctttctctggcaccagagaaggagcccttccttggccgaggtctcttccacggagatgtcctggatggcgaacctaaggatgatggtccagatcattcccagggtcatctttgcgttgccgtccacaatctcttctgccccgatggagaccagcttgacgcctttgctggcaataaagtccagcgctttgttcacattgttgattttgtgcactctcatcttcccccgctccggcttaggtaaccgctcccctgatatgacctccaggagcagcatgagcttgagcccgtctcggaagtcctcatcaatgttctcgatctgtgtgcctgccttccgcaggtgggagttgcaccatgccgtgaaggtcttgcgctgctgcttctcccaggccgggtccagcagcaggtcccggtcccagtcgtcctcctgggccatgtagtcgcccatgctgcccccgccgccagcgccattgcccgcgctgctggggccgtactggtacgactggttcgccgcgtggtagtccaccattccgccgcctctcgctcgcccaccagcctgtccgctcccgcctcagctcccgccccccccggccgtaatggccgaattcccgggcatatgtccggtaccgtcgactg

SEQ ID NO: 123297 - DNA, 3735 bp, Homo Sapiens
  misc_feature (195)..(203): n is a, c, g, or t
  misc_feature (421)..(429): n is a, c, g, or t
  misc_feature (582)..(617): n is a, c, g, or t
gcggggttggtttgctgtgtgcggcgcggccgtggcggggggtgatgggtgtgcggcgtgtgttgccgtggattggccccttgggtggtgtgttgcggggggggtttgaccgtgggcggctgcggtgacgctcgcagtgcctgtgagggggcgatggcactgtagagtgcggctgttcagcgggctgtccccctnnnnnnnnntttgaggtggggcgcgcgtgggttcgctgccgtgggccggccgttcgagaggtgtgcgtggattgttcgggggagcgttgttcaggaccgagtgggctagccatagcgcacaggcgccaagggcggtttgacaggggtaccccgtgcgcccggctcccacagccaaaatggacatgagattggagaaattgaatacagcagatggaacagatagaagnnnnnnnnntcagtaaaaaggatggaatataactttgtgcttggttattttcctatgtcgcaacaaacagacatttcggtgcaaatagttaatcgtttcctctgttttgttccatttgtctggtggagaaagaaatactttttctataataaaatatgtagnnnnnnnnnnnnnnnnnnnnnnnnnnnnnnnnnnnngcagaaaataattttgtaaactgtcacttcgcgggcagggaggatcgatgccacgtgggccccagctcacccgggtggaggctgggagctgaaaccgaacccaggcaggagatgggcgacggcggaggtgcaaggcagggcacggcgcacaagacgagggcggccgggcggggtggattagaggtcactctcgccgtacagcgccgtggagaaggacatgtagtccagagcacctggcacggagtcggggccggtgtagggggccatccgcgcgatgcagtactcagcctggtcgggtggcagctcgcggcgcagctcgtccatggtaatgtagttcttgtccccagccaggatcttgaaggaagccatgacttggtctgctgtatctgtgtcggctgtctcgcgggacatgaagtcaatgaaggcctggaatgtcactacccccaggcggttggggtccacaatgctcatgatgcgggcaaattctgcttctccctgggggtcgttgccaatatcataacccaagctgatgaggcaggctttgaactcctcgggacccagtgtgccggagtgatcccggtcaaagtggttgaaggaggcccggaactcattcatctgctcctggctgatgcccttggcatcccgggtcaggatctggttctctacctcattgatggtcctggcgatggtggtgagcagctgctcccagcccacacggatgtgctccatggtgtagttggtgtgcttgttgtcgaagatgagcgcctcctggatgagctggtggtcgccctccagctgatcaatctttggcttgtagttgacgatgctcttctcatactgccgcaggtggctgagctggtcctccagggtcccatgcatctcaatggagatcctcccgatctcctccatcttggtctggatccagggcccgatgacattggcctgggctccaaactgcttgcgtagcctctcattgtgctgctgtcgggcatgctcctccgtcagagcttggtccctccgaggcaccagctgccgcacgtggtcccatttgccattgatctcctgaggcgtgatggttgtgtaggggttggtgcccgccatattgacgtggtaggtctggacaatcttggacacctcattgtggatgcccaggatggccaggcgctccttgtcggcatcagggagggtggccttgaactgctcatgggctgtggtcagtccctggatctcctcaatggtgtgcacaatgaaggtgtcctgcaggtcctccatggccccctccatccagttgttgaagggtgcagcccgcttggcatactccaagtacagctggtcaatggtctccagcagtttctcggtccgctccagagcttcccttcgcttctgagttagggcccccagattgtcccactggtcacagatcttttggcaacgggcgttgacactgggtgagtcataatagtccagctcattgagctcctgtgcgatggcggcaatctgctccacacggtcctggtgggcagccaggtccactctcgaaggcctcatgcttcttgagcaaggccttgatctccgagagggtggcggtctcatagtccttctgtcgcagcatggcctctttgccgtcagtccaggcctcgtggatggaggccttctgccggaacttctctgccaggtggtccagtcgctccagcctccggatctcattcagcaaccactcctcatagcccttctccacctgctccaggcagccccaggcattgttgatgtccgagaccatcctgccctcagagggcatgaaggcaggccggttgctgagccgcagcttggtctgcagcgtgttgaagttgatctccagctggcacttctcctgcaccttgggcggcttgtgcaggcgccggtagtcccggaagtcctccagcttctgttgcatggcatgcatggtgttctcgggcacccggttctccagccacgggattgtgcggcggatccactccaacagatcactggccagcttctcgtagtcttccataagctgctcgttctcctggttgacggccaacaccttgcagatgcgattggctgctgtctccgccttctgggctccagagaaggcgtggtagaagctagacacgtaagtcatgatggctttctcatccggtcgggcagttccaacgatgtcttcggcatccagcatcttggggatgtccaggtacttctctgccacgtcaaaagccgtattcagatttgtgagtggatcatccttccgcagcttcccgtagtcaatcagctcgggccggtgtcggtggatcaaagcacagaagccgaggccatccttccagcttatgtggaagttctggatgttgacatttttgtaaggggctgtctttctctgacaccacaggagcagcccttccttggctgaagtctcttccacggagatgtcctggatggcaaagcgcaggatgatggtccagatcatgcccagggtcatcttcacattcccatccacgatttcttcggctccgatggacaccagtttgacgcctttgctggctatgaaatccagggccttgttgacgttggagatcttgtgcactctcatcttgcctcgctctggcttggccaagcgttcacctgagatgacctccagcagcagcatgagcttcaggccatcccggaagtcctcttcgatgttctcgatctgtgtccccgccttccggaggtgggagttacaccatgccgtgaatgtctttctctgctgcttctcccaggccgggtccaggagcaggtcccggtcccagtcctcttctggctgcatgtaatcgttggtttgctgagaatcataatggtccatgatggtgcgcgcgtgctagggtctggatttcttcctccaccttctctctgagcaacggctgctgccctggcgtggggagggagtagggctgggctgggctgggctggcggggccgggctcgctcccctgcgcccggttccgccgcggcgctgctggcgaaggctgctactggcggcgacagcggcggctgggctcgcggactgcctgcctctgggcgggcgccctcgtgccgaattcggcgcgccgtcgacttcatactct

SEQ ID NO: 123298 - DNA, 1101 bp, Homo Sapiens
  misc_feature (882)..(949): n is a, c, g, or t
gaatctcactaggtgctggtctctggtgacgccaacacttgcagatggaatggctgcgtctccgcttctgggctccagagaagcgtggtagaagctagacacgtaagtcatgatggcttctcatccggtcgggcagttccaacgatgtcttcggcatccagcatcttggggatgtccaggtacttctctgccacgtcaaaagccgtattcagatttgtgagtggatcatctttccgcagcttcccgtagtcaatcagctcgggcccggtgtcggtggatcaaagcacagaagccgaggccatccttccagcttatgtggaagttctggatgttgacatttttgtaaggggctgtctttctctgacaccacaggagcagcccttccttggctgaagtctcttccacggagatgtcctggatggcaaagcgcaggatgatggtccagatcatgcccagggtcatcttcacattcccatccacgatttcttcggctccgatggacaccagtttgacgcctttgctggctatgaaatccagggccttgttgacgttggagatcttgtgcactctcatcttgcctcgctctggcttggccaagcgttcacctgagatgacctccagcagcagcatgagcttcaggccatcccggaagtcctcttcgatgttctcgatctgtgtccccgccttccggaggtgggagttacaccatgccgtgaatgtctttctctgctgcttctcccaggccgggtccaggagcaggtcccggtcccagtcctcttctggctgcatgtaatcgttggtttgctgagaatcataatggtccatgatggtgcgcgcgtgctagggtctggatttcttcctccaccttctctctgagcaacnnnnnnnnnnnnnnnnnnnnnnnnnnnnnnnnnnnnnnnnnnnnnnnnnnnnnnnnnnnnnnnnnnnncgctcccctgcgcccggttccgccgcggcgctgctggcgaaggctgctactggcggcgacagcggcggctgggctcgcggactgcctgcctctgggcgggcgcttggacctaatctccacgcacactgaactaggcggacacactagcgctg

SEQ ID NO: 123299 - DNA, 797 bp, Homo Sapiens
  misc_feature (77)..(77): n is a, c, g, or t
gggttagtcttgtcagcagctttgcgtatcagctgggagaagctttgcggatttttgcagtgtcagtggtcagctcngatttcatcagcaccactctcatagcttttcactgctccagcagccccggcatgttgagttcgagacatctgccctcagaggcatgaggcaggccggtgctgagccgcagcttgtctgcagcgtgttgaagttgatctccagctggcacttctcctgcaccttgggcggcttgtgcaggcgccggtagtcccggaagtcctccagcttctgttgcatggcatgcatggtgttctcgggcacccggttctccagccacgggattgtgcggcggatccactccaacagatcactggccagcttctcgtagtcttccataagctgctcgttctcctggttgacggccaacaccttgcagatgcgattggctgctgtctccgccttctgggctccagagaaggcgtggtagaagctagacacgtaagtcatgatggctttctcatccggtcgggcagttccaacgatgtcttcggcatccagcatcttggggatgtccaggtacttctctgccacgtcaaaagccgtattcagatttgtgagtggatcatccttccgcagcttcccgtagtcaatcagctcgggccggtgtcggtggatcaaagcacagaagccgaggccatccttccagcttatgggaagttctggatgttgacatttttgtaaggggctgtcttctcctcgtgccgaatcggcgcgcctcgacttcatactcttcgccctaa

SEQ ID NO: 123300 - DNA, 918 bp, Homo Sapiens
  misc_feature (198)..(198): n is a, c, g, or t
cggtgtcggtgatatcggcattcgcctgggtgcaggcgatccgatctcagttttgcagcagatgtttcggccccgtttcagcacggatgtgcgcgatcatcaacagatcactgcagctctctagtctccatagctgctcgtttcttgttgacgccaacacctgcagatgcgatggctgctgtctccgcttctgggctnccagagaaggcgtgtagaagctagacacgtaagtcatgatggctttctcatccggtcgggcagttccaacgatgtcttcggcatccagcatcttggggatgtccaggtacttctctgccacgtcaaaagccgtattcagatttgtgagtggatcatccttccgcagcttcccgtagtcaatcagctcgggccggtgtcggtggatcaaagcacagaagccgaggccatccttccagcttatgtggaagttctggatgttgacatttttgtaaggggctgtctttctctgacaccacaggagcagcccttccttggctgaagtctcttccacggagatgtcctggatggcaaagcgcaggatgatggtccagatcatgcccagggtcatcttcacattcccatccacgatttcttcggctccgatggacaccagtttgacgcctttgctggctatgaaatccagggccttgttgacgttggagatcttgtgcactctcatcttgcctcgctctggcttggccaagcgttcacctgagatgacctccagcagcagcatgagcttcaggccatcccggaagtcctcttcgatgttctcgatctgtgtccccgccttccggaggtgggagttacaccatgccgtgaatgtctttctctgctgcttctcccaggcctcgtgccgaattcggcgcgccgtcgacttcatactcttccgccgctagg

SEQ ID NO: 123301 - DNA, 1039 bp, Homo Sapiens
  misc_feature (259)..(267): n is a, c, g, or t
  misc_feature (792)..(847): n is a, c, g, or t
ccgtgtcccccgggggggcttccgcgtaccaggccccctgggcggggccccgggggggtgttttggccccgccaccaaccgcggaattccggcttggggaaggggtctacccttcccgccggttcccgtgtcccactccgcccggggccgggctctggcgcatccgatgcccccgagaccgggagcccctcccttccagctgtgagggggaagttccgggactttggccatctttttaacggggctgtctttcttctgnnnnnnnnngggagcagcccttccctggccgaagttctcttccccggaggatgtcctggatgccaaagcgcaggagatgggtccagatccatgcccaggtccatcttcccattcccatccccgatttcttcggctccgatggacaccagtttgacgcctttgctggctatgaaatccagggccttgttgacgttggagatcttgtgcactgtcatgttgcctcgctctggcttggccaagcgttcacttgggatgacctccagcagcagcatgagcttcaggccatcccggaagtcctcttcgatgttctcgatctgtgtccccgctttccggaggtgggagttacaccatgccgtgaatgtctttctgtgctgcttctcccaggccgggtccaggagcaggtcccggtcccagtcctcttctggctgcatgtaatcgttggtttgctgagaatcataatggtccatgatggtgcgcgcgtgctagggtctggatttcttcctccgccttctctgtgagcaacggctgctgccnnnnnnnnnnnnnnnnnnnnnnnnnnnnnnnnnnnnnnnnnnnnnnnnnnnnnnnnctcgctcccctgcgcccggttccgccgcggcgctgctggcgaaggctgctactggcggcgacagcggcggctgggctcgcggactgcctgcctctgggcgggcgcttggacctaatctccacgcacactgaactaggcggacacactagcgctgcgcctcgtgccgaattcgccacccaggcctcgctcttt

SEQ ID NO: 123302 - DNA, 770 bp, Homo Sapiens
  misc_feature (377)..(377): n is a, c, g, or t
  misc_feature (523)..(558): n is a, c, g, or t
  misc_feature (613)..(613): n is a, c, g, or t
  misc_feature (623)..(623): n is a, c, g, or t
  misc_feature (662)..(662): n is a, c, g, or t
  misc_feature (682)..(682): n is a, c, g, or t
  misc_feature (736)..(736): n is a, c, g, or t
tcataggagtagtggtttttttaataccatctgtgccaagcaatatcaaagttgtccatactctccaagtttgtcctatttttaatagacaatattaaaaattttttaagtgtgtgctgataaagagactagtcacacctctgaggggatttaaaaatgagaagccacataaattctcttccttaaaaaacagccatttcaaaagattttctttaatatcataaaatattttcatggacaagtgagctagcaaacacacatgcaccaatgtgccttttgacaagagtaccccctaccccgactcccacaccaaaatggacatgagattggagaaatgaatacagcagatggaacagatagaagaaaaaaaatcagtnaaaaggatggaattataactttgggcttggttattttcctatgtcgcaacaaaacaagacatttcggtgcaaatagttaatctttcctctttttttccatttgtctggtggagaaaaaatactttttctataataaaatatgtagnnnnnnnnnnnnnnnnnnnnnnnnnnnnnnnnnnnngcagaaaataattttgtaaactgtcacttcgcgggcagggaggatcgatgccacntgggccccanctcacccgggtggaggctgggagctgaaaccgaacccangcaggagatgggcgacggcngaggtgcaaggcagggcacggcgcacaagacgagggcggcccggcggggtgganttaagcacttctcccgtacagcgccgtggagaag

SEQ ID NO: 123303 - DNA, 620 bp, Homo Sapiens
gcagatattaattcagtttaatcatatcaattcttaaacaaaaaacttcctccaagagacaatagttcacagtaactgcaaagcttactcacaatttttaaaaatatcgctcatgcttagcattcaaagaagatattatagaataactgtaaaaacttttaccaggaacatcagcttctgacttgaaaaattacaaatactgaagcattttggtatcagacacagtagttttgacattgtctgttcatttgatgagtttctggaagtttggaaaattgtacctctataattggataatgcgcttattctaaactaaacattttcaaatgtagaaaacaaactagcaagctacacatacaaagaaaagccctctaagacaagctttccacatgttgaatgccagcatgtgcaccgtgaatcctggaagactagaattgatacatacgcttggcttgaagtcttacaccccaggctcaacgatggagtttgcattcacctacacattaatgacaaactctgggttagtataagagaagccagcaattcattttggtccaagttcatgatgaagagttatcagtgggggtcagttccacaggctgtctggtgactctttgtcg

SEQ ID NO: 123304 - DNA, 1029 bp, Homo Sapiens
ccaggttccaaatgtgttttttattcactatttttgatgactataaataagtgtttccactatgagaaaagaaagttagcacagtacattttcatgactggggaatggattttctgaagtcatcttcaatagggcaaaaacttagaaacaaacataaaaaacaacctgaatgttgagttcagttctttatataacgtcccttgtaaaaatgaaagaataaaaacaaaccgaaaaagaggggcagggtaaaattttttaaaaaaagcaaggtatagagaggaaaagaccataaaataagacgatttattgcttctcctcagcatcctccttggtctcctccttcaccgagagagcttctagcttttccgccactttttcggcatgatcatttttgcctgatccctttcttttctctctcttcgatctctttcctgcattcttcaaactttgttttgaatttctgtgcattctcagcattcaggaagcggatggccagcagctctggcttggggcactcgtcggcgaagtcagcgtgggtgttccagacccaggcacggtcgctacctgcgttgggcttcagctccatcatcggcgtgatgtagtggttggcacagatcttcagggtcttgtccctccgcatgaggaggcggatggcccctttctccttgtgcttcaggagcttgacgtcaccagtgcctcgctccttccattctgggagatcgttctcagaggcaaatcggaacagttttgcccgcattttaaaaagttcctcttcatcttcttccagtgttttaatttcttgctcaggaagagaaactattggctcaaactgagggtcatggttggactcgtctgtattctcagtggaagtatcatggtcctcatgagtgtccttggcggccgccatgggggcgcggcggcggcggcggctcggctgggtcggtcgtcgctggctccgcggcctctcggcgactactcgtagctcccctcgtgccgaattaacacccaggcctcgtacctagccctata

SEQ ID NO: 123305 - DNA, 2827 bp, Homo Sapiens
ttttttccccaccctgggggctctctctgcctagtctacagtactgacagaaagcaaggacatgcggcctgcatggtgggagctggttgaattgtctttattaacaaacaggatatccaaggccactacattgaggatgggtgagttgtgagggaggagaagggttacttgctgctcacactatatacagatgcaagcaaggggcgtggagagtgagggctccctgctccctccctccaccggggaagggcatgggctagaagaggagaggggggtcgggaatggggggaatgttttggctggcggggtcccccctccattccctggagtttgggggaaggggaatcattaaagtgctttcagaaaatgaagaaatggtccctgcccctggagtggctggtgaccccccaaaaatctagggcccagtgaccccccccagggtctggtacattcaaggggggagccggctctcctgacgtgcaaataaaggggtccagggccactgcccagtcagcagcagtggggtaaggggttcaagccccaagcactctcctctcaaatggagaaaaggggggaggggctaggcccactcaattcctgggaaggggaagctgtgtccctccccagaagctggggacaggcacagttttgggaagaggacatgttggggaagaggatggtcacgtgatcacgaaagcatcaggggtcagaggtcacgttcccagcaggctccagtgaaatcaaaccagtaaaagcaaaagcccagggaggggaaagaggggcggcccgggaagcctggctgcagggggagagctgggtccagtgtgggacagccccagcccagggccccgtcaccagttcatgatgcagttacggttcagagtcatgaagtaaacttggctgctgcccccagagcggactgaggcaaaaaacaccttgtcattccgctcacacaggaacttgagcctctgagctcgtttgtgcatgaagaccccgtcgaggtggcccgtctccacagagcggatctcaatggctttctcaccccagcccattatctggttggagcagatgtaggccacagaagtaggcatctccccccactgcagcaccacatccttaatgatgcgcccgtacgtgttgacgtagacaccctcgtcctcgtagcacagcagcatctccatgccgtcggtgttggggaggaagatgatggcatggggcgtgatctggctctggatgtgcacagggatgtagatgtcatagctgttccccgagtcgacatccacagcatggaagccagcactggagccatagatgaccttgagccgctgcccctcctctactgtcaggtcgaccagcagagggcggtgggggaggtcggcaaaggacttgaaggccatgaatttgtggtagggtttgggggcccaggcatacacctccacggagctcttgagggcgatgaccaggaacttaatccgctcgtatttcacaacacggtagtgcccgcagccctccatgtcccccacggtggtccagccctgcttcttctccacttctgggtcattgtgcagaatcttgttccggagccaggacaggtaatacacccgcagtttgttccttttccctgagatggtgatgagcaggttgagcccctccagcacatccatctgctggaagcgtcgccgcccaatgagtccatacaccttgccctgcccacttcggtccagcaacatcagcccgttctccgtgcccaccagcaggttgaccccccaaagggctgcacagaggatctcggagttgaatcgcttcttgtacttccggatctcaggggtctcactgtgggcccgggtgttggtgggattcacgttgaccacagaacccttcctcacgtcgtactgcagctggtcgagccgagtgccctctccacccactagggctgtgatggggatgctgtccccactgcctccaggctggtagatccctagatccacaaacatcgtgaaaacgagctcttgccaggggcctttacccagccccacgagactggtagtcacccactcccattcctttcgagggtgggctttggcctttgctgttctcggtgggtgagtggctgggctggaccacgtcaggcaggtttgtgtacccattgctgtcagcatgcagcaggttccgctcctcttcaggggtgcgctggaccaccatggtgccgcccccgtatgggggctgggtcccggtgatctcctcgacgtcgtggaccaccatggtgctgacgctgtctgtatccccatcgcggcccccaggggtatctctgctcccctctgctggcccgccttcgccttcctcctcgtcgtcctcactgctttccacctcctcgctggacgacgagtagtccatggccttcttgggaggccgaggggcctcgtccagagtccgctctttcagcaacacaaagtctgcgggccggcctggccgtgagcggtggtcgtcagggcattggctttattcccaggggagagcacaggggagctgtccggtttggaggaggctcccacagcggttccagctccagtgagccagcctgggggaggtgcccgtgagaggctggaaggacgctgtccgagcgttcccagccagggtcgctcctcctgaggtcggggttactagaggcgttgggcgggcccgggggctgagcagggggccctggaggctttggggtgccccgctctgcccgcctttgcagatagatttgccaggcggagttgctgcgaggtctggcacggactgcctgggctggccgggaccctccggccccactggtgttaagggc

SEQ ID NO: 123306 - DNA, 887 bp, Homo Sapiens
  misc_feature (149)..(161): n is a, c, g, or t
  misc_feature (207)..(294): n is a, c, g, or t
  misc_feature (753)..(753): n is a, c, g, or t
ccaggttccaaatgtgttttttattcactatttttgatgactataaataagtgtttccactatggaaaagaaagttagcacagtacattttcatgactggggaatggattttctgaagtcatcttcaatagggcaaaaacttagaaacnnnnnnnnnnnnncaacctgaatgttgagttcagttctttatataacgtcccttgtaannnnnnnnnnnnnnnnnnnnnnnnnnnnnnnnnnnnnnnnnnnnnnnnnnnnnnnnnnnnnnnnnnnnnnnnnnnnnnnnnnnnnnnntaagacgatttattgcttctcctcagcatcctccttggtctcctccttcaccgagagagcttctagcttttccgccactttttcggcatgatcatttttgcctgatcctgctttcttttctctctcttcgatctctttcctgcattcttcaaactttgttttgaatttctgtgcattctcagcattcaggaagcggatggccagcagctctggcttggggcactcgtcggcgaagtcagcgtgggtgttccagacccaggcgcggtcgctacctgcgttgggcttcagctccatcatcggcgtgatgtagtggttggcacagatcttcagggtcttgtccctccgcatgaggaggcggatggcccctttctccttgtgcttcaggagcttgacgtcaccagtgcctcgctccttccattctgggagatcgttctcaaaggcaaatcggaacagttttgnccgctccccctcaccatcccctaccctcactcctggccccaaatcagccccttcagctcaaagatcacttcaccagagagacttccctaagtataagtcagggctctttcagttacaagttatggaaattgatt

SEQ ID NO: 123307 - DNA, 1068 bp, Homo Sapiens
gccgcacgcgctggcggactaagagtggctggcgaagcgagcggccggcgcgggcccctggcgggcgggcggtacagccccaagcctgagacccggacctgagcatcgcaggttcgagtcccgccccgcctggggcgaagccgggggtggcggcgacctcgcggcgttgcaccggctctgtgagcacctcccctctgagcacttcccttgtgacaggccacttcccttgtgacaggcccaggacgaggtggccaggcggcccccatggcgtccctggtctaggcggagaaccgcctgggcgatgagtgagaacctcgacaacgagggcccgaagcccatggcagagctgtggccaggagagcagcagtgccctgagctgccctaccgtctcggtgccccctgcagccccggcagccctggaggaggtggagaacagagggcgctggggcggctacagggccggggcctcagcccgggctctacagctacatcagggatgacttgtttacctctgagatctttaaactggagctgcagaacgtgcctcgccacgccagcttcagcgacgtccggcgcttcctgggccgctttggtctgcagccccacaaaaccaaactctttgggcaaccaccctgcgcctttgtgacattccgcagcgctgcagagagggacaaggccctgcgcgttttgcatggtgccctctggaaaggccgcccactcagtgtgcgcctggcccggcccaaggccgaccccatggccaggaggaggcgacaggagggtgagagtgagccaccagtaacacgagtggccgacgtggtgacccctctatggaccagtgccctattgctgagccagctttgagcggaagccagcctggagtgcgagccaggtgctgcagaaccttgcccaggaaatcgggagcaccaaccgtgccttgctgccctggctgctcgagcagaggcacaagcacaacaaggcctgctgcccgctggagggggtcaggccatcaccccagcagactgagtatcgtaataagtgtgagtttctggttggcgtcggggtggatgg

SEQ ID NO: 123308 - DNA, 2425 bp, Homo Sapiens
  misc_feature (246)..(298): n is a, c, g, or t
  misc_feature (424)..(529): n is a, c, g, or t
gccccccgttttttcccccgggggaaattattttttccccaggggggccaaagggtgtgggtacccccgggggggatttcagggttcctctaaccgcgcttgggggaggggttcccattggcgccgaaagtgtttaagaaatttcccccatttttccaataaggggcccggggcggggggtaatttgaattcggagtccgcttggctcccttttgaaaaaaccccaaaagaccccccggaaccccnnnnnnnnnnnnnnnnnnnnnnnnnnnnnnnnnnnnnnnnnnnnnnnnnnnnnaatccaaccctttttcttgccccggttttcttgggaaacagttttgccccttttcctttccttttggggccccgggcccaaaaaaaaggttttaaaaattttttgggggccagggggcccccaaannnnnnnnnnnnnnnnnnnnnnnnnnnnnnnnnnnnnnnnnnnnnnnnnnnnnnnnnnnnnnnnnnnnnnnnnnnnnnnnnnnnnnnnnnnnnnnnnnnnnnnnnngttttagaggcattttatttagacaactaaaaacaattagatgttcagaggcagtgtacaatgaacgagaaatcaaaccagttactttatcatgtattccctcttctttacaactgaagcaaaaaaagaaaaggcattctgctttaagatcagaaaaaatcagccaatatagttttcttctccatattaacataaacagctacaagaaccctaattgtaataatagaaattggatgttggcttgtatatattcattaaaaagataacaggccactgtactataagaggataactccacctcccttcatctgacacttgagttttcacttacaggtaacaccaagttagttagttgttccagcactggagctaattcattttcctcattatttactgctgtttctgccttaagcagacagtaactctggaaggctgatgcttttctctgcttgcttgttttagtcagttgtatactaactgcaacatatgattgacgctcaggccttaacatcaggagctgaaggaaagatgcaatctgaattctctgaagcaatttcttctagctcctcttctgttgtctctggaaaaccaatctttggctttgccagctcaccactatcttcttcaggaagcacacatttccaaaggccatacgtttttcctaccacagtttgccatagtctcaatgttccatcttctgaaccactggcatagagttctccatcaggactaaatctcacacagtgaataggaccaaagtgtcccttgtaggattctaattcttctccactattataatcatacttataaagtttaaaatcttcaccgcctgcaacaagaaattctttctcaggatgaagagatgcagaattgatggttgcaggagcttcaaaggatttaattgggtccaaacttactgcactatgaaaagcaatagatcgtccataagttataaccaaaatctctccctcaggaatatattccatactactaacagacatattaaaatttagagatttcacttctgtcatagtagcatgatcccaaagtcgaacagttttgtcatcagcagaaagaatctgtttatcctcactgcaccacagagctttttttataccagaagtatgaccactaatttccttaggttctgcttcaggtttgttcaagtcatatatgcgtaacagtttatcctgtcccccggttaacaaataattactatcctgcgtgaaatccacagtcttgacaatgtgtttatgagccagggtcatcaattcatctcctgagacagcatcccacactttggctgtgaaatctgcagctgctgtagctgctttggtggcatccttattcagtgttgcaccccaaacagcacctttatgacccaaaaatgttccaatccagtctcctgtatctccctggcgtagcataggtttaccatctttgcaagcgctgattaagaaatacccataaggcgtgatgccactgaaggccaaatcaaccacgggtcgcgtgtggccagagcaggtgagcggcgtctgtctcattgccatggcggcggcgaagccagcgaccggactggcgagctgagggtcgtcgttgtcttttctctcttctgctgcagtgcctcgggctgctccaggcccccgccctgacactagggctgggctgggcaacaggaaaagaagggcaatccggtggcaccgaggttagggaggggtgagggaggggtcagggagtctgcgaccagcaagcaacagtcgacgagggagggaaagggagggagggaggaaagtaggggatggggagaagcggagaaccgggccagccacgattcacacctcgtgccgaattcgccacccaggcctcgctaccttaaaccgttagagttactgccgt

SEQ ID NO: 123309 - DNA, 945 bp, Homo Sapiens
  misc_feature (76)..(89): n is a, c, g, or t
  misc_feature (91)..(188): n is a, c, g, or t
  misc_feature (462)..(681): n is a, c, g, or t
tgggttcaagcaatccttccgccttagcctcggaagtagattggactacaggtatgcgccaccatacccagctaannnnnnnnnnnnnnannnnnnnnnnnnnnnnnnnnnnnnnnnnnnnnnnnnnnnnnnnnnnnnnnnnnnnnnnnnnnnnnnnnnnnnnnnnnnnnnnnnnnnnnnnnnnnnnnatgagccactgcgcctggcaactttgccttcttagtttgtcttgcaggtttcagtgcttctaataataaaaataagtcttttattttcccaccttttctcaggctcttgttaatagcttctctatcattagtccccaacactaatagctttcaagtcctttgatgcctttttgcctaagccccatgcagactgagctctgctagttctgcattcttttccaaaactacagatcctcttcagatcttcaggttttatgcctatacttctctggtnnnnnnnnnnnnnnnnnnnnnnnnnnnnnnnnnnnnnnnnnnnnnnnnnnnnnnnnnnnnnnnnnnnnnnnnnnnnnnnnnnnnnnnnnnnnnnnnnnnnnnnnnnnnnnnnnnnnnnnnnnnnnnnnnnnnnnnnnnnnnnnnnnnnnnnnnnnnnnnnnnnnnnnnnnnnnnnnnnnnnnnnnnnnnnnnnnnnnnnnnnnnnnnnnnnnnnnnnnnnatgattgaatattgagtggaccccacgtacctcaatcacatccaagctcttaatacataatgtcaagaatccttccccagttggtgttcctgttaatccatcagtgttcccgataatccatctgtctgcatgtcccagtttgtatctagccaggtgtcgtaagtcattgcagcttcctgtgtgtgatttgtgacttatttctaagccttcgcatgtactatttcttaccttctgctaaccatgtctttcttccttcaaacttca

SEQ ID NO: 123310 - DNA, 984 bp, Homo Sapiens
  misc_feature (870)..(936): n is a, c, g, or t
tttgacgttggcagtgacatttatttttctgggggaggggagttatatacagcagtgacccggagcccctcacccccaccaggcttaggtggggacaggaggcgttggcagaaggcacacagtggcagtagcccagaagaggccaggaagtaagggtgggtatgtgatgtgtcctgggagacccagatgaggaaattgaggctcagtgagggcctcaggtcacacagcaaggtgcgaaggcagctagtcccgagagcttgtggtggttgcttctctcttgcctgggctacaggaggacgcaggggcagcccccgcccttcttcctgggggcactgggagggctcggtgggagctcttgttcctggtatttccggacagcccgcaccagctgctcaaaagcctcgtccacgttgagacgcagtttggccgaggcctcaaagtaggccacgtggtgggaggcgccgaaggcagaggcttctgatcgggggacctggcgctgtgactccagatctgccttgttcccgaccaacacaacggggaagtcgtcgcggtccttgacccgcagaatctgcgtgaagagcttgcccacctcgttgaaactctgccggtcattaatggcgaacaccagcaggaagccgtggccagcacgcatgtactgctctctcatggccccgaactcttcctggcccgcggtgtccaggatgtccagccgggctgggatgccatccacactgcagatcttcgtgtaggagtcctcaatagtggggtcgtagtcagacacgaagtaggactggatgaactggatggtcagcgcgctcttgcccacgccgccgccgcccacgaccaccagcttgtgtgtctcgctgggcnnnnnnnnnnnnnnnnnnnnnnnnnnnnnnnnnnnnnnnnnnnnnnnnnnnnnnnnnnnnnnnnnnntgctcatgtcgccaccgctcctcgtcgagaattcgccacccaggcctt

SEQ ID NO: 123311 - DNA, 727 bp, Homo Sapiens
agggggcgggacatgctttattttcagccacagaactagccctctcagggcccaatccccagaacccaaggccctggccctcttcctgagtagatgggcctttctcttagagccggcctggaaggaggggcaagtaggcaggagatatctcttgagctgttgctgctgtctcaatgccactttgcaccctgggatctcctggagggaggtggcctccaggtgggttggcagcagcctgaggaggagcccttccttcccagatctctctgtgggctatcaaggtacctgcagccatgctgagcggggtcccagaccctggggggctcctagcaggcagcaaacttgcgctggatgcgcttgtaccggagcagctcctgctcactgactgagggttgcagccgggcggcagcctgcagcaagtcctccatggtgagcatcagtgctgagctaccttgttccagcccttcctccaggtcatgaaccctgcgtttgagggcagctgtcatagcatcagagcagagagagtagaggtccgcgcccgtcagctggggagggcagcaatctagcacgtttaccaggctcacagatggctctagcttgaatttgcgtgtgatggcacttagaacgcgtagctgggaggcccggtcctcatttgcccccacaaacaccagcttgtcacctcgtgccgaattcggcgcgccgtgacttcatactctctcccccctaa

SEQ ID NO: 123312 - DNA, 1687 bp, Homo Sapiens
  misc_feature (1237)..(1263): n is a, c, g, or t
ttttcagaaccagaacatttttactctttgggctctgggaagggccaggcagagtgcaaggtgtccacaggaggggtaagcagagaggagctacagggggctgcagtcctagtaccctgttggggaggactgagggatggtgagtttggtctccggagggggctccagtcctggtgcccagttctgacacctgcccctcctgagttcacactggagtccttgcagtcctgaaaccacaaggcctgcctgaaccctgggtcaggagagaaacacttggggaggggaaaggacggcgtgggctacccatgacggctctgagttcttcctggggcttgtgtctttccttggcagaagagggcacagccaaggcaaggaggggctgaaggctgcggggccatcccggcctgccagagccatgcccctgactcctcagcttcaaaatcaggggtctcaggacagaggatgctgggtgggctcagagctcatcaggggggctgtgtgtgagaggggatgccttctggatgccctcatcctcctcggggctggggtctccctcaaggccacccagctccttcctttgtttgctgctgctactcctgccgcctgctgccttggccctgctgctcttcttcttggacttcttccctcccagggcagctgtgtctcccttcttgccggaccactgctctgccaggcaactggtgtcttttcccttcagcacgtggttggcgcagaggaattcagtcaggtcttcctcctggtggttcctgtaccagtcctcgatcacctcctcaaactcttccaccagcacatcacactgcttcttgaggtcagccacctctgcagaagtctcgttccacagctcataggggatgtccatcaccaccttgacccctttgtgtaccaggttgtgtaatgtctcaaaggtctctgacatgcccttggcaaatcgattgctgccggtcctctccttgtgcaggctataatccaggagcctcttgcaaatggtctcagtgacttcgattaaccgcaagtccgacttggtgtatttgactccagaggccttctggtccaggatgccatagcccgtgccaatcacctccttggtcttgccggtttcctcaaaggctgacttcagctccacagcaacatatttacacacttcgcatttgctgggcaggcgaacccagtcgttctcctcagctccggcctggctcgggcccagctccggggccgnnnnnnnnnnnnnnnnnnnnnnnnnnnagggaagaagcagaagacagcgggacgcgggctcaggcattgaatccatggcccggccgggcccggaccctaaaggaccgggcggttcctcctcccgcggcgcgcgcggagcagtttcccctcgccgcttccgggactgcacacgtgcctccgagcaaccacgacaacagctagcctcccgcccgccctcctctcgcagccgcagcccgccttcaaagcggaccaaggcccgcggacggcgcagccataggctttctggggtttgctctctagctaatgggaagactatctttttacgcccttggccagtaagagagcagatggtggcctcagcgacctatggcaagtcctttcccaccccctaaccggaggctctgggagagagagatgcaggaccagacccgagaagaagcctgcgtctggc

SEQ ID NO: 123313 - DNA, 720 bp, Homo Sapiens
  misc_feature (248)..(274): n is a, c, g, or t
  misc_feature (648)..(648): n is a, c, g, or t
tagggggatgtccatcaccaccttgacccctttgtgtaccagcttgtgtaatgtctcaaaggtctctgacatgcccttggcaaatcgattgctgccggtcctctccttgtgcaggctataatccaggagcctcttgcaaatggtctcagtgacttcgattaaccgcaagtcccttcgcatttgctgggcaggcgaacccagtcgttctcctcagctccggcctggctcgggcccagctccggggccgnnnnnnnnnnnnnnnnnnnnnnnnnnnagggaagaagcagaagacagcgggacgcgggctcaggcattgaatccatggcccggccgggcccggaccctaaaggaccgggcggttcctcctcccgcggcgcgcgcggagcagtttcccctcgccgcttccgggactgcacacgtgcctccgagcaaccacgacaacagctagcctcccgcccgccctcctctcgcagccgcagcccgccttcaaagcggaccaaggcccgcggacggcgcagccaataggctttctggggtttgctctctagctaatgggaggactatctttttacgcccttggccagtaagagagcagatggtggcctcagcgacctatggcaaagtcctttcccaccccctaacggaggnctctgggagagagaggatgcaggaccaagacccgaggagaagaagcctgcgtctgggcctgggcctcgtgcc

SEQ ID NO: 123314 - DNA, 948 bp, Homo Sapiens
  misc_feature (860)..(886): n is a, c, g, or t
gtctcagacagaggatctggtggctcagacttcaaacggggctcttttgagaagggaaggccttctggagcccctcatcctccctcgggctggggttcccccctcaaggcccacccggcctccttcctttgttttgctgctgctactccctgccgcactgctgccttggcccctgctgctccttctttcttgggacttcttccctcccagggcagctgttgtctcccttcttggccggaccactgctcctgccaggcaactggtgtcttttcccttcagcacgtggttggcgcagaggaattcagtcaggtcttcctcctggtggttcctgtaccagtcctcgatcacctcctcaaactcttccaccagcacatcacactgcttcttgaggtcagccacctctgcagaagtctcgttccacagctcataggggatgtccatcaccaccttgacccctttgtgtaccaggttgtgtaatgtctcaaaggtctctgacatgcccttggcaaatcgattgctgccggtcctctccttgtgcaggctataatccaggagcctcttgcaaatggtctcagtgacttcgattaaccgcaagtcccaatgggaagtgactcagagctggaaggaagataggtcatctggtctgggggatctgaaatggacttggtgtatttgactccagaggccttctggtccaggatgccatagcccgtgccaatcacctccttggtcttgccggtttcctcaaaggctgacttcagctccacagcaacatatttacacacttcgcatttgctgggcaggcgaacccagtcgttctcctcagctccggcctggctcgggcccagctccggggccgnnnnnnnnnnnnnnnnnnnnnnnnnnnagggaagaagcagaagacagcgggacgcgggctcaggcattgaatccatgcccgccgggccc

SEQ ID NO: 123315 - DNA, 1760 bp, Homo Sapiens
  misc_feature (1580)..(1614): n is a, c, g, or t
aattggtagtaaaaccagcagtcactcaaattcgcctccctcaacccactcaccttctgaagaacaggcttttcaagttttgttccccttaagtttaatagcaaaaaaaagtttaagtcatgttgtaccaatatatccccagaaagaattgcaatttaccaaggttttcacgtgttttgagagaaatcttactgaaagactagtgatgtccattttccagtaaatactgagcgaaaaacaatttttataccccaatctgaggtataaacttgctttttgtgggatcacaactgctgtaaattagacaattgtagcaacaatccaagacaataacagaatgcctatgacagtctgccatattctggtgagtgtctatcaaagctcatcatgattttttgtgagatcttccccgtaattggtagcttggcttccgacaaacatgttccagttctccaatatttcctctttagttagcttctcatccttgtttttgtctgattcatataccagatgcctggcctcagcctgtgcgtgatcataatcttgagggaggatccagtggcgaatctcatctttgtctaacttcccgtccttgttcagatcccggaattcgttaaactgctcccgttctgataaaacccagtctggctcagggccattctcctcatgggaaaacatatccgcaatatactcatcctgatccacaaacccatccccgttcttgtcgatgtcctccagggtttccaaaaccacaatttccttcatatgttcaaactcttcaggatgcagaaaggcagtgaactcctcccgagtagctgtcaggtcaccattgaggtctgcagctttgaatcttctctcatcacgtggcagcatctttttaaaggtgtgatgatctgaagaatcatgaaactctgcggggtttcctaggtagtaaccataggtggcttgtttgtattcttcccaggaaattttatcatccttgtccctatcataatccttccagactttggcgacattatcaaagatgtatcttttctgcacccgtttgatccaggttttcagctcctcagtagtgacaaagccatccccatcattgtcgattcgatcaacaatcttccctagcctctccttgctctcgtccggggtgagctggtcgaaggtcttggagtcctccttgcccaggaaggcctcgtggtcgtactggaagctctggttgtcctcagggggccgctcgcccagctccgagtcgggccgcaccacgcgctctttgcgcaccgtgggcttggcccgcagaacccgcggcgccagcaccagcgccagcagcagccccagggctaaccccaggcggcggccgcgcgccatcgtcccgaggagagggcggccgggagggagacgctgagcgagcgacaacagcggcagctcgggaatgggggctcggagcgcggcggccaagttttatgttatgtatattttacaagtaaaaaaattttttcacctcagcctgaactgaacactagctgacagacgttttgatttctttgaccatcacggaatcgtggccaagcgcggtggctcacatnnnnnnnnnnnnnnnnnnnnnnnnnnnnnnnnnnnggattgcttgaatccaggtgtttgagatcagcctgggcaacatgacaaaaccctgtttctagtaaaaatacaaaaattaaccaggctcaagccatgaccatgcaccattgcactccagcctaggcgacagagcaggaccctgtctc

SEQ ID NO: 123316 - DNA, 1515 bp, Homo Sapiens
  misc_feature (1084)..(1164): n is a, c, g, or t
cccccttgagcgtgcggttttgcagtttgttcccctgagtttcttgctttaattgttgctcagtcgtgtcccagtttcgcccgtgtagtctggctagttcacagcgtcttcaccgtttgcagggcatgctgccgtcaggtctagttgtggtccgttgtgccagttgagtgctgcgcgtgccgcattgtgtagtcccccatttgagtataactgcctttttgtgggatcacagctccgtgttattagacaattgtagccacatccaagacataccaggatgcctatgacagtctgccatattctggtgagtgtctatcagagctgcatcatgattgtttgtgcggatcttccccggtaattgttagcttggcttccaactgacatgttccagttctccgatatgttcctgcgttagttagcttctgcatccttgtttttgtctgattgcatataccagatgcctgggcctcagcctgtgcgtgatcataatcttgagggaggatccagtggcgaatctcatctttgtctaacttcccgtccttgttcagatcccggaattcgttaaactgctcccgttctgataaaacccagtctggctcagggccattctcctcatgggaaaacatatccgctaggagggaaggttattgttggttacaaaggaaagtgggaaggtaaacctcccccacccccataaaacagacttgacctcctgagctttaggaaaggcgacaaccaatccagagacctaactcaaacagctggtaggcagtttcttggggataatgatgcagtaatttattcatgatgaaggccatgtggtggagtagaaagaactgagtttagaagccaaaagataaatcccggcttttgacttagttcagtgactgagcctgaagtttccttgtctgtaaaatggagatgataatttataaatcatggggctattatgatcaaatgtgccattttgatgtaaaagccctctacaacccaaactggcactacataagcgaaaactaataataatgactaacattgaacactatggtccagatactgtataaagtgttctacacacagtttnnnnnnnnnnnnnnnnnnnnnnnnnnnnnnnnnnnnnnnnnnnnnnnnnnnnnnnnnnnnnnnnnnnnnnnnnnnnnnnnntcttacccaatgacccacagctcatatgagctggaggctgcacaggaacatggtcactctgctttcaacccagagtcttagccactgtgtttagtactattgtttatatcatttccaaagggctttcacttgtcattatatttcatccttataacaattctacaagatgggtcattatccccattgtacaaaatggcaaggaaaagaaaaaggaaacgtttttgcattgtgtgtgtgtcagtagctcttggaaaagagagataccctgcaggcagtttctctgtcacggaagcagagcttggaaatatcaggtggtgaatgaagctaggtatcgcagggaattccggactg

SEQ ID NO: 123317 - DNA, 1148 bp, Homo Sapiens
  misc_feature (69)..(83): n is a, c, g, or t
  misc_feature (871)..(879): n is a, c, g, or t
gctggtaccggtccggaattcccgggatatcgtcgacccacgcgtccgcccacgcgtccgggccgcccnnnnnnnnnnnnnnnaaatccttagggggatcctttatttcattcacttcctccttacaaggtgaaatttcaatctgtacaggttgtgtctgccagttcagtccacagctcagagtatcaccttgtcctcattccatggtataagctgttgcgggggggcaggtctgcgggtcgtggattcactggactggatgggacatgatccagaactccgctccgtttggcttcccaaggatcccaccaactcattctaatcagtgatcactgaggaaatgcattgtattcctattcactatttcaaagatcaggcctacctcattggcatattaagaaagttttctcaagtatatttagtgtttatcattttactatagttcttcaaatgtctgacattcatcttttccctacctctaaattcctttctttttcacattatctttcttgattgctttttaatagaaaaacaaacaaagacatggatttactgtgcatattagcagatccatactggaaaatgcatggaggtttcatatacaccacttacagtaagtaataactcagagtataaagtcgaaaagaaagaatctgaaatattagacttgttctgaaataagcttacctaggatgataccactttcgcttaatcagaatttcccctttccaactatttaacagtggcaaatataaaaaatctggtagttaaaatacacagcagtcacttcatattactgcctccctcaacccactcaccttctgaagaacagggctttttcaagttttgttcccctttaagttttaatagnnnnnnnnngttttaagtcatgttgtaccaatatatccccagaaagaattgcaatttaccaaggttttcacgtgttttgagagaaatcttactgaaagactagtgatgtccattttccagtaaatactgagcgaaaaacaatttttataccccaatctgaggtataaacttgctttttgtgggatcacaactgctgtaaattagacaattgtagcaacaatccaagacaataaccggacgcgtggtcgacgatatcccgggaattccggaccggtcca

SEQ ID NO: 123318 - DNA, 979 bp, Homo Sapiens
  misc_feature (482)..(491): n is a, c, g, or t
ttaaggcctccgggatttaagttttagaaaattggttactgtcagcaagttgtaaagggcactacactgtcccgcgtgaagtcgtgtgtgtgccaaaacgttctggagccttttaaatagaaaccgaccaagacagggattttctgggaaatttacagatccataccgggaaaaatccattgcagggttttcaataatccaccacctttacagtaatgtaataaacttccaggagtattaaagttcggaaaggaaagaattctgaaaatagttagacttgttctgaaataagctttacctaggatgataccactttcgcttaatcagaatttcccctttcccactatttaacagtggccaatataaaaaatctggtagttaaaatacacagcagtcacttcatattactgcctccctcaacccactcaccttctgaagaacagggctttttcaagttttgttcccctttaagttttaatagnnnnnnnnnngttttaagtcatgttgtaccaatatatccccagaaagaattgcaatttaccaaggttttcacgtgttttgagagaaatcttactgaaagactagtgatgtccattttccagtaaatactgagcgaaaaacaatttttataccccaatctgaggtataaacttgctttttgtgggatcacaactgctgtaaattagacaattgtagcaacaatccaagacaataacagaatgcctatgacagtctgccatattctggtgagtgtctatcaaagctcatcatgattttttgagagatcttccccgtaattggtagcttggcttccgacaaacatgttccagttctccaatatttcctctttagttagcttctcatccttgtttttgtctgattcatataccagatgcccggacgcgtgggtcgacgatatcccgggaattccggaccgtacaagcctgctttttttacaacactgttctatagccacagg

SEQ ID NO: 123319 - DNA, 2099 bp, Homo Sapiens
  misc_feature (652)..(660): n is a, c, g, or t
ttcatttcacccttgttattttgcaaagcaagtgggcagttgctggggaaagtcaagcatccttgggaaagagactctggggaaagagggcagggttgtccttagtggaaaggccaaagtcccctagaggactcaaaatcctctatttaaaatacaatctctttctttaaaacccaaaagcttcctgttagttccagctcctatatttctcgctgacattagctctgtgaaataaggtcttaggctggaatccaccctacagccagctttcaaaggccctttctggagccctgcgggcagcacacaagttgcctcaaagacagggtagaaatgttctgttttgttattttttaaagtctcctgaaagtgtaagaataaaaagggagtgaaagcttctgctttgtcaatgggaaatccacccccctgtccccaactctgccctgggagcctcacagatttcctgaagttaaaaacaaacagtgaccatttctactccttgcaagatttaattcttcctttaatataaataaggcagcatgaaacaccaagagccccactgctttctgctttagaagcagctttggtgcagaaaagattcccgtttccccaccgagttctgttgtctctgtacacacaagaagccagaagatannnnnnnnncagtgaactttctcctggaagcaaaggagaagctatgggagatccaggcatggttttggcttctggaggctgttttttggttactggggtctcttcaaagcaaaacgggatcaggatgaagagggggaaaggcatgggccataaataaataaggaaatttgccccgattctacaaatgcatctgatggaatgaggagggtcaggctgtgagggattgggggtagctccaggctgctgttagggacacacttgagctggttcattccctggagtgccccgcaactgcgtctagggagaggcaggcccaagcacatgttcagtctaattccagctcacactggaaggcttcctataggtttggttgccctgatcacagccgagctgccccaccaggaattaaccctggtgggcaaagggtccatcttctcaagctttctgagggctggttgagagcactcctggggaccgggggaaggatctccttccctccagtttgtggggtaactgggcacccccgttcaagttggttatgctctcgggaagggcatggccggcttaaaccctggaggaacaacggtatattcttgactcccttggccccctgcaagggtaactgaagtaacggtgagataggaaatctcaaagggccagtgaagccacaggtggaaaagagccttcctgatccccctgaaccagacctggagacggagcccagctccaaccacagagcttctgccaggctctttgggtctgggtcatctgtgtggtcagcagtgcccacacagaaggggtgggttctgtgcagtgagggagccccgctggagtgaggaactaggggctcagagcctgcagactggagctaggtttctatagttcttgcttccatgcacaccctgccctaggattgggaccctgaggacaacctggggctatgacatccttggcccctgatctctgcaactttctctgaactgggccagactgcaagccagacaccaccaccccgggtagcatttttgagcacctcatcgaaggagtctactgtcttacagcagagacttcgctgcaggacgcagggccagaagaggttgagaggcttggctctgcgcacagcctctgggagtgccatggcctcaggtgccttgtggttgccaatgaagaagtgatagagtttcttttccagctgtcctttgccacagtcaccccgtgtgtctctttctccaggtcagcttccacctttagcatctgtcctccccctaccacaatgatagtcagaaagaccagctttggagagaataaagagaggtgggggggtgctgagctggcacccagtgtggcaaatacccaccacgctcgggacccagtacgttggggaaaggacagcagaagggggcggacgcgtgggtcgacgatatcccgggaattccggaccggtccac

SEQ ID NO: 123320 - DNA, 696 bp, Homo Sapiens
cataattgcaattatggtcttttccattaaattaagatcccaactgctcacaccctcttagcattacagtagagggtgctaatcacaaggacatttcttttgtactgttaatgtgctacttgcatttgtccctcttcctgtgcactaaagaccccactcacttccctagtgttcagcagtggatgacctctagtcaagacctttgcactaggatagttaatgtgaaccatggcaactgatcacaacaatgtctttcagatcagatccattttatcctccttgttttacagcaagggatattaattacctatgttacctttccctgggactatgaatgtgcaaaattccaatgttcatggtctctccctttaaacctatattctaccccttttacattatagaaagggatgctggaaacccagagtccttctcttgggactcttaatgtgtatttctaattatccatgactcttaatgtgcatattttcaattgcctaattgatttcaattgtctaagacatttcaaatgtctaattgattagaactgagtcttttatatcaagctaatatctagcttttatatcaagctaatatcttgacttctcagcatcatagaagggggtactgatttcctaaagtctttcttgaatttctattatgcaaaattgccctgaggccgggtgtggtggctcacac

SEQ ID NO: 123321 - DNA, 583 bp, Homo Sapiens
atacgtattatttggagtggtgttatttgtttgggaactcttacctaccaccttagtcgtttatttcttccgagttagaaatcctacaaaggaccttaccaaccctggaatggtccccagccatggattcagtcccagatcttatttctttgacaaccctcgaagatatgacagtgatgatgaccttgcctggaacattgcccctcagggacttcagggaggggacagaagtactgaagaaaagctgggagaatacatgctttctcagtgatcggggagcagagaaatcctggtcagataggataaaagattgtcgctgagaaaaaagaagaaagctgcccaatgcgctgagccagcagatgtaaagaacgtaagctggaagcaagccaacaaacaagaaggacttcttgaagtcaaaagctgtcctttgggtcactcagattttgagctccacctcttccttaaaactgttcttttcccgttaccccactgcatctcctattagttgctttcccctttaaacccatattctgctagagctgtcccaccctctcacctgccagaaatgacttagatgctgagg

SEQ ID NO: 123322 - DNA, 1758 bp, Homo Sapiens
  misc_feature (164)..(173): n is a, c, g, or t
  misc_feature (448)..(457): n is a, c, g, or t
tttctgtgaacatagcagaggaggtttaataggataagtcagctacatttttaatgttatcaacttatcattaatgtgtatacattagcgccctactgaaaggaagtaccagtctttgggcaaaacttaagagattccttgaggaacctacggcctgaaccttnnnnnnnnnntctctaaagaccttacagtctgctgctttaccatttcattttaattatcaacactggagttgcaattggctaagttgtcaactgtattttaggagtctaccaatgtggcactcagaatcggagtgaccatcagtgacctaaagaggtaagatttgtggaatactttagtccaaaagctttaaaaaactattagaccatatattctatgtttttaaagtgaattatgcataaaagtctgtgcaaactacaacatgattgcagtaacattctcaagnnnnnnnnnnccctagtatactttagcattattatttaagttatacaaaatacatctttataaaagtacagattttctttaaaaagtttaaattatacccactgaaatagcaaggctccctctttagtactaaaataagggtttatcagtctacattattgcttattcctatggggccattggaaacctgtaacaaataaaaatcaagttctatttcttaaggaaaagtgccctaaaaattcagctgtcactatgcttttctgaagcttttcatctgaggaatcgtccataaaactgttaactgatgctacccaaggcttggtttgtcaggatccaaagttgagtcttgcaaagttcctgcttgtgccaggaagctgttagtttgttgtccccaatcatagtaatctggagcaaaacctccctgaagtccctgaggggcaatgttccaggcaaggtcatcatcactgtcatatcttcgagggttgtcaaagaaataagatctgggactgaatccatggctggggaccattccagggttggtaaggtcctttgtaggatttctaactcggaagaaataaacgactaaggtggtaggtaagagttcccaaacaaataacaccactccaaataatacgtatccagcatctcccagctgattcttcaaatctgcctggtctgatacattgtaccagtcataatcaaaggaatggacgctcttgttctgagaaaatgacaggatgaacaggttgtagcaggcccgagaggtgtaaagcagtatcacggtgacaccgatggcagtcacttgacacacggaggagcccttggactccaagtaaatgttggctaaggacatcttagagattttgtagagacagatggagagagagacggcacacagcacgaagagcgtgtcattaatggccactcgcacagagacgataaccttcctctcccaatttcccgtctttaccagcacagcacaggttaaattcaccaacaggaaaacaaggctgatgaagagggaggccaggtagaggggcacctgcgtgaagtacaagttcatcagcgtgagggtgaaaaactgcaggcacacagggaagcagtagagcagccagaagacgaaggggctgagcgaattggccgccacgaagtctttgaagtagaaggagaagaggacggtccgcagggaggcccagaagaggcagagaaagaggaagacgctctggtagctgagccgcttgtggcggtaacgcagcaccagccagagctgcacgtagatgaacacgaagagcagcgcgtagaacacggtgt

SEQ ID NO: 123323 - DNA, 1372 bp, Homo Sapiens
  misc_feature (289)..(297): n is a, c, g, or t
  misc_feature (1153)..(1172): n is a, c, g, or t
ttttcaattattaaatgtttggcactttattaaattaattaaataagctccaaaattaattacatacaaatcaaaggaataagaaacaataaatagtttattcagcaaacacctctctgcagcagccggcagctctgaggccgaggctggcgtcctgtggcagagggcctgtggattgccatgctcgctcccaggggtggctcaacagggacacaggtctactccttccacatcgggtttccggaacaacaactgaactctcattcattaccatcccattcattaccannnnnnnnnacatacacgaaacacaccgcaatgtatagactaataagccaagagctttattgatgcagcaggcactttacaatgagcccaagagtgtccaccttctctgggaagacaggatgtctgtacaaactcttgggtttttttccacttcaaaaacacaagctctcccgtttaccacagcccttggatctgcacctgcccaaaccatccctcccccagtgcacacaggtgcatctgaccaacaccagccgccacgctggtagaccgtcaaaatgtcagttctgcagtactcggagacaaaggcatagactatcagatcctaaacaggatttaggaaacagacgattttcccctccaccttgaaaataaaatacatttcagcagatacatgtcctgaaatagtttacttgggagttcctaggaagatggtccattgtcaatcccttcttcaccagcctgggcatccagaattcttctcaaggtaacatgagtctttttattttttttaaacagtctttcttgctgtaagaactcttataatggagcctagtcctcctactgctaaggccttttcgtgccactggagtaacactgcgctgctattttctgtgggcttctcaaagcctttataaatgtacttcattaacaagtcaacgccgtttctgtccagtgactgcacagcctgctcaatctcactgctcttgaagtttgtgagcactttcagcaccacgccctgggctcgctccttcacagcttgattcttggtgttgacgggagagttccgcaaggctgcatggaatgcccgaagcatgtccccttgccgcaggagcccgtccacctcgctcgggtccgggcctggctnnnnnnnnnnnnnnnnnnnntcctcctgctcgtccacaaatttgttctcgtcaaattcgtcgatgtccacccggcggaagcgcgaggacagcgtgttccgggccatggcgggagctcggcgcccgctcagccggctccgctcgcggcccgacctcggctctgccctcgtgccgaattcgccacccaggcctcgctacctaaaacccctactagttactga

SEQ ID NO: 123324 - DNA, 891 bp, Homo Sapiens
  misc_feature (280)..(293): n is a, c, g, or t
  misc_feature (648)..(667): n is a, c, g, or t
tggatttgcacatgcccaaccatccctcccccagttgcacacaggtgcatctgaccaatgtcagttctgcagtactcggaggcgaaggcatagactatcagatcctaaacaggatttaggaaacagacgattttcccctccaccttgataaataaaatacatttcagcagatacatgtcctgaaatagtttacttgggagttcctaggaagatggtccattgtcaatcccttcttcaccagcctgggcttccagaattcttctcaaggtaacatgagtcnnnnnnnnnnnnnnaaacagtctttcttgctgtaagaactcttataatggagcctagtcctcctactgctaaggccttttcgtgccactggagtaacactgcgctgctattttctgtgggcttctcaaagcctttataaatgtacttcattaacaagtcaacgccgtttctgtccagtgactgcacagcctgctcaatctcactgctcttgaagtttgtgagcactttcagcaccacgccctgggctcgctccttcacagcttgattcttggtgttgacgggagagttccgcaaggctgcatggaatgcccgaagcatgtccccttgccgcaggagcccgtccacctcgctcgggtccgggcctggctnnnnnnnnnnnnnnnnnnnntcctcctgctcgtccacaaatttgttctcgtcaaattcgtcgatgtccacccggcggaagcgcgaggacagcgtgttccgggccatggcgggagctcggcgcccgctcagccggctccgctcgcggcccgacctcggctctgctccgctcgcaccggctcctgctcccacgcgtccgcggacgcgtgggtcgacgatatcccgggaattccggaccggtccagc

SEQ ID NO: 123325 - DNA, 914 bp, Homo Sapiens
atgatcatggaaactgatcattgcctgatccttctaccgccttggcgcgctttcttgaggaatgtctttggttaatggcttcacggccatggaggtgacatcatgtggacaacaggctaggatgccagagttagctgctcggtggagatcatttgagctccgactcagattttgaacggatgtttgcatgtataccacagtgctacattaaaaaccagtcatgtggatgtggagaagggtgctgatcaggactccctgtttgctaacaaattctacagcagaaacaaagtattaaggtttgcagccaggaagcaagtgcatggggaataagcctgcagcttcttccaaatgagacagagccaaatcttttttctgagtctgttttcttcatttctattaaaccaaggtcctttttaagcagtcgaatttcatccaaagccagagtgagctactttgtttgggggaacagtaacagttacctccaccactgactggctgccatctggattgatccggaaagatcccatctgaatggtcttcttggggtccacctgggcaatttcccattctagttcatccaccagagccctgcatgctccacagtggagatcctggctcctccgagcccaggcggttcccagcagggcccccagaagcagggccagccaaccccagcctttcatctttagcgtaatggggtcgctccacctctgctcccagggccgccgccgtggcccaagcgctggaagaccgctggactctcactttggccccagtggctcccgaaactacacctggctgcagggagcagggctgtccgggattctccagagcgcttcgccgcctgccacacacggggtgtcccggcgaccgcctgacccagctcccctgacgctaactggtacctaagcccc

SEQ ID NO: 123326 - DNA, 1043 bp, Homo Sapiens
gtttgtgtggtacttttggtttcatattttttcagttaatttcagtaaaaacataatatataaaaggcattgccaccattttcccctcctgggggtgatccatcaagccagtgtgggctgctccagtggttcatagctcatcatgcgatatgtgcagggcatggtcacaaagatctgttcgcttactgcaaagtttgtctttaacattgtcagcctctcgggaaaagaattcaatgagttcatcctcgtattcctccacaatgctctcacacgcaaacttgagggtgccgctaatatctgagtcgattcggatgccttgtaggtccagttcactggattctccattccggcccactacacgtacgtagttcttgcgatgggtggaaggatcaatctgttccccatactccttcatccggtcacatatctcctccagcagctctgtgaggtgggcctctgagcgggcataaggcacctccaccactgactggctgccatctggattgatccggaaagatcccatctgaatggtcttcttggggtccacctgggcaatttcccattctagttcatccaccagagccctgcatgctccacagtggagatcctggctcctccgagcccaggcggttcccagcagggcccccagaagcagggccagccaaccccagcctttcatctttagcgtaatggggtcgctccacctctgctcccagggccgccgccgtggcccaagcgctggaagaccgctggactctcactttggccccagtggctcccgaaactacacctggctgcagggagcagggctgtccgggattctccagagcgcttcgccgcctgccacacacggggtgtcccggcgaccgcctgacccagctcccctgacgctaactggtacctaagcgggactccagcgtgctgcggtgcgagccccaatcagacaccgaccccaaacccgcccctccaaactctcgcgcgaacaggcagcttaggagaggctcccgaacagcaaggatcccggtcaatcgccgaaggaccca

SEQ ID NO: 123327 - DNA, 549 bp, Homo Sapiens
  misc_feature (430)..(430): n is a, c, g, or t
  misc_feature (512)..(512): n is a, c, g, or t
  misc_feature (519)..(519): n is a, c, g, or t
tttaatttttttatatccataggttattggggaacaggtggtgtttggttacatgagtaagttctttagtggtgatttgtgagattttggtgcacccatcacctgagcagtgtacactgtacccaatttgtagtcttttatccctcacccccttcccaccctttcccctgagtccccaaagtccattgtgtcattcttatgcctttgcatcctcatagcttagctcccacttatgagtgagaacatacaatgtttggttttccattcctgagttacttcacttagaataatagtctccaatctcatccaggtcactgcaaatgccattaattcattcctgaaaaaggtttttctaaaaacaaatctctgtcccactcacctatcagaaataccagcacagctctaaggatccctgggattttgacttggncaaagcattttgcatacctctcctaaggacacacacaagagaggaggcatcttaggcagggagcaccattgctgtgattcanttctctnattcatgacatcctgccttccttaccagct

SEQ ID NO: 123328 - DNA, 1856 bp, Homo Sapiens
  misc_feature (16)..(16): n is a, c, g, or t
tgtttcgaatccatancatttaccattcgccagggtagatttgttcatcagctgggcttaaagaggtataattcacacatgtgcagtattagtaaatgctgaaatttaatgatttaaatataccagcaactgttgcaaagcagttgtatagcagcatttaacgttagccagaacctccctggctaatgttaagtttataccaaaagaatgagagaaattttggcatccccttgggatgggggtcacaattcccacaacttttacgggtaccagctagagcgactccttgcatggctagtacagaccctctgtttttctctgacaatacctttaaaacattgactggatctaatcaggaagcaaacagattcctctggaggtttctgagtcatctgttcttaaaatggttatgatttgggaccttcttacgcttgatgcagagggtatcagacattcctcctggcgtgtgttcccagacatgggcagaagactgttgtcaggccaaagacggagttaaatatatcaagggagaaaggtggttccttggactatcaggaattggtgtttaagacacagtagaaaaaggaataaaaaataattttaatcatatcaaaaagccaaaccaaagaggaatagctcatggaactgacaggatcctgactcagcggctggtgctcttcctgtgcacaagcccagcactccaggtcccaaggcatttatcaaatcccaccaagatgtttggcttttgcaccgaattctgggtttggttccctgaaagaactcattgatgtaaataactaaaagtgaggtctgggtaccctttacatgattccccagacctcaaatgggctaacacgcttctcttctccagcagtcttcctgtccgtgaagtttccttccagattgttacatggaactgaaaacaaagggagcctcagctggatttaaatctggagcatgccacaaagtcttccacttggcattttcgagaagaacccatcagagatcataagaaatacaagaacagaggttgcatagctcgaggtgcttggatattcattctaggttcttgttcttgagaaagtgggttaggtgggtgcatgccaagatccaagtaggtcaaccttccacccttaacctactactctgacatcagagtgctgggaggccttgttctctccctctgtcccagcctcacattcagacctccaccaatgacacgtttcataagctgccaatgttggggaagctcttcagcttctcaggaaagtcatctttgtacaggacagggtcagctcggtgttccaccaccttgagaggcatggtcccgaagactgaagcaaacttgttgatgcactctgacctctccaccatgtgtgtttggtctagtgaaagcccatctatggctgtgcactcaggacacttgaatttctttcgtggggttaccttgataactgcttttcccgtgacgttggccaccaggaagttcatggcaatatcttcacagttcatatgagcatctacccagttcttgatatccccaggcattttgtaggtatacaggtaattaaaatacttgtgataaaaagctgccccagtgagcaccatggacacttcattcgtccactcagactcatacttccacttattcatctcatggtcccagagatgcagacgacccgggtaacccaccaaccggtcaggaaattcccgccagacctcataaccaaattgcagctcgtcagaggtcagcataatgatatcatcatcaatggccagaacagcttctgtctcgatttcatcataagggaagaaccttcggccgattcaacacccggctcgtactagcctaagtt

SEQ ID NO: 123329 - DNA, 2083 bp, Homo Sapiens
  misc_feature (303)..(326): n is a, c, g, or t
ttttttttcacaaggaatatcattttattactgtaatcacaaaatcgtaatttctgtacaggaatgtataagtgaacattattcaaagcattggtaattcacttcataaagagggtaaacatactacagaacatattgtaaagaaaaaatattgtaaaattttctggtcttgcagtgcactatttagtgcaagtatttaagacacaatagtgttcaattcagcaaagtattgcagaatgtcatgccacagtccacttaattcaaagagggtcaggacatgcagcttgtaataaaatgtcagannnnnnnnnnnnnnnnnnnnnnnnatataaaaccacatgtaattcataaaatatatagtggtttatttagatggttttaaatgatttcactgtggaatccagcataactggaacaacatccaaggtcttcttaacggcaacaatcttattgctaggcaatggctttggcttcaggtaagaatgcttcccagtattttatcagctgttgttgtgtttgaactagtgattctaagtacttgatgataacggttttaaaatccttcactcgttctttctcaaatcttcccacttcttttcgaatcgttttagatatctgttcaaaatctctttccccttgttgcactttcgcctcccactctcttatttcatttttagcttgctgtattttatctggtttgttagcaaccatcatttttgcttcagcttcacgttttttgagcaaagtaatttgagcatcttcccatttctgccagcacttcattcgatggtcaaacacacctttcactgcagcaataagacgaatgtagtcactaagtagttctgaaaacatataaaagtcagcaaaagcttgttcttgatgtaactggtctatcttctcctcaacctctgcaagctgagacaaagctctagataaagcagtatgatcctcagaattacctaacatggcagcacttttagcaaaggcagctgtgttggctgaaagttcttttctatgacagaccaaggcttcaacactgacatgaagtttcctaagttgctgatccagattctcaaattgctgctgcttttcttcaaaccatgcatccgattcattcatcttgattgtcattttgttgacagcgtcggcagccttgttcaccatcctcaatattcctgctccactcagagcctgtgtattaactgctctaggcagctctgaactttccaagaactgccttaaatcaggatcctgtagtaaagttggatgttttactgttctttgaagatacctttcaagagctgctctccgtttttctacaaactcagtggatgatgagtcttctttacccactttgaccttggtcatccctactatactcttttctggagctggtggcacaatataaccaacatgtaaatatttgcttgctaatttgctgtgcaaaccaagaaagtcgctgaatcttcttttcactgaaaattcactcttactgaacatggaaagagatgtctttgttgttactctatatgccatataggcattcatgccatcaccaactttttctggatctgatacaccaatttctatgtcaaaaatgtctccatttgcttcttcttcaatctcttccctggatctatcaaagatcacgggagcagacatactctttgattcaattctaggagcaatgagtgtagtaggagtgacaggtgtgactgcaggagaaggttccgaggataggataggttccctttcagggctgtccaaagaaacttcttctgtggcttctgcaaaaagatcttctctgtcatcatctaatacaacttctgtgggttttgggccattggagtttgcactaatatcttctgcaggaagactagctggttctggagatgatggacttgactctagggtggagacagtgctggtgaacaggtcctctccgtcctccagatcctcaaagtcggtgggcttcccgtcccccagcggaggaggttccctctcggccgccatcttcgctcacccgaacgacccccggccgtaatggccgaattcccgggcatatgtccggtaccgtcgactg

SEQ ID NO: 123330 - DNA, 2654 bp, Homo Sapiens
  misc_feature (1671)..(1679): n is a, c, g, or t
  misc_feature (1719)..(1728): n is a, c, g, or t
  misc_feature (1887)..(1895): n is a, c, g, or t
  misc_feature (2563)..(2563): n is a, c, g, or t
  misc_feature (2589)..(2589): n is a, c, g, or t
  misc_feature (2595)..(2595): n is a, c, g, or t
  misc_feature (2619)..(2620): n is a, c, g, or t
tgagagaaaaaagaaatttttttatttagctaaattaaaatggctgtgttacttatttgaaatatgcaaagctcaaatcaagtcatggaaaccctgaattctccctaaacagaaccaaaattgcttatacattaccaaaatagcttcactaaaacaaagtagatttaaatttcttaatatgagaaaacaacaaggtaggttaggttcgtataacaaacaatacacgctctataaagtctcaggaatacccaaatgtgttctggtttggatatgaaagagggaccacttctagctggtgttggtaagcaagccaatgaggtgtgcagcaaacaaaacctgtcactaaaaacaactcaacaggccattatgagtatgagcccatcacagccaaaatcctcaactgtgaccggcaggaccagcaagggggggtgttgaaggggttatgaacagcaaccataaagaaaggaatctccaacagaagggacaatggccagcagtaggtgaagggaacccattcttcagctctgttgcatcatacacattcctgagggtcaggcacctctgccttttagatgacaccacagtcatctagaagtcaggttttctcttcttttggttcttctttttatatgctacctttttgcctctctgatttatggggaggctcttttagtaaacattatacaagatagtacaaggcaaaagaaaatcaagggccaagaagcagtgctttgagtaacttaggaaagcagcagtaggagcttccagactgaaaaggtaaaagggtttaaatccaaaaccaaaaccaaactcactatccagtcttcctctcagagatgagatatggctggtgaggcttgactacagctaaatacaagtcacaggctcagtaagttaagtcaacatacaaataaaagtcccaaattcacactaaataataggcttatgggatgcttaagccagtgagtctgctcaactcagaagaaaggagttcaagataccctacttttgcctggaagatgtactttctcaggcaggatgacaaaaatattcatagatctgagaatgcagtataaacacctctgccaaacttggtagggggagaggatggttactgtatactggctcaggggtgatactagtcagacaagcacaaggtaggaagaacagaagataaaccgaaaaacaaaatggatttctccatgtatagttatctgatgcaagggaaaatacacacaacaaagagttaaggtgtcttcaaagtatctgcctatgaataagaatttgaaactaaaaaggacaagctacattaccctcaagtatatttcatataaatcagttctcaaaaaaataccttccaggtacagacatactatttatggtacagtatataccaatatagcagtataattccatttattgctagaattttaatttggttgttagaaaaatctgtaaagggtgtatatatattaaaaaaaggtgtggggtgagagtggatggaaggcagtcagaagggtgagagttattttcaagttacctaaagtgccaggctaatttgttttaacctttccaagaaagtgaaactgagcataagctataatgagataaggggacacattcatgggaaaagacttcatcttgctttgactaaattttaatacttctggnnnnnnnnntttaagtttggttaataccaagctgaacatcatgtaaagnnnnnnnnnncagcccttaaatgtttaagggtaccggactgtatccatggtgaagggcaacctgaacaaagttaaaaaggaaatgatctccactaaagaagtctgtggcatgacagctttctctactttctccctgacttggcctataccaaagttaagtttttgtagnnnnnnnnncccctttcaagttgttgcccaaagactgcttctaagaacaacacagcaattctagactcaacatacaggagacatggaggtattattcctttcaatctagggatctttcatgccaggtccacagaagcatttaaaggaagtattgtacttgattgtattagatttgaaaaacttgctaccaccatgtgaaggccctagctccaggcctgccctgctatactttggcatcctttgggtagaaagcctctagctacttctgagctggtaatggtaaggaaactgaatattatttcacatgtttcatctcacagcctttttggctttagtcatcccccagagaaacatattaggctcttggttagcctctaggtaaaatctcaaggggtatggttttctgggtcaaaattagaagcacagctctcttctaaagctctgggtggtcagtgtgagataatggctgggggaatttagccctgccattcaaatggagatggtactggtggtgggagccagctacggctttaagacagacttaagtgggtgggtggggaaggcaatctagctcactcagcagggaaaatggagctccccaatggataactttttatgctcataaaccctgaaatagtactaaaaatgagaaaaatccccaagacttctctgattcncaggttgggattagctgagggaatangaacanagaaccagatcctacttccatganngcatgctggagtcagtattgtctccagtgtctac

SEQ ID NO: 123331 - DNA, 906 bp, Homo Sapiens
  misc_feature (12)..(12): n is a, c, g, or t
agtaacctgagngggtatctgggttcccacctaacttgcactgggatagctatgcctatcactgtcattatgcgggccatattcatctgggcatgtgtgggcttgctgcagctcctcctacctgagttagtagtgaccaccttcggagatgaaacaatctagagttgaaatatattctttattttcaggatggaaataggatagggaaggaggaaagatacctttgttagttgccactgcagtaccatcgaaagaacatccacgccaacactgtcgcactcgctgatgcgagggccccgaggactgcaagcaggaacagattgctgggcgtcagagcctcgggcctggccagcagctcgcccaggctgggcctccagggctcgatcagctcggcatcccgcggcgcccagcgcagcacttcccggaacgaggcctgcaactctgtctccgcccgcgggggcgggcccgtcacgttaagaaagaagtagagccgggccagggggcgctggtcttgcttgatcacgcaggagaacgtcccgcggtgcgtgagctgagccggccggatccgcgccaggtatccttcggcccgcggcatatctcggaaataggacaagtcctgagtccggagacctcctcctgcgaacttccaggaataggtgatctcctcctttggcagctggaagtttacgatgcaagaaaacatagcctggtcgccccgagtcactgtcacatcctgaactgggcagtccagcgggaggtcgcagaccctagagtagcacccgctgcagaggaaacgccgggcgaactcctggagaccgcagggagggatgcaagcctgggctgtggaggaagaggaaacatcactaccttacagtcatgggaagacccttgctcgatgcctcgtgc

SEQ ID NO: 123332 - DNA, 1051 bp, Homo Sapiens
aacaattccaaaggtttatttccttacgttggtattatacaatataacgcaaagggcaggaaatcacacaaaattcgctttaaaatagacaaagggtccagcactatcaagagaacattcaaccaggggcagcagttgaggcgcccaggacctgcttggacacacgcacatgcggccgcgacggaagcaagaggaccaggacaccgggcaagatccccgcagtgccagcttcccaggactcaggattccagtcggccatgaagcaataaatacaaacatgccccacaaggtgagaataaagccatcaaggtgatgaggaagaagtcacggggattttcttcttctaagtccaagcacagtggcaatatttcaagtattgcaaagaaaaacacacgtgtgtgtatttttgtctgttatgtggcgtgtgaccctggaaccccccgcatgggtccatggccccaccactgcctcccgcagactggggactcgttcaagtatctactgattcaggcagggctaaccgagggctgggcagaccaagggaggcccaggcggggtttgcagggcatgcccgcctggaatccggaaggcaggcctctctgcagacgccctccgtggccttgggcaaggcagaggcagggagggacagggctgtcatcaggcctaccctgccgaggagctgacatcgaaactgactgtcaaagctggacggggagcttttgcacatgttacttttttctttgcatgaagtattcccctcatctgcttccaggcccaggtagggagggtgctgggcacacacctgtcctgctgctgccacagggaggggcggcaggggacagcaccaacacaggtgtgcaaagcaagctcaccgaccgcgaagccctgttgcatctgactctaactggccagtctcgccttccaaagcatcttagaactaaagttctcctttaagaaaaatggtggtaaatagaagttaggataaggtgagatacaaagtcggtggaaacaggatggaggccggagtggaaaggtggatagagacaccgaa

SEQ ID NO: 123333 - DNA, 567 bp, Homo Sapiens
ttttcagagtttaaaaatctctagtttatttctaacaaacaccactttgatgcttgactcacaggctttatttacatttgtctacagtatcatttccttatgaaatgaactagtacagcttagttaaaccaaatgaaatcataatcatcagaattgtctgtaaactactattagctaaattataaccttgcatttgcttagtacagccaaagttttaaatacagaaagcacaagaataaaccaatggtaacatgtagaatctagatcgtcggggcaatttagaaggtagactttcaaaaagtctgaggcacaattacaagtgagtaaaagttcttgtgcaacctacataaacgcagcaaagaaacttaagacataaaaacatgggaaagctcactgtaaaaatattatcaaaatatttctacataagatatcttgctttcatttttagatcagctgaagagaaaaacattcactttaaagtaaaaacatatatttttgtttggtttgtctatgaaatatcttaaaatgtcgtaatttttatttaaattgcagcagacaatgttacgg

SEQ ID NO: 123334 - DNA, 1230 bp, Homo Sapiens
  misc_feature (1118)..(1118): n is a, c, g, or t
cctatttgaccccagaaacgctgaggcgagatctggcaatctgattccatgagccctcccaggggatttctgatccatgttaaagtctgtgatccaccaggcctgagaaaaggtaccatttcaaatccgaagtaaagggacaaagttcttcccagctcctatggactagtcttcagtccccatcgacacactgacgctggatccagctcctgctgtgggcagtgcatgttggcactgcagggaggagaaggccccagagacccgagaaggaaggtagggaccgtggcttcctctttctttattgggcgctttgtagatgtcacgcaggtttaaaagttacactgctaaataattatttaaaaactgaccaggacgaaggtcctggtccggagctccaaaccagaagcaaaaaggaatcggggcggtgggctggggggtactcctccaacatcaccaaaacccagaaaacgaggatcctaagctcctccgcaggccaaatccagggcttgggcccctgggctaacccgcaggtgcctctgactgcatcacactcagagtaagataaccagcaaggggctggagggaacggccagccgagtccagacatggacagatgtaactggaaggaggacaggaaacagacaggtactgtccagctgtaggtaagagagtgcagctaaggcaggttgaggggcaggggagaggctgggggagcagtattgcagcaatgcaggagtgtagccccagggtcctgtcctgagcggctggtcaggttagcagctgttagttcccagatggagctcctgacccgaacccaggtagagggctcacacgttgtgggtcctcttggtgagctggggctcctcatccaccagcttggacttgaggtgctccttgtaagccaggatgtctccaggccacttggtgattgtctgcttctcacagacccaaatttcctgtgcacctgctgaatgagtctgagtcatggctgacagcatcatacaccctcaaactcatgatggatctgcaggcgtcatggtccgaatcagtgatggtggtcatccagaacagtggggtctgcaggcagcagcagaaatcggactctgcctctgaagtcnggatggccactgtgttccatgaacgtacgcctctgcgatctggctccagcaatcctaatgatcgataatcgacagtcaacgtctgttgatgtatcgcaatcaacaataacga

SEQ ID NO: 123335 - DNA, 720 bp, Homo Sapiens
ccatgagcttctcacactccgcatcctcatgagccagccgctctgcctctttctccagcatggcccgctctgtgtcgacttccatcacacaatgcaagggtgtcttgtcactagggggcatctctcgagtcagatggtagatgtcgatgtgttcagggatgggtcacttcatcgcttgcccgatgagtcagagagcagcatggactttccgattccatttgtagcgcatatgaggccatgaacgacggcctgagtttgattccagtttggtgtcatcttgagcagctcttgagccagtgaaaggtgagtgagaggttgagtgatgtggacatgcagtatctgttggggtgagaggccaggacgccagtgacagctcgagcaggcagctttcttcagtctctagagtcctctagctccttggtcagcgaatctacttctgtggtctctcgtgccagttggccgtcattcgttctctgccacctgtggttgctgtgacaacagtctccattttcttcatgtccttttctgggccgctgtcgagctttggcagcctccttctttttggctgccttcttcttggccaggtcggagggcatgatgatgacccacaggggtaggttactgttgtttcagggagctgggcctcgctgctcggcctatgtctcgtgccgagctgctccttaggatcctccgcgtgcggccggctcaccagccaatccc

SEQ ID NO: 123336 - DNA, 2351 bp, Homo Sapiens
cgggtactctccgacatccctgacccagtaacgggatctaagctcttcccagcctaatcagggctgggccctgggtaacccgcaggtgcctctgactgcatcacactcagagtaagataaccagcaaggggctggagggaaacggccagccgagtccagacatggacagatgtaactggaaggaggacaggaaacagacaggtactgtccagctgtaggtaagagagtgcagctaaggcagtgttgaggggcaggggagaggctgggggagcagtattgcagcaatgcaggagtgtagccccagggtcctgtcctgagcggctggtcaggttagcagctgttagttcccagatggagctcctgacccgaacccaggtagagggctcacacgttgtgggtcctcttggtgagctggggctcctcatccaccagcttggacttgaggtgctccttgtaagccaggatgtctccaggccacttggtgattgtctgcttctcacagacccaaatttcctgtgcaacctgctgaatgagtctgaagtcatggctgaccagcatcataccaccctcaaactcattgatggcatctgccagggcgtcgatggtctcgatatccaggtgattggtgggttcatccaggaagagcatgtgggggttctgccaggccagccaggccagacacactcggcacttctgcccgtctgacaagttccggattgggctcacctgttgtttcccagtgagaccgtatcgcccaatgatcttcctcatttcttccttctccttgatctctgggtagcacttcatcatgtactccaaaggtgagagatctaagtccagctgctcttgtaaatgctgatggtaacgccctatcttgacatgagagtgttttcggatcatgccatctgtgggtagtagctctccagttagcagcttcagaagagttgacttccctgctccattgggccctaccagagccactcgtgtgtcaaggtcaattccaaattctagattattgtagatgcaaggcccatcttttgtatacttgaagctcacattttgcaccataatgacaggtggagggatcttgccacatggtgggaaataaaatgacagtgtcttatcgctcacgaccctctctgtcagtcctgatgccatcattttctgtagcgtcttctccttgctctgggcctgccgggccagcttggcactgccatgaccaaacctcgcaatgtagttcttcatgtgtgcaatctgatcttgctcccagtgaaacctcttcatctggttctcctccagctctagccgcgtcttcacgtactgatccttcttgcccgtataatacttcagtttcttgttgtgcatgtgaatgatattggtacagacaccattcagaaaatcctgggaatgggagacgaggaccaagatgcgcttaaaagtttttagttcttcttccaaccacacgcaagcatctaggtccaggtggttggtaggctcatccaggagcagcatgaagggccggaataaagagggctctggcaagggcaaccttcatcctccagcccccactgaagtcttttagcttcttgcgctgcatggcaggtgtgaaacccagtccatgcaagatccgcgaggccctcatctctgccttgtcggcatccagctcctccaggcgctcgtagagctccatgagcttctcacactccgcatcctcatgagccagccgctctgcctctttctccagcatggcccgctctgtgtcgacttccatcacacaatgcaagggtgtcttgtcactagggggcatctctcgagtcagatggtagatgtcgatgtgctcagggatgggcacttcacgcttcccaatagcagagagcagcatggactttccaattccatttaaaccaatgaggccataacgacggcctgagtttaattccagtttggtgtcactgagcagctcttgaccatgaaaggtgagtgagaggttgatgatgtgaacatcagtactgttggggtgagaggccaggacgccagtgacagctcgagcagcagctttcttcatctcaaagtcctctagctccttggtcagcaaatctacttctgtggtctctctgccattggcctcattcttctctgccacctgtggttctgtgacaacatctccattttcttcatgtccttttctgggccgctgtcgagctttggcagcctccttctttttggctgccttcttcttggccaggtcggagggcatgatgatgacccacaggggtaggttactgttgtttcagggagctgggcctcgctgctccctcgtgccgaattcgccacccaggcctcgcttcctt

SEQ ID NO: 123337 - DNA, 716 bp, Homo Sapiens
ttcattttctgaggaaaacaaatgtgtttattttctctatttttctgtaaattctgtgttttacattagcgttgttaacactgcaccaatttctgtcaatagatttctccagaggacattgtgttcatgacaatctatcaccacaaggcaaaatcagacagaatttggggagagcatgaaatttgttaccttctgcttgtgaggaaaaacgtcactctgaacccggatcccagtgaaacgaaaagcatcctctacctgtcccaggaggagctgtgggagctgctggagagggaggcgaggggtgaagtcaaagtcaccccctggctaagaaccattgccgagaggtttctgtaccggtggtggcctcacctggatgacgtgaccccgtttgtggagcttcacaaaatacacagagtgtgagaggcagggaggtcgagtcagccatgtgtaatgccctcagtgcaggcagacgcaccattgaggcaatgatacaccctctccaaaaaacagggcaaaaggggcacttgattgcccatcatgtataaatcactatttcaaccttttcatcaactttgtcatatcttcattttcccttttccttatttccatatttctcatctgcctggttgcagggaggaaatttaacatttcctttgtcccaatttccatttttataagcacttgtttgattaacagcagctgataaatatggaaat

SEQ ID NO: 123338 - DNA, 532 bp, Homo Sapiens
  misc_feature (156)..(200): n is a, c, g, or t
ttgtttgtctcacacagtttatttaacaataggtaataagaaatcaaatttaacagtctatacagtgatccaaagttcatatttataagtaatcaactttaattgcatgatttacaacagttgagggtttttgctattttcaagttttatagaaannnnnnnnnnnnnnnnnnnnnnnnnnnnnnnnnnnnnnnnnnnnnagtggggggtagggtaaggaggaagaaagcaagcaaagaagaaacccccagggacattttgcatgttaaaatcatcccaccggaatcgtttcttaccctctttttaatttttttactttgttagatgtaaaaataacgaaaaaaattctttcaagaaacagaaaccacaatatataatacatcaatttggcagctgcccctgtatatttttgaaaaagtcatttttctctctacatgtacaaattattttaatacttgaagttttacgctcagacttacagaatagaaaattttctggagcacaaaagttgacttgaggggaagaaaggcag

SEQ ID NO: 123339 - DNA, 1353 bp, Homo Sapiens
  misc_feature (1055)..(1090): n is a, c, g, or t
  misc_feature (1309)..(1309): n is a, c, g, or t
tttgtttttttatgaagataactacaggaatatataacattagttcctgttttccaccctgtgaatttacctgaattcatagaatccttgcgtgctttaagcaaaaaatgtattttgtattgaaattgattcttatctcaattccagacacctatacagtgctggagacacctaccctacaccacgaaatgccagacagtaattcctagatcaaagtaaatgatctaaagcatgcatcacatctgatctggaagtggtccagaaacaggtgtgttgcatcttctgtagctgtaaatagagattctggaagggtgatactgtttccttttcagggtaaataacccatacttgttatgccatcaagccaagcagcaaatgaataatgtcatgaaaatattattagaacaaattaacaaattacaattacaattatcaaattaacaattagaatatagtagcaccatcattctaaaaatttaaatttgatataaatatacatttccatatcagcctaaatttacaaagtcctataatatgtaggatataaggtcaataagttaagaattccagccttaaggacaattttaaattataatttttattcctcagtcaccactgctaatccttcaatttatttcaaagtaacttctggtttttattacatttggaagataaagcaacttatcacatgtaggttacaacttaaaattcgtgtatgagccattgcttatattttctaaatctgacatgacccagggggtttctactgctcctaccaccacccaggacatgcgatgaagattgtgcacgctaccgtgagggcagaagcaggttagtagctgtaggagctgtcacatggatttactataatgcacttgaaattgtgtatgtgaccttatcaggcatttaaggaccataatctctccttgacctaagaaatcagcttgaagtaattcacttagatttcaaattttaatgtggatacccaaggctgcaaatctgttattcagtacctgctacacttttggggttgcctcttttatgcactgttagannnnnnnnnnnnnnnnnnnnnnnnnnnnnnnnnnnnatatcttgttagaaagtattcccagaaaatgaggaaggctacattttaactgtgtcttgattttacagggagaaaaataaagttaatattttgaggaaaaaataaggcttttaagatgacatgctatatagtagacaaatagtttaactcggtgcctacttcatgtacactggatgtgttaacatgaatttatgaccctcagtgactttttattaccanaacagcttccttaaagcaacacacacacatgcctctacagtatt

SEQ ID NO: 123340 - DNA, 471 bp, Homo Sapiens
  misc_feature (125)..(184): n is a, c, g, or t
tttccagagtggtagctcaacatctttatttttcctctttagcccgagggtaatcctgacaaacagcttcagccaggaggaggcagagaggactgggctgggcaaaggctccaccaggacctggnnnnnnnnnnnnnnnnnnnnnnnnnnnnnnnnnnnnnnnnnnnnnnnnnnnnnnnnnnnncccatggggttggggttgggattagggccatgatccaagcttggcatccctggggaggagggaagtgggccagtctgcagcctctgctgtcccccgcctctgacaaccacgttcatgggaaccagccacctccacatgttgggcaggagggaccctagggagcggtcctgacccctcgatgtgcatgcgcacagggacctgggccagcagggcctgatcagtgtcgatacatgccgctctggcctgtgggccagttgggaaacataaagcccatactgacgggcatg

SEQ ID NO: 123341 - DNA, 793 bp, Homo Sapiens
gttagtggattttccatttaatgctccccatgttatttcaggacctatttaaaagtaataacaaaaaggaacataatccaaaattacatgttttattttcatgtttgtaaaacgaagagcttttttctggatggttttcttatcagcttttcacacaacagtcaagtaaacctcgtggcactagccagaaatcgttgcaactttggaacttccaagacaatctggcctctatcaatgggcagacagcgaccctcattcaaaatgaagctgctagtcagtcacattcgacattcattatcttcactggctactcgtccacactcagaacgctgttcactgttaaaagtgtcaggttttaaccaagcgattttccattaaatattctcccagatgttctggaagttttttcgtgtatctttgcatcttcagagctgctccactgtgccacttaagacagcgccattgttcctgcgggaaatcggtatttaagcattctcgcagaaatgtcacactccaaggcgtttttccacacaaaacccttcgccttcattaatccgaattgcacacaacgccgccttcgaacagctcagtttcaatacagggtcgaggcttcccatttttaaacaacgccgacggaaggccttcgccattttagtaaaggccctttgctcttaaaactaaccctccgccccaattaaggtggtttttccgccgccgctcaggcacatgccggaggccagcaagttcggcgcccgtggccgatcagcggttcctcacgccaaaattcggagcc

SEQ ID NO: 123342 - DNA, 1036 bp, Homo Sapiens
  misc_feature (497)..(506): n is a, c, g, or t
  misc_feature (529)..(917): n is a, c, g, or t
  misc_feature (978)..(978): n is a, c, g, or t
aaaacttttaactaaaaagtaaactttaatgtcgaaagtgcaaacttggggaaggcagaaaacatcacacacaaggctgtcacttcacacttggaaggttgcacagcggccgggcagaggcgctcctcacttgccagacggggtggcggccaggcagaggtgctcctcactttccacacggtgtgggggccgggcagaggtgcttctcagttcccagatggtgctgggctgtcggactccattgctggatgtgtgacttgggtttaagcttctcccttctgctctcatctggaaatgctgacagcctgggcatttcctcctttggcactggagactgaagcctggcaaggccctgccctcagcaggaactccccctgggccccactctgtgaccttgagcccaagacaggatttttcctttaccttcttccagccactttgggcctcccggctctctcagagccctgttaggtaggtgacaactctgttcccactgnnnnnnnnnncttcgcctcgtgccgaattcttnnnnnnnnnnnnnnnnnnnnnnnnnnnnnnnnnnnnnnnnnnnnnnnnnnnnnnnnnnnnnnnnnnnnnnnnnnnnnnnnnnnnnnnnnnnnnnnnnnnnnnnnnnnnnnnnnnnnnnnnnnnnnnnnnnnnnnnnnnnnnnnnnnnnnnnnnnnnnnnnnnnnnnnnnnnnnnnnnnnnnnnnnnnnnnnnnnnnnnnnnnnnnnnnnnnnnnnnnnnnnnnnnnnnnnnnnnnnnnnnnnnnnnnnnnnnnnnnnnnnnnnnnnnnnnnnnnnnnnnnnnnnnnnnnnnnnnnnnnnnnnnnnnnnnnnnnnnnnnnnnnnnnnnnnnnnnnnnnnnnnnnnnnnnnnnnnnnnnnnnnnnnnnnnnnnnnnnnnnnnnnnnnnnnnacatgtgagaaaaggcagcaaagggcaggaccgtaaaggcgccgtgctggggttttcatangtccgccccttgagagcacacaaatcgagctaatcagaggggggaacccaccgactta

SEQ ID NO: 123343 - DNA, 1470 bp, Homo Sapiens
ttttgggatttttaatctttaattttcaagatggttaaaatattgaaatgtttaagtggataactatattattcataaaatgactgagtgaaaactaatatactatgagatgaaaagtacttgtcagggattttcaagcttttgctcaagtaattaccatgaagtaacaatttctagaaatgaagaacaatctgtgaagataaattaccattggtgtggggaaaaaaagccaaacagaagtagaaaaaggtgtagctggcatacaaatgttatctacagtgtatttatatatatatatttttaaaacttttaactaaaaagtaaactttaatgtcgaaaatgcaaacttggggaagacagaaaagatcacacacaaggctgtcacttcacacgtggaaggttgcacagcggccgggcagaggcgcttgtcacacttcccagatggtcaggcggccaggcagaggcgctcctcacttcccagacggggcagcagctgggcagaggtgctcctcacttcccagacttttatattttttatacttgaccaggtctcttatgtcctttttctggaaaactacttttaactactaaagtgattataaatgaaaaagtggccaataaagtgactactatcctcagggctttaaaccagttgggataatgtggtaagagaaaaagttcaaggtggaatgctactcccatacccattattactgtgactatggcttcactaagtctttcagaaataaggaaggcaaaccatgaaaagaaaagaggagctgcactgctagctaaattaaggtagtctggtttggctggactaccttctggtagagcaaaccccatctgatcccacccaagaaagataggaaactggctccataagccatctgagtaaaagctaatatgggaatataagtttttgtcatcagcatgaccagtggtggagcaacgaaggggattagtcctgccagagttacacataatgctggctttgggctgtcagttaggtaagtgatggtgcttgagggtctggctagaagtgcttgcttctgctgctttttaaagctgcagggggatgtatgatagcactgtgtcttgctcatatacgctggaaatgatgaggaaagccaaggccttggacatggggaaaagttttgctggagagacatcttgagagaaagtatatctgttctgctggttcttagtcccactgggaaagagtacttcagtatctttgaagatgcttgagaaaacttctggatgaagcgaagcatactggcccctattgaaagtcttgttcaggaagatgccaggtagttctgattaacatgttacagctaagcagaggcactgaatcaggggcatgtttctgtggcgactttgagacttgccagcgttgcacggagagaaggaaaacaaccgcaacaacagcccaggtccactggaaaggcacttccggcaagtccc

SEQ ID NO: 123344 - DNA, 1073 bp, Homo Sapiens
  misc_feature (50)..(84): n is a, c, g, or t
gcgaaccccaggtaatagtcgcagcgagtcagtgagcgaggaagcggcgnnnnnnnnnnnnnnnnnnnnnnnnnnnnnnnnnnncagtcgacggtaccggacatatgcccgggaattcggccattacggccggggggatctccatttggaatccattaattcatgaggttttgcctcattccacacagcttccatatctgaagtgtttagtggagcaaaaattgtaccataaacttgtgtttactcttttcattcggatcatagtcaaagggctgtagcattactgaaacagtcacagttgaccctgggtcaataattccactgttgggcctcacacagtaccggtgaggcacggtagtcttcactttgaaccacacttttctatcggatggatttcgcaatttaagatttgtagtgactacatctgtgaaggggcttttgaatttgaggtctatgggcgggtcgaggaccaggatctgctcgtgcttcgccgtggccccggaggcagacgccattggagagacagcgcagagcagggggcggcttgctcgctgggggcgggggacgatggcgagaggggagggggagcgagttcgcatctctccttttcctggttagactctgttcaaccacattcttatgttggcagatctgcttccagattgatttttagagcaccatcactttcacattcctgattctgattttgttttgttttgtttgggttttctgaaacttaaaatgctgccccgaaaatactatatttttgagtttgtgttctgaaagcctccgtgctgctggatctttggggggaaatacaggatccttcagcactgaggtgtttaagatttgcaactagcaatgcaattttttctaaatatggggatatttacctttattaagaaattatactaaacattgatgtccttgatcattttatgttctcatattacttttgattctactatgattgtgtggtggtgaacaaagatcattacaaacaaaaactgtaattttgttatatttgattcaatggaatttacctaaaaaataaagactaaaaatgtggtgtg

SEQ ID NO: 123345 - DNA, 1828 bp, Homo Sapiens
  misc_feature (57)..(66): n is a, c, g, or t
  misc_feature (638)..(647): n is a, c, g, or t
  misc_feature (1715)..(1750): n is a, c, g, or t
agcatgtatgtgggtagagctttcatgcatctctagtaataataagctgaaattagnnnnnnnnnnaattctccaatttaaaacttttaattaaaaagtaaattttaatgtcgaaaatgcaaacttggggagggcagaaagatcacacacaaggctgtcacttcatacttgcaggattgcacagcagccgggcagaggcgctcctcacttcccagatggggcggcgggcagcagagacgcacctcacttcctagacagtgcggcacgcaggcacaggcacacctcacttcccagacagttgggcggccaggcaagcgctcctcacttcccagatggggcggctcccgggaagcggggctcctcacttcccagacagggtggccaggcagaggtgctcctcacttcccagaacaattctttatgaatttgataaaggactgaagtgcaactgaaagctgctagtgatgatctggtaatatacaatttgtccagtagccagtttgtttttattgtgttttctaaccataagagatcattaaaggcaaagcctgtatgacgctgtacacacacaaaaaaatggtcaccgcaggccatactaccaatgaaatggtaggtaaacaaatcttctggtcaagagnnnnnnnnnngaaacagcactctgcatgcttcactctacaagatgaatttccctagaaagaatccaatgaaaatggctgcaattacaacaagaagtgaaggaagaggactggtgacattatctctgaaggatgcagttgaggttgatccaggtttatccgaatgtgctacctttctgagccttaaaccttcatctctcaggtgccgattttcttctgatagcttcatcatttctccctgaagtcttttacactcttccattagtttccttgtttcggtatcattaagtgaaacactgtgtggttttggcataggtccatcttgcttagatgcattcagtggaacagctttgctaggttccatatcattcaatttatcattttcattgggcatttcaaatacgcatctcaatttggaatccattaattcatcaggttttgcctctttccacacagcttccatatctgaagtgtttggtggagcaaaaattgtctgtaccataaacttgtgtttactcttttcattcggatcatagtcaaagggctgtagcattactgaaacagtcacagttgaccctgggtcaataattccactgttgggcctcacacagtaccggcgaggtgctgtagtcttcactttgaaacacacttttctatccgatggatttcgcaatttaagatttgtagtgactacatctgtgaaggggcctttgaatttgaggtctgtgggcggatcgaggaccaggatctgctcgtgcttcgccatggcccctgaggcggacgccatcggagagacagcgcagagcgggggcgcgcccgcggcggcggtttgctgactgggggcgggggacgacggcggcgacggctcggccgagctctaggacgaggccaggctcgcggctcccgagccctaacgcctgccgctgtgtcaccggttcggtgggccacccgctgggtcagcagctccgggtcccacaactgactcaaccccacaccagccgccacggccacgcgcacttgcgagcctcccccggccgtaatggccgaattcccgggcatatgtccggtaccgtcgactgnnnnnnnnnnnnnnnnnnnnnnnnnnnnnnnnnnnngccgcttcctcgctcactgactcctgcgctcgtcgttcgctacaacgcgctagcccctatagtgagtgttcaagtttc

SEQ ID NO: 123346 - DNA, 806 bp, Homo Sapiens
  misc_feature (541)..(554): n is a, c, g, or t
  misc_feature (576)..(576): n is a, c, g, or t
  misc_feature (578)..(582): n is a, c, g, or t
  misc_feature (585)..(598): n is a, c, g, or t
  misc_feature (600)..(622): n is a, c, g, or t
  misc_feature (624)..(625): n is a, c, g, or t
  misc_feature (628)..(629): n is a, c, g, or t
  misc_feature (633)..(639): n is a, c, g, or t
  misc_feature (641)..(649): n is a, c, g, or t
  misc_feature (651)..(657): n is a, c, g, or t
tctcttttccagaaaaagatttgtttacctaccatttcattggtagtatggcccacggtgaccatttttttgtgtgtacagcgtcatataggctttgcctttaatgatctcttacggttagaaaacacaataaaaacaaactgttcggctactggacaggttgtatattaccagatcatcactagcagatgtcagttgcacattgagtcctttatgaaattcataaataaagaattgttctttctttgtggttttaataagagttcaagaattgttcagagtcttgtaaatgttattttaataatccctttaaattttatctgttgctgttacctcttgaaatatgatttatttagattgctaatcccactcattcaggaaatgccaagaggtattccttggggaaatggtgcctcttacagtgtaaatttttcctcctttacctttgctaatatcatggcagaatttttcttatcccttgtgaggcagttgttgactgagtttttcatccttacaatcctgtcccatggtatttaacatnnnnnnnnnnnnnnctgttaacagattcttgctcgntnnnnnaannnnnnnnnnnnnncnnnnnnnnnnnnnnnnnnnnnnncnnccnncccnnnnnnncnnnnnnnnncnnnnnnnccttgttggcccgcctcgggcccttaaaaaatttttttaaaaccatttctttggggcgcgcggccccccgaaagggaaagggaacatggcccaatactggttccctaagaaaaccccgggcccaggacaagggcttggaatttcccccc

SEQ ID NO: 123347 - DNA, 1108 bp, Homo Sapiens
  misc_feature (67)..(90): n is a, c, g, or t
ccaagaaaagctgggtacggcgtaagcttggggcccctcgaggggatactctagagcggccgccccnnnnnnnnnnnnnnnnnnnnnnnnttaggtacacacagtaaagtttattttggtgcatggtatacttcactccattaaaaataaattaatcagcaaattcctgcctggctcagctctggtttatgtaaatagtgcccagctgtaatgagttacaaggtgttattatctcacacacacacaggaggcttcactctagagctccgctcgcaacaaaagcatcttaaataaactgagagaagcggtttgatttgtaatgttttcacagaagtgggatatacctcacccatatagagtttctttatatgactcattttatagcaagttaaatgaaggaagtttgatgggggagggaggggcaatatggttccccaccccctttcttcactttaagaaaatcccccaagagatgacccgcactgagggaggaggggctggtcctcaggtgctcagaccaaggtggctctgcagcacgtgcttcagaagttgggaagggggaccaaagctgggcacaggtctgggtctgctacaactaagccaggaggaatgttctcttctccccagtatctcatgaaaggggaggccaagacaggagacagcatgttcctcattcagttcactgggagtgacaaaggtgactttgttctcaaggcctccttccaaatgacttaggatgtgaaagcccttggtcatcagaggcctcctgggtcccagacgacaggcctggctggctgtatcttggcctgaacagagacacatctccatgaactagaggcaagagcagcagagaccatcccagcctcttccctttctccgtctctaactgagctgcgcggtgccctcattactgcgtccaccatctcaggcaagtttctaagtccctggaataaagaagggcatggcagactcggtgcgattcttggctcgagggcaattcctaagggagcgtattaatcgtatcagtcaagctgttctgtgtaaatgtatcgctcaaatccaacacatacagcggacatagtgtaagctgggtgctaagatgaatatc

SEQ ID NO: 123348 - DNA, 890 bp, Homo Sapiens
tggtataaaaagtttccccatttatttttccttccactaaactgattgaaacatccagaacaagtgatgaaagagaaaggcactaattaggtaatcaatttaccattagattgtaaatttaatttaaaataaaatgtccctaaaatcatctcagtacttggcacactgacttaagatgtggggtgggggagcatcccttaacacattctttgttttcctggtaaatactggtggaacaagacagctgagaatgtatgacatctgaccatgaacatatgacagctgtttgtgccagtcatgtccaaacccatggctctcaactccagatccaaaaactctccccatgttttagacctcccacaccagcatttaggatttcttcctctataatcttgctgggtgctggtcttggcagggccatctactggggataggtggtttggggtctcagtggtgggcaccggcttgttcttgcctcctctgcagctcctcttgccgcctcgcctgctgttcactcatgcaatccttgaacgcctgcacctgtggctggcattgccgccagtcctggtgctgggccatgcactcctgcactgcaaagtgggaggcagcacagccagagcgggagatcagctggtccagcgggtcctcctcctcatcgtctttcttcacccgttgggtccaggtatggccttgagggactgaggttgacatcctggggatggggagtcgaacaggtgggagaagagggcccgaacgcacgctcctacgcggcggcttgggtttcgcaggcggttggggatcctctgtacatccatcccgggaatcccggaccgtaccatcttcgttaggatgtgggtgggggaaggagttggtgtgtgtgaggtggtgtg

SEQ ID NO: 123349 - DNA, 1220 bp, Homo Sapiens
  misc_feature (368)..(383): n is a, c, g, or t
gaattttttaaaaactttattttaacacctaatacaattgcaattttaaggattacttgcacaaaaaaataaacacatttggtataaaaatgtatcactttaacgccctttccccttcagtcccccgccccctccctcatgaactgcactctatctggatgcagaaacatagaaagactaatggcacaaattactttttacctacaggagtttctgtttatgtacccaggtactctagaggataccagcccacattatcacatgaaccatttccttcagcctgctgaattagtttcacaaagaaacaaagcttattataaaggcattttaaaaaccattatcttaaattctttttagaagcactgacnnnnnnnnnnnnnnnngcaaccatttatatacagtgttacataacagctctggagtacagtacatgcagcagaatatacctgttgaatataaaatactttccttaaaatcttcatcattggaattccttgaagtctaaatcatagaatgcccattactttgagaaaatggttgaggagtacaaatgtctgcatatgttggccactgaaataatccaaggctaactggaataatattcatagcacaccaggagtgcataaataatttacttacattattaaaatacaacccataaaattcaagttcaagatcttataggattgtctatgtaaatcctttaagtggttgcctggaaatgcattgtttcttcttgtctcttctcttctttttaaagtcctatataaaatcttcagctgaagtttatttcttcatcaaacaaaaggaccacctttatttgtgtctgctgcctcttctcttcattgcagcagtgcactgtggacagataccattttgccttttggtgcctctgtcaatccaacgcagccataatggaaccattctatacgggcaatcttggttatcacatcccaccatctcaccataagatacctgattacaaatgcagtatcgaggttcatttggatcgtaagtccaatcaacctgactatttgaatcagattctggcactacaggtagtttgttgagagatctcttgtacaacaagttgatgatgatgaccacgatgatacggaagaagaggaggaggaagatgatgactgctggcttgacgacttggtgtgtcttgctctgtcgaccactcgtgagtcggctgctgatgaactggcattctgtgt

SEQ ID NO: 123350 - DNA, 1015 bp, Homo Sapiens
  misc_feature (937)..(956): n is a, c, g, or t
ttaacggctaggtacgaggcctgggtgtgtgaattcggcacgaggatagctaggcagaaggagcagacctttcgggagaaggcagcgatgcctgtggcccagcacctgaacccagtgcaggtgctgcagctggtggaggaaacgctacctgacaactcaattctggtggtggatggcggggacttcgtgggcactgctgcccatctggtacagccccgcggccccctgcgctggctcgatcctggggcctttgggactctgggagttggtgcaggatttgcacttggggccaagctgtgccggccagatgctgaggtctggtgcctgtttggggacggagcttttggctacagcctcatcgaatttgatacattcgtcagacacaagatcccagtgatggccttggtagggaatgatgctggctggacacagatttctcgggagcaggtgccctctctgggcagcaacgtggcctgtggcctggcctacactgattatcacaaggcagccatgggtctgggggcccggggcttgctgctctcacgggagaacgaggatcaggtggtcaaggtgctgcacgatgcccagcagcagtgccgagacggccacccggttgtggtcaacatcctcattgggaggacggacttccgcgatggctccattgctgtatagggccttgtgggtcaggacgcttggctgccttcctgcccctggactgtgtccagctggtttggagtctcatcattgcttgccctgggcctatcccatgaggcccagtgactccacaacctccctgaggaggggatggaggggtcaaatctcagagaggctctcttgtgagctcttggaccctcctcttcacggacccaactgtgccgtttgtcccctctcttatggagactgaataaaccacctctggcccatgtaggcccaagtnnnnnnnnnnnnnnnnnnnncctgagcaggcggccgcaagcttattccctttagttgagggttaattttagcttggcac

SEQ ID NO: 123351 - DNA, 2017 bp, Homo Sapiens
ccatgaggatgtgaccacaaccgggtgccgtctcggcactgctgctgggcatcgtgcagcaccttgaccacctgatcctcgttctcccgtgagagcagcaagccccgggcccccagacccatggctgccttgtgataatcagtgtaggccaggccacaggccacgttgctgcccagagagggcacctgctcccgagaaatctgtgtccagccagcatcattccctaccaaggccatcactgggatcttgtgtctgacgaatgtatcaaattcgatgaggctgtagccaaaagctccgtccccaaacaggcaccagacttcagcatctggccggcacagcttggccccaagtgcaaatcctgcaccaactcccagagtcccaaaggccccaggatcaagccagcgcagggggccgcggggctgtaccagatgggcagcagtgcccacgaagttccccaccatccaccaccagaattgagttgtcaggtagcgtttcctccaccagctgcagcacctgcactgggttcaggtgctgggccacaggcatcgctgccttctcccgaaaggtctgctccttctgccggtcggcttcccgcagctcctccacccagtctggggcccaggtctggccctgaaggccctccactaacttcagcacgaaggaacccacatctccctgcacagcctcctggggcttccagaagatgtctgagttgagcaacatctcttcccgattacgattgacgatgatgatcttgctgctgtggctgaggacacggccataggataggcggaagtcacacacagttcctgctaggacaatgacatccgccttcttcagggccgcactgcggttctcccggatgtggagggggtggttgcggcctaacagcccccgtgccatccctccaaggaagcagggaacacccaaggtctccacggcagcccgaagcttgtcggcagacgttggggtgagcagggcctgactccccagcaccatcagaggcctcttggcccggctcaggatctccacacagcgctgaacctgctgcggggaagccctgggggatgtccaggggcagcggtccctcgggctgaggctcccagggctcctgcaaagaggttggccaggtaattctctaaataccaggagaccactcggccccacgaggcccttgggtggcttggctggcaccatctccttctggaccatgaagtaggggtacagcacgtcaacgggcagctccacaaacaccggacctggggtgcccgactgggcggcagccatcgcggccctcagggtgggcacaatgtcccgcaccctccgcacagacacacaaaacttacagagtggccggaaaagggacagctgatcaacagcctggagcgcaccccggttctgcagcagagtgctggcagccccacccagaagcaggattggggactgagccatctgagcattcttcaccgcagtcaccgtgttggtgaggccagggcctgctgtcactgccgccacgcccaccgtcccggacaggcgggccatagcatcagcagcaaagacgggccgtgacctcatggcgtgtgtccaccacacggatgcccagtttctcacaggccaccagcagcggggaaatgtgcccaccgaccagcgtgaagatgaaccgcacaccatgggccctcagcacagcggccacgttctctccgccatgccggacgcttgccttgtccaccttgtgcagcagctgatagaagagccccaggcggtgagcggcgcccagcaaggcggccaccagcgtcccgcaggccaggagcaggaaggaggggaataagctcccagcgggggcggcggccgcgggggtctccatgaggtggtaccttcacctccaggatatggcgctgcctccagcagaattcggccccctccgtgtcacgtgacccgggagcgtggccgtgcccgggtggcccacttggctcacgcggcgcgccgtagcctcgtgccgattaacccggcctctcta

SEQ ID NO: 123352 - DNA, 1158 bp, Homo Sapiens
tttttaaatttgaatatgattttactgaagcatacatcatttcaaagcaaaagtagtttatgttgtcaattctaacatataatacatttaagtcattatatgaatttcattttttgtgtatttcactgtagtgctgtgacaacaaaatgacatctgtgtaccagagcatacatatatcaacagtaagatgtaatttttcattacatcactgctagaatatttagctttgtgtaggagacataagcaggtaagatggccacaccaaataattttctgtttttttccttagataattttttatcagtaatactttatcaacctcactgttaacagaactgtaaattatctgggtgatggggtgtgtggagaagatcatctgtgttatactgtaatagttgctagagtaatctcacacacaccaataaggaactgtcaccataattaagggctagttactgttgttagttgtacaatgatgaagttcttttgaaaatattggttagcccacttatatgtgaaaaatgccctttccacttatacacaagaaaaaaatattcagaaagttatttttggccttgctatgtcaaaaagtcaactgtacaaagatctacgtgttaaacctaaaattatgattttaaaagtctattaaaaacaagaatgtcatgcatttttattatcaattatgcagaggctttaaaactgttgcaagaccatatagtatatattagcttttatactgctaatgcacaactaacagcaaacttgattagattaacagaactctgtcttaattacacctttatatatcacactagagacaaatgccacaagatctgcagaaacattcagttctgagcactcgaatggcaggataactttttgtgttgtaatccttcacatatagaaaaacaaactctgcagtctcacgttacaaaaaaacgtactgctgtaaaatattaagaaggggtaaaggataccatctataacaaagtaacttacaactagtgtcaaaaagcaaacaaaacctctaaattaaaatatcaaaatacacagagcaactgaagcacacatcctgcattaaatacagtgaagatttaataagacaatgcactagttaataaaagacacaaaaatagggggggaagctagggcaaccag

SEQ ID NO: 123353 - DNA, 1361 bp, Homo Sapiens
aaaaaaaatccaaggactatgagactggtgctccctgggatttggaatggggtaagggtgagggtcttctggaataaacaaaccttacactttataatactgctggcatttattttaaaaggtattggagatacaaaaattgtatcttatcttgtaaaaaatatttatttatcaatctttctggcactattaaaaatgtcccattttcactagacagaatcacaaaggtatacccactcaatcataacaatttgttttctatggagcaatattcacagatcctgtgaataaataggtgacaaactccaggtggccccctgtagggtctgttatatttagagttttctggaacacacataattatgaggtttggctctcctacagtcttttgtttgccatttcccttgtctttgaaccaaaacacagctctttccaagcttggagcgtggagagggcctcttctcccattggtgaaggcaacaggttcaccaccgatccactcccagtggccagcatgcacttggtcgttcaaacctatccaaaaggactttctcccaccaatgtcccagagccaccgcatgtgctgcctggagaatacaagttacaaggtttgcccaggtattgttccctgcaagcttgggcagccgcattccaggtgcctttctgctctgtgatcaagatgtgacagtagcctgagtgctggtgccacccggctggacaggatttgtcttccacatccttggtttggggactccaggctttccaggcgatcccattgcactgatacagcttctggatgccttcttcaaaatggaagagtccctttaattccagagtgcagttctttggaaatgagggcaactggtcctgtctggggaagtgtgagtcagttgtggattccaccgttatctgcttgaggcagttctgccactttgattgtcttttgtggctgactaatgatggatactttggccttccttttgtgagttgggaaactgtcatcctccagtttcaaggaaactatcccatgataattatagatgatgtctgttccatttctataaacagaggatggacgaactgttttgccattcccacgggtcctaagcttcctttgagaaagatctgtagaatcaaagccccgcgagggtgtctcccctgatgactgctagctgcatggaagatggaagaggtcttctttccagatgaaaggaaccagaagtggtggatgaggaagacctgggggcagcagatgccaaatgcccttctcccatgtgctgtgcttgctttggttggaggaatatgaaggatggcattgtcctccttttgagtccaaattttcactgcagcttttgtctttg

SEQ ID NO: 123354 - DNA, 767 bp, Homo Sapiens
tttttcaagtttttcaatgttctttaataaaatgacatcaattgctgaaagcattatgacctttgttatgctacataatactgatacaaaatgtgaatagtacaaagttcattatatataaggctttaatatattacatttgtttctacataaacagactataaatatatgtgccatagcatgtcttatagtcattgttcccagcatttcacactatggtaccaaacaaaaaacacattttcttttttgaaaaaaaggacagaacaagggcaaaaatcagtagaaatagctctatatgttaaaagtctaaataatacaatagatgttataatttgggctataaaataattttgaagtctggctaataatcattcagagagtgaacaaacccaatcaggtttactggagtagaggccaaataactaaaatactgatgggttgcggggtgagagtgggttggggacagggggaagaacaaaagggtaaaatccttcctgaaactttgacaccacacacagcttcacattgaacctcccgcattcagtctcagacatatcacatcaggacagatatgagggtattcattccagaagaaaccagaagctggtttgtgcagtcagaactcttcaacacggcagggagccttgagctgaatgtcctttctttgtggtattctgaataaaggatcagcctgggagacaaggagccagagctgcatcatttccttcctggggctgggccaggagacacgtaaggatcgagaacat

SEQ ID NO: 123355 - DNA, 613 bp, Homo Sapiens
cttcgtggtgtctctgtgtgttattgatcatctgtgtcttttgcttaaaatggcattatttgtaacacaaacctaatatcatatatacaaatatactgtatgtagccaagaacactaaattggtaagacgctttagaaaatatgcatttgaatttgaatatctaatgcctcaagcaaatttattagagtttcagatgaatataatatttttgtaactgggcaagtaaatgagtagaacagagcttttttgcctaaaaaatatttttataagtactcatttacatagtattcattattttaaatgacaaaatatcaaattggttctataaatagtaattgttttgaatatatccatacttaacatcatatgaaatccaaaatttaatgataaatttcatctggatgtgttattataaaagtcatctttttttcctttgtaaaatatccatgtaacatagcttccattactccatattttatgtatggttaaaattatcaaagtgcattatgtattttatattgtttatttttgtctgcatgaaagattggaatagtaaccgtgtatgataaatgttaataataataaagtgaaatgtagtatgaccaattcaga

SEQ ID NO: 123356 - DNA, 925 bp, Homo Sapiens
gtgtttttgttgttcccatttgaacaatctttataaaggtttcttcatgttatttacaattcaaagtaaatttactttataagcagctagggaattctttatttagtaatgtcctaacataaaagttcacataactgcttctgtcaaaccatgatactgagctttgtgacaacccagaaataactaagagaaggcaaacataataccttagagatcaagaaacatttacacagttcaactgtttaaaaatagctcaacattcagccagtgagtagagtgtgaatgccagcatacacagtatacaggtccttcagggaggcaagagacctttcgactggtctgcaggtgcctccaaatgctggtcctgtggaacttctttctgagtctcgttttcttccaacgcagtctgtggtctgacactcaagtgttcggatttccgggaaacgtgactacctccgtgttgagtccttgcttcgcctactcgtcttaaaatgacaccttctgccaataaagccttccctgtttccacaaataacttctcttcatctgtttctccaagtttctgtagctcagtgtacttctccacaaaccgttgacaggtagacttgaagtttggattgaatagatcaaaagctctttgaccagacccatacactgaataaaacttcgctctaatccgatcctcgtggtaccagatgtcttggatgggagctttggctttgccatatcgcactcgaggcctttggaagacgggctccctcagcgggggaaaggcgtcatatacgtcaaaccacaggggcttctccttcagcaccccggcccgaaccaggtcccgagtccgagagaagatgctccctacggtttccagccggctgcctgccatgatctgcgcctggtaccgagcgtgactagctgctaccggccc

SEQ ID NO: 123357 - DNA, 632 bp, Homo Sapiens
gatgaagtgcatttactttgacattgatatagcttgtaactacttttggaatttttttcccctaacactttgatctcattaagggtattacaccttttccaccagaaaatgcagaggtatcatctttcttggaaaccaattgaaagcgtcccattttaacaaaatgacataaaattacaaacatttacatgattaaattcaaagcctgatccatctggtggtaagaaatgttaacttattttaaaagatgtatttgcattattaaaatatagtaacgacttccatctttacatcaaaagaaacgggcttgcataagcaatggctcccagctctggggagggtttgagccacgcccttgcgggggccgctccaagctctgacttcaaaagttggagtttcccagctgcgaacagctggtcaaaggcactctcaaaagttcaaggaaatgcccgtttgcggatggccgcagcaggcctgtggggctggggacagcgccaaggagctggccgttggttcctgagatgctcctgctctgccgtgttctaaggacctgcgagctggagctcttctcgggaaaaagaaacgctggggaggcctccgtgtgggcgggtcaagccagataaccaggcttg

SEQ ID NO: 123358 - DNA, 960 bp, Homo Sapiens
tttttttcagtagcatgactctttaatcattgttatttacaatttatcatctgacagacttacagagaataaataaagaaaagaaaatatacaattggtatcacgtttctttttctaatacagagaaattttacatattctatttggaacgtctatgatagttttaagcagaaattaaatccatttgccctttaccccttgacaagacacatcatcttccaaagcctgcagaagggggcccagatgtttcctcatcacaggaagagtgcaccacatcgctgcagaaactcagtcctcagaaaaagttaccaggcaacaaggtagaagaataggatatcatgaataataaaggacatataatggataggctagattacagactcttggtgtgtttgcaggaagccagctttcaattgtgtccaagcctgttttcaagaaaacagtttttcactgaaagtgattaccttatcccattgtgcttcccttgagtctctgcaaattcttccttgacatgttcattgtgattgtggatgagcacaggctagcttgggactcagattattttcctgcaaggcacctgacactgttgcatgttgttgacaaggtgtctgcaggagaaactagatagcttgtttcaaataggctgggtatgaggccagagtctggtctctccttttgattcggtgtcctgtggagaactacctttcattgctgtctaaatgcctcaaaaaattaagcagttctatagatcaatttctccatcaaaaagtatacaaacagagaatgcacttcaccaggaacaagtctgagtaatttttttctctttcctcacttgaaaataaactctccatgttacaagcaaaacaattctccctacattcactctagttaactggatgagaagtttgtttctatcttatgttcattcaaaaaaacaacattcagcaaatatttatcaag

SEQ ID NO: 123359 - DNA, 762 bp, Homo Sapiens
  misc_feature (659)..(659): n is a, c, g, or t
  misc_feature (670)..(670): n is a, c, g, or t
  misc_feature (672)..(672): n is a, c, g, or t
caggcatgttggctgtggcagtgccatttattatattattagaagggtttagcagccatctcaaaaaaataaataaattataaataagagggacacagctagtaagagtaagaaagaggtaaaatgaacaaaagagaaaacagtagcttcaaacacccaactttcctttaaggaagtccctgggccttaagtcaggatttgtttcaaacacatttcatggagaaaggaagaaagaggcattttctagtctcaacctgccccacacaacttgggtggtgatctggaaaacttgctcatagccaagccctagaccagctcagccactgtgtggatcttctgatggcgaatgaggttgcagtgtcgattaaagcttttcccacattcaatgcactggtgaggtcgctcccctgtgtggcttctctgatgttcaatgagaaatgaacgccgactgtagctcttactgcactggctgcactgatacggcttttctcctttgtggattctctgatgctggataagacccgcactctgactgaagaccttcccacactccttgcagtggtaccgtttctgtatattgtggattcctcggtgattaaaaagaccagaacttcgactgaaggctttcccacattcattacattcataaggtctttctncagtatgaatncntttgatgcgaatgagacctgagccttgagtaaagctcttcccacattcatcacaattgtgtgcccctctcccctaagagttcccccactg

SEQ ID NO: 123360 - DNA, 1195 bp, Homo Sapiens
  misc_feature (1089)..(1102): n is a, c, g, or t
tttttttagttttataggcatttaatagtttaccagttggtacaataagattttttaatatgcagaaaacatgaataaattttgttttacacagtctgagagcaacaaatcttactgtaaaacacgagagcaatattatatacattcctttactgattttttaaaattgtgtcaatatcttcagtgaactcttaacaatctggggaactgttttcctcaattaccacttcagcaacgttcatacgaaatcaaggcttgccttcatgtcagtgtcaggatcaactttaactcgaagagtttgtgtttgtctctaacatcttcagagtgagctttagggatgcctgaaggatggacagtacaagcaagcagctacttccatgatacagtgggaagataaaaaggcccattcagtccagccgtgacctgtaaatccagcttgccctccccccaccccactggaaaaaaaatccaaaacctttttccaccagttttttacatgtcgcttctctaccaggagattctttgcgtcatctagatgaacacactggacttatatacacctggacatgaaagtaaccaatttaagtgccttttccttcaacaattttaacttcagttgcttaaggatgatcgagccaccgatgtcaacaaaatatcctttacctttaaatagtttttctttaattaagtttaaagaaaacctatttaacgagtgatattaccgggaaagttcacacagaaacagaaagaggcgaacgggagagcagggcactggcagcggggaggcggggcttggtaaatctaaagccaaagcttccaaagactacggcgaacgctccccagcccgggacgacttgctaacactagtgattttgagagtagtgctctgggcacaccattggtcacaccacacacagacgaaccaggacggtcttagtctcctaaagtgcaagatgccgtgacaacaggcaactaggctccacgcggtgtctaaaccagtctccatggcatgcactctcaagagcgcagctaggatttcttgggcacgttacagatatatatttgggtggcactggaatgtctgttttnnnnnnnnnnnnnngtcaataatcatctgaggatgcaattctaccagctctttatttcttaagtggccaatttgattgagaaagtgacaaagcagcagtgaacctct

SEQ ID NO: 123361 - DNA, 933 bp, Homo Sapiens
  misc_feature (234)..(268): n is a, c, g, or t
ccaagagagttatttgaaaagttaacagaacaatgagataacagtgacagtttaacaaagataaaattctgaactgcgttttattcatttgtgtactatgtgattttttaaatgtcccctttagtatttaatggaaaattggttcctgcaaaagacaaagggtgagagttagcgtcctgtagatacacacagagactaggccgtatattaactagaagcagctttatgtctagnnnnnnnnnnnnnnnnnnnnnnnnnnnnnnnnnnnagattcctgagagatgtctctggaagggaaagttttgagaactaatggctatttttgaggacaaaaattacatcttaagctaattccttaaatacatacagtaggtgaattttcaggacaatattgcctcacaaccctgcttacattgaaaagtctttttcccttagctcttctgactggatttttctacaaaaactatggaaaatatctttgttcttgtttgctgctattttctgtcctattttgagaaatataaatacatagaaatggtgcatcttaacatttgtttgtacatgtataaatgtcttgtattttaattcatttttagcatgaattgtttaagggtaagccacaacatctagaaatcactcatagatattgaacaataaaggagaatggtaccgatgcaggaggaagcaagcgtgtcttcccctgcagcacacagcgacttgcgttgacaaaggaggaggaaacgattactctgtaaacaaagttatccttacttgggagattgccacagcctgctgctgagttgagttaccagacatcctccatgtgagaagcagcgaacattgaatctcagggatggcccacaactgggtccacatgtaatgagccctgtttaataacgaaggggtgggggagagcagtccgtctacaacctg

SEQ ID NO: 123362 - DNA, 720 bp, Homo Sapiens
gacttctagaagttgcgaccatttattaaaatggggaggagtgtgcaggcatggccaggcacctctggctgagggcagggcagggccttagccaggggagcagcttgtccacttactgccagccttgttcacgccccaaaaccccgccccacgggcctgtctcagccagcgtcaggggccagaggccgccccggccaccggtccgtgtcctaggcttggaggcagcttccaaacctcccaggggctccgatctgctcaagagggaaaagcgatgccttctgggagacagaaagctgctcttccacccggagagcaggatgccgtggggagggaggtcacctgaaggccgaagcagctggtgagcaccaagtgtggccgcggccagagtccacccacgcctgctcactcatgcagacgacgcttgagggtctgcagagaggccgggcagggcctgcgaggacggcccctcctcctgtggggaggatggacccgcagagagcttgtggcagccgggcgagctgggagcagcaggcgtgcagccggggcagctgggctgggcgcgggcacagaccgcaggggtctcggcaaggatgagcaccatgttggggcgggtggggacggcacaggcctcggtcccgggggacaggcgtctgtctgtctgtctccagtgggcgccaggcagccccacatcttggtgtggcgggacggcacgagcgtctc

SEQ ID NO: 123363 - DNA, 2335 bp, Homo Sapiens
cggctaggtagcgaggcctgggtgttgaattcggcacgaggcccactgctgccctggcctctgctcccacctcagtgttgtcccagtcaggagccttggtccgcatgcaggctgtcccatacacggctggtatgaaggatctgctcagcgtcttccaggcctaccagctacccgctgatgactacaccagtctgatgcctgttggtgacccacctcgcactgtgttacaagcccccaaggaatgggtgtgtttgtaggagagaaagccaggaggtaagagccagctgatatcctcggcgaacatgtctctcctgagtccagaagaccagcaccctcaacctggtagcttctttctggcttgtcaaagctctcagaaggtacctagaggagcccaagccccagctccatcctccacttattctgcctgtttcccccaaagacaatggctggaccctgcatgcagggctgggggtggaatggggctaaccagctcctgatggcctgagccaggcatcttgactggcacctggagagcccttaagtctgtcctggctgtggcccatgccgacagatatcgtggggctgacaggtccacggcaggcttgctttcttttataaaatggaagctctggtaccttcaatgtatgactcctgggagaatcaagggtccatctgagcctctgagtaaagatcccaatgttctacctctccctgtccctcttgtaggggatagggaggcagagagagccagcccctaccctcagagtatctggacctcagagaccatgttgtgccaggggtggtcccacctaaagatgctagcccctctccaggtgggcataaggagtaacagatggcaaaaccacaaactattttgatggactgtgctgcagtatcaccagaagacattagggggcagtaggcccccacacaaaaccttcaggcttgaattttaaaggggaggactttctgccaacttttcttgtatgccttgggaaagccagttgccctgaacccagcagacaccatggaatgtcctttgcacgcattaaatggtacagaactgaagcctcggaagcaatttggaactcgatcttctcttccttaaatgaaaagttattgaccaaatggactttttaaaagacacaggacccttaactttgccccaaagtgaggggctccacaccaaccccaggcggaggaacactcagacagattaaggatactgttgacctgtcactgtttattatttcagcactaaaactgaggagcctcaactgctggctcttcttccctttgtatttgtgtaaggagcactgcactcccataaaaggttttaaaatacaaaatgtacaagaacacacaattccaagtgctgtaaacataactgagaaccagttcctttactaaacatccattttataaaacacaaggtttcaatttgagcccatctgagccttaaagatccattctgaataccaaaaacagggcttcacagccaggcccagaagaggtctggtgataatggctggccctgggtggggatagtttacacccgggcagcagcaccacacatgaacccaaagacatgttctttttaaagctgttttcagccatgtttctctgtgcatctccagtaagcagaaggctacccattccattcctcaacccaagagctagcacagttagagtaggagggggtgcgtactagcacgtgcccagttgctcagtgctgctagtagaaattgatttgcatagtccaatggatgtgtgctttaacaccactatgttgcacaaaaatttaagtctttatctacaaagccaaaaaatattgactcttaacaccaaagcttttacaaagctgatataaaactgcttacatagtatacaaagctctattttaaaatttaatgtttattttaaataggaaagcatttctagtgctacaggcatcaaggtatttagaaggcatcaaaatttggtgcatagcaactctggatcatagaggcttttaattcttgagggcacaaagggtattgcaaggggaactcttgcaataacctcatgtgaggcagctacaccaggggcaaaagggtaggggcaagtctggccatttctctggaatgtcaaccgagaggccaacttcttgcccctccaaaggaagctgtgggcgtccaaccacaggcccagaagcaaatctcactatccacattctgtgacacaactcacttttcaagaaaatttgaaaacacccagctccaagaggggccacagtgatctgctgaagaatagacctttttctctaactaactttaggggagaaatctaaaatata

SEQ ID NO: 123364 - DNA, 740 bp, Homo Sapiens
  misc_feature (53)..(108): n is a, c, g, or t
gcatttaacattttattgagattctcaacagctgccatttggtttgtatagcnnnnnnnnnnnnnnnnnnnnnnnnnnnnnnnnnnnnnnnnnnnnnnnnnnnnnnnncttcagttttaaagccctgtccctcccccaaagaaggattaataactaccaagtaaggattatttaggagaaaaacaaaagcaaaaacagctttataaacacttgtgaaacaggggtaagtgtccgaagtcaagaccttctgggcccagtggaggtgctgggctgctccaggacaccatcaccacttcaccatccacaacatcctcaagagctgagcagccctgcacagaccctggggggcttcctgttccacaagctccactccctttttcctctccatctttgctgttgggcctcccctccaaatctgcctaacaaaggcagcacgatctttaatacctgtgcagctttgtaaatggagccaggatactctattttgaaagttgagattccctatccagtctgggggaggaaaaattatccaatgtagcatggatggtttcactttcttgtccactcagacacatgctcatacttattaaatggatttattggatgcttcaaaagtcctgatgtgtagtagcacaaaagttccttgtaaaaaaagaagttgcaaaatttataaaatttctgcagcagttctggctctggatgacaaagctcattctgattagtagtttttttgacatgca

SEQ ID NO: 123365 - DNA, 818 bp, Homo Sapiens
  misc_feature (643)..(688): n is a, c, g, or t
aactttttggtacaataactgcgtgctttattgagatacacagtaaagcagtactataatacaatagtaaggcatatatttggtgaagtctgatatgttgtgaaaatgcagtaaaactgaagtttaaaaaaataattcgtaaatgttacagtgttggtgttaaaacacaatatattatgatactcaagtaagaactcagtacctgaaaacaatgacaaaacatgccatgtgatgtttatgcttcagttacattatgatttacagtttaatacttggtggttataaagaacacaacacgaaataatgtccaaattaattatgcttaaaatgcagcaataaagctctcaatttttgttcaaatattatgacagactcactccagagctaatgtgtgtaaaagaaatacagaaagattaaaacataattatttatgcactctatttacctctgattttagaatgaaacttacttacttaaacttcttagtaggatgtaaagtaaccccttgttttaaatctgagttttaaaaatccttgggtaaagaaaaggtccagcgtcacataaaggaaaaaaatgcaagactaaaaccaaatcttcatgtaatttggtaatttgttaccttagagctttgggttttcttttnnnnnnnnnnnnnnnnnnnnnnnnnnnnnnnnnnnnnnnnnnnnnnaacgcaatggacaagtggtgaagctgtgaactcaggtgtgcacaattatcaggaacaccccaaaaccaaagtgaggtagaaatagcatgagaagccgtgtttgatgttaattaattaattattaataatg

SEQ ID NO: 123366 - DNA, 1042 bp, Homo Sapiens
  misc_feature (870)..(880): n is a, c, g, or t
ggcaccattttgctgtctgtttatttcaactgtacagagaagcttaaacacctgtggaaaaacacgaaaggcttagttgtctcttaagttcatgtactttttagtgataaatacacagtatttaactttatacacctgataaaaggaaaatgcatagtagaaagggtcgggaatgaaacagaagcatcgggcattgaatcgatcacagagtagaaaaatctgcagtccccagaaactcggcctccagctggagaggggaaccagcgtaccctgaaacttccctagcaccttggaagcaagtggaggtcatggttcttccactcggcaacgtgaagctccccgctggaagacaagtgagagcgacaggccaggcctgtgtgtccacctgcacaggcattctccttgttccagaaaggctctgaggacggaagacctgcctctcaggaaaggccagaccagtagggagaggcctccgcagccccaagtgtcaacaaggggctcaataaggctttctgggagccactggcagctggtgggatggaagggggaggtggaaaagggcagaggaaatgggaagtggatggagggtttgtgcttccttcgaggccacaagtgcaggccacaggttgcttacaccaaattggtcccacagatgagctagcaatggaagaaattatgggcgtcctctttgcccactggaagagctgctcataacagcacctcctttcctgacagagctggcttttgaaaaatcaatgtgctccaagagtggcagctcaaatgctctgtgtttacagccatcttggcttatccttttcatgtggggcaggtcctttccacagctttctttggtgtttcttcattaaaagnnnnnnnnnnngtcatcaatgtgggtctcccccaccccactgcccccacagctgggtgctgcctgattgctggcattccctggaagaaatcttagatggaaggttccgtggtggggagaaatggcattgtctgatgcagctgtgtaaacaagagaagccctgcagaagctccc

SEQ ID NO: 123367 - DNA, 701 bp, Homo Sapiens
atcccagttttattatagattgaaaagcattttgccatgttcagtaaataataaaattaaacttgtttttcatatgagctaattaagatatctgagctaacagctctaagttattactataaagagttaatcagaaatatagttcaaagtaacaaactacagttgatatcactaatggtgacctttcttacattttaatatttctcttactgagactctactgtgtctcaatagatattttttggttgttgttaatactcccattcaccctgaacccacccatgggactttattaaattcaagaaaataccctaagatattgactgcaatgtcagagatggccaaattaaaaataaaataattgctgatgattaggctttctttttattctcaactatttttgatatatgtgtatttaaaaattcaatatttaacaaaaaatgactaaaatatgtttcaagtctcaaagttcatttgaaagaagtatacaccatttcatttgaaaaataatgaagtttctgcagatatatgcaagatccctatatgtgctataaatctgtcatggaaaccatcaaattttagttattttaaaggggaattcaaagatttttgctgtattatgcaactggttgaatacagtacttttacatgtaaaaaataatttacactgaagaactcaagcaaaaagtctgatactttat

SEQ ID NO: 123368 - DNA, 1382 bp, Homo Sapiens
tttttaatttttaacaaaattttatttagagcattaggaaaatcatattcaaaacacagaaataatcagactataacaatgctgcatagatagtggtatacaagttccctgactctaacttcttcctaacttaaaagttcaattttcaagtcaccaggtagaaaatggtggaggcattatttcctctttctgaggctataaaaaaatggcttcaatggtgagaaggcaaaccatttaaacaatgaagattagattataccccaatttaattctattcccttcttgtttgttatttctcatagatgaaaatttagaatgtaataattattggaaaggaataagaagtgaattacctcttaggagataccctgatcagtgcctgctttaatcagacaaaacactaagttttaaaaattacaaccacaatattatgcctaactaaaattgccaatatgaatacttttttacagaatacattacatgtataccagaagagaaatacttgtttcctatcctctgaccttcagtagaaaaaaaatgttatcactaacaaggatcagaaaaataattttcaaggcagagcattaactcaatggggatcaaaatcttttctgaatacttaaaatagactgagtcagtcaacgagaaattgctaaatttcttctatgagagtacttttcaaaaaggaagacaatttattggaagaatttgtagctggaaacattgttcattaagaaaacattaagttaccctgagaaagactcttaatattaccagtgttttcagggccccctgaccaacgcatggaagagcaacttgtaggctctagccttttaacaatacctacataaagaatattttgatctaaaatgtaacttgggttctctgccacactggtaataagtcacaaccaagacatctgaatgtgatggagtataagcaaattttgcgtttattttaggctgccctctttcttttctaagagaaagagtttgcagttcttcaaatggtcttggatgaaacctactgtttggaaaaaagaatcttctgtaagtaaactggtagttttcttaaaacagtaaacaaatttatctggtctacattctctaaactattattatatgcctagaaaataaggcattagtaattcatcattgaccattgcagagcatagacaactgtttctttctaatcaggaccataagcaaacattcctgaaagtgcagtgttatttttaacgtctcttatgcatttacagtaagcatttgactccctacatactttcattataaaatgttttttcccaacgccttatatataccataattacttcccggccgtaatggccgaattcccgggcatatgtccggtaccgtcgactg

SEQ ID NO: 123369 - DNA, 904 bp, Homo Sapiens
  misc_feature (487)..(522): n is a, c, g, or t
  misc_feature (537)..(853): n is a, c, g, or t
aaggttggattcattttgaaatttaataattctaatagtaacaagaaacatagtttatgcttttttttaaatgaaaacaaacaagtaattttgtaaaagtcagaaaacaccagtatccttctgatctcatcctggatttttctgtcagctggaggatgcatttctgaccccatcccagacacgtgaaagcagaagacatgatgcatctataataatgaaagcacaatctaaagagtattatcacaccgtgaacagcttcttcctgacccagagcaaatattaagagaaagacaatatatttacaaacaagatttaataatgctcacaagaatagagtttgcccccaaatggaaaattacacattattttgtttcaaaaagttataaatttagtgcttgaaaaatccagcaggtaagtagaaggactaacagggtctgtttctggaactgtccgccagcaaatgagcatgctctgtcctggaagccannnnnnnnnnnnnnnnnnnnnnnnnnnnnnnnnnnngagacagagtttttnnnnnnnnnnnnnnnnnnnnnnnnnnnnnnnnnnnnnnnnnnnnnnnnnnnnnnnnnnnnnnnnnnnnnnnnnnnnnnnnnnnnnnnnnnnnnnnnnnnnnnnnnnnnnnnnnnnnnnnnnnnnnnnnnnnnnnnnnnnnnnnnnnnnnnnnnnnnnnnnnnnnnnnnnnnnnnnnnnnnnnnnnnnnnnnnnnnnnnnnnnnnnnnnnnnnnnnnnnnnnnnnnnnnnnnnnnnnnnnnnnnnnnnnnnnnnnnnnnnnnnnnnnnnnnnnnnnnnnnnnnnnnnnnnnnnnnnnnnnnnnnnnnnnnnnnnnnnnaccacgcccggccaggaagcatttttcatgggagggaatagggagaggaag

SEQ ID NO: 123370 - DNA, 944 bp, Homo Sapiens
ctcctgaatcacagaagagttttaagttccaggcaatttcctcacccaggtctcctttagggagcacccccacctcacggcgggccttgcacagaacgctgtcggacgagagcatttacaatagccagagggagcactttttcacctccagggcgtcacttgtggaccaagccctgcccaacaaagtccttttcagtagcacgtacccttctctccccaagtcgctcccgttgaggaggccttcttacaccttaggaatgaaatcgctgcatggagagttctcagcctcggacagctccctcactgacatccaggagacccgcaggcagcctatgcccgaccctggcctgatgcccctgcctgacactgctgcagacttggattggtccaacctggtagatgctgccaaagcctatgaggtccagagagcctcattttttgctgctagtgatgaaaaccatcgccccttgagtgctgcatccaacagtgatcagctggaggaccaggctctggcccagatgaagccttacagcagcagtaaagactcctctcccactctggcttctaaagtggaccagctggaaggtatgctgaagatgcttcgggaagatttgaagaaggaaaaagaagacaaagctcaccttcaggcggaggtgcagcacctgcgagaggacaacctgaggctacaggaggagtcccagaacgcctcggacaagctgaagaagttcacagaatgggtcttcaacaccatagacatgagctagggaaggctgaggaggacaggagaagggcccagacactccctccagtgagtgtcctgcagcccttattccctccatagaaagcatcctcagagcaccttccctggcttcctactctgccccctttcggggagtgcacaacacaatagttgcagatcaacaatcatcacctgccttttgtag

SEQ ID NO: 123371 - DNA, 608 bp, Homo Sapiens
  misc_feature (417)..(496): n is a, c, g, or t
  misc_feature (562)..(562): n is a, c, g, or t
tccagtttgattcgtttattgacaaatcaaatgaaaaaaattcacttaaaagaagggtatgtgatcacaaatgtagctaacagggggaacgcatacagcaccagggagggagagtgaggctggacataccattacagagaggaggaagagaaagaatggcgcggggggcggaggaaagagagcacctgccaaaaatcccacactttccacttctcagctatcactcaatcatttttctggacagggttaacagctagaaatggtttaagggcaacatccaggtagtttgtctggaagatcagggagatgaagagttggagagaatgtgggtgtagcattttgaaggattctccagcttgaacctgttgccagaacccttttcatggtgaactgggagtcaggaagcttaatcctggnnnnnnnnnnnnnnnnnnnnnnnnnnnnnnnnnnnnnnnnnnnnnnnnnnnnnnnnnnnnnnnnnnnnnnnnnnnnnnnncaatcaagttggcaagttctccactggctctagcactctgcaatgccaagcgttctggcaacctgngctagaccaggagactggctcagcttccggagaaatgaaactacta

SEQ ID NO: 123372 - DNA, 659 bp, Homo Sapiens
ttattacacttgttagatctttattcattatagattctccaatgatttgcaatggttgtagcgttactgaagactttgtgacaatcattacattagtcaagtttccctacaccatgaactgcctgatggtgaataagtgttgactgcttgctaaaggctttgccacactcattacacttgtaaggtttctctccagtgtgaagtccagtatgttgtttcaggtgtgaatcactcccaaaagtcttgtcacaaaccttacatttgtatggtttctttccaggatgaattctcctatgtcttttaaggtgtgatttgcgactgaaaactttgtcacatgtttcacatttgtaaagtttctccccagcatgaattctatgatgaagtgaaagttgtgattgttgattaaaagccttcccacattcattacacttgtaaggtttctctgcagtgtgaattctggtatgtcttgccaggtatgaattacgcacgaaagccttgtcacaaaccgtacatttgtaagatttctcttcagtatgaagtctacgatggtgaacaaggggatggcttgtgactgaaggtcttgccacactcattacacttgtaaggtttctcaccactatgaagtctacgatggcaatgaaggtatgacctctgactga

SEQ ID NO: 123373 - DNA, 1071 bp, Homo Sapiens
  misc_feature (50)..(84): n is a, c, g, or t
  misc_feature (154)..(302): n is a, c, g, or t
ccggataacagcacgagcgcagcgagtcatgtgagcgaggaagcggccgnnnnnnnnnnnnnnnnnnnnnnnnnnnnnnnnnnncagtcgacggtaccggacatatgcccgggaattcggccattacggccgggtttcactagcgtttagaaannnnnnnnnnnnnnnnnnnnnnnnnnnnnnnnnnnnnnnnnnnnnnnnnnnnnnnnnnnnnnnnnnnnnnnnnnnnnnnnnnnnnnnnnnnnnnnnnnnnnnnnnnnnnnnnnnnnnnnnnnnnnnnnnnnnnnnnnnnnnnnnnnnnncttaaccactttgcactttttaaaatagtagtaagcctagaacagcttgccttttatttaggttaatgaagtatttttcagggtatcagatatgtttatctttatgccaaaatgaaatcttgtgaactctgagtgatcttttgtctatttcagataggggatacagcctacaaatttggtggaatgaatttcccacatgtctgtggatagctagggaccctgttcaaaaatgtttctgatttcctggataatagggcagccttttccaaaggatgaacactaaatatcttccagttttatactgatcacatctgacattctctgatcatcctgattatttcactagtggtggttatgacttatctttttaggcagttaactgggaagcaacataggaatctttaaacttcaaaagcaaagtattcttgactattcagtaagtctattaatgttaaaaccttagtggtcttgttacgtttaatgtacctacttctttgttcttagtctatgcagatggtagtatatgtctggacatacttcagaaccgttggagtccaacctatgatgtgtcttccattctaacatccatacaggtgaatttttccttaatgtgacgaactataacttttaatatgtttatattagcaattgaattgtttttgaaagtcataatgtaatagatctttttatttttggtcaaagcttgtttgttttatagatgaaaagtagaccattaagacccaagtcagctgggtacagtcgctcacac

SEQ ID NO: 123374 - DNA, 1785 bp, Homo Sapiens
  misc_feature (48)..(56): n is a, c, g, or t
ttgaaattttaaggttatttttatttacaacttttgaaaaatgtacannnnnnnnnacatgggttacttgtgcaaagttagatttggaagtgataaatgcataaaaggtgacaatagaacattagacaaaacatttacaagccttgtcccatactgctacttaaaggtactatatatctaaaagtataaatatccaaaaaaagatcgcagacattggctttaaggttctcagatgctgaaagggaagaaattaaagcatgcagcaataactcaggatttgagtggaaaatagtttgccacagatatgctatgctcccttccttgaattcattaaaactctaaaataaagatggacaattgagtttattcacttagggcagcactgatcctttaaaaagattaaaggagctccaactttccctagctcaaaaactcacgattgtttccattcctctgctcccacacctcttttaaaaagcaaaaacccagaagaccaataattctgaaacttggcatgagtgtgcccagtcagcagcttgcaaagagaggatgtgtcagttactacaattgctgtactcctttagctgagtccttcaactttctccttcttgccagtaaatactacgttgtaattcatatgactgagatcttagtatcacaggatttttagctcccatgcctccttcaaaattgtttacatggatttgtttctattctctgtaggccatattccaaacacattcacttctaaatccaacacaagtgaaggaccagccaggatgaaacacttcagcaatcattttgttaaaaataacatcctggtcatcaagctaagcataagcacctcttgtataacaattcatcttaaaagcttaaagtacaataataaaaataactgcctgaaaactggaaatgaaatacaacagaaaaactgaagcattagtaatttttgcaagtaacccaggtacagtacatttgatttcatagagggtgttttctgatgtttaaggagagggtagaaggggtaggaaaacttggcaaggaagatggaaacagcacaacagttattttgcttttaataaagtaaatgtaatgacaggagtagggaggtgacaaacacatcaatatatatttttcttatggccagcttctttaaactgtacccggggtcaacaatcacgccagctttgttctactattgcagaaacacgcttttcatattcccgtttgttctcctggtacagctgagcagcctggctgtttgctggactattgggattgggttcatccaacagagactgtatggatgttagaatggaagacacatcataggttggactccaacggttctgaagtatgtccagacatatactaccatctgcatagacatttggatggaacatcttagagacaaatctaactgtaggtggtttatttggatattcttcagtgaattctattgtaagtttaaatgttccatcctcaaacggggtcccttcaggcccgaaaatgaccgcgttccacaccattatgttgttctcggacggagccccgctgactccggctggaggatcctcctgcaacctcttgaagtcccgcatgaggcgccgccgagccggggtggacatgtcgcgagcggggtcaggggtggggcatacactggggtctcgggttcccgcggcgggcgaggaggccgaagaggctggagaagcaggagaaggggaggcggaagcacccagaggaaccgcgctgcctctccgaagtcgagggtcggtctggcggccg

SEQ ID NO: 123375 - DNA, 1374 bp, Homo Sapiens
aagcatttggatttttatggactctttattagggtattaagatattgaaaataatacacgtaaaccacaaaagagtagcattccattttcttgaagtgcacatgatattatgaacaatacaaatgcattatttttatcattaatagtttaatcattaattatctcataagtcaatgcagagagtgaaattactatgaattaaacttctgttcacaatgtacagtattttgcatatgttgactttacttaattgtacatttttgtttccaaagttaatgttaaatacctggtgcataggttgttgtcaagcaattactctcattgtcttgtcatacatgctaacattttgctaaatataaatctacaagtatcacagctgcatatatttctgaagtggttagaacagaggaggatgctggaaagttgagttctttaaaatcttcgttcaaaacaagagattttcatctatgtcctcttctttaattccaaagcagtggccccactccttcagggtgatgtgcttatccttgttggggtcacactcctcaaagaaacgggttatgcagtgttccatgggcaccagagatgctcgcagaggagcaagttcagaatgtgtcaagactctatccatagggtgttggtcaagttcactaaactgccagtgcacaggatacacatacatgtggtagtttttcttaaagtcccttaagagaaggtcaatgggatggtccccagccaaaagcctcttttcatccaggtaaattttcttgactttatttctctgcttctcatttagataaccagcgtgttcagagttggcttcataaagctgcatgaggatattcttgagccagtctctcatccgtagaggaaactgaatcacttcaaagtccgtacaagtaggaatagatttgcaggctccaaaataatccagctggagttgatgcccctttttggtcccctccagtctgcatttagtagcgaatagatgacaggaactagcataggtctgattgtcagtgccacaaacttgatcaaggggttttgttggaggacaagtcactggatcctggcagacacagtgaggttttccctgttggtctgccttacagatgtggcctcttttacactggaagctcatgcaagaatccacagcatgcaccctcatgttgccttcacttgacgcttcctcctcatttgatgagttctctgctttcttggcctcttggtgctctccaggctcagtggtacctatattttcattttcatgtactttttctctttgctcctcaattttgaggtgataggcaatggattgagctctctcggcctccagaaagcctggcttgggatgaagtagtcatacttgaactg

SEQ ID NO: 123376 - DNA, 946 bp, Homo Sapiens
aaaatggaatcagtgacttttatttctcataacagaggtcagaatagagaaaatgtgatgaaagcacaaaatttaacaaagaaaaggggagcagcccacccaccatcaaggtggggacagaatgtctgtgttcacgtaggtcaatggtagcaggtggcagatggcagctgttatccgaagccctggactcttaaagctgaggaaaaagttttgttctgtttaggtgattatgatagtagaccagtcgaggttatttggatttggttcacacctgtgtaacgtttcatttatcagtagctgagtctgaaagatttaaagtacagcaaaattccagatgaaccagaacactgctttatgttttatcatatttaggttatttattaatgaaaatatatgacattttcaggaatacaaattttgcaccctgatgacctcaaatgcgtgcaacaagatgtttaatacagaaaataacacaaaaactgttgttacagtggttagaatttttaactttaaaaaaccatgaatttgtattgttttaattgcacaataaaataatgttgatatatacttaagcttaaattaattccaacaggcaaacattttccaacccagagtgtggctgatgctgggtcagctgactctattttggttcacaccaactttgatgtctaggctattcagcatctacctagaaaatctcaatcgttccaagcataccgtgaattttgtgatttctcagaagattttcggagttaaaagaagtgtttatatcacttaatatccaacatttctaaaggggggaaaaccccaccatctattatcaatgacatttcccaagtccttgcaccaggcccttagtcaccaggttcccacgttttgttgctttcctaccgtctcaaaccaggttcatgaaagcatttgaacagagttcagtcttcattttaca

SEQ ID NO: 123377 - DNA, 845 bp, Homo Sapiens
tttgctgaacagttctatattgaaatagacagaggcagcagggccaagggcgagcgcagggccagcggggtgcagccccctttcctgctgtccttctggccaaggagcatgggccagactccaaagccctgctgtgtttaggagaggtgtgcaggcacgcaccgcaccgcagacggggaatgagaatttctggataactatctttctgtaagaataatttgtgggttcaggagatggctctgaggagcagttcaggttgggagggaatgccagcccagctagcgcagcccccagtgatgggcaggggtggaatcaccatcagtggtgcccggtgacatgctggaggaagctggtggccccccggggtggaccatgctggtgggagcggcggggtgggagcccctgagcccgtgggcccctgacgctctccagggtgcagtctggctcactcagccattctccaggacagctgctggggtcgaagagctcagggtctggcctctcagcttccatggtcatgttgtcaatgttgggcccatcctcatctcgctgcaggatggccagtggctcagcagaggccccgagatgctctccttcctcccagctgctgccccggcagggcctgtcatcctcaggcgagacctggctcagccgaatgaggttgctgaagttggagtcggacttggaacccgcaggtggcttgcgggccttgtggcggcctgccaggcggctgctgtagaaggccaggatgggctcagggcccgagtcgggcacatggtggccagtgatggctgcttgagggggacatcatgtcggagacgcattggtgcagtctcacccacagc

SEQ ID NO: 123378 - DNA, 307 bp, Homo Sapiens
aatcctgctaaacatattgtcagttacttcttggcttataaattctcagtactaaaaatcaagaaaaagaacataaagcatatcaaatgtatgttaaaaaaggaggcttcactaagcacaagcaaaaaactacctttatatatgatgttattcaaatacatggataagataacacattttatgatgtaaaaagtaatatttaaaaattaaaaggcaagtctttctggtattcagaagtctgaagcaaccactgtccagctctttaaaaagagcacattccattctggtgcacacaaatgtacattaa

SEQ ID NO: 123379 - DNA, 283 bp, Homo Sapiens
actttttatccaaagaagtttatttgcatgtaaataaacaggttattttgtaatgtttcgggaaaaaaatcccacaacagatttcatctactttcaaaaaaatgaaaaaccccaaagtatttacaaaacggccatatgcacagaaaaccaaatttgaaagatttttttaaaaaaagaccctccccagctgctcctgatgtacatttttaaactcaaaatttaaagctcagttcttatagctgagcatgtttcccaatctagcttctgagatgttaagtacttc

SEQ ID NO: 123380 - DNA, 644 bp, Homo Sapiens
  misc_feature (454)..(454): n is a, c, g, or t
  misc_feature (505)..(559): n is a, c, g, or t
ctgtaccaattgtatttattgctagaaactttaaactttttaaaaaagtttttgaatggtagataacatagaaaaagacatccataaaggtaggaagcaatctcatcatttacaaagtgctgcaaatttgataaatttatgttgctgataataactcagaagtactcttggatgaatagatataaatccttgaaatatccaaagcatgacaaaaaagaataggacacctaaatggatataaacacaccaaaataggaattgagcttttggcaaattagtcattaagtcattaactttaagcaaacaagttttcagtaaattggttttaagagatctagctttaggtgaactagtttcaagcaaactgactagtatcaaatcagtgttttgctccctccagttccccccaactctagttttgggattgtgatggatgcaatccgggacccctctngagaggtggcaagtgagcttctactaggaaaccaagtgtacaagtgacctnnnnnnnnnnnnnnnnnnnnnnnnnnnnnnnnnnnnnnnnnnnnnnnnnnnnnnntgtgtgtgtgcatgaacaacccacacatgcatacactgggctatatggctcagtgcacctaaacttgggaatgtggctaagctga

SEQ ID NO: 123381 - DNA, 1444 bp, Homo Sapiens
  misc_feature (1373)..(1373): n is a, c, g, or t
ttttcattttccagttaagtcctatgtcttttgtgaaattccaatacttaaactgcaagtctgcaatcgtctctgaagtcagtgaaattaagaaaaaagtcctaattctcttgaaggtcattttttcctcttaggatatgcagatgcaaccgttgctgcagtctgtgtagaactgccttttatttcccacgaccttgacgttcctttttaacactttcttcttcctcttggcgtttctcatagtgtgagaagtcatcaaaaatggaagtggtgtgcttgtagctggctataattttcaacacctgcttagccttttccagaggcacttcctgagtgtccctagagttggtcactggtttattctcgttgttctctaggcgaatgtgtcgcagttggctattgggaacgtccttcacaaaaatccacctgacatcaaaacgacccttccatttgtcctgggaccacacacctgcacatgtgttgtagtccacagcagatttcatttctgccacgccacagaagtgtccactgccgttgacactgaaaagtaagtaaacggggcctttcccgttcatggaacgataagcagcatccagtctcttgttaccatgctctgtgctgcaccaaatattatacttaatggaacggtgaatatcgtcctcagagtagctcttaatgatgaaaacccggccatgtttcagattccagtcaaaatctttggggttatagttattaatggaccgaagcttctccaacactgggtggggttctgaaggagtagatccagaaccagcctgagactgtcctactccattaccatccaccccattatgaccgaacccactgccacggttccgaggtgctacccagcgggttggctgagctgcctgttgctggactgaaagctgggcaggctgtggtggaggtggaggcaatggctgtgtctgttgccctactgatgcctgagccactggtgggctattgttagcctgctgacctacaggctgaggagacccctgggttggctgacctatattctgaaccaaagcctgtgagggggcttttgcaacgggacccttgttatcccaagttccaatatccatgttatgctttatcgggggtggcggaagacttgaccctgcaatgccattcttggtcttcagtttaggttgctgtttttgcaggcttgctagcaatatcagcccaagatgctggttttggaggagcaatggtggctggaggcaaactattggaagccacgatgttactagtaatggacccgctaccaacagcagaacctacaacttttggaacattgcttgcaacttctgtgctacccaacttcagtgctgccatcccttggtctatagtantcatgccaggagccttattgagggtctcattggcaaaagctgactgtccatcaatcatggctccacctaag

SEQ ID NO: 123382 - DNA, 632 bp, Homo Sapiens
ttttttttagcccctttgtaaaacttttatttagaaatcttcccgatacatcctcacatatatatacacatcatcaccacatgggttttttttgctaaagagtcacacacccacagtgttggcctctgggctgtacaaaggtcaaggtacctggagcggttactcctcttctgcagaaaaatgcagagaccaacgcaattcatcacatacagtacaacgttgacggaaagtgctgggcccgcccacagaaacaatgcactatgtacacgggcagggggcaagtcttcagcagagggtcacgtaccatcgaaatcacaagtacggccagacccacccccaaaaggccgaaatagttgtcggctgactacagatgctgtgccctttgttttattttggaaaagaataaaggttgtaccatcttgtcatctgccataacaaataaaagaatatgaatttgtcttaaaagatgtgattcccttcagtggttatggtcatctttgttctcaaaatgttgttttgttttgttttacctttatgttctttcccctttgtacagatgctattcttggaatgttgccagtttttcatgggtaacaaggaaggagaggaaggataaggtcatggggtacaga

SEQ ID NO: 123383 - DNA, 1099 bp, Homo Sapiens
  misc_feature (727)..(834): n is a, c, g, or t
  misc_feature (838)..(932): n is a, c, g, or t
  misc_feature (1074)..(1074): n is a, c, g, or t
  misc_feature (1085)..(1085): n is a, c, g, or t
cagaaaataatgcaaccaattttaatttaatctagatacaggtactttatttacaaatatttagattaatagcattttgttacatcaaatgaagagtacagcagtctgaataaatccttcagtcacaaaaacaataaaacccactgtaactaactttgggagtcagggtattgcacctcaacaagccgcagtctttagtttgtgattgctaccttatatcccaatgggtggtttgtttgttttgtttttgtaaatatacacacacaccagcaggtcatggtccctgggtgagtcccttgtgatgcaacagtgtaagcaaaatggatcactgtaagtctttaacagaatataccaatctactccagaaatcttattttttaaaaagttaaacaaagacaaaaataaaaatgaatccacaaattaaccaaagcctactttctgcacattccagttttggcttttatttaacattgactatacaatactctggtactaccacatgtttacaacccagaaagatgtacttttatgttagtgtctgtaaagagggatttaaaatgtgtattttaaacacagcagttgagctgagtgcattttctatagtacgctgaggtgttacctattctatttcaaataaattctcaattcccagccactgaatcataaatgcaataaaaaaaatcaacagaaatgaagaacttaatacaaccctcgtgccgaattcttnnnnnnnnnnnnnnnnnnnnnnnnnnnnnnnnnnnnnnnnnnnnnnnnnnnnnnnnnnnnnnnnnnnnnnnnnnnnnnnnnnnnnnnnnnnnnnnnnnnnnnnnnnnncggnnnnnnnnnnnnnnnnnnnnnnnnnnnnnnnnnnnnnnnnnnnnnnnnnnnnnnnnnnnnnnnnnnnnnnnnnnnnnnnnnnnnnnnnnnnnnnnagctgcataatgaatcggcacgcgcgggagaggcgtttgcgtatggcgctctccgcttctcgctcatgaccgctggctcgtcgttcgtgcgggacggtacactcatcaaggcgtataggtatcaagatcagggaacgcagangaatggagcanagcacaaagcagac

SEQ ID NO: 123384 - DNA, 1292 bp, Homo Sapiens
  misc_feature (1193)..(1208): n is a, c, g, or t
  misc_feature (1213)..(1231): n is a, c, g, or t
acttgaaaatggtgtcggtaccttttacaaaacaagtttatgccaacatgacgataaaacagtccttcacactgtggcaacacagggatatcttaagttatttcactgtagggttaaaaatgcacaatttaaaatcccttaacagcagacctgtggttctgactgtccagttcagaatctgaccattccaagaagataaaggtataaaagcttaaaatgtgcaatagtaaacccagccttttttctttttctatacagtaaggcaagaatgcagcctgtaatgcaaaaacgtttacaaaaagagaaaagcaggttagcacattgtcgattgcacaagaacagttaagaaaatcagcaggtaagcaacagtgcaaagatggaacagaatctgctagtgttaatcctctgatgctaggagctctttccagcataatgtccccaaacactgccagcaccaaggggtggcgccagtactacttgtgaactgcagttgtgtctatttctttgtgtgaaatggaagggagtaacatggtcacatataggtcatactgtacaaactggtattttatactgttccaatgccagtaatcaatttattttcttcattaaaataatatacacagaatgtattgttagttcgattccttcaaattttatccatatttactttctgttacagagaaagggataaaatggtataaaaacagataaagctattaattaagcacgagagagaagataaatggatattttccctgtgtgaggctaagacagaagcaaatctcgttaagaaaaatgccacccacacaacaggaaatttatccaaaacaaaacaaaagcagttatagaaccccttctctaccatcagaagtaatttcacagcaataaacttattggttacaacagacatacttgaacagttaaggatgggaagaaaggcttaagatatcaccaaattaaaccgtacagtgagacaaagccttgccaaagggagggtaaaaatcatgaagtccagcatcagtgctcggtttaaatcatatattggtgacatacttatcacgaggacaagggggaaaaaaagtctagatttaccatgcaggagagatttattactctacttgcctttgataacctgattacatctagttgtttagcagtttagtattgtgttaaactgtttttacaaccagagnnnnnnnnnnnnnnnnaattnnnnnnnnnnnnnnnnnnngcctacagccgcggccgcaagcttattccctcttagtgagggttaattttgagattggcac

SEQ ID NO: 123385 - DNA, 567 bp, Homo Sapiens
  misc_feature (321)..(384): n is a, c, g, or t
aatttaatctaaaaacagggcctttatttacaaatatttagattaatagcattttgttacatcaaatgaagagtccagcagtctgaataaatccttcagtcacaaaaacaataaaacccactgtaactaactttgggagtcagggtattgcccctcaacaagccgcagtctttaatttgggattgctaccttatatcccaagggggggtttgtttgttttgtttttgtaaatatacacacacaccagcaggtcatggcccctgggtgagtcccttgtgatgcaacagtgtaagcaaaatggatcactgtaagtctttaacnnnnnnnnnnnnnnnnnnnnnnnnnnnnnnnnnnnnnnnnnnnnnnnnnnnnnnnnnnnnnnnnatgaatccacaaattaaccaaagcctactttctgcacattccagttttggcttttatttaacattgactatacaatactctgggactaccacatgtttacaacccagaaagatgtacttttatgttagtgtctgtaaagagggatttaaaatgtgtattttaacacagcagttgagctgagtg

SEQ ID NO: 123386 - DNA, 2110 bp, Homo Sapiens
  misc_feature (1363)..(1363): n is a, c, g, or t
  misc_feature (1897)..(2040): n is a, c, g, or t
ctgtgtttgtcaccaatcctttattgaaactggtaacttacacactttataatagaacaacaaaaataatgttcaatatatacagccttcgcatggactatctgactatacacaggcagagtgataacacaatctaatcttcatcataatctgtgcacaaaaagacaccaaacagacaacatgtgcacatcacagtgaaatgacatcacaggtccagtgaaaattcagcataatacaaaatggactgctctattgcaaatgacatctttctaaatgcccagctcttactcagtagtaatttacccagagtctgaagcagagattggttgtgtggctataagtctcttgagtgagacaacctctgcagataagtttgctatcccctgcttcaaatacaagttctctgggtcagaaactttgtagccactgtctttcatttcaacaactccagttttgaaactattctgagttttgccactcagttctttttgatgccagtgctccgatttgagagaccaatcttgaatgttagtcacttgcactgagaaaggagtaagagaagaatgtaccatacttggggcactatgcttttcgagttcgaaatgtcttttagatgtcatgtcaataggtgaggaaagtttttgcgtggcctcaaattcattatcaaaggcttctactttgatctgcatggctttggctttgatccggagcttgtgtggcaaggcagaggaattcacttctggaactttaaccacagttgcatgcacatgcttgagttcaactggagaatggatggggcccttggggacctgttgctcgtcttctccatcagatgactttcctaccacaccatcatcagtttccgacgttctcggggagttgctggaggatcggttgacttgcagtagtgggggagagtgtgagtacccagagaaagaattccccatatagttttgatagatggacgctgtgtaagagcctcggtcatctcttggctcccttgtgtagctctctaattccatcggctcttgcttgataatctggaacttgttttcaggacttctgcagcttccctgcacagagctctcctgcgtgtgttctactgaggacacttctgaaacatcggacagcgagctttgtggagagtgtttaatgacagaaatacaactacttgacaccatcgagggttcgtgctcgtccacaaatgaactcacattggatttggaagtctggtaatcttgaaagtacacagctgtagaattactgagtttctgaatctcttgagcatatgctgtggagctaattaaaccaactttaattttagtgaaagcagctcagcttttaaagtggcgttttcttctcnccagtgcaattagtttgttctctaaaaccaggtcattcagtcgacgcttctcacgagatcttttggcagcttcattatttttccgccttttttcccaatacatagcatctttcttttcatcaggaatgaattcccgtttcctccgacatgcagaagatttgttcttccccacacttccttcactgagaagcagctcctcacctgttgtggagtcttctgacacttccgttaaagcagaattaaggaccatcatcttgtccacattgctactggcatcaagagacgcctgctcctttttgacggtctgcatttttctcagctgcatcagaaacaaccttaccctatctatgtgtgtaggagaacaaattaatttccccgtattctcaagctctttaaaaactctggtttaaaatccatcaatattcttccttttgttctaccgtctgggataaatccgtcaggctccttattgaatgaagttgggcctccttcgttatcgtgttcctgctctcgggccggcgaggagaaagaaannnnnnnnnnnnnnnnnnnnnnnnnnnnnnnnnnnnnnnnnnnnnnnnnnnnnnnnnnnnnnnnnnnnnnnnnnnnnnnnnnnnnnnnnnnnnnnnnnnnnnnnnnnnnnnnnnnnnnnnnnnnnnnnnnnnnnnnnnnnnnnnagagatgtgtgttagtaggtcagttccgagcgccgcgctacgtcgcctcgtgccgaattcgccacccagc

SEQ ID NO: 123387 - DNA, 1759 bp, Homo Sapiens
ttttttttacgtgttgtggtttctgcccagcctacacagcaggagctggggagactttattcgtttcggggaaagtgacaacaggaatgagatgaagtgtgaaagtgaaaggaaggggcaatactgagatgagaacagcctgaacaaagtctagtacaacactgcagccatccagagcttgagggagcggggaggtccatcaccaccaggccctgtgggccaagcacacccatgtttcttctctcttgtcagatttgatgaaaaggaaacttgggactccggaggaccaagatggagcgagacggtcaatactgatggacttgcagctagcaccatggcagccctgcctggtctaaggaagctggcaggaggcgatggtacctggcgggggcagactgcccacctccccactccttcagaggactgtttcctgcccttcacaccatcatcatgttgggccctgcatgtatgttcctgcacttggagcgagcccagggacacagggcagacactgggctcacagatgttgctgcagctgagccagaaaacattccaggcaggaaaagcaggtgcacacattcacacaggcctctggtcactcgaccagccagaatgagacggactccttgacctgggaagtcaagtcccagtgggaagggctggaaatcacacgtggtcaacttcttggctctctctgctccccaaaccctggccctaggcttgctttatcatcacatcccaaggccagagggctgctgctgtccccatcttggccctgctagaagagggataggggtggctggcatgatgggtgaggggaacatgagaatatgcagaggccttggaggaagaggactggcagttatgacaggaaggctctctatacctggctccccagtgttctgcccctggcactgagcatgaggagccaggctttggggagactttgcaatcacccccccaacctggtccattttccacaggtagctttcttgaactcaccttgacccctcctcagccagcagcccccacctccaggggcaaaggagctgaaagacagtcctgaactggggggagctgggatcacatcagccaggccctgtccctcacaggaagtgagatgaggtgataccatggatggtgactaaggccccaaagtccctgcctctctgcctccccagaaacctcacagccaggccagcccccagagcagagcctgtgtaaacatgcccaggaggggaggaggggttgctacatatgagaaacagttaaaaataaatttaaaaagcaccactatgtcctgtgctggtctccacagccccgaagtctcagctcaggaagggtgagtgctgggggattatcagctggggctcggctccctcccttgcagacagcaagcaggtaagggcttcattttgctgttttctccatggagggctctgggaaaggatcctgcaagttggaacctcctaagactccagaaccaggagcggctccctctcatatctactcccctcaaaccctgtcattcccgggaagctcccagaggcagctgaggccacgcccctgctcctgagcggcagcatccagacccggaaaggacctagtttcagcctggcacctcccaaggtgagccatctcttcttaggcatagtaggaacatggagaccacactacccccactccctgaaagctgggatgggatggtgagtcagggtcaccatgcccctattagtgtgctcctcgccgatgagccggc

SEQ ID NO: 123388 - DNA, 1020 bp, Homo Sapiens
  misc_feature (304)..(316): n is a, c, g, or t
tttttatttgttcaatctctgcagatttattgttgagtaaacttatctttaaataatacagaacaattaaagctaaccaagtgcaacagataaataagcctgccagttatacacataactttataccaaccataattcagccagtcaaaattccaaaaacaatccaaataacttccaacatactagcggtcaaactaccgaataaacttgatgcagaccagtattcccaagttgcaatagtatccaatgactttgctgaaatgcataaaatggacaagcctaggtatctgcgcaaccagcaggnnnnnnnnnnnnngtaccaaggctagagaatgcctggtaaaagcttgaccagaaaactctcaaaagtaactgttactgccctactattcttaagatacttaaaatttgaataaagaacctactggctatgtaacattctaaggtctaccagatgctaccaaaaaatattagctacatggagtgttgctaaatatagctgagatttacaaaaccactttagtctcattgacatttctgattgacatctttaattactttgcaccagcctggcaaaatagaagaatgttgtggttgggaactgcaaaacctagcttgaagattaacaacaggtctttgctcagaataagacaatccatttgaatagatgaagagtatctgggctggaaaattttgcaaagctggtttacatgaaggtgttttgtcccaatttcatacaattcctcaaacatgcattttttggtataaaactggttaactaatgtagaaagcaaagaaacaagaccattgagagtaaagtggttttgtaaatctcagctatatttagcaacactccatgtagctaatattttttggtagcatctggtagaccttagaatgttacatagccagtaggttctttattcaaattttaagtatcttaagaatagtagggcagtaacagttacttttgagagttttctggtcaagcttttaccaggcattctctagccttggtac

SEQ ID NO: 123389 - DNA, 739 bp, Homo Sapiens
  misc_feature (217)..(232): n is a, c, g, or t
  misc_feature (604)..(604): n is a, c, g, or t
  misc_feature (674)..(674): n is a, c, g, or t
tttggtggtttcttaaatgatttattatcgtattctacatgccaactgctttacatttcccagcagcaagatataggcttctttgggcatgttctgacatgtctgtctgagtgaacttacaccaagtaacattggccctcaggtcaaatttctacaattagtcttccaacacccattttttataatgtcacgtactcttcaagttcctagaaaacannnnnnnnnnnnnnnnaaaatttacatatttaattactgaattgggttatccaacctgaatccaagaagaagccacagctctcatgtggtctgcctcaggctttgggcagctgagacagcccatgactgttgtgtcccatctgtaagaagtagaaactcactggtcagtcaccaccattgaagaatactgtagctctacaacagcaaatgggcatgattttgatgaattctctacaaacattttctgtatgtacatttatgcccaggccagacttaatacatttacctaaaaatattgtaatatatctttgtattaagtagtcaatagcaccatattgtcaggttttaaaaatgaagtgttcacagctccattttcagtgctcttcanattagaagttgggaaggtagcctataatcttggttgtgtaaacttaaaatatttatactttgtcctccanatcttacatgctcttgtgtttggctactgacttgcagcctaaactattggagatgtagctttcct

SEQ ID NO: 123390 - DNA, 666 bp, Homo Sapiens
tttttttctttattatcaaagtttattgttggggtcagttcctatctactagggagtacaactatatctcaatatgtgctatagtaattctagggtaacagccattctgcaaaatagttgtactggggctctgttaggcatagatcataattaagtcagtggaagaatgagcccagagaaaccctggcagcagagccgttactctaggaaagttccagtgctatgcaacctgtaaggcatcatcgctcagctgatgatgagactcacagaggtgttggtggagcgaaacaggagttgaacccattttctactcttcttggcagggtaactatggctccaaggaaggaacccaaaattaggtcttgtaaaatcttttaagctcccaaagcaagagaaataagacatgaagaaagagccagtaactaggacagatgaaaaattaggtggaattggagggaatggaaacttctggaatgcaaagtagctgggtttagacgccatttgagatgaccaagaatacagtacaggtaaaagcaaatggggcaacaattcaaatattgagttgttcaaatactagaggttaagtaaaattccccccttgggggaaaatggttgaaaaggatcagaaaggtgaatcagtaacaggacaatgagtacctggagtag

SEQ ID NO: 123391 - DNA, 709 bp, Homo Sapiens
  misc_feature (692)..(692): n is a, c, g, or t
ttttttttgacacaataaattttattgtttccataataataggctctggacaaagacaatggagacaatgacaacacatttaaactcctataacaaattaatctgttacaaatttccagtggctcaacatattaaaatgcaaaacatataaagaaaaaaacaagaaatataaatattcagatttttgcagtacaatgaaatgtcttttaaaaaaagtttgttgtaattgtgtatgtaattctgacagtaattcaaaacacaaaatcacacattttccctaacttcccatgttctggatctggggactgcaatattacagaaatatgcaaaaataagtttagtgctcagagataaataattttccttatttcaatgcatcaatgcgcaaaaatttcaattcaaaaaagccaaccactgctatatgcagataaataaaacatttgacaacacttttataatcaaacccaacattatacaaaaaatgtgtggcacatgcacatacgtgtgcatatgtgtatgcaatgcctattttagaaaaaaggtgtcttgatgaaaatgattttgaaaatagtcactgacacacattatatacaaaaccttttatataaaaaattaaactattttcagtgaaattccatgttcacatcctatctgaaaattgcaattgaatcataaataggtctactaacganatcatggctaaggcagt

SEQ ID NO: 123392 - DNA, 1019 bp, Homo Sapiens
  misc_feature (684)..(684): n is a, c, g, or t
ttcggcacagcgaggggggctccttccctctcctcgaatgacgttatgggcacatgctttttaaaagttctttaagcaacacagagctgagtcctctttgtcatacctttggatttagtgtttcatcagctgtttttagttataaacattttgttaaaatagatattggtttaaatgatacagtattttaggtatgatttaagactatgatttacctatacattatatatattttataaagatactaaaccagcatacccttactctgccagagtagtgaagctaattaaacacgtttggtttctgaataaattgaactaaatccaaactatttcctaaaatcacaggacattaaggaccaatagcatctgtgccagagatgtactgttattagctgggaagaccaattctaacagcaaataacagtctgagactcctcatacctcagtggttagaagcatgtctctcttgagctacagtagaggggaagggattgttgtgtagtcaagtcaccatgctgaatgtacactgattcctttatgatgactgcttaactccccactgcctgtcccagagaggctttccaatgtagctcagtaattcctgttactttacagacaggaaagttccagaaactttaagaacaaactctgaaagacctatgagcaaatggtgctgaatacnttttttttaaagccacatttcattgtcttagtcaaagcaggattattaagtgattatttaaaattcgtttttttaaattagcaacttcaagtataacaactttgaaactggaataagtgtttattttctattaataaaaatgaattgtgacaaaagtggactctggcttcccctcccccctacccctctgggataaaaattttccagcattgccaggagctttcaggtacacattaaagaataaaatgaagttaagcagctggagtataggatagtatttgattttcaagatcacccaaagctgcactatcgtcccaaagctgaccaagtagaat

SEQ ID NO: 123393 - DNA, 1465 bp, Homo Sapiens
  misc_feature (1334)..(1368): n is a, c, g, or t
cccggcacagatggtcacctttttattaggatattggcagcatgagggtctaagccttgacttctggccaaactcctgggccaagcactgccccacccaccccagttggctcagaactcgcagaccacaagacgcttttctccacaagccctgtcattccacttgccattggtgaagatctccacacagtcctctgacccgccatcatcgttgggctcccctggggcccagttggaatagaccagggactctcctgtggggtaggtgaacttgccctctgtcttggaatcagtcatgctcaggaaagcagcctcgttcttagctacgaccagctgttgcaaggcggcattctcagcggcagagcgtggagaggccaactgtccaccagcctgtgtgcacagcagctgtgcctccgtaaatggttttacaaagcctgctgtcttgaaaatcttctccccgacactttggccatttgggaagagctcaactttcttatactgagagaaagcagcctggaggtgctgtacttgtccctgtaaggcctcaacctgctgcctcagagaagcaacatctggaagcccactttctccctttgctcctttgtctccaggaatgcctttgtcccccttcaatcccgggggtcccctggcacctggacttccctggggacccatggctccagcagaccctgctgcccctgcgtttccagggactccacgctcaccagggacacctcgctctcccttagggcctgcgaggcctcttgcccctgccgagccctgcatgcctggggcacctacttctcctttgggcccagcttctccttttgggcctggcttgccctgaggtcctatgttcccctgcttccccaggggaccttctcttccagctggaccaggcacaccgggaggtcctggaggtccacttggcccagtgtctccctttggtccaggttctccaacagagccattgtcccctttgggcccaactgggccagcttgtccaggcatccctgcttgccctgcagctcctggcaaacctgggtcccccttctcgccccgagggccctctctcccatcccgtccatcgcgaccaggcaggccactctccactgagctacacatgaccagggtgcaagcactgggcattgttctgtgggagtaggtcttcatttctgcttccaggtagcccaggggctgtgtgagcaggaccagtgcagagaggaggaagagcagcatggcaggtttctttttgttaggccccaggagctccaagcaaactcccccggccgtaatggccgaattcccgggcatatgtccggtaccgtcgactgnnnnnnnnnnnnnnnnnnnnnnnnnnnnnnnnnnncggccgcttcctcgctcactactcgctgcgctcgtcttcgctgcggcgacttaggcgccccacttaattaagtggaagttcgtaattccaaaggtct

SEQ ID NO: 123394 - DNA, 623 bp, Homo Sapiens
  misc_feature (543)..(580): n is a, c, g, or t
cttttggaaaaccaaacatgctttatttcatttttttcacaatttatttaaacatctcacatatacaaaataggtacaatttaatttttctgcttgcccaagaaacaaagcttctgtggaaccatggaagaagatgaaaatgagactggcaaagaacaaatgctgaatctgaagaagaggacaactttgggcaaataatctgcatacttttaattgggaataagatggaaaatatgaatgctaaatcaaattttttaaaaaatacaccacacgatacaactcaatacaggagtatttcttctcaaattcttctagcaccatcaacattcttcaagtatctgaaatactattaattagcacctttgtattatggaacaaaacaaaacaaggacctcagttcatctctggtctagggtcagcacctaacaatgtgggatcacactcatggggaaagtggttttgagggtagtttaaacctttggaagtttgggttttaaacttccctctgtggaagatattcaaaagccacaagtggtgcaaatnnnnnnnnnnnnnnnnnnnnnnnnnnnnnnnnnnnnnncttacaaaggttgacattttccataacaggtgtaagagtgttg

SEQ ID NO: 123395 - DNA, 1815 bp, Homo Sapiens
  misc_feature (545)..(568): n is a, c, g, or t
  misc_feature (618)..(626): n is a, c, g, or t
tcttttggaaaaccaaacatgctttatttcatttttttcacaatttatttaaacatctcacatatacaaaataggtacaatttaatttttctgcttgcccaagaaacaaagcttctgtggaaccatggaagaagatgaaaatgagactggcaaagaacaaatgctgaatctgaagaagaggacaactttgggcaaataatctgcatacttttaattgggaataagatggaaaatatgaatgctaaatcaaattttttaaaaaatacaccacacgatacaactcaatacaggagtatttcttctcaaattcttctagcaccatcaacattcttcaagtatctgaaatactattaattagcacctttgtattatgaacaaaacaaaacaaggacctcagttcatctctgtctaggtcagcacctaacaatgtggatcacactcatgggaaagtgttttgaggtagtttaaacctttggaagtttgggttttaaacttccctctgtggaagatattcaaaagccacaagtggtgcaaatgtttatggnnnnnnnnnnnnnnnnnnnnnnnngggtttcttacaaaggttgacattttccataacaggtgtaagagtgttgnnnnnnnnnttcaaatttttgggggagcgggggaaggagttaatgaaactgtattgcacaatgctctgatcaatccttctttttctcttttgcccacaatttaagcaagtagatgtgcagaagaaatggaaggattcagctttcagttaaaaaagaagaagaagaaatggcaaagagaaaggtttttcaaatttctttcttttttaatttagattgagttcatttatttgaaacagactgggccaatgtccacaaagaattcctggtcagcaccaccgatgtccaaaggtgcaatatcaaggaagggcaggcgtgatggcttatttgttttgtattcaatgattgtctttccccattcatttgtctttttagagcagccatctacaagaacagtgtaagtgaacctgctgttgccctcagcaacaagttcaacatcattagagccctgtagaatgacagcctttttcaggttgccagtctcctcatccatgtatgcaatgctgttcttgcagtggtaggtgatgttctgagaggcatagttggccagcaggcgcatgaaggcaagttgggtagccatttccttggaagtcactccttctacattatattcaaactggctgccagcattgatagtttctcctagccagacgtgtttcttgtccttggagctcctataccagttcttggctgggatgttttcaggttgggcccggatacaggtttcgccagtagagaaatcacagtatactttgatagcatccatagtgcatccttggttagggtcaatccagtagtaaccactgctccactctgggtggctgagtctcaagtcacggcatgtgcgagctgggttctttctagagccttcaggagtaagaagggtctcaatctggttgttgagagacttcagagtagcatcaacttcatagtccttgggtctgagagaaggtgctgagcgaggctggtcagccctgtagaagtctccatcgtaaccaaagtcataaccaccaccgcttacacctggaggtccaggagggccagggggaccaggggggccagcagggccttggtgaccctgagggcctcgaatgccagcaggtccaactgtaccaggatgtccagtgcgaccatcttttccagcagggccagaaggaccagcagggcccctaggaccagcaggacccacggagccaggaca

SEQ ID NO: 123396 - DNA, 201 bp, Homo Sapiens
  misc_feature (179)..(179): n is a, c, g, or t
cgcttctctctgtttcagacttttattacgttgccatggatttcggaggtcatgggctctcgtcccattacagcccaggtgtcccatattacctccagacttttgtgagtgagatccgaagagttgtggcaggtaagaaacagagtgtgtattttcggcggtgtgggggggtgctctanggcaccccctcttatcactgga

SEQ ID NO: 123397 - DNA, 740 bp, Homo Sapiens
  misc_feature (206)..(235): n is a, c, g, or t
  misc_feature (484)..(484): n is a, c, g, or t
aattttattctgtttatttaaataaggataagactacttaaaagactttttacatacaaaaatgtacaaggttaaacttttctgtactgaattacaaaacctgcacaagcatgtaataaaagagcacacttaaaaacattctgaccattatttagcctctaaaaattactgaagttcaacagtagtaaatagaggaagctcttacnnnnnnnnnnnnnnnnnnnnnnnnnnnnnngatttaatctactggcagttttacttaatgtaagtatttaaaaggtcacattgctattgaatgagtctctagatcaattttagaattgtctctcaaaacttaagtcaaccaaaatattatttcaaatagtaattccaattctgaagaattttaataccagcaaatatattatggcctcatagtagtaactgaaccaactttccaaagtgcctggtagctgtccagatgaattaggctgctttggaaaanctgtactgtctctacagccattgagaagccattcagtgccctggtagggacctgagactttccagaattcacacagcagtctatgatccctcaaatgtaagaggacagggggtcagcctatcttcacctctcagtgaatgtggagggccaagcaatatgacttgcaaacctaagctagaagcttgggatctacagtaaggaggaaggagaattaaagtagagaaagaaaatgtataaggagaaagggaaaagaagg

SEQ ID NO: 123398 - DNA, 303 bp, Homo Sapiens
  misc_feature (206)..(235): n is a, c, g, or t
aattttattctgtttatttaaataaggataagactacttaaaagactttttacatacaaaaatgtacaaggttaaacttttctgtactgaattacaaaacctgcacaagcatgtaataaaagagcacacttaaaaacattctgaccattatttagcctctaaaaattactgaagttcaacagtagtaaatagaggaagctcttacnnnnnnnnnnnnnnnnnnnnnnnnnnnnnngatttaatctactggcagttatacttaatgtaagtatttaaaaggtcacattgctattgaatgagtct

SEQ ID NO: 123399 - DNA, 2002 bp, Homo Sapiens
  misc_feature (62)..(73): n is a, c, g, or t
accttgaacttgaaagactttttggtaagtccccccggggctcctgtgggccccacataagnnnnnnnnnnnnagggaaccggtccttgggggtccttcaaaaggagatcttcaggctttgctggggcccctggacagcaaatggcccaggcctccagcaccagcttccccgggtccagatactgaatcgggctggcactccagtttcagctctctccaggccagggcccccagttcggaccttggtgggctcccccttcccctaggggccccacggtgaactggaaggggctcccaggcacgtgctggcccttgtacttcacgctgactgtgtgtgtgcccatctcagcgggaacaaagcggatgcagtaggtgtggttctccccttccacgatctcggcctcatgggtcttgcccgatgggctggtcacctgggctgtcatatcctggatgctaatttcagggattttcaggctgaggtcacaatgactaccaacgttggccactgaaggagcccgacgcctgcgggtgatgctctctttcacccggccctcgcctgtcaccttcacagagaaggggctgccaggcacgtgctggtcggcaaacttgatgttgatgatgtagttgcctggctctgtggggcagtaggtgaccctgcacgtcccgtcctccaggtcctctgtgttgatgtccaccttgctggggccctcaatggacaggctgagcccaccatagcctgcatcgcgggtatcaatgataaactctgcaggctcaaaggtgtggccttcgtgaaggccctgaccagagacccgaacacgactggcatccccaatttccgactggctgatcaccaccgggatggggctgctggccacgtgctggccatttttcttcacatgcaccaggtgctcccccgtctccttgggcacgaatgaaatccccacgtggccattacgcagccgcttcagcaaacagggctcctcccggcccgagggcgggaccacagtggccgtcagcaggctgagatccgtctctgagatgttgatggggatgtcggcagcagagccgacctttaggtgggacatacgcatggagtcgtcacctgtgacccgagcagtgaaggggctgcctgggacgtgctgttcattgtacttgactagaatgctgtagtcccccggcagcacaggcaggtaggacacgctgcatgtcccatcctggttgtcagtgcagctgatttctgctttggacgggccctcaatggccagagacaggcccccctctcctgcatccttggtgttgacggtgaaggtggcaggcttgttcactactccatgggtgaggccaggcccataggcagtgacatggccacagttgacgtaatccacatagaactgcaaggggcttcctgggatgtgcatgttgtcatagcggatgtccatctcgtgcaggccagcctcgctgggtgcataccgcacggtcacggtgccgtctttgttgtcagtgatggtgggctgcgccaccttgcctgagggcatccgaacctcccctgtgatctcgcccttcttgatggtgaaggggatgacaaggtcaaagggcctcaggctggtcacatccagcccattgacacccaccaggggcctctccggggcccaagtctgctggccgccctgggcgtaggtgtactgtggggccagctgctgagaccgtagagggggctgcaccgagggctggtccccagccagagccgtcacttggaaggggctgttgggcacgtgctcgccaccaaagcgcacacagatgacgtatttgcccggctggggggccgtgtagaagatgtcgaaagtgccgtcctcattctccaccacgtccacatccacctctgagccatcaggcgtgcacacggtgcacgtcactttgcctttgcctgccgccttagtgtccacagtgatcaccgtctcctccccaatctcctcgtgccgaattcgccacccaggcctcgctt

SEQ ID NO: 123400 - DNA, 1316 bp, Homo Sapiens
agtacatcccttatgaggctggcacctacagcctcaacgtcacctatggtggccatcaagtgccaggcagtcctttcaaggtccctgtgcatgatgtgacagatgcgtccaaggtcaagtgctctgggcccggcctgagcccaggcatggttcgtgccaacctccctcagtccttccaggtggacacaagcaaggctggtgtggccccattgcaggtcaaagtgcaagggcccaaaggcctggtggagccagtggacgtggtagacaacgctgatggcacccagaccgtcaattatgtgcccagccgagaagggccctacagcatctcagtactgtatggagatgaagaggtaccccggagccccttcaaggtcaaggtgctgcctactcatgatgccagcaaggtgaaggccagtggccccgggctcaacaccactggcgtgcctgccagcctgcccgtggagttcaccatcgatgcaaaggacgccggggagggcctgctggctgtccagatcacggatcccgaaggcaagccgaagaagacacacatccaagacaaccatgacggcacgtatacagtggcctacgtgccagacgtgacaggtcgctacaccatcctcatcaagtacggtggtgacgagatccccttctccccgtaccgcgtgcgtgccgtgcccaccggggacgccagcaagtgcactgtcacagtgtcaatcggaggtcacgggctaggtgctggcatcggccccaccattcagattggggaggagacggtgatcactgtggacactaaggcggcaggcaaaggcaaagtgacgtgcaccgtgtgcacgcctgatggctcagaggtggatgtggacgtggtggagaatgaggacggcactttcgacatcttctacacggccccccagccgggcaaatacgtcatctgtgtgcgctttggtggcgagcacgtgcccaacagccccttccaagtgacggctctggctggggaccagccctcggtgcagccccctctacggtctcagcagctggccccacagtacacctacgcccagggcggccagcagacttgggccccggagaggcccctggtgggtgtcaatgggctggatgtgacccgcctgaggccctttgaccttgtcttctccttcaccatcaataagggctagatcacaggagaggttcggatgccctccggcaaggtggcgcagcccaccatcattgaaaacaaagaacgaccgtgaccgtgcggtatgcaccagcgagcttggccgcccgaaatggaattccctatgacacatgcaaatcccaga

SEQ ID NO: 123401 - DNA, 2132 bp, Homo Sapiens
aaggtagcgaggcctgggtggcgaattcggcacgaggtttttttgagaatggaagcaaaactttattcctcttggctggagaagagaactagtgggtggttgtgtacaggacccccatccctcacccctcccagaaccaaagaagacaagcagcgccaccaaatggctccctctgcccaagtgaaagccgagaggtcagcggctggctggggaggcaggtgagcgcagcacggcacagggcaggggcggctgcagtgacaggcgggcggccagggcggcctgggccggggttgaggggaagagggcggggctgcttgggtagcggggcaggcttgggggctgccggctggcacgggccccagactcagggcaccacaacgcggtaggggctgcctgggatgtgctcgtccccccatttgaccaccagtgtgtactcccccttgtccttgagcaggtaggacacgctgtagagccggctgcccacgtgcttcaccaggatctcctcgcagggggtccttgggccatgaacccccaccagcagcatgttgttgcctgctttgctgcagtctactgtgaagctgctcttctggcctacgtaggccttgctcagccccaggcccttggccaccaccttgctggcgtcagcaggcccaggacccggggccccatgctggggggcacaggtggccttggtcagagagtctacaaacactgatgatgtctcgtggaggctgtggttgctgacgagacgggggcctgtgactttggccttgaaggggctgcccccaatgtggtaggggccgccgtacttgatggagatgaggtagctgccaggtgccatgggggtataggtgacgcggtagccctcagggcactcctggcaatccatcttcaccttggaggggccgtcaatggtcaccgacagggcaccagctcccgcattgctcgtgttcacgacgaactcagctgggttccctgtgacaccgccttccagacctgctccgtaagcagacaccaagcctgggtcccctccatgcccaggctccccaactcggatcttgaaggggcttccagggatgtgggtgccgttgaacttgacgtcaatcaggtaaacgccattctcccgagggatgaagcgcacagcatacttatcttggtcaatttctgtgacatagcactcctccagggctcctgaggggctgtgcaccttggcatcgatcgcccccttggccccgttcaggctgactgcaaaagaggctggctggttgacctttagccctgactcctgaaggctagaaacagtgaggcggcgggcgtcgccagacggagaagccacaggcaccacgaaggggctgtcgggaatgtgttcctcgttgaacttgactgagacttcgtagtcacctggctcctggaccacataagccacaccacaggagccgtccttgcggtcctcaaaagagatctcagccttgctggggccctcgacagcaatggccaggcctccagcaccagcttcccgggtccagatactgaattcggctggcactccagcttcagctctctccaggccagggcccccagctcggaccttgtgggctcccccttcccctaggggccccacggtgaactggaaggggctcccaggcacgtgctggcccttgtacttcacgctgactgtgtgtgtgcccatctcagcgggaacaaagcggatgcagtaggtgtggttctccccttccacgatctcggcctcatgggtcttgcccgatgggctggtcacctgggctgtcatatcctggatgctaatttcagggattttcaggctgaggtcacaatgactaccaacgttggccactgaaggagcccgacgcctgcgggtgatgctctctttcacccggccctcgcctgtcaccttcacagagaaggggctgccaggcacgtgctggtcggcaaacttgatgttgatgatgtagttgcctggctctgtggggcagtaggtgaccctgcacgtcccgtcctccaggtcctctgtgttgatgtccaccttgctggggccctcaatggacaggctgagcccaccatagcctgcatcgcgggtatccctcgtgccgaattcgccacccaggcctcgctac

SEQ ID NO: 123402 - DNA, 743 bp, Homo Sapiens
  misc_feature (568)..(568): n is a, c, g, or t
ttaaaaaacaaagaacactttattcccttgacagtttctgtacagcgacaccaggctgtgcaaagcccagtgtcgtcttcactgagcacattccccaggacgcctggtgcagccctcctctgccccaggccccaactagccacccctgtgcccactagcaggccctgtgccttcacagggatgaagccctggcactgagaatgcctgggaggcaccgtttgctggggagcagagggactgacctttggcttctttgtggctggaggtgttccaggcctggtgagggggtcccatactgttctctgctgagccctctgcacactttgggggatcctggctggcggtggtaggtgggccggagactcagttgtccgtcagctggccatgtccccattttatggacaggcagcctgaggcccagaggcggaaggatttctccttgccacagctgcatcacacttgaactgtccagacctccaccgctggcctgtttgctccccaccctagtcccgcaggctgatatggtgcctccagcagactccatggcttcccggagggtgcagggtcnccagttcaccctccagcaggagtggcagcagctggggtacccctagcagtggcatgtggagaagctggggtatgcagaggatccagttctgtgacaccaggaggcacaccaagttttcctctgttctctacacagaccagaggggtggcccacacccccccgggtggaggatgtg

SEQ ID NO: 123403 - DNA, 1271 bp, Homo Sapiens
  misc_feature (69)..(86): n is a, c, g, or t
  misc_feature (130)..(145): n is a, c, g, or t
  misc_feature (155)..(156): n is a, c, g, or t
  misc_feature (159)..(159): n is a, c, g, or t
  misc_feature (161)..(272): n is a, c, g, or t
  misc_feature (527)..(535): n is a, c, g, or t
ggggggagaatcccaagccccttgttttttgccgcggtgtgttctttggaaaaaaaagttttggccccnnnnnnnnnnnnnnnnnnggggccgggcgggccaacaaaaaaaggttttaaaaaatttcttnnnnnnnnnnnnnnnnccgcaaaaannttngnnnnnnnnnnnnnnnnnnnnnnnnnnnnnnnnnnnnnnnnnnnnnnnnnnnnnnnnnnnnnnnnnnnnnnnnnnnnnnnnnnnnnnnnnnnnnnnnnnnnnnnnnnnnnnnnaagtatttattgaataaaatgattctatcaacactgctactgtattcaagccagtgcaataaaaaagtgggtggacagaggtcattcactttgactttgcctgccccctccaaatccccagtgtaaacaggaaaatgagaagtcacaggtagaggacatgctgtccaggcccatgtaaccaggcatgtaacatacaaaggaagcccctctggttaactagtcctgaagaaggtaagcctcaagtatgcagctttnnnnnnnnngtagaggcctcagctcatttgtgaaaggaagcaagagccataattaatgtaagtcctttgggaacctcattctggctgtgtgtaggtttcctggggcccctacataaatgggtaagacgaagtgcttcaaacaaactgtacggctccctttttaatgtctgaaggtctatggggactgtctcctaggatctttgcatgtctgttgaaacaaggcagctggggaacagtacttgtgctactgagtccataggctcatctgttatttgcctggggagccaggggggtaaattcccgaatccagcattgctctcctgcgggctgtttccttggcaacactgtggtttagccgtctcagtcgttcctgagcattctgtagaatgttgttaaccaagacaacgcgtcgccgggcattaagtagcttcttaacataggggtcaagatccagggccaccttctgatcctcatttatgcggcacagttctgtggctaggttgtcaatttgttcccggagctctacctggctctctctgacggcgtgtacgtgagagtcgagctgctgcacagcgggtcgcaggaactccagcagcccttcggcgaaaaggtcgcggcctgtgggccccgccaccggggtccctgcccccgatacagcggcggaaccagcccccgccatcacgaattgtcctgaagcccgtaacccggacgcgtgggtcgacgatatcccgggaattccggaccg

SEQ ID NO: 123404 - DNA, 1495 bp, Homo Sapiens
  misc_feature (72)..(72): n is a, c, g, or t
  misc_feature (1429)..(1438): n is a, c, g, or t
tgacacccagctcgctgcctcctagcattcacttctggagcaccctgagtcccattgcgccccgtagcccgnccaagctctccttccagtttccatccagtggcagcgccaggtgcacatcccttctatcagcgtggatggcctctcgacccccgtggtgctctccccagggccccagaagccatgactactaccaccaccaccaccaccccttctggggtcactccatccatgctctctccagccagccatctcaaggagaaacatagttcaactgaaagactcatgctctgattgtggtggggtggggatccttgggaagaattactcccaagagtaactctcattatctcctccacagaaaacacacagcttccacaacttctctgttttctgtcagtcccccagtggccgcccttacacgtctcctacttcaatggtaggggcggtttatttatttattttttgaaggccactgggaggagcctgacctaaccttttagggtggttaggacatctcccccacctccccacttttttccccaagacaagacaatcgaggtctggcttgagaacgacctttctttctttatttctcagcctgcccttggggagatgagggagccctgtctgcgtttttggatgtgagtagaagagttagtttgttttgttttattattcctggccatactcaggggtccaggaagaatttgtaccatttaatgggttgggagtcttggccaaggaagaatcacacccttggaatagaaatttccacctccccaacctttctctcagacagcttatccttttcaaccaactttttggccagggaggaatgtcccttttgttcttccccctgagaagccattcctttgtctgccaacctccctggggtcctgcctgtttcctcccaatggagggttttctggggggtggtccccgtctggggggcccctccagccagtactccaggtctccctgtctctcccccgctgccattttgatagtataatctatttttaaatggggcttttcaataggggagagggagtcatctcttcctatatttggtggggtgggtgggaaggaagggatttgggggggaatcttcctgccgcctcccccactccaagtgtttatttttgataccaaacatgaattttcagttccctccctcccagccccccaatttcctgcgggcgggtacaaaggaccctttcaatgtccctggagttgggagggaggaatgggggacataaagcctgtcctgtctctattctaggcaagagagagtgggttcaaaagactcctgggctcacctgttagcgctggcccagcccaggccttgggacctgggggttggtgatttgggggacagtgctacactcgtctccactgtttgttttacttccccaaaaatggaccnnnnnnnnnnctaaagagtcccacgagaatggggaattgttcctgtaaatatatatttttcaaagtg

SEQ ID NO: 123405 - DNA, 822 bp, Homo Sapiens
atccctggtgtttttgtttccagtgaatagtcgcttaataaaattttattgagaactagtaagtcaaatactttacagaacatagaaatacatatgatcccagcctttcccattaaatgacaacataacattggggtagtttccctgaatatcccaaacagtttgctttataattagagaaacagttcgtctacagctcaatagtagagaaaacacaggaatgaggtgctcttacttagcggaagcagaaatgaaattggaattcagtgtaaataataaaggactacagatgagttctagcagccaaaggagtatacatgtaaatagtcactcttcacattttctatttctaaagtagctagtaaaaggcagggcatcgtaagatcagacaaaaattaacctgaggacatagtagcagagtatgtctctcaattcagttatttaggaaatgttaataaagaaagtaaccctagatccacttttacctaaaactctacctaccatgaaggtttttgatgccaaataattggaactgacatcaaagatgaaaagagagccacatgactcaggattaaagactgacaactcaggccacaccgccgtccatggtatctatggaaataggataatgttaactttttacatgatgaaaagttaactatttgcaatttctaaattactatagaaacagaaacatgtgacaggataaatgaacactgcttgatgacctttgacaacctttgaaggttttattacctagtccctgtatagagataagagatgatggtattgagttttctaggaaccaacttctgggaaaga

SEQ ID NO: 123406 - DNA, 1142 bp, Homo Sapiens
  misc_feature (1055)..(1101): n is a, c, g, or t
ggcctgggtggcgaattcggcacgaggaccgcacctggcctatgagtggtcttttaattaggaacaaatctaatggaaaggagagttgactgaagttggcccacaggattgtgagctgggcagtgccttcatgaaggcttgccaccttgggacgccccagtttactggggtgtcttgcggagtgcagaaggctttctggcagctgcctgggtttggccagaccctgcctcccctcccgccggccaacccctagtccccttcctgtctccacttgcattcaggggtggctgctgttctgagaacattagaactgggaagagagatggagtcacatggatttttggtgggcattattctgaactttcgtatccaagttagtcccccttattccactgtggcattgccgttctaagcagttacctgatgcctgctgctgaagagctgctcacaggaggcggcggcggccctggcactgccccttgcattaggtcttgtgtttgatgtgttcttgtgaatttactttgtcagaacaaaatatttacgcgttgggttcaggaatttcttttagctccccatctggctgtgaaattcaggaaacctcccgttgcctagtaatcaccccatgtaggtgtacattgtgacaaagtgcatctgaccactaaggggcccccttggtgaccccagcacattcacagcagtgttaaaatggcctgcattttggagatgctggctggcctttcagtgcctcccaggaagacacatggcctttccctcttcagatgcctgaagggagtgctttgaggcaggtgatgtgctgggagtgtgggcggcctccctctggccccggggccctctgtggaccttggctccctccgtggacctgggcttcgtggtgagcactgcagcctccctgggcattccctccagcgccagcaccactgcaacatatagacctgagtgctattgtattttggcttggtgtgtatgctcttcattgtgtaaaattgctgttcttttgacaatttaagtgattgttttgtttactgtaagttttnnnnnnnnnnnnnnnnnnnnnnnnnnnnnnnnnnnnnnnnnnnnnnncctgagcagcggccgcaagcttattccctttagtgaggtta

SEQ ID NO: 123407 - DNA, 726 bp, Homo Sapiens
  misc_feature (154)..(175): n is a, c, g, or t
tttctcagagaaaatgtagctttattatgacataggagagactacaaagcactgggggggaggaggagtgacacagctcctcaaaatggaaggggaaaggaagagtaaacatcttggtaaataaagtctccaaccacagcacagtcattggaannnnnnnnnnnnnnnnnnnnnncaaacttacagtaaacaaaacaatcacttaaattgtcaaaagaacagcaattttacacaatgaagagcatacacaccaagccaaaatacaatagcactcaggtctatatgttgcagtggtgctggcgctggagggaatgcccagggaggctgcagtgctcaccacgaagcccaggtccacggagggagccaaggtccacagagggccccggggccagagggaggccgcccacactcccagcacatcacctgcctcaaagcactcccttcaggcatctgaagagggaaaggccatgtgtcttcctgggaggcactgaaaggccagccagcatctccaaaatgcaggccattttaacactgctgtgaatgtgctggggtcaccaagggggccccttagtggtcagatgcactttgtcacaatgtacacctacatggggtgattactaggcaacgggaggtttcctgaatttcacagccagatggggagctaaaagaaattcctgaacccaacgcgtaaatattttgttctgacaaagtaaattcacaagaaca

SEQ ID NO: 123408 - DNA, 1217 bp, Homo Sapiens
atatgtataatttatttgttttcatataatttagagaaaacagtccttaaggataatgattactttaaaaagaaagcccttaaaatcatggaagaagtcacttgagaagaaatccatccctcaatgggtcgtcatcttctattataaagcttgctgtacccgtgtaatgggcttgtcctgatacttccactataacagctttaaaatcaccacatttcgcttccctcacagctttccctgtgaatactgagccagttgcactgcttttgaaggctctcatctggttcagttccagaagccctttgtgatactgtaaggcaattcgggctgtcactcctgagccagtgggacttctgtcaacctgttcatctgcaaaaacacaaatgttggtggttggttccttggtataagcatcttttccatctgttaatatagttccatataaaaaggcaaggtcttcactatcaggatgattaattttaaactgagctttcactgcctctgtcactgcactcgctgcatccacaaggtccctggtctttgcagaacaaatgtctagtcctaacttttcagcagtaacaaatgcataaaatgcaccgccatatgcaatgtccaccatcacctttccatgtccaggaacatccaccatgagatctgtggccagcacgaaggccgggacgctgtggaagcgcaccggtccgtggctgcggccgtcctcgcatgccacgaaggcggtcaccagcccgcaggggcagtggatattgacgcgggcctcgcgggtgcccgcagggggcgccggcacaagcccgaagtccaaagcgaagcggcccagcgccagcactgcgtggccgcacatggagctgtagccctcgttgtgcaggaacaggacgcccagatgcgcgtccggcagctcgctcgggactaggaccgccccgtacatgtcccggtgccctcggggctcgaacatgagccgtcgccgcacgtggtcaaggtgctggcgcatgtagcgccgcttggccagcagggtgggcccagacacctccggacaccccgccagcacgatacgcaagggctcgccgcccgtgtgcatgtccaccaccgacagcaccggcgtccctggatcatgcgggggcagccggggcaccgccagcgcgctctccatggtctgcgtcgggggagacgagtacaggtcccgcagctatggcttcaagcccgac

SEQ ID NO: 123409 - DNA, 1357 bp, Homo Sapiens
  misc_feature (1235)..(1269): n is a, c, g, or t
gtacgtgagcacatccaaggaggcaggggtggagtggaagataagaaagtggcgatggttgagtgatggtagatgacctgctgcagctgttagcattgaccctgttcactagtcgtgcttggactataaggcatagggtgggtttctcggtgtgtagcaagtgtgtcttccatgtggaagtgcgatggtttggaagtaattaaatttagagccccgaggttatgaaaccttagcctcaagatatgtgttgatgcggagcatggggtgtcgttacccatcgtttcaagaccccgtgtttcagtaccagatcagtgttgttcgtggtagcaacactgtccattgttaatgccatgggattccatgacgctggggggcactcgtgtgtatgtcaagttaagtgactaaacatcactccttatgatagtttggctactgcatgaggacgccgcaagttgcgcccaggtaaaggtattagggaagtatgctttcaagtagaggtgggtgcagtgcctttgggtgaatccagtagcattgcctcaatgtccagaaagccaacaccagggccattggattgccagcaggatgctggcccaagcccattggcccaggtcccccctcctgagaatttcccaaagggatcctgcccattcaggacatcataagggtgatgacagagtcagtctgacaaagactgacacccccttggggagggaaacactccagtttgctagcaggtgaacacaagcaaagacttataggaaagtactcatagagtcaaagtatgagcatagcaaaggtcagggcttaatgcccaatgccccctcactagggcattggtttaagtctttaggtaagagggacagctggctggtcagttccggtcctcttcatcctttgccatcctggtcctgggggtcagtgagtggctgctttgtatgttggtgggatccaggaaaccgtgctcctagtgccctcgtgaggtgtagatgggcagcaggccccttggcagcagctcagcatggagaggaggtggtccttgaagacaaggaggtggacggatgatgtcatccctgaggagagacccgggtgagggatcctctcgtgggcgccccagctctcctgaggagccgccgccaaggccagcgagccaaggcgcgctccctctctgctctccgccgtctgcccccggccgtaatggccgaattcccgggcatatgtccggtaccgtcgactgnnnnnnnnnnnnnnnnnnnnnnnnnnnnnnnnnnncggccgcttcctcgctcactacttcgctgcgctcggtcgttcggctacagccgagctagcgccctatagtgatgatcaagttctcccc

SEQ ID NO: 123410 - DNA, 990 bp, Homo Sapiens
  misc_feature (474)..(499): n is a, c, g, or t
  misc_feature (578)..(595): n is a, c, g, or t
  misc_feature (640)..(648): n is a, c, g, or t
  misc_feature (773)..(781): n is a, c, g, or t
tgactcgctctactccgtggaagcacgctcacaaaggcacgtgggccgtggcccggctgggtcggctgaagaactgcggatggaagctgcggaagaggccctgatggggcccaccatcccggacccaagtcttcttcctggcgggcctctcgtctccttcctggtttgggcggaagccatcacctggatgcctacgtgggaagggacctcgaatgtgggaccccagcccctctccagctcgaaatccctccacagccacggggacaccctgcacctattcccacgggacaggctggacccagagactctggacccggggcctgcccttgagtagagacccgccctctgactgatggacgccgctgacctggggtcagacccgtgggctggacccctgcccaccccgcaggaaccctgaggcctaggggagctgttgagccttcagtgtctgcatgtgggaagtgggctccttcnnnnnnnnnnnnnnnnnnnnnnnnnnggcgctgtgatgcggttccaaagcacagggcttggcgcaccccactgtgctctcaataaatgtgtttcctgtcttaacnnnnnnnnnnnnnnnnnncaaagaacgaaaagagcacaacagacgaagaacagaaaaagaaannnnnnnnncgccgccaaagaaccccccggggggcgcccgagtaggggacccggcgtttgcgtacgaggggggccccaaaagaggcaccagctatataaaagcgaggacgcgggcggccgcggcttaaaccgannnnnnnnnaggcgaaaaaccggcgactgggacaacacttgtgtgaggagaaaccccatatgggaggggggcacacattgtgggggacaactccccgaagagaatattatgcgctcgtgggggacatattcaccttgagggttatcggtgttaacgcagcgaggtaatgcgcggcgcgagacaatgtgtccacggcagtgtattgagacaatttccgg

SEQ ID NO: 123411 - DNA, 890 bp, Homo Sapiens
  misc_feature (697)..(747): n is a, c, g, or t
  misc_feature (749)..(804): n is a, c, g, or t
tagcgcccctcacaacagccctgtaggtaggtgaaggagcccacttcccacatgcagacactgaaggctcaacagctcccctatggcctcagggattcctgcgcgggtgggcaggcgtccagcccacgggtctgaccccaggtcagcggcgtccatcagtcagagggcgggtctctactcaaggggaggccccgggtccagagtctctgggtccagcctgtcccgtgggaataggtgcagggtgtccccgtggctgtggagggatttcgagctggagaggggctggggtcccacattcgaggtcccttcccacgtaggcatccaggtgatggcttccgcccaaaccaggaaggagacgagaggcccgccaggaagaagacttgggtccgggatggtgggccccatcagggcctcttccgcagtttccatccgcagttcttcagccgacccaggcgggccacggcccacgtgcctttgtgagcgtgcttccacggagtagagcgagtcaggaagcagtgggttgaagaggaaattggaggtgaggaaggaagacagcaagtgtagacaggcctttcaagaagcttggctgatgcaaggagagcccgtggacaagggctgcctggagtgctgttggagaataaataagacaagtaagacaagcaagaggggtgggaagggactgacctgtcaaaccttnnnnnnnnnnnnnnnnnnnnnnnnnnnnnnnnnnnnnnnnnnnnnnnnnnncnnnnnnnnnnnnnnnnnnnnnnnnnnnnnnnnnnnnnnnnnnnnnnnnnnnnnnnnattcccccagaaaaggataggaagatcttcagagaggtggggcgtgcctttggtgattcagtagcatgctcattccagaagcccac

SEQ ID NO: 123412 - DNA, 1081 bp, Homo Sapiens
ttttttttgttaagacaggaaacacatttattgagagcacagtggggtgcgccaagccctgtgctttggaaccgcatcacagcgcccctcacaacagccctgtgaggtaggtgaaggagcccacttcccacatgcagacactgaaggctcaacagctcccctaggcctcagggttcctgcggggtgggcaggggtccagcccacgggtctgaccccaggtcagcggcgtccatcagtcagagggcgggtctctactcaaggggaggccccgggtccagagtctctgggtccagcctgtcccgtgggaataggtgcagggtgtccccgtggctgtggagggatttcgagctggagaggggctggggtcccacattcgaggtcccttcccacgtaggcatccaggtgatggcttccgcccaaaccaggaaggagacgagaggcccgccaggaagaagacttgggtccgggatggtgggccccatcagggcctcttccgcagcttccatccgcagttcttcagccgacccagccgggccacggcccacgtgccagggcacgatcacgaggggtctctgggatgggacaggagtctgtccatagccctgaggccaggcccacaggaggaggcactggaggatgcttggcaggagatggggacaccagcaggggcttgtcggggacactgggaacctgctggaaacaggcagctggagtgggagtggctcctggggcaggggagtggtactcagaccacaggagggccaggtgaccacaggtatgggcttggcagggagaaccagcctgctaggcagagggctgtggagctgagccctggagcccagggactgaggcagagaaggggaggttggtcaggcccacctcaggagacagagcaaagcagagtgccgggtgggtgaggaagctggccgctggagagccaccagggagagcaagccagcagccgggcagaagcagagcctgcagatgctccgtggaggtttcccctgctggtcctcggcatgggaggtgggccccagcagctgctagagagtgaaggagctggaccaagccccgggggagg

SEQ ID NO: 123413 - DNA, 732 bp, Homo Sapiens
ttttttttgttaagacaggaaacacatttattgagagcacagtggggtgcgccaagccctgtgctttggaaccgcatcacagcgcccctcacaacagccctgtgaggtaggtgaaggagcccacttcccacatgcagacactgaaggctcaacagctcccctaggcctcagggttcctgcggggtgggcaggggtccagcccacgggtctgaccccaggtcagcggcgtccatcagtcagagggcgggtctctactcaaggggaggccccgggtccagagtctctgggtccagcctgtcccgtgggaataggtgcagggtgtccccgtggctgtggaggctgagagagacacagttgcagatgaaggccacctgctcccggcctcgctggccgacaagagttcacagacagacaggcaggccccaggagggagggagaggagagcaagtccctgctcacgggctcctagcagcatggagggtgaggggagcacccagccaccagctcggcctgtctacctagtgcccctcaacttctggcgtaccctgccctaccttagactcggcccacttgcagaaacttctggaagcatcactctagtcctgacgcccacctacaactggcaacctctggtttctctcaccttgataacccagaacccaggactctcagcctctctaaatgctatccccagctcttctgcccaacctatccagctttgatgtttttcct

SEQ ID NO: 123414 - DNA, 2417 bp, Homo Sapiens
tttttttctgttcttaaataatttattttttaatgttgactcttgtgaaaagttacatttatttagaaaaacttgaagaaatccaacaaagaataggtggctttctattagggacaattaaatgtgcaaatttcaaatactttttataataagtataaataattactttttttcacattaagaatggaaataatgatcaacacaaaatattaagatatcaactttaagagaattagatgaaaacactgaagtttatttggtatctttggaaagaaattataaagattcgtctgggaaaaacttagggggctctaaggggaaagtgtgcctaatagtatgagtaaaggctgtgtagagttatggatcacaaatattttcaggccataagtacagacccccaaaatggcagcctttatctctggggaaaatgcatttcccctcctttgttttgtttcttctagagcaaatatgacagcaaccacaaagcacacagagaaactgtaagccagcaacagaaagagatttcctcatactcatggttactggcttttgctgtcccaataccagggtaccatgggatgcaggggacttcccagcccccccaggacacagtgttaacagaaaataaaaccatcacaaaaggccacatctttccctgtgaccattgccagtctcatccctgctccttccctatctcatctccaaggaggtaggacactcagaggcattaacagaacacagagtatagttttttattacatagctggagtttcataaggagaagcacgaaacatcgatgaatatgtatgtataccttggatgcaattccttctttcctggggaggcaagcaaaagtgtatcaaagaggccaatttactccctgtggtcaggaacttgcccacagcctgactcaaagcaaggatgttctctcaggagaacactgtggcattttccccagagctgaagaaatatcttcacttaaataatcttgaagtttgtaataaaataaataaagtgaattacacaaaaaggactagagctccctttaaaaaggcagctggttgagtttatgcaagcagtgtatacacaagctcatgccccaacaacaaccagaaaacaggttattattatttagccttcctattgtacttctagggcagcatttcaatataatttaaaaaaatccctcatacataatgtaagggtatattatatatgtacacacttttactcctcagttcaagctaacttctttagaagtaaagacagtaataacccaaagagttacacgtcttcccagtaaaatattctaattttttaaaaggtgcatattataaagagcagcttgtttttctgtcaatgtgaacatgttcagtctcacgcagcctcagaatcacagtccatggatggttctgcatttctgccgggtcctcaggaaaggaaccgggcaggtagggaaaaaccatgaactacaacactctctgaatacgtccattttccctgagcttccttgagcttcttgcagagggcctcgctgccatgaggatctggcttcacatctctgagagatgctgggggaggggaggtggaatggctctggcttctccaacccacgcgacttgtgtgtcttttccctttctcagccaagacgatgaagcagtcctgatgcgcagggtgcaggggcctcggccagtccccgcacaccttccaagtccaaagaagttcctggcctcctgcttggtaggagaggaggaaccttgggctgaatctgacatcatcccttgccagttacaagctttgctttctaaggccacctgggaacactcccgggttaccaaacctgagcatcgtgggcaccacgaagagcttatctttcctctcctgctcagacacccttaagcccactgttgcagtggcagctgaggggttcagaggatagcaccatgatgactgacagctcgaggccccacttcttgcaggaggtgacccacctgtttccggttagccatacatctgcttgaactgaaagcattcgttgcagtagccgttgcacttggcattgccaaaatgatcacaggcgggggcccggcaacgctgcttgggggggtcttcgggggcaggctcaccccggtgggccccagggcccatcctctggttgggatgctgacactccatgcagagctcctcgctgcggcagccaggatgttcttgcaggaggcccgggcgcacttgggccttgaggtgctttgtgtggttcgaggcacatctctgcgctggctcgatctcagttgctcttctgtccttttggcctcatgaaatctctgattctgagcttcaatgaaacacttctggcagtatccttcaaaccccggccgtaatggccgaattcccgggcatatgtccggtaccgtcgactg

SEQ ID NO: 123415 - DNA, 1974 bp, Homo Sapiens
  misc_feature (303)..(368): n is a, c, g, or t
  misc_feature (1295)..(1339): n is a, c, g, or t
  misc_feature (1343)..(1365): n is a, c, g, or t
  misc_feature (1468)..(1485): n is a, c, g, or t
  misc_feature (1766)..(1783): n is a, c, g, or t
gcaacaaaagaaactatttattttggaatatgcattaccagtacaaattaggagactgtaaaacctacaccgtgttagtatcattagagaacacaaaagttcagttggaatcaaaagggacagaagcctgtgctctcacagaagcagaaaagcttaaactttcaaaaccaaaacagagcagagctttgcaggtttatattctgaataataagaaaaggggaggggtagggggagaataaaaccaacaaccaaaggaaagcatttcaaattgaaaatgccaaaggaaagaagtaataagagagnnnnnnnnnnnnnnnnnnnnnnnnnnnnnnnnnnnnnnnnnnnnnnnnnnnnnnnnnnnnnnnnnngattccaggaagctttgagctagggattgaaaccataaaggtgatgtgaaaagctcatcattattttgttgtgacttcaagagtacaagtgttcaggtagaaatatttcctaaagcattgctccacaattctgcattctttctttacttttcttgcttaagttctgaccactttctgaacataatttgttgaatgatggtatttaaaatgaatttttttccagataatatggctttcttttttcctctaataaaaacattccaaatcaagccagttttgcaatttgctttaagcagctgcctaagtcagaggttactaagaggtgtactctgtgaagtaaacgtaacctcttagcattaaaactacagcattgagcctggcccaatatctcattaactcttcatccaaaaccaggactcagctggcagactggccccaaggacttcttcctgcatgtagtttacttaaccaatggtgcccatcataccagcatctcctgcgggactctcctggaagaaaaggcctctttggttggaagaggcctcatggaatgtagttattaattagggagaaataaaacaaagtacttggctgtgataatcagaatcaaaaacagcaaaaacctttcctgatagcataaaaagttcccttggactaaacgtttttgaatttttaaaaggctaaaaggagaagtatgtccctgattttatttttctcagggagtgcatgagtgtcccactttttggaaatgcaggtgagcaaggaggcatcaacatgggtttgattttggtttttggcattaggtgaattgtgaagcaaagtagaagaacaagcctacttgttgttactcctttgcccaagtcatcttttcacatcaccttgtatacatattgaagaaaaacagcaaggtcataatccggacaattnnnnnnnnnnnnnnnnnnnnnnnnnnnnnnnnnnnnnnnnnnnnngcannnnnnnnnnnnnnnnnnnnnnnaagagcaagaatcaagaaaagaaaagaatttatttgtgggtgtcaaagttaataaacataataatgtgttaggttgtacctattatgctcactattccaaccnnnnnnnnnnnnnnnnnnagtttacaaaatgaattactgtcacttttaaacattgtgaaacaagaaatggatgtgcacaactcgacacttttctagcattcttgaactaattcacaaatgcaagaaaataaaagaaaaatgagggaaatgatgaatgtaggtagtctggtgttaaaaactaatgcaggaatgatgcgcattgtcacagaaagaagaggggaaattccccatcctgttttgcgtgctatgagggtcatttttaaaatttttattataaacactattaaattcagaccgcnnnnnnnnnnnnnnnnnnctttatctgaatatacagaacattcattatcaatgttcatcatcatactacaagaacgagacacagtcgcaagaaaccatggaaaatgttcgacgcgtgggcgacgcgtggcgacgcgtgggtcgacgatatcccggattccgaccgtaccagcctgctttttttaacgcgctgttctatagtgtccatgg

SEQ ID NO: 123416 - DNA, 342 bp, Homo Sapiens
tttttttcaaaagaaactatttatttggaatatgcattaccagtacaaattaggagactgtaaaacctacaccgtgttagtatcattagagaacacaaaagttcagttggaatcaaaagggacagaagcctgtgctctcacagaagcagaaaagcttaaactttcaaaaccaaaacagagcagagctttgcaggtttatattctgaataataagaaaaggggaggggtagggggagaataaaaccaacaaccaaaggaaagcatttcaaattgaaaatgccaaaggaaagaagtaataagagagaaaaggagaaaaacattgaatgttttatttattttaac

SEQ ID NO: 123417 - DNA, 660 bp, Homo Sapiens
  misc_feature (117)..(129): n is a, c, g, or t
  misc_feature (602)..(602): n is a, c, g, or t
ttcttctgactaggtatttattaagttctaaaaccttgaataactgctattttaaaaattcacactaaaagaaaactagaaatgttaacatcttttacagagggcagtaagtggccnnnnnnnnnnnnnaaaattataattgcctaggagaaaggtgagctaatctctttggaagtgtcatcagctggtgaacttcatcttggtctccactttatgtctttcactccatgaaaatgtcttttcaaagcagtgttatccgcccatggtgagtttaaataggcatcatcatcattttcttccaatctctggaaataagtatgttttattcaggcaggcatttcaggaaagtgttttgcacataaagagactgaagaaagagtccatgactgacctccccctctccctgccctctaggagcaggatactgccatgtctaacaccaggggacacctggcaggaccccgacagacctgcagacagaagctctagaaagacccctccccggcattctgcagagctcactgctccccagcagccccaggtaaggcaccacaggctatgtgtgggcgccagcactgcagaaagccatctgtcccctgctnacttgagctcctcttgtcttctgtgatagtacagcatcagctgcttctgctcctcact

SEQ ID NO: 123418 - DNA, 1023 bp, Homo Sapiens
  misc_feature (115)..(128): n is a, c, g, or t
  misc_feature (743)..(891): n is a, c, g, or t
  misc_feature (905)..(906): n is a, c, g, or t
cttctgactaggtatttattaagttctaaaaccttgaataactgctattttaaaaattcacactaaaagaaaactagaaatgttaacatcttttacagagggcagtaagtggccnnnnnnnnnnnnnnaaattataattgcctaggagaaaggtgagctaatctctttggaagtgtcatcagctggtgaacttcatcttggtctccactttatgtctttcactccatgaaaatgtcttttcaaagcagtgttatccgcccatggtgagtttaaataggcatcatcatcattttcttccaatctcttgagctcctcttgtcttctgtgatagtacagcatcagctgcttctgctcctcactgctaataataggctctcgggctggagctccctgtcccctttgctgaatcttggcgataattttggttttttcattcttccccacgtagtctgaaagcttcttcgttcttctcagctccttggctgcccaccacagctgcgcctctgcctctttaatgacgttgagccctgcctgtgttcccgacaagtcttccttattttcaaactccatgcggatgggatcatacggtggcaaccccatggggtaaacaatcatcaccgcgcctcgaagctggtccaaggcatctttcaccatctccatggtaacacagacaccggcttccacttgtttcttagatattattgctttggcttcttctatagtctcctcgtgccgaattcttnnnnnnnnnnnnnnnnnnnnnnnnnnnnnnnnnnnnnnnnnnnnnnnnnnnnnnnnnnnnnnnnnnnnnnnnnnnnnnnnnnnnnnnnnnnnnnnnnnnnnnnnnnnnnnnnnnnnnnnnnnnnnnnnnnnnnnnnnnnnnnnnnnnnngctactcacataanntgcgtgcgctactgccgctttcagtcgggaaactgtcgtgcagctgcataatgatcggcaacggcgggagaggggttgcgtatggcgccctcgctcccgccatgatcgtggccggcg

SEQ ID NO: 123419 - DNA, 1425 bp, Homo Sapiens
ccctgagtggaaatctcgggccccagaccagtcgattgggaggtccgccctccccttcagcgacttggtctgtgttttggcagttgccgcgacaacagtcacttccgggaaggggctctgcgaatctccttccgtcggtccgctcagaatcagctgtcctctcagactgtgtgggtggtttccccggccgcagctccgtacgggcttggattgctgggcctcggtgcaccccagcctcccccactcgggttctgagcttgagctggcggctctttaactctgcttcactgttgctcttggcaacatccacttccgggagcgagtgccgtttcccccgctcaccgcgggctagggagcgtgggattccggactgtgagcggctgttagtgcgtcgcagctgctggcgatccggcgaccctcggccggcaggacccgcgggccacgcagccggggccttctcaacgcctcagtacctcggcgggaccgccatggttctgctgcacgtgaagcggggcgacgagagccagttcctgctgcaggcgcctgggagtaccgagctggaggagctcacggtgcaggtggcccgggtctataatgggcggctccaggtgcagcgcctctgctcagaaatggaagaattagccgaacatggcatatttctccctcctaatatgcaaggactggaccgatgatcagattgaagaattgaaattgaaggatgaatggggtgaaaaatgcgtacccagcggaggtgcagtgtttaaaaaggatgatattggaccgaaggaatgggcaagctccaaatgagaagatgaagcaagtgttaaagaagactatagaagaagccaaagcaataatatctaagaaacaagtggaagccggtgtctgtgttaccatggagatggtgaaagaatgccttggaccagcttcgaggcgcggtgatgattgtttaccccatggggttgccaccgtatgaatcccatccgcatggagtttgaaaataaggaagacttgtcgggaacacaggcagggctcaacgtcattaaacgaggccagaggcgcagctgtggtgggcagccaaggagctgagaagaacgaagaagcttttcagactacgtggggaacagaatgacaaaaaccaagattatcgccaagattcacgcaaaggggacacggagctccagcccgagagcctatattaggcactgaggagcagaagcagctgatgctgtactatcacagaagcacaagaggagctcagcagatggacgaacatgatgatgatgccctattaaaactccaccaggggcgcataacactgctttgcaaaggacattcctggagtgaaggcataagtgccgacccagaggagttcacagtgtatgacttccaagagatagctcaccttcttctagcaattaattt

SEQ ID NO: 123420 - DNA, 1309 bp, Homo Sapiens
aaaattataaaatgccttggggagaaaaggggagcttaatttccttgggaaggttcatccagaggggggaacctccattcttggtctccccccttaagttttttcacctccccggaaaatggttttttcaaagccagggtattcccgccccttggaagtttaaatagccatcatcatcattttcttccaatcctcgggaggtccctctagtcctcggggaatagtacagcatcaggctgcttcggtccctcactgctaataatagggctctcgggctggagctccctgtcccctttgctgaatcctggcgataattttgttttttcattcttccccacgtagtctgaaagcttcttcgttcttctcagctccttggctgcccaccacagctgcgcctctgcctctttaatgacgttgagccctgcctgtgttcccgacaagtcttccttattttcaaactccatgcggatgggatcatacggtggcaaccccatggggtaaacaatcatcaccgcgcctcgaagctggtccaaggcatctttcaccatctccatggtaacacagacaccggcttccacttgtttcttagatattattgctttggcttcttctatagtcttctttaacacttgcttcatcttctcatttggagcttgcccattccttcgtccaatatcatcctttttaaacactgcacctccgctgggtacgcatttttcaccccattcatccttcaatttcaattcttcaatctgatcatcggtcagtccttgcatattaggagggagaaatatgccatgttcggctaattcttccatttctgagcagaggcgctgcaccttgagccgcccattatagacccgggccacctgcaccgtgagctcctccagctcggtactcccaggcgcctgcagcaggaactggctctcgtcgccccgcttcacgtgcagcagaaccatggcggtcccgccgaggtactgaggcgttgagaaggccccggctgcgtggcccgcgggtcctgccggccgagggtcgccggatcgccagcagctgcgacgcactaacagccgctcacagtccggaatcccacgctccctagcccgcggtgagcgggggaaacggcactcgctcccggaagtggatgttgccaagagcaacagtgaagcagagttaaagagccgccagctcaagctcagaacccgagtgggggaggctggggtgcaccgaggcccagcaatccaagcccgtacggagctgcggccggcctcgtgccgaattcgccacccagcctcgtacctagccctatctt

SEQ ID NO: 123421 - DNA, 632 bp, Homo Sapiens
  misc_feature (46)..(230): n is a, c, g, or t
  misc_feature (232)..(291): n is a, c, g, or t
  misc_feature (309)..(332): n is a, c, g, or t
  misc_feature (360)..(438): n is a, c, g, or t
  misc_feature (461)..(489): n is a, c, g, or t
ctcgtctccacttaaaatacaaaaatgccggccgcggcggctcatnnnnnnnnnnnnnnnnnnnnnnnnnnnnnnnnnnnnnnnnnnnnnnnnnnnnnnnnnnnnnnnnnnnnnnnnnnnnnnnnnnnnnnnnnnnnnnnnnnnnnnnnnnnnnnnnnnnnnnnnnnnnnnnnnnnnnnnnnnnnnnnnnnnnnnnnnnnnnnnnnnnnnnnnnnnnnnnnnnnnnnnnncnnnnnnnnnnnnnnnnnnnnnnnnnnnnnnnnnnnnnnnnnnnnnnnnnnnnnnnnnnnngagtgagacaccgtctcnnnnnnnnnnnnnnnnnnnnnnnnttatccaggtgtggcggtgggcgcctgnnnnnnnnnnnnnnnnnnnnnnnnnnnnnnnnnnnnnnnnnnnnnnnnnnnnnnnnnnnnnnnnnnnnnnnnnnnnnnngacgggagtgaaattccatctcnnnnnnnnnnnnnnnnnnnnnnnnnnnnncatgccgtttgagtactgtgtttttggtgttgtccaaggaaaattaaaaacctgtagcatgaataatgtttgtttttcatttcgaatcttgtgaatgtattaaatatatcgctcttaagagacggtgaagttcctatttcaag

SEQ ID NO: 123422 - DNA, 1351 bp, Homo Sapiens
ccaggtctcttccgctatactttattaggaatataaaacctaatctatgtacaggacacgtctcgtgtcagggtgaggggtggccacaaggcgggccatggctgggaccggccgctctcctcggtgtggtacctggagcggagggtcaggcacaggtaggaacggggctcacaggccgagcagagccccctctggcccctactcaattccttcctgcttgtcttttatggccacctgggagagaagaaggtggtggagactgagctggaacagctggggcaaggacgctggaaacacatgcccagcatcccccccgccaggcccttcctggagggcagccatgggccacactccccaggacagtggagcagccaaagggccctcccagctggcccaatccagccattctctatggcagccccggcaggagtcagaggccccagaggcttcctggtgagcagacgactcagacgttgaaatcccccaagctgtggctctttcccctctaaactgttctagattcccaggcgccctgccaggaacaggtgtgggccaccctggggtgagctgcctcccagagacctggaaggaccagccttgccaatcaccggacaagggacgtagaagagcacccccaaggacagtaggtccccgcccggatctggcccacagcacccgagggaccctgcagcactacagaattccccatggggcagacgggagccacaggcccagactccacagcccctcagtccacatgtcctggagcctgtggtggaagtccctgttcttccatcaccgccgcctctccctgaggacctccgaagaaacaaggccagggctgtcccaggcctgggcacacgggccagtgtccagcccaccccgtctgcccctccaggccccgccctcacccggaagcgctcctccagcagggacagctcactgatgaggtcggtgatggcgttggtaaaggcttcctgggggctgtagtccggcgtggtctgcactcggatgatgatcttgtgctccaaggggtgggggactttgtagccagcaaatagcacttgcgggtcttttaggtcacgttgtgatttaatgatgtttcccagtgtgtggtcttctttgttgatggtgaataaacaggcattgggtaccttggtgtccttgttaatggtgatcttcttctcgccctcgaagagcaagaacgactcgaaggctggaggggcgttcatgctcccgcctccgttgcgtccagaccccaagtgtctgccgccgccgccaccagagcccctcgtgctgaattcgccacccaggcctcgctaccttagaaccgttatgaggttactgcctc

SEQ ID NO: 123423 - DNA, 791 bp, Homo Sapiens
  misc_feature (678)..(712): n is a, c, g, or t
tttcaggtctctcccgctatactttattaggaatataaaacctaatctatgtacaggacacgtcggtgtcagggtgaggggtggccacaaggcgggccatggctgggaccggccgctctcctcggtgtggtacctggagcggagggtcaggcacaggtaggaacggggctcacaggccgagcagagccccctctggcccctactcaattccttcctgcttgtcttttatggccacccgaaagcgctcctccagcagggacagctcactgatgaggtcggtgatggcgttggtaaaggcttcctgggggctgtagtccggcgtggtctgcactcggatgatgatcttgtgctccaaggggtgggggactttgtagccagcaaatagcacttgcgggtcttttaggagttgtgatttaatgatgtttcccagtgtgtggtcttctttgttgatggtgaataaacaggcattgggtaccttggtgtccttgttaatggtgatcttcttctcgccctcgaagagcaagaacgactcgaaggctggaggggcgttcatgctcccgccgccgtcgcgtccagaccccaagggtccgccgccgccgccaccagagccctaataagaggcctctccccggccgtaatggccgaattcccgggcatatgtccggtaccgtcgactgnnnnnnnnnnnnnnnnnnnnnnnnnnnnnnnnnnncggccgcttcctcgctcactacttcgctgcgctcggtcgttcgctatgaacggacgtagcccctatagtgatctataca

SEQ ID NO: 123424 - DNA, 698 bp, Homo Sapiens
cctttaaaaaagtatgttcccccctttgtggaaaaaaattttcctttttaaggggggtggcacccaagggttaggcggttatggaaaaaattaacttggcttccccccactggacccggtccatcccctttgggggtgggggttagggggtttttctggatgattttccccatagtgatcaaacaccagtcgagtcccaaccttcgccgatacatggcaggtagaaatggtgacatcactcagtgcacaaagtgagctcagagcttccccccgaaagccaaaagtttcaacctgaggtaggtcggcaaactcttgaatcttagatgtgtgatgtttcagagttaagccttcgaagttttcttcttctaccccacatccattgcctgaaacttcaatgagatccactccatagtccttaagctttagatcaatattagtggcaccagcatccagactgttttctactaactccttcaccgcagtgcttagactcggtaccaccggcccagagcaaatctgatggactgacttccgatcaataggtttgatggccttagcaggttctgtactcgagctctcagctcgctccaaggatgcaacaccggatccgcctcggggactgggaaagttccctccacggctcccacaggcgccccgcctcctgggctcccaacggctgctttcgacgttgtgctccc

SEQ ID NO: 123425 - DNA, 1049 bp, Homo Sapiens
gatgtggattttcagcaggaactttattccaatgctaatggcagacatcaggaaggaggagaggaaccatttgtgcagatcatctagaagaacctggaccattcttgacagagctgaatacagtgatcacgttgtcctccaaggagcaggggtggggtggggtacttctaggagtcagttttgcaggctgtacaggaagcatggctggggagccctcaagaaactgacaatcacggcagaaggcgaaggggaagcaggcacgtttcttcttaatattcctttgaaattccttatggcgcacaggtagcgtagaaaataactgcttcacgctgactgtggtccctctggggtgggggtagggggttttctggatgattttcccatcgtgatcaaacaccagtcgagtcccaaccttcgccgatacgtggcaggtagaaatggtgacatcactcagtgcacaaagtgagctcagagctttcccccgaaagccaaaagtttcaacccgagttaggtcggcaaactcttgaatcttagatgtgtgatgtttcagagctgaaagagattaagccttcgaagttttcttcttctaccccacatccattgcctgaaacttcaatgagatccattccatagtccttaagctttagatcaacattagtggcaccagcatccagactgttttctactatcttcttcatccagtgcttagactcagtaccaccggcccagagcaaatctgatggactgacttccgatcaataggtttgatggccttagcaggttctgtactgccgttgagatgacatccccagaaccccttttcctggggccttgccgtaaagcaaactgtggtggtgcactcacttgcaaagcacagaagaccccaatttttgcattcacgcccaggccacatcagaaactgggcatggcctcttccctctgccttatctcccaattcctgcggccacctcctgcatatttctggaatccaactcttcctctccaatcctctcctcgtgccgaattcgccacccaggcctcgctacctt

SEQ ID NO: 123426 - DNA, 917 bp, Homo Sapiens
gtgcgctcgccaacctttctccgacattttctccgcgcgctgtgccgatcggcaattcccacggcgtccccactcacgagtgtgtctcccgtccaaccctcttgggtctagtcttggccctggctttggccttgggcctcgggccaatggtccgggccgtaaggatcgcttgggaacccagggagcgctggggaggacccagggagcctgttgtcccggcgagggtcagggccggagcctaaggggaggggtctgcccaggagccctggtcttggggaactccagcccgcgctctttccggcaacccctccagaatgtaccgttcatcgccgtcaccagcttcctgtgcctgcgcttcttctctcccgccatcatgtcgcccaagctcttccacctgcgggagcgccacgcggacgcccgcaccagccgcaccctgctcctgttggccaaggtgcgggccttgcggccacgggcgggatgcacagctgggtgtcctaccggggcctggcctggactgcagagtgttccctaccggctccggcgaggccactggcacgcccacgtaggcactgcacttcacagtttgcaaagccttcctgtggccaccttgtccgagttccatctcatggataagggaacaggcctgcgaggggtcgggggttgccaaggccgcccatcctgtcggtggtgaatcgcgggaccttccaacccaggtctgcttactctcaggctgcacctatgtgcccggcaccggggtggggtatccagtgcagcagcgtcagttaaacctcccatcatctgtgcctgttgacatttgctccatccttgagctccatagccccgccgccacctgctactgacgcgtgtcccgcctccaagcccatggcctgccttcctcagattccccaacggggaat

SEQ ID NO: 123427 - DNA, 973 bp, Homo Sapiens
  misc_feature (381)..(466): n is a, c, g, or t
agggagatcgaccctctggaaagcgcagaccggagtcctgtttgccggggccgaagctcagggtgccgtgctgagggccccaccagccggtggatccaatcagaatgtctggctgctgaactggcctagaggctgctccaggcgtgaaggtggaacgggtgagcttccccgccaaggtgtcgtttgaagaactggggcacatagctgatgtgctctggggcagctcttttggccaaggcagcacaattcagaagaatcttgccagggaagactggtaaatggacgtcaacgtgatgcctatggctcctggtggatttagatacctcctggtgcttagttgatatctttaccagttgcacaggggcttttccatgccagaannnnnnnnnnnnnnnnnnnnnnnnnnnnnnnnnnnnnnnnnnnnnnnnnnnnnnnnnnnnnnnnnnnnnnnnnnnnnnnnnnnnnngatttaatgatgtttcccagtgtgtggtcttctttgttgatggtgaataaacaggcattgggtaccttggtgtccttgttaatggtgatccacagcatggcctccacgcccagcaggtgccggtagatgagctgggcctcaaggtcatggtcaagagggtcattccactcctgcagggtcacccgtgaccgggtcttatcgcagccctgacctgtcttctctttttggtggcagcagctccacttgtccccacggaagacgccagggtggtaggagcccagcagtccggtgttgttgatgctcaccttccgcagcgcagacagccactggttaagctcattcacacacttggagctgggcgtcttcgcgaagctgagggcctcggtagtgagggagaagtagagcttcttgaaggaggaggacatgagggggcccttgcccttggtcctgtggatgaagagtggcccctccttcacaggtggcgcctgcaaactcagcgtccgctgc

SEQ ID NO: 123428 - DNA, 855 bp, Homo Sapiens
gttaaagctgccaagaagccaagagtaggaggccggccagagaagagaggatggaggtaatgacgatcatgctgccacttcgccgccctgtccagtgtcgatggatccgggggtcttcccgatagggtccaggcacagcgaggggcgcgttgcagaaggtctgctgttgcagccgtggtcatggcccacccgcagcacgggggcgcctccgctgcccgccatggggtcgccacagggcagctgttccggagacaggggcagcgtcatgtagtggccatcggtcagcagctgtggggaggccggaatgtcagccagtgtctccgggttgtggaagcccctggaggcattgctgaaggccgccacgagccagacggtatcgctggcgctggcaagcccatcgaagacacagcgcggctgctccagggagaaggtggtggctgtgaccttcccttccaggtcccaagctgttatctgtggtgtgtagggcaccagctctgtggccacgggggacaaaaggtgagccacggagacagggcgtgggggtccctggggctgcctctcccaatcggaggggggcgggcgcccagggtccaatcactccagcagggcccccagccccttgggtctggctggacgcgtccatccaggacccccactcacccaggctcaggctgggccggagacagttcaatgccaggaggagcatctgcagccctaggtgaggctgcccccagggtagccccatgacagctgccagcacccgggaggctcaggggctggtctggctgcttcgggctgcacctcacccccaacagcttggccctggagaagctggatcccgggaattccggaccg

SEQ ID NO: 123429 - DNA, 1924 bp, Homo Sapiens
tcaggctctggtggatttagatacctcctgtgtgcttactgatacctttaccagttacatgggggcttttccatgccagactgaaaatgctggagatcactgatcaaccttcaactatttactagcagaacactgaggggactctgcagtcaccaatatctcctattgcacttggataaacacctcccgggaaatagagatgaatagaaaggaaatacttaaacaagcagaatggctacattccttcaaccagaagggtccattagtctgttttcacactgctataaagaactactggaaactggggaatttatgaagaaaagaggtttaattgactcacagttttgcaggctgtacaggaagcatggctggggagccctcaagaaactgacaatcacggcagaaggcgaaggggaagcaggcacgtttctggccatggtggagcaggagagacagagagagtgaagcaggaggtgctgcatgcttctaaacaaccagatcccatgagcactcactcactatcacgagaccagcctgcccatggccctcccctaaaccctcctgagtgcaacttacagatgcttggagagggagagaaaccagaaaggcagaggagaggcaggggggctggtgctgggattccaggcagggtacggggtgtgctggtgggggggaaaggcaaggagccctgagggggcctgtgggtgcaggagctgggacaaagcaccatgcactcactcccggcgccccatctcccccagccccatgcaaagaggccaggctaggggctgaggctggggagggggtccaggccaggcttgcagcccaccggcagtgtggcggcctcgctgggtgggatgtggtgggtcatgtagcgcttgcccatgaaggagccgatccgcagctgctccggggcctcctccggccaccacaggctggagaagcgcatggtagaggctgccaagaaggccaagagtaggaggccggccagagaagagaggatggaggtaatgacgatcatgctgccacttcgccgccctggccaggtgtcgatggatccgggggtcttcccttggtggagagtgatggggtctgaccacttggtctcagccctgggtgagcccctggtgtccatcaggaggaacttcacccgatagggtccagggccagggaggggcgcgttgcagaagggctgctggtggcagccgtggtcatggcccacccgcagcacgggggcgcctccgctgcccgccatggggtcgccacagggcagctggtccggagacaggggcagcgtcatgtagtggccatcggtcagcagctgtggggaggccggaatgtcagccagtgtctccgggttctggaagcccctggaggcattgctgaaggccaccacgagccagacggtatcgctggcgctggcaagcccatcgaagacacagcgcggctgctccagggagaaggtggtggctgtgaccttcccttccaggtcccaagctgttatctgtggtgtgtagggcaccagctccaggctcaggctgggccggagacagttcaacgccaggaggagcatctgcagccctaggtgaggctgcccccagggtagccccatgacagctgccagcacccgggaggctcaggggctggtctggctgcttcgggctgcacctcacccccaacagcttggccatggaagaaactggttaatcagatgcaccaggggctggaaagacgacaaatgtaagtgcaccccaccccatctcctcgcaggcagccacacagcagggaggaggctgggggaactctggtaagcggaggcaggccagtatccagccacactgccagagccaagcgagagggtccactggaaccccagatgccagccagccatcccgagcgtgcatgggcccctccagtatctcgc

SEQ ID NO: 123430 - DNA, 1503 bp, Homo Sapiens
tggacagtaagagcaggtttactgttggcaacagcacagccctgtggcacccaagggtagcgggtggggtggcggccgggtctcctggggccccgttctccctcccattctctaggtccctggaggccagacccctgggtgcggcccatcctagcagtggttctggctgggtctgtcctgggcaggagaggagggtccctggagaggcagtgatggctacagcgtctgtagggagctggggacacttccggccagccatgacaggcccaagcctgctcagctctgcacttctggggatccccttattcctgactctcccccctcccccacctggaagagacctaggccctgcaccctaatgaggaggaccggggtgagggggtgcagagtgtcctgggggggctccgagcgcttggcaggggactcagcaaggggagcgtagggcgggcctcacgtctgcagctccaggaggcagttgggctctgagggtggggagccggccgggctggagctatgggcctcgcggaggtcctgcagcacccggagcagccgggccaatgagtcctcggggactttgccagggctcgtgggcaccgtgcctgcctctgcgcccccgctcagctccccgtgcctctcccacagcatggcctccacgcccagcaggtgccggtagatgagctgggcctcaagggtcatggtcaagagggtcattccactcctgcaggggtcacccgtgaccgggtcttatcgcagccctgacctgtcttctctttttggtggcagcagctccacttgtccccacggaagacgccagggtggtaggagcccagcagtccggtgttgttgatgctcaccttccgcagcgcagacagccactggttaagctcattcacacacttgcactgcaggtaggcagtctggggcctgccggcgtcgtccgtgtagatgacctgcatgacgtgcgagccgccaaagctcttttcctcaaccttttccgctgcccggatgttggctaacttgatgagggcgcttttcttggagctgggcgtcttcgcgaagctgagggcctcggtagtgagggagaagtagagcttcttgaaggaggaggacatgagggggcccttgcccttggtcctgtggatgaagagtggcccctccttcacaggtggcgcctgcaaactcagcgtccgctgcaggtccagctcgtccttctcctcgatgtccacgagcttggtgatgaagtccttcagctgcgccacgccctggcgcacggtgggctgcagcggctccatccaagcctccttggccctggaagccggcgtgtccatgttgcccacgttctggactgccttggccaacaggagcagggtgcggctggtgcgggcgtccgcgtggcgctcccgcaggtggaagagcttgggcgacatgatggcgggagagaagaagcgcaggcacaggaagctggtgacggcgatgaacggtacattctcgtgcatcccggga

SEQ ID NO: 123431 - DNA, 515 bp, Homo Sapiens
cagcaggaactttattccagtgctaatggcagacatcaggaaggaggagaggagccatttgtgcagatcatctagaagaacctggaccattcttgacagagctgaatacagtgatcacgttgtcctccaaggagcaggggtggggtggggtacttctaggagtcagttctgcaggctgtacaggaagcatggctggggaggcctcaggaaactgacaatcacggcagaaggcgaaggggaagcaggcacgtttcttcttaatattcctttgaaattctttatggtgcacaggtagcgtagaaaataaatgcttcacactgaatgtcatccctctggggtgggggtagggggttttctggatgattttcccatagtgatcaaacaccagtcgagtccaaccttcgccgatacatggcaggtagaaatggttacatcactcagtgcacaaagtgagctcagagcttccccccgaacgcagaagtttcaaccttagggaggtccggaaacctttgaat

SEQ ID NO: 123432 - DNA, 539 bp, Homo Sapiens
  misc_feature (347)..(478): n is a, c, g, or t
ctgatacgggggaagcatggctggggagccctcaagaagctgacaatcacggcagaagggaaggggaagcaggcacgtttctggccatggtggagcaggagagacagagagagtgaagcaggaggtgctgcatgcttctaaacaaccagatcccatgagcgctcactcactatcacgagaccagcaagggggacgtcagccgccatgagccaatcatctcccaccaggtccctccctcaacactgggaattgcaattggacatgagatttggttggggatacagagctgaaccataccaagggtagttcaaccactgagattgattgattgactgagatggggtccnnnnnnnnnnnnnnnnnnnnnnnnnnnnnnnnnnnnnnnnnnnnnnnnnnnnnnnnnnnnnnnnnnnnnnnnnnnnnnnnnnnnnnnnnnnnnnnnnnnnnnnnnnnnnnnnnnnnnnnnnnnnnnnnnnnngccaatttccgcattttcagtagagacggggttcaccatgtttgcccggatggtcttgaaa

SEQ ID NO: 123433 - DNA, 406 bp, Homo Sapiens
cgtttagatctcggttatctcagagggatcatcagctttgtaagaaaatcttgagagaatagcaagtgaagaaaagagtagtcagtgcccaacatcacggatctctcactgaacacaccatgcctggtattctctcacggtgatgtcaccatttctacctgccacgtatcggcgaaggttgggactcgactggtgtttgatcacgatgggaaaatcatccagaaaaccccctacccccaccccagagggaccacagtcagcgtgaagcagttattttctacgctacctgtgcgccataaggaatttcaaaggaatattaagaagccacgtgcctgcttccccttcgccttctgccgtgattgtcagcttcttgagggctccccagccatgcttccagtacaacctg

SEQ ID NO: 123434 - DNA, 369 bp, Homo Sapiens
gagcaggactccatctcagtcaatcaatcaatcaatcaatctcagcggttgaactacccttgacatggttcagctctgtatccacacccaaatctcatgtcaaattgtaattcccagtgttgtgggagggacctggtgggaggtgattggctcatgggggccgacttcccccttgctgttctcgtgatattgagtgagcgcttgtgggatctggttgtttaaaagcgtgcagccctcccacttcactctctctgtctctcctgctccaacatggccagacgtgcctgcttccccttcgccttctgccgtgattgtcagtttcctgatgcctccccagccacgcttcctgacagccattgcactccgaca

SEQ ID NO: 123435 - DNA, 660 bp, Homo Sapiens
  misc_feature (62)..(62): n is a, c, g, or t
  misc_feature (587)..(605): n is a, c, g, or t
atgtggaagagctcatgaagctaggaaatcaccccatccgcagggtcagcgtccacccggantaccgtcgggatgagtcctacaattttgatgggcacatcgcccttctggagctggaaaatagtgtcaccctgggtcccaacctcctccccatctgccttccctgacaacgataccttctacgacctgggcttgatgggctatgtcagtggcttcggggtcatggaggagaagattgctcatgacctcaggtttgtccgtctgcccgtagctaatccacaggcctgtgagaactggctccggggaaagaataggatggatgtgttctctcaaaacatgttctgtgctggacacccatctctaaagcaggacgcctgccagggggatagtgggggcgtttttgcagtaagggacccgaacactgatcgctgggtggccacgggcatcgtgtcctggggcatcgggtgcagcaggggctatggcttctacaccaaagtgctcaactacgtggactggatcaagaacgagatggaggaggaggactgagcccagaattcactaggttcgaatccagagagcagtgtggnnnnnnnnnnnnnnnnnnncaactgaccagttgttgataaccactaagagtctctattaaaattactgatgcag

SEQ ID NO: 123436 - DNA, 991 bp, Homo Sapiens
  misc_feature (56)..(73): n is a, c, g, or t
  misc_feature (978)..(978): n is a, c, g, or t
ctgcatcagtaattttaatagagactcttagtggttatcaacaactggtcagttgnnnnnnnnnnnnnnnnnnccacactgctctctggattcgaacctagtgaattctgggctcagtcctcctcctccatctctttcttgatccagtccacgtagttgagcactttggtgtagaagccatagcccctgctgcacccgatgccccaggacacgatgcccgtggccacccagcgatcagtgttcgggtcccttactgcaaaaacgccccccactatccccctggcaggcgtcctgctttagagatgggtgtccagcacagaacatgttttgagagaacacatccatcctattctttccccggagccagttctcacaggcctgtggattagctacgggcagacggacaaacctgaggtcatgagcaatcttctcctccatgaccccgaagccactgacatagcccatcaagcccaggtcgtagaaggtatcgttgtcagggaggcagatggggaggaggttgggacccagggtgacactattttccagctccagcagggcgatgtccccctcaaaattgtaggactcatcctgacggtagtccgggtggacgctgaccctgcggatggggtgatttcctagcttcatgagctcttccacatttgtgtggcccaggaacacatccaaagaggcgttgctttgcgcttcgtgttccttgggatacagggtgtgggcagctgtgaggatccagcggtcgcccagcagggccccgcccccgcgcccgtggatgttggtgaacacctgccaggggaagttgcccatcttggctttttgccctccgatgatgcgctgcctctgttccacggggttcacgggcttcccacacactggcaagcaccgaggaatcttctctcccttctgttcattcttccaaatgccctgtgctgtgcaggtgtacaccccttgctcagactccctgcncatcgtgccgaat

SEQ ID NO: 123437 - DNA, 426 bp, Homo Sapiens
tttacctttggaatgatctgcttttgtttgatacctttacttttcaggatgaaggcgcggggtttctggagccgactgagggactggagaaggctacgggggtcctcgccctgccagggcaatcctttgatgctcttgatcatttggttatgcaaatcgctgaggggaggggtggagggggcgcagtgacagaaagaagatggagttagaagcaggcctgccacctcggggttcccagcgccattgggaccatccccaggccactgaagccaaaacatgcagctgggggaaagacactgtgctcaatgctgcccctctctcttttgccagaaatggggactgggccagcctccccaagccctggagcggggcagggctttgaggcaaattggacttggcaacacagatcattgatccttttcaata

SEQ ID NO: 123438 - DNA, 827 bp, Homo Sapiens
  misc_feature (267)..(284): n is a, c, g, or t
tttttgcacactggcatttctcataaaactttatttggaaaaagttatattcaatgacccaatggtatcaaagtggaagaggaaagtgacaactagagattgataactatatcctctgcaatcctcagaagaaagaaaggggccctttgggttgtttcaggtaaagtacatcaatgggactacaggaaagagaatttcacacacggtctttctgcatcagtaattttaatagagactcttagtggttatcaacaactggtcagttgnnnnnnnnnnnnnnnnnnccacactgctctctggattcgaacctagtgaattctgggctcagtcctcctcctccatctctttcttgatccagtccacgtagttgagcactttggtgtagaagccatagcccctgctgcacccgatgccccaggacacgatgcccgtggccacccagcgatcagtgttcgggtcccttactgcaaaaacgcccccactatccccctggcaggcgtcctgctttagagatgggtgtccagcacagaacatgttttgagagaacacatccatcctattctttccccggagccagttctcacaggcctgtggattagctacgggcagacggacaaacctgaggtcatgagcaatcttctcctccatgaccccgaagccactgacatagcccatcaagccccggtcgtagaaggtatcgttgtcagggaggcagatgggggggagagtgggacccagggtgacactattttcagcttccgcagggcgatgtccccctcaaaatgaaggactatccctaacgtaattccggtgaacctgaccctcgg

SEQ ID NO: 123439 - DNA, 688 bp, Homo Sapiens
  misc_feature (57)..(74): n is a, c, g, or t
  misc_feature (530)..(530): n is a, c, g, or t
  misc_feature (566)..(566): n is a, c, g, or t
tctgcatcagtaattttaatagagactcttagtggttatcaacaactggtcagttgnnnnnnnnnnnnnnnnnnccacactgctctctggattcgaacctagtgaattctgggctcagtcctcctcctccatctctttcttgatccagtccacgtagttgagcactttggtgtagaagccatagcccctgctgcacccgatgccccaggacacgatgcccgtggccacccagcgatcagtgttcgggtcccttactgcaaaaacgcccccactatccccctggcaggcgtcctgctttagagatgggtgtccagcacagaacatgttttgagagaacacatccatcctattctttccccggagccagttctcacaggcctgtggattagctacgggcagacggacaaacctgaggtcatgagcaatcttctcctccatgaccccgaagccactgacatagcccatcaagccccggtcgtagaagggtatcgttgtcagggaggcagatggggggagaggttgggacccanggtgacactattttccagctccagcaaggcgatgtncccctcaaaattgtaggactcattctgaccgtagtccgggtggacgctgaccctgcgggatggggtgattcctaacctcatgagctcttcccatttgtgtgggccaagacacattcaaagag

SEQ ID NO: 123440 - DNA, 1139 bp, Homo Sapiens
  misc_feature (92)..(110): n is a, c, g, or t
  misc_feature (146)..(146): n is a, c, g, or t
  misc_feature (160)..(248): n is a, c, g, or t
  misc_feature (1025)..(1059): n is a, c, g, or t
gggccccggtttttctttggggaaaccaccttttggcccccggtttcccttttctctttggggggcccccgcgccccacaaaaggaagaggnnnnnnnnnnnnnnnnnnnaaggggccggagggggcccgcaacaaaacgggtttntttttgtcggctcnnnnnnnnnnnnnnnnnnnnnnnnnnnnnnnnnnnnnnnnnnnnnnnnnnnnnnnnnnnnnnnnnnnnnnnnnnnnnnnnnnnnnnnnncctaaaacagtcatattttattcttctgaacagctacttacaaagtaatctcaatcagtgaaattataaatcatgtaactgttcatgattaaaaggcaagacacagccaagacagtagatgggcaagtctcacataaatacaagaatgtttatagaatgtttagcatatcatgttaatggacaatagttttccgttctctacagaagtatgaatgaaatgccaaagttgaagtcactggttatattcataaccagcttagtgaggatgttgcccactgcctcacatctgtaggacagttgggatatttctgcagagcattcataatttgagtattatccaaaagcagtttcatcagctggtactctctctgtgaatttcctgaagttctttccatgggctttattaattctaattgctgcaagtgttcaaaagccttcatgacaacaggtttttcaaaattataaacggaatgtgctttcctttgaacaaacttctgaaactcattatagaccatttgaaaattaaatggctcttcctcatagatgtcatttaaatgtttcattgctattataagacagatttccaagactgatagaccatgtacaatatttgctttcgagtccatgctacacagttggcttgcttccattagatctacggcagtcataaatgggtgcgatgctgttactcgattttaagcaagcatcaatagcatgtgtaatgaccccggccgtaatggccgaattcccgggcatatgtccggtaccgtcgactgnnnnnnnnnnnnnnnnnnnnnnnnnnnnnnnnnnncggccgcttcctcgctcactacttcgctgcgctcgtcgttcggctataacgagctagcgcctatagtgatttacaatttt

SEQ ID NO: 123441 - DNA, 680 bp, Homo Sapiens
  misc_feature (575)..(575): n is a, c, g, or t
  misc_feature (669)..(669): n is a, c, g, or t
attcagtttttcaagataccactgtacctttaatttattagctttccataaaaacacataacatacacaatctacagtatagaaagtataatttacaaaaatataaaatcttggttattttttagtattcccacgttactatatgtgttatttcaatatgcatgtttaaacaacccacactcagcatgactatctctgtggggaatggtgtcaacgccctccctttttgttgttttaaaataaaatatatatattaagaaaaagaaaccaatattggctacatgtgcataccatatggataaaagctctgcagtggactttgaaaggaaacactcatttacaccacgattatcctgttttccaaaatcactatgtggcccaaagtgttctgaactgagcatttaaacagagttctttccgtgtgcagggagcgagcgccctaagatttgcatagtcttcttgctcagttatgagatgatgatcacatcaagccaatgttgtggatatgttttgttttcaagccttcagaacagtgggtatgaatgatgggccactttcaggccagggctaattcncagattccttcaggtactcaggctggcatttaaggggctagtcactagcaatgaaagacccctaatgatgcactggcggacagctctctctggngcccagtgatg

SEQ ID NO: 123442 - DNA, 755 bp, Homo Sapiens
tggcgctgcgtcggcctctcatgccagccccggcagctcgttgtcctggagggtcccagtggcctgcgcggctcggcgcacgcgggggtccgctgagttgttggggcctgcttcggggctcggggtctccggcagggaagggctcgtatctctgcagcgtcactgccacgctgttgggctccgagatggccagatcgttggcatagactaggatgtagggcgcataggggctgggccggggcacccccgggtccctctcctcagaatccagctgggcggagaggagcagctcgccatcccggcgggccgccttgacgatgggggagatgtccttggcctgccacaggccgcgcggtgggggcgccagggccatggccccgcggagtagcccctgtgtggccgtgttctgcgagaggctgcggaagagcaggtgctggcgtgtgggcgggcccaggggcagcgggcggcctgaagcgttcttggcccgcggcttgcatagcacctcgagcgctcgaggccaccgaggcggctctgagtagaagtggaaagtggccgtaaggatcatttccgagtcttgcatggaagtcaggttgaagaaatacacggccttctggtcgaccacttccagcctggccctgaagctgcggaccgtgttgccccctcccggccgcgcgcctgccggctgtacttctcatagagcctgtgcatgtggacagcgaccatgtacctggcgctggggcccaacgtgcggcccc

SEQ ID NO: 123443 - DNA, 576 bp, Homo Sapiens
ataattatagcttttatttattatatcttcattcaatcatttattcacaattagtctaattgcattcttgatgaataactgacttcagcaaaggagtcaatccactaagcaaagttcatttatttttcatgatgttcttctttcgatcttgagtctttactctcctggattcccaagagaactgcattagcctctagtacagttgtatctgttgttgctcccaggaacctagacgtaagttcaagatctaatagccgcaaccggaccctggttcctttctggtatttcaatatatgatcttttgtgaatggcttctttcatttggcataatgttttcagggttcatccatgttgtattacaacttctttatcttttacgatgttttccaaagtcagagttggaagaaaaacaggttatcatcacttgtgaaaatctcctccaaacagcataccacgaaatgggactccatactatttcctagtctgttcgatctgaataacaaaacaccataaatgagggtatcttataaacagcagaaacttctttctcatagttctagaggctggaagtccagg

SEQ ID NO: 123444 - DNA, 839 bp, Homo Sapiens
ttttttggacagcactcaaaacgtatttattgaatgacaatttcttagtacagtgtatactatccccaccaaaggaaaaaaacattaagagcaaaacaaggggtggggggtgggaatattgctaaagaaaattctaataagagttatctataattatagcttttatttattatatcttcattcaatcatttattcacaattagtctaattgcattcttgatgaataactgacttcagcaaaggagtcaatccactaagcaaagttcatttatttttcatgatgttcttctttcgatcttgagtctttactctcctggattcccaagagaactgcattagcctctagtacagttgtatctgttgttgctcccaggaacctagacgtaagttcaagatctaatagccgcaaccggaccctggttcctttctggtatttctctccatccacttctggtcttctacatacacaatgaaactttccaccaaaatctatgtacagatcattctccacaatatgaaagatccgtccaatgaccagtttatcctttgcaggtcccatctgtgtaagaggagaatgtctcagcatagatgcaaaggattccacattttttggagaacccttctgtagaagctccgagtgccgctccaacgcgctcgcgaaaccgcctgcgcgcgtcttaggctccttggcattggaactaccactttcggatccactctcagtgcctacaccccgaaagggcctgaagaagagaaacactcgcagaaaatggctctcggcagccacagcacgggtccgacacagcgccgccatgacttctttacctctgacctttccc

SEQ ID NO: 123445 - DNA, 665 bp, Homo Sapiens
  misc_feature (136)..(136): n is a, c, g, or t
  misc_feature (396)..(477): n is a, c, g, or t
ggacatccaccagtacagggagcagatcaaacgggtgaaggactcggatgacgtgcccatggtgctggtggggaacaagtgtgacctggctgcacgcactgtggaatctcggcaggctcaggacctcgcccgaagntacggcatcccctacatcgagacctcggccaagacccggcagggcagccgctctggctctagctccagctccgggaccctctgggaccccccgggacccatgtgacccagcggcccctcgcgctggagtggaggatgccttctacacgttggtgcgtgagatccggcagcacaagctgcggaagctgaaccctcctgatgagagtggccccggctgcatgagctgcaagtgtgtgctctcctgacgcagcacaagctcannnnnnnnnnnnnnnnnnnnnnnnnnnnnnnnnnnnnnnnnnnnnnnnnnnnnnnnnnnnnnnnnnnnnnnnnnnnnnnnnngctgctggagcccagtcaccccgggaccgtgggccgaggtgactgcagaccctcccagggaggctgtgcacagactgtcttgaacatcccaaatgccaccggaaccccagcccttagctcccctcccaggcctctgtgggcccttgtcgggcacagatgggatcacagtaaattattggatggtcttg

SEQ ID NO: 123446 - DNA, 1040 bp, Homo Sapiens
  misc_feature (193)..(248): n is a, c, g, or t
  misc_feature (931)..(983): n is a, c, g, or t
caagaccatccaataatttactgtgatcccatctgtgcccgacaagcgccacagaggcctgggaggggagctaagggctggggttccggtggcatttgggatgttcaagacagtctgtgcacagcctccctgggagggtctgcagtcacctcggcccacggtcccggggtgactgggctccagcagcccttcnnnnnnnnnnnnnnnnnnnnnnnnnnnnnnnnnnnnnnnnnnnnnnnnnnnnnnnngcatccggcacctccatgtcctgagcttgtgctgcgtcaggagagcacacacttgcagctcatgcagccggggccactctcatcaggagggttcagcttccgcagcttgtgctgccggatctcacgcaccaacgtgtagaaggcatcctccactccctgccgggtcttggccgaggtctcgatgtaggggatgccgtagcttcgggcgaggtcctgagcctgccgagattccacagtgcgtgcagccaggtcacacttgttccccaccagcaccatgggcacgtcatccgagtccttcacccgtttgatctgctccctgtactggtggatgtcctcaaaagacttggtgttgttgatggcaaacacacaccaggaagccctccccggtgcgcatgtactggtcccgcatggcgctgtactcctcctggccggcggtatccaggatgtccaacaggcacgtctccccatcaatgaccacctgcttccggtaggaatcctctatagtggggtcgtattcgtccacaaaatggttctggatcagctggatggtcagcgcactcttgcccacaccgccggcgcccaccaccaccagcttatattccgtcatcgctcctcaggggcctgcggcccggggtcctcctacagggtctcctgccccaccgttcacaggcgcgactgccccnnnnnnnnnnnnnnnnnnnnnnnnnnnnnnnnnnnnnnnnnnnnnnnnnnnnnttcgccccgcgcatgggctccgtccgcggcgggtgcggctcgggttgcccccgtgcc

SEQ ID NO: 123447 - DNA, 210 bp, Homo Sapiens
gcttatgaacaacagaaatttatttcttatagttctagaagcaaggaaggaaggaagggctgctggagcccagtcaccccgggaccgtgggccgaggtgactgcagaccctcccagggaggctgtgcacagactgtcttgaacatcccaaatgccaccggaaccccagcccttagctcccctcccaggcctctgtgggcccttgtcgggc

SEQ ID NO: 123448 - DNA, 606 bp, Homo Sapiens
gaggctagtaacatcagttttattgggttggggtggcaaccatagcctggctgggggtggggctggccctcacaggttgttgagttccagcagggtctggtccaaggtctggtgaatctcgacgttctcctccttggcactggccaaggtctctgtgaggggaagcagcaggtgagggagaagggagacacaagggggagacgtggggaggcagggccaggggaaggtgacatatagacatggagtgggtcaaggaagacacatgcattcacggacctcagggccccttggcaggggcaaacagatggactgactaggatgaggggaacaggacggacgtggatgcctcactcaaggccttggggtcatagaggtggggtggggagggctgagtcataaactactttatcctcttctttagaaggtttaaggaagttggagacagaaggtaagacaaagactgcgccaggaaaggaagggccagacagacagacttgaggtagaaaacagacctgctgctgcagtgaaagccccatgttgctgatatccaacatttttccaagctccattccagaccttttggcaacttcttgcccctgtcctgca

SEQ ID NO: 123449 - DNA, 598 bp, Homo Sapiens
gggtgtcaggagtgaaccagtgctccgtggtggcgatagaggtgctctctggagggcaggaaaacagcatggagaccaagttcagaatttattaagcagcaaaggagggtggaaggggataggtaaaggatgaagccagtgccagagtgggtggtgggcatgatgggggctctccctaggctgctcccagcctggctgtgcaatgttggcaatttctgctcctcctgcctgctcccctccccatagagagaatggaaaggagaggagagaagagagctgaggtggccacgctggcgtggggctcagagggaggtgatgtcattgagtgcgttgtccagttcctcgctaatggccttgtacttcatcttctgggcatagacttcatcttctaggtcatcgatggttttctccaactttgccacagacctctcggcaaactctgctcgggtctcagcctccttcagcttctccttcaacagtttgatcctcctcttcatatttatcttctttggtggaatacttgtccgcctgggcctctcagggatttcaagttgttggtaacaattttcagctccttctcttggtccccacatttact

SEQ ID NO: 123450 - DNA, 1114 bp, Homo Sapiens
  misc_feature (1087)..(1087): n is a, c, g, or t
gagaggctagtaacatcagttttattgggttggggtggcaaccatagcctggctgggggtggggctggccctcacaggttgttgagttccagcagggtctggtccaaggtctggtgaatctcgacgttctcctccttggcactggccaaggtctcttctaggtcatcgatggttttctccaactttgccacagacctctcggcaaactctgctcgggtctcagcctccttcagcttctcctccaacagtttgatctcctcttcatatttatcttctttggtggaatactcctcctctgaggccatcagggacttgagggcctggtccatggttcgaagttcctcctccagctgtctggctcggctctcggccacctcagccctctcctccgagcgctccagctctccttccaggatcaccagcttcctggccacctcttcatatttgcggtctgaatcctcagcgatgtgcttggcctccttcagctgcatctcctgcagttccatcttctcctcatccttcatggcccggttttcgatgaccttcattcctctctcgctctcatcagccgccttctcggcctcctccagcttctgcagggctgtagccaggcgctcctgggcccggtccagctcctcctcaaccagctgaatgcggcggttcagggaggccacatctgcctcagcatcagtggccttcttctcggcctgctccagtttctcctgggcctccttcacggattcagaatacttttccacctcatcctctgtccccttcagcttcttctggagggcctgctgctcctcctccagctgcttgcagcggtcctcagcttgcttcttgtcggcttcggcctgctcggcgcggtcgatggcgttctccttgtccagcttcagcatctgcatcttcttcttgatggcgtccatggctgcggtggggggtgggccggccggcaggcggtgaggaccggacggactgggctgggtgagcggactgggtgcaccggtggcaggcgaggaggacggagcgggactgggacgtcccggccacgcgggcgcggacgcgtgggcggacgcgtgggttcgancgatattcccgggaatttccggacccc

SEQ ID NO: 123451 - DNA, 670 bp, Homo Sapiens
  misc_feature (598)..(598): n is a, c, g, or t
  misc_feature (639)..(639): n is a, c, g, or t
  misc_feature (651)..(651): n is a, c, g, or t
gctagtaacatcagttttattgggttggggtggcaaccatagcctggctgggggtggggctggccctcacaggttgttgagttccagcagggtctggtccaaggtctggtgaatctcgacgttctcctccttggcactggccaaggtctcttctaggtcatcgatggttttctccaactttgccacagacctctcggcaaactctgctcgggtctcagcctccttcagcttctcctccaacagtttgatctcctcttcatatttatcttctttggtggaatacttgtccgcctgggcctccagggatttcaagttgttggtaacaattttcagctcctcctctaggtccccacatttactcctcctctgaggccatcagggacttgagggcctggtccatggttcgaagttcctcctccagctgtctggctcggctctcggccacctcagccctctcctccgagcgctccagctctccttccaggatcaccagcttcctggccacctcttcatatttgcggtctgaatcctcagcgatgtgcttggcctccttcagctgcatctcctgcagttccatcttctcctcatccttcatggnccggttttcgatgacttcattcctctctcgctctcatcagncgccttctcggnctcctccagcttctgcagg

SEQ ID NO: 123452 - DNA, 1735 bp, Homo Sapiens
ctgtaagatgctttatttcattgaccaacaacatggggtctgaaaacccagcgggaggggtctttttatcacagagccagtcccaggcgagctgatgcatctctgctcctctgcccctcaggagctctcatcctccaaccccagctgcccccacagccccaccccattcacagaaagagggctaccacgtgcctcagcccccctgcccaggctgccagctcccaggtccttttggagaaggactgatctaggcagggaggagagaaggccaacccctccagggctcactgaggaaggccaaagcctttcagaagcagttcctgcagtgacgtaatccacagcctgggatctgcatggccctgagatgcctgcggcaggctggccaaggggctggtgtgaagaaagagggcagggcccataagctgtggccaacaggggcaggggccctgcctggagtaaagtgctctggcctaggctgcgtgggtttcactgccctgcagccccagcctcccttccctctgatgccaggcacagggagcctagtcctcactggagttgtcaaactcctcccagtcagacacactcatcacctcagaggcaaagtccgggtcggcctggctgcggtcaggggtcccgcggggcggctcaaggagcagggagcggggcagggtgagcacacaggccgccaggcctgagatggagttgtccagctggggcccttcctcccagcagtccttctccacatcgtaaatgtgcacgtagcctgtgcggctgccgcggttgtgtgagcggccacctaacacatagatcctgttgtccagcacagcaatgccaggctcaccgtgcccagcagggagtgggcagacagatgaccactgtccagacgtgcagctgtagcaggccacctggtgcacgtccctcctgtatccggcatcgttgttgctgcccccgatcacatacagcttgttgaggagggttgccatgccgtgccaggcgcgccgcacaggcccatcagccagtgtgtgccaagtgttgctgcctggatcgtagcagtgtgtctctttcaggtaatcctcccctctgcggccgcaggtgatatacatcttcccctccagcgtcgcgcctgcgtgggcatacacctccctcttgagtggggccacgtatgcccaggagttggtggcagggtcgtagcgctccacagcattcaggtcattgtggtagtcacggcccgccacagcgtagatgtacctgcctacaacacacacggacaggtcggcgtgctcctgctgcagggactggatctggaaccagcggttgtgccgtgggtcatacctccagcatcgggactctgctcgaaatccttggacattgttgtcccctccaatcaagtatacgaagttgttgagcaccgcgatgccctggttggacatgcggggggccagggaggcagtgaagtgcttccactctcccagtaaggggtttagatacttggcctggtcgctgaggacagtggacggcgtggagtgaatgcccccgaagcccacaacgcactggaagtccgaccgcagctccgtttgcgggctctgcaggctgggctgtaggctctcgttccggtggtacatgagggcgctggccactgtgtccctcaaagggctggggtccagcttgtcatgcagccgctgcaggacctcagcttccatcagcggaaaccgcactgtctcaaggagctttgggg

SEQ ID NO: 123453 - DNA, 1882 bp, Homo Sapiens
  misc_feature (22)..(22): n is a, c, g, or t
  misc_feature (36)..(36): n is a, c, g, or t
  misc_feature (184)..(184): n is a, c, g, or t
  misc_feature (573)..(582): n is a, c, g, or t
  misc_feature (739)..(786): n is a, c, g, or t
cggcgcggctccatatgtttcntctctctatataanaaggggtgatcttatgtgtagagagaatatagtagtgtgtttgtgtgtgtttgccacagggcgcgatactcccctcgggtggtgggagtgtatctcttcacagcacacgtcgtgtgtatagtattataatagaggtgtgtgggcccanaataaagtcggagaacgaatgtctgtgtgtacggcgccccgccggtttgtttctctcgcacgtggggcgaaatatatgtttatttgtccgccaagggcgacacaaatggtgttcttatattcctccccccgggcgaatttcaaaggtttattccaaacccgcgtttggtgggggggcgtcttcccacgttccgggcagaaaatcgcttttatttaatatttacaccacctctatttcccatatgaatgggccaacggccgggggggcttaaatttttatattcgaagcctccccttgggcacccccgtttgataaaatcccggtaatgaccctccgaaactcccatcgggaatttgtttcaaaaaagcttgggtttcccccgggggggnnnnnnnnnngggggaaatcccaagcccttttttcatggcccaggatttcttttagggaaccagcttatggcccaagtttcccttttccttttggggcgccccgccgccccaacagaaaggtgtttagaaaaatgttttgagggggcggaggcggccgaccaaggcnnnnnnnnnnnnnnnnnnnnnnnnnnnnnnnnnnnnnnnnnnnnnnnncctggttgtggtttggttgtttggttgttcctgaatctgctttatttctctgcataaggaaccctgaacaggcaattcaaattaaaacaaaataaatatatgaatattcatgtaaaactgtcctttctaatgaacaattatacacaatgtacaatttcatgttcactgggtggatttacaaaaatgtaccattcccaactaaaaatgcaccaaaatggtttcatgcaaacttatcaaaagtgaccaaaaatatggagggaaaaacctgactgagagcacttcgtttttgttgtttttgtacaatcacagaaaaataaaaacatctaatttctttgttacatttagagtaactaaatgtggccattgtttataatgttggtttatgttcttataacatctatgtagttaccataaaagtatatcaacatcaaatcagaagtgagcattattgagggagagaagggagggtgagagcacccgcacggtcagtagtcagtgtcggagccctcggcgttgtccacgtttctcgagagcatgtagttgtccatgtcgattgagcggcagttgttgatggcatagcgcaggcgctcggccatgaccagctggctggagtacgggggcagcctcagctggaagaagcaggtctgtgaggtaggcagactgtcgtaaggcctatcaaccttcatgatttgaaatctctgagaaatgtcagcagtgttggctggtagtcgagatcttcctgacacaaacctcatgaaaagcacccgctcctcattggagaactcttccagcgtgtgccagaaccactgcaccagctgatgctgctcatccacctcacggtaccgcaccactttcttcaagacttccacagagatctcgggcatcccacacaccatctgctccagttgttttgctgtgaggagggacagcagcggcacaggaacaatccaggacatcccttctcggactgcagccacctgtctgtccatctcatgaagtcgatattcaatggccctctccacatattccttcctgttggaaaatgtgagtgggatactatttccaccagggattataggaaccattttgccatcag

SEQ ID NO: 123454 - DNA, 326 bp, Homo Sapiens
aggtttcagctatttattctctctccattacacataatcaacgataatctggtactaaggaatatacaaatggcaattaattttcctcagttatcttatattttgttaacatatattttgatgaaccatacataattaaataaaactgcttagaaatgagatttttaaaaccactttgcatagcaagtttgtaaaatattttaaacttgaaaataagtttaactattatccacaaacatcaagacaaactgaaaataatcaaaacacatgtaagaacaatatcatttttataatttgtcattgaaaccaaactgtacaaaaggaac

SEQ ID NO: 123455 - DNA, 1521 bp, Homo Sapiens
catggggatattttttattgtgccaaaaagttgccatcactgtcattaaacctgtttaacaccaaataataaggaaaataaaataaaaaattcgggcttggtgcagaaactcactccaaataaattacctaccaaaatatttacataatggtggaaatattccaaaattccatattttgggatttatacacaaaagataaacaaattagaggccaagaggctgccggaagggaaaaacggggcctggaatggccgacgtgaggaatgagctgggcctaaagaggccactggcaggcaggagctggacctgccgaagtggccgaaaggcaggagctttggactggggaggccgcagtgaggcgagagctagctgggcgtggagagtccgctgtgaggccgaggccgaggccgggcccgtgcaggccttcgagaggcaggaggccgggcctgcaaaggccgactggagatcaagttctgcgcctgaagaggctgccaaaagtcaaaagcggggcctgggaaggccgccgagagccatgagctgggctgggccgaaagaggccactgggaggcaggaggagctgggcctggagaggctgactcgaggaagttttgcacctggagaggccgtcgagaggacggagctgggcccagggaggccgacttgctgctcttccaggcccacttccaggccgacttgaggacgacttgggcctgcagaggccgccgggaggctggagctaagcctggagagactgacttcgggacgatttgggcctgcagaggccgccgggaggcccaagcttggcgtggaggagcccaccgaccggaggccatttggggcctggagatgccatcggagggcaggagctcatcctggagaggccaccgtgaggcctgacctgggcctggggagcttggcttgaggaagctgtgggccgaccaatgccgccaggagatgggtaggcactgagtccaaagaggttgttgagaggcaggagtcgggcctggagacgcaaccaggaagaagagctgggcccggagaggacgcccggagggtgcaagtgggtctggagaggccgacttgaggaggttctgggcccggagaggccgccggaagggaaaaactgggcctggaaaggccgttgtcaggaatgagccccatgggcctgaagaggccactggcaggcgggagctgggcctgccgaagcggccgataggcaggagctttggactcgggaggccgcagtgaggcaacagctagctgggcgtggagagtccgctgtgaggcataggctgggcctgtgcaggccttcgggaggcaggaggctgggccttgtcgaggcctgcagaggccaccgaaagtcaaaagcggggcttgggaaggccagccgggaggcatgagctgggctgggccgaaagaggtccactgggaggcaggaggagctgggcctggagaggctgccgaaaggcatgagcttcgcctgaagatgccccagtgaacaacatctgggtcaatgtacg

SEQ ID NO: 123456 - DNA, 818 bp, Homo Sapiens
cgggagcctgagaccctccgagctggggttccaggacacgcgtcacctcttcccagagacccctcaggagggaaatgaagaggtttctgctccgtcctgccaccaatgttatttgcgcatccgcaggaggtgacagctcctgtggtgtctgaccacccccaactccgaagtccagacaagctgtccgcccagaatatgaggctgacttgggcacactaggggaataccccaaaggcctgaaggaggtgccactgggctgccagcacttcaggaaggcacagggccccacacccccgagatccaagctgcactggctggcagggggcagggcggggggtggcgaggacacagtcccgtgtgtcccagcaccggtgccaccctcctaagccccgggcaggcagtacgtacatgcggaccccgcctctcaaagcacgtttatggaaatgaacagggtggggtggcccgcgctcgccggtcacatgttggctcgttcccgctgcagccgcgagttgtaggcgcgagacacggtgttccaggcgtccatgtagcggtccatgcacatggcgatgcacttctgctcggagttgtccagggagcccccaggtttccctatacacttccggaaacacttgtccgtcatcctctgcagcagctcctgcgcgttggccacggcgatctgcactttcacctgctccattatgagccctgggtccagcttcccgctgccggagcccccgaaatcggagccgaagccgccctccatggctccgcaaagtcaaccggaccgaggccgcgtgcgccgactcgtaactaactgc

SEQ ID NO: 123457 - DNA, 735 bp, Homo Sapiens
atgtgtttgtttttagtttttttccgtcctccaccaatttatttgcccatccgcaggaggtgacagctcctgtggtgtctgaccacccccaactccgaagtccagacaagctgtccgcccagaatatgaggctgacttgggcacactaggggaataccccaaaggcctgaaggaggtgccactgggctgccagcacttcaggaaggcacagggccccacacccccgagatccaagctgcactggctggcagggggcagggcggggggtggcgaggacacagtcccgtctgtcccagcaccggtgccaccctcctaagccccgggcaggcagtacgtacatgcggaccccgcctctcaaagcacgtttatggaaatgaacagggtggggtggcccgcgctcgccggtcacatgttggctcgttcccgctgcagccgcgagttgtaggcgcgagacacggtgttccaggcgtccatgtagcggtccatgcacatggcgatgcacttctgctcggagttgtccagggagcccccaggtttccctatacacttccggaaacacttgtccgtcatcctctgcagcagctcctgcgcgttggccacggcgatctgcactttcacctgctccattatgagccctgggtccagcttcccgctgccggagcccccgaaatcggagccgaagccgccctccatgcctcgtgccgattcgacaccaggctcgtactagctacgttt

SEQ ID NO: 123458 - DNA, 1017 bp, Homo Sapiens
  misc_feature (985)..(985): n is a, c, g, or t
ttgagcctgacttgggcaacactaagcggaatacctccaagggcctgaaaggaggtgccactgggcctgccaagcacttcagggaaggcaacagggccccacaccccccgagatccaaagctgcactggctggcagggggcaggccggcgggttgcagaggacacagtccccgtgtgtcccagcaccggtgccacccctcctaagccccgggcaggcagtacgtacatgcggaccccgcctctcaaagcacgtttatggaaatgaacaggttgggttgcccgcgctcgccggtcacatgttggctcgttcccgctgcagccgcgagttgtaggcgcgaggacacggtgttccaggcgtccatgtagcggtccatgcacatggcgatgcacttctgctcggagttgtccagggagcccccaggtttccctatacacttccggaaacacttgtccgtcatcctctgcagcagctcctgcgcgttggccacggcgatctgcactttcacctgctccattatgagccctgggtccagcttcccgctgccggagcccccgaaatcggagccgaagccgccctccatggctccgcaaagtcaaccggaccgaggccgcgtgcgccgactcgtaactaactgcgccggaagcgggccgcccggggcaccacgggaaacggagtccgcgcggacggggacggaggactacaactcccacacgaccgcgcgcgcccgggccattcaaggtcgcgcggggggccctccgctcatgcggaggcctggacctgccgttacctacacgagctacccgtggttgcgactccgcgggaagagggaggccctgacttggccggggagtaggggggctactgcgtgcggccgaggccgatcactttgtactcacgctctgcctccagctcgtcccgaagggcctgccgcgccctcgtgccgaattcgccacccaggcctcgctacttaggaccttttacagngcggttttgtttctactcacaggtcggggggg

SEQ ID NO: 123459 - DNA, 646 bp, Homo Sapiens
  misc_feature (582)..(582): n is a, c, g, or t
attgttagaagagaatactttattttgaaataaaatacaaatgtgcaaaggaaattagctcctcctgccccccctttgaacaatgagtcaatagaatgtgagactgggtagattagcagataataggcaaaggtctagcttttcagtggcaacttgaagaaaccaaagatgaatgatgctaaaggaatgaccctttggtacctgttttaaagtacttctggcccccttcttttataaacccccaggagcccagcaccacaccttgttaccctacaatgatcactcacgctccacgatgtcactaatgtaataactgaagatatgggccagtttgtccatgtcacgttccgacttgtaggtcagggtgaacctgtccattaatgctgtaaaccctgaccaacaaagcagaaattacgatgttaactccaaatcctaaactttttggcccctttctccccacacatcaggccagtgtaaaggaaacagatcccttcaagctgagtaattcctttatccattaacatggtgtaacttagaaactactaagggccaggttggttgctgctgccactgggaatccanaggaccaccctctctgcttccaagagctggagatggtgcccttttcatctggagccagctcttt

SEQ ID NO: 123460 - DNA, 1082 bp, Homo Sapiens
  misc_feature (556)..(638): n is a, c, g, or t
tcggtacccgggagtggagagagaacggttcaggcagagggagctgtctgggtgaatgcaggaagacaggaaggagcctggcctgggagaaaggctggtgtcaccagagcttcaacagggaggcatcacggctctagaagaggctggggaaggccacgagggtctcattttgcagggtgctggaaggcatgccaaggaatttggtctttggccaagaacaaggcgtgtgccacagtcacgtagtgacacaggtcacatttgctttctgccagcagaagagactggactccagtgcaggggagtgtgcaaggacaggttctggggggtggaggcatctgtggacatcccagggcaggggtgagggccagaacatccctaggtcctgagactacagtttctccacatttagatcagacattctcttccaaggaaggaaaccaagagaggctggtgaaccgtctggtaatgacaagccctcacttttgcagccctcttggctggtccctcagcaggtcttccctatgagcctgcaaaggagacaggcaggaatgagttnnnnnnnnnnnnnnnnnnnnnnnnnnnnnnnnnnnnnnnnnnnnnnnnnnnnnnnnnnnnnnnnnnnnnnnnnnnnnnnnnnnagtggccctgggcatcctgagtccagttctgggcactctgcacctcacaggcctggactcagtccttgccaccaccactctcagagtccttctcatggaggggcttcaggcagccgggatccccagcctcttgcccagatgccagctgctcagagtcttctgcagggattccattcgggacacctctgccagcctccatcttctccttcaggttccgtttgaagaaaccaaccttgtacagcactatgaaaatgagcagcagcagcagcagccccccgatgccgctcagcacgtagaggtagagcatctgcttctcatacaccacgtcaaccttcatgacaacctgggagcagggggaggggagtgccggaaaatgccttttccacgcctgaaagtccctgtgaacctggttccattccccatctcctcctatccggactgcat

SEQ ID NO: 123461 - DNA, 678 bp, Homo Sapiens
  misc_feature (643)..(643): n is a, c, g, or t
  misc_feature (660)..(660): n is a, c, g, or t
tttttttaaaaagtatttattgcaaagaatgctggacacagtgttgcatgtggctgagattcaataccatccattctggggaactcgggaaaatatctgcaacatgggcacgccagccagcatggccgaaatgtggcagccaatcagctacacctcagcccatgcggagaccatgccagggcagaggccggggggttgcccccactcatgccctgatccctggatgtccctctaccctgtccccagtcctcgtaatgcatccagtccagcaactcctaactcccctctgtacacagagagaaaaggcctcggtggtctcacctcagatgacatccagaggtacatgcactgttgctgaccaagggaacccactatggctaacaaatgagtgtgtccaggtgacaaaagtcaccaaaactccaaaatacacagaagcaaaggctgcagtcctaatgtcccaaaggcatggtccttgggctctgggtctaaagggcttggggctctgacagatgagtctggaaggatcttgccccggctccgccttggacatctcttagcagagcagcacacaaggatgagagacaccggccagggccagggacgctaacttctctcagggacaggtggcatctgcaggctgcanagccctgggaggctggnaagatgtgctaccctcca

SEQ ID NO: 123462 - DNA, 711 bp, Homo Sapiens
  misc_feature (608)..(651): n is a, c, g, or t
aaaaatcctctctgccttctgtaacccttaccaacaacagtgccctgtccatgtaggggaaacttctgggctgtattacaagtgggtaggaaggtataaggatatcatagtgggaagtattgcttagaatgccagtacttgtttgctgtggaaggtttctaggaatggattgcttagtctaaagtaagcactaccaccatccacgttttcactcaacacagtgccttttaattggtgactaacatcaaaacaccttgacaaaccgttaaaacagtatcagaaaccatgtgtacatccctgtgcctcttagattgctaagttctgctctcattcttacttcaaaggacactttttaaagaattgttaatgcttttttataatacaagtcatagccctgttggcaaaaagaaaaaagattcagtgagaaagaaaaatcactgataattccatcatccagggagaaccactgttatttaagtatatggccttccagacttttctgtgcatttatagatatttttaatgggatcaaagtgtacatactgttttgtaactttttttcactcaacaataccatgactgtcttgctgtgtcaagtatatttctannnnnnnnnnnnnnnnnnnnnnnnnnnnnnnnnnnnnnnnnnnnattaaactactgttcaatttttaggtttccaactttcattaataaagtgctttaaagaac

SEQ ID NO: 123463 - DNA, 970 bp, Homo Sapiens
tttttgggtgaaaaattgtaatttattgaaactcaactcaaaaaatataagatgctgtagtgtacaatatattacacaaagcaccctcaggtgcacattcaagtcaagtaagaactccatatccctttccctagccctcccaccctgggaccttagtatttgttccatatacaatcatgcacacttaatttgaaaaaggaagccccagtatattttgatgtattaattagcaccaaacaagtgtacagttccatttttttaataaacaaacaaacaaaaataaacccaatcattaaaccaactggagagctaatggactcagccaatactgctgacatagatattatacattcatgtaaatacacagcctattctaccctaaacaacggtgtggctgcttctcagcctttgttcgagttggcaaatgtccccatgttgcagtgttggagccagtctgttactaaaacaaaattgctacttatgaacttcctacacaaagctcatctgtcttttttgttggaaataagtctaaaattggtgtggaaaacttagatctttcaagaaccaccactggccgaagataatgaagctgttttaaggcaagctctccacagtctgttaatgctttgtccaatacaaccctcaggttttccaaggaaggaactgttgttgtttcagctactattaaaggtgggattgcagtcaggttctcatgaattgtagagtcactggaagaatgaggtatgtcaacttcaggttcactgtcattcaccatattatttgccacaacattccctgttaaatcattactggactgtgaagaattacttaatgttaagtgctctgaaggctcccaatcatcaaaatcatcttctttctcttcactttcctggataaatttcagaaatgaagatgtcaatcccataggtttgtaagtcttcaaattcaatgacccgggcctgcgatggtt

SEQ ID NO: 123464 - DNA, 815 bp, Homo Sapiens
taggtcaccagtttgttaactttattattcagagagcaccttgcagggactacgcacaaaataggcaatcactaagtatttacagacgaaggcaacttcaacttccttattgcatccaaaagcaagggcactaaatggtgtaaaagacttcaaatgcagggaaagacaatacaacggtatttgtcctgctcctagggcaaatcaggaaggaaagaatttccagggtctaggggaggctcaagaatgaagagagtacctaattcacaacaaaaggccaagttctgttcagaggattttatttcaagataaatcataacttctacccatactatgattccaaagggtgaaaaaagtgttttgcctcttctaccctccaaagagggcatggcaatgccaatgtctctaaaatgcctctgcatagttgtcagaagctatatttcagtcattgaaaatacttgtccattttcagctgaggtaaggtttgttaggaaacctctgtaacaacttattcaatttatttggaagtaaactcccagactctcccagggtttcctgtattgatctcatctttcgggcttcctgagccctcgcggcacaatcgaggaagccctggatctcttttctgcacgcatcgtcgcggaattcattctgcttccagcaagccatcatcaccgacatctccgtgatgcaagtcgcctcgcccttctcccggcgccgctccccgacgcggttagctagaatgagaggtttattgggcttcagcacatggttccgcgggttcccaaaccgcgccagacgactccgcaggcggccgc

SEQ ID NO: 123465 - DNA, 1020 bp, Homo Sapiens
tttagcacttttggcatttcttcaaaagggagtggtctgggattgccaggttgtggaaaagtcatttccaggaggccacaacaaatgaattttcctcagagctggggttccattagctggtaatcagggctgctgcccccaggcagttttcagagtctggaaccgctttacgttgcccactgtgaagggcatagagggtgtcaatcagccattgccggtcagtattcctcagggactccagcacagggtgcatgaggagttctcccaaagtttaaaaactccctcgccgagaagtcctgctagccccagcgtgaaggctctctcctgctgctcagacactggtagatccttgatgtcaacacagcccaaaaaccgcagagcatctttgtagtaggacgcgtggtttccgattgtttgatagtatttactggagagatcatagaaacgactgtgaaccgatgtcacaccaggaaggttgttgagcatttcttcaacatcttcaattgtttcctttgtaacctgtaggtccccgatgtttaattttagagctccaattgctgttttacacaggatcactgcctcatcactacttttcaccttctcacgagtcttttccagaaaagtaagagccacattaggatcagtcatctgtctaactacgtgaagaatgatttccacgagggacagaggattcaccctgtgttcaaattcactgataaagttttcataaagcttaatgagaccatctccttgggcaaagcacggatcctgcacaaaatcaagcacctgaagtgtcagctgatgccacaacttcttcgtgtagagctcctccagacggtgccacacagcgggctgcccgggcccggagctctggctctgctgtaggaagcccggtacgtccttcatgacagcaggaagacccccggcacagaagaacaaccgggatgtcagcaccgcggggatggctgccggaaatgccctcgtgccgaattcaacacccaggcctcgtacctgccgtat

SEQ ID NO: 123466 - DNA, 1640 bp, Homo Sapiens
ttttaagaacaaagcagaggggtttattataggaacattctcaaaccgcaacggaaaagatgtccgtacaggtggatggggatggagatccacctcggagtacacagacttcagggggcctcctgcctggcacgttctttctctcccgtatcacctaagaccctgagacccccaccctctgcaggagagacccacaaagaagcctcctccctgtggcctggctcccatcagggacagtcctgtttttagagcaagaacagtctgtacttcagacaggatcccaacccccacccaaattcaatgtcgaccgtctgagcagccagcttcattggctgcaaacgcctctctcaggtgagtcaaaggagacacgacggggaaccagggggccctaggtgaggatgtcatgggcctggtgctccaccagcatctccatgctcttcacatccgtgcaccagaactccaggcggtccttcattcccttgatctgttgcaaatccaacactcggggctgcacccaggtcatgtggactcgtttgtccacctcgtctatactgcctttcaccagccccaccgaaagggccttcatcaccagaagctccacctcattcactgtgattttagcacttttggcaatttcttcaaaagtgagttgtctgtgattggcaggtcgtgtgaaagtcatctccatgaggcacaacaactgaattttcctcagaagctgggcttcattagctgctaaatcaggctgctggccccaggcagtcttcagagtctggaaccgctctacgttgccactgttgaaggcatagagggtgtcaatcagccactgccggtcagtattcctcagggactccagcacagggtgcatgaggagttctccaaagttaaaaactccctcgccgagaagtcctgctagccccagcgtgaaggctctctcctgctgctcagacactggtagatccttgatgtcaacacagcccaaaaaccgcagagcatctttgtagtaggacgcgtggtttccgattgtttgatagtatttactggagagatcatagaaacgactgtgaaccgatgtcacaccaggaaggttgttgagcatttcttcaacatcttcaattgtttcctttgtaacctgtaggtccccgatgtttaattttagagctccaattgctgttttacacaggatcactgcctcatcactacttttcaccttctcacgagtcttttccagaaaagtaagagccacattaggatcagtcatctgtctaactacgtgaagaatgatttccacgagggacagaggattcaccctgtgttcaaattcactgataaagttttcataaagcttaatgagaccatctccttgggcaaagcacggatcctgcacaaaatcaagcacctgaagtgtcagctgatgccacaacttcttcgtgtagagctcctccagacggtgccacacagcgggctgcccgggcccggagctctggctctgctgtaggaagcccggtacgtccttcatgacagcaggaagacccccggcacagaagaacaaccgggatgtcagcaccgcggggcctcgtgccgaattcgccacccaggcctcgctaccttaagtaccgttatagttactgccagttccg

SEQ ID NO: 123467 - DNA, 865 bp, Homo Sapiens
gttcaaccagctctgcccagccatctcaaattgtgaccctttacgttcccactttgaaagcataagggttcaaccaccacctcccgtcagtattcctcaggactccagcacaggttgcatgaggagttctccaaagttaaaaactccctccccgagaagtccttgctagcccccagctgaaggctctctcctgctgctcagacactggtagatccttgatgtcaacacagcccaaaaccgcagagcatctttgtagtagacgcgtggtttccgattgtttgatagtatttactggagagatcatagaaacgactgtgaaccgatgtcacaccaggaaggttgttgagcatttcttcaacatcgttcaattgtttcctttgtaacctgtaggtccccgatgtttaattttagagctccaattgctgttttacacaggatcactgcctcatcactacttttcaccttctcaacgagtcttttccagaaaagtaagagccacattaggatcagtcatctgtctaactacgtgaagaatgatttccacgagggacagaggattcacccttaatgagaccatctccttgggcaaagcacggatcctggcacaaaatcaagcacctgaagtgtcagctgatgccacaacttcttcgtgtagagctcctccagacggtgccacacagcgggctgcccgggcccggagctctggctctgctgtaggaagcccggtacgtccttcatgacagcaggaagacccccggcacagaagaacgtaccgggatgtcagcaccgcgcgaacgcgtgggtcgacgatatcccgggaattccgaccgtaccagcctgcttttttaaccacgggttcatagta

SEQ ID NO: 123468 - DNA, 689 bp, Homo Sapiens
acagaaacgagggaaaacactccctgatttttaatctgacttcgggtaacagctcaatgggcgtcacacacacttccagaccctgtggtgggaaaccctgggagcgggtggaaggagaaggacagagactcagaatgggggtggagggacctgaaatccaagacctgggttgaggtggaggcggaagggggcctgtcaggggatacattccaatggctcccacaggggagcagccagaggcctgggctccgcccccccaccccaggtgcctcagagttggtgatggggcatgtgagatgctgccatccttcatccgctccctctggtgaaccagggggcaggggtgcaggagactaaaggggcaggccctctttgttaccctcccagccactctaaggtgtggggaaggggagccacctcctctgtgtcagagggaggctcacagagggcaggtcacttgcccaaagtcctgcagcacagcagggactagaatgcaggaacactagactgcccaaggtcagggcggttgctgtgaggctgtgctaccccccacttggtggacagagtgggaatccgctggggaagcagaatcatagattccccctacaatggatgttggtgataattccccacccacgacccttcccccagactctgctccatcaccagtctgggctacctgatttcct

SEQ ID NO: 123469 - DNA, 2073 bp, Homo Sapiens
  misc_feature (201)..(201): n is a, c, g, or t
  misc_feature (251)..(251): n is a, c, g, or t
  misc_feature (374)..(374): n is a, c, g, or t
  misc_feature (429)..(437): n is a, c, g, or t
  misc_feature (503)..(512): n is a, c, g, or t
  misc_feature (868)..(884): n is a, c, g, or t
  misc_feature (1350)..(1366): n is a, c, g, or t
gtgctggtccccccctactgtctgtgttcccccgcccacaccataggggcgggcgacaataaagttgtttattttggtacgagcgcttaacagtcggggggagtttcaaccaccaagaaggggtgtttgttagaggacacacccccccgcgtcctccccgtcgtcacggcatcattacccccgcgcggcgggcaccacccnccctcgcttataggcgcccacccggcgtttgtgcttcttaaggaagaaangggcgcgtatttatttagtataaaaaatggctggagttcgcgggttacgttagaactacagcggttctggtccgcgcacgtgcagccgaagcgacatttttttgtacaaagagaaccccgganaagacatttttccagttgccccgcgatagcgctgacgcacgccccttcactcgannnnnnnnnggggggcgccccatcggccgggttggagtagagaaaaaaatattttaaggggtgcgcctcttggtnnnnnnnnnnccccggcgggcctctgtttgagtaaccaccccccactgtctgcgcacttacggaggcgcgccgcggggtgagtttgtgtgtggtgccaaggggaagtgttggttttttgcgggcgatgtgcgtcccgagaccacccccccgcggggtttggccccgccccggggggcgtctcttttttgttttgggggggaaaagttccagccgcccttcagcccagaggcgtgcggggtttctcccggcgggaaaacccgctttacgcccccatttcccgctctccttttcgggggccggtgggccgcccacagcaacggttttgcaaaattcttttggggggccccgggggccgccggcaaggnnnnnnnnnnnnnnnnngcgcgcgttttgcgccgccgagcaacgtcgggggtggggaggagcccttgggggtttgttcttggcttgtttcggtttcttgtgtcaggttcaaaaacagttttatttcattattatccaagtacctttgaaaagataattaattgtacaagtgtcatcgcatgaaaaacagactcgggcagcccctgctggcctagcctgagaaatgtacatatttacacgggccctcagaaaggaggacccaggactgcacagccggcggctggaggcaggtgcagtgctccgtcgccgattcacacagtggcaggcaagagacaagctgtgttgaaggcactcggtggcgcgtacaattgacagaggccctgcaggcctctgcatccgggcctgggccccagccagacctgggtacgtgggcaaatcccagagggaaagtagatcccagcacacgtgcccaagggaggtgccnnnnnnnnnnnnnnnnntcacctgaagctggcagcagggacctcggctgcctcacttgggctgggccctccaagtattgctatgaggagtggtccaggctgcctccttgggggcaggacagaagcttgtggaccacttggagggaccccctacctgcctctagacacgggtagaccacagggatgggtggtacacccaacactgttccccatcgggctcctgagtacgaggtcatctgcctggccgtgacacccgtgcccgccaagggcctcgcctggcacagcggccagcccaccagcctatcagtccaccttctccactttgccgatgatcttctcctcaaagacgggcaggacggcctcgtcctctcgaacctcctcaaacaccaccccacagtcaaactcgtcgctcactttcttgaagtagtatctgtagctgccctttttggtcagcagctccttgaactggcccagggtgacagcgcggcccctcaccagggtgcggtaggggatgggttccccgcagaagtagtacgccacaacgatgctgtcacacggctgggcactcccgccgcccaccttcctctgcgatcttgtcctctgtctcggagagctccatgtccgacacggctggtaccacgtgcagcaccggcgcgcacgctggccagctgggttagggggttgggagctgggtggggtggcatggtggggtcttggatgaagag

SEQ ID NO: 123470 - DNA, 1886 bp, Homo Sapiens
  misc_feature (95)..(95): n is a, c, g, or t
  misc_feature (134)..(633): n is a, c, g, or t
  misc_feature (651)..(672): n is a, c, g, or t
cgacgctaaccgatggtactaagctagttgggagcccccttcccgagggaaagcgacagttccgtagcgcagtcgaacagagaccacgaggactncaggggaacgcttgtacttatagtctgtcgggttcgccnnnnnnnnnnnnnnnnnnnnnnnnnnnnnnnnnnnnnnnnnnnnnnnnnnnnnnnnnnnnnnnnnnnnnnnnnnnnnnnnnnnnnnnnnnnnnnnnnnnnnnnnnnnnnnnnnnnnnnnnnnnnnnnnnnnnnnnnnnnnnnnnnnnnnnnnnnnnnnnnnnnnnnnnnnnnnnnnnnnnnnnnnnnnnnnnnnnnnnnnnnnnnnnnnnnnnnnnnnnnnnnnnnnnnnnnnnnnnnnnnnnnnnnnnnnnnnnnnnnnnnnnnnnnnnnnnnnnnnnnnnnnnnnnnnnnnnnnnnnnnnnnnnnnnnnnnnnnnnnnnnnnnnnnnnnnnnnnnnnnnnnnnnnnnnnnnnnnnnnnnnnnnnnnnnnnnnnnnnnnnnnnnnnnnnnnnnnnnnnnnnnnnnnnnnnnnnnnnnnnnnnnnnnnnnnnnnnnnnnnnnnnnnnnnnnnnnnnnnnnnnnnnnnnnnnnnnnnnnnnnnnnnnnnnnnnnnnnnnnnaagaattcggcacgaggnnnnnnnnnnnnnnnnnnnnnnatataaacagtttatttactctaaacagcaacacagacaaaacgccatataaacacaaaggaagtggcgcagaaccgagatgctgccctggggtctgaggctcaaaagcagcacagcccaggttctagaaggttctagagaggagcggcaggagggagggtgcatttccatacagccagctgaggccaagtgcagctctgcacggtgagaagcatgcctgcatcccagagcgaggaactcgcccctgggggacttacccaagtataaaagtttataattttacagcagttgaaatactgacatcaatattaaaataaaagcgagttttacataacaatcaaaaatacaaaagaccgaaggaagagaccctgtatggaaacgggcaattcagcgaatcgagaccgcacacccgcggcggcaatggaagatggcgcccgcccaacccccccaggtgactagtcattgtatggagcaactttagatttgcaaaaatgttgtaaacaagttcttgccaaaccaatcccttccttctgacgatgccacaaggtcgctgcttatgagggcgcaaacttcttggcttgtgctcggacccttttctcgtactccactctgttttggcagtaaatcgtgtaggcctctgcttgagctgggtcttggatatttggttcatttagaagttcctgtattcctaataggatctgtttgattgtgatggctggcctccagtccttgtcctcctctaagatggacaggcacactgtccccgaagggtacacattcgggtgaaataatggtggttcgaatttacattttggtggcgaagatggataatcatctttgaaaagcatccgtagtttaaacaagcctccttcccacggagtccctttctttcctggaatggcgcactcccagttcatgaggttcatcgtgccatcgggattttttgttgggacagccacgaaaccaaatgggtggtctttcctccatgctttcctctcctgggcgagtctgctgagggcgatccccgacatgttcaaagtccctcgggcggccgcagccccggcgagcgtagcggacaggtggaggaccgagcggggcggcggcggcggcgcttccctttgtctcgggacttccctccggagcccgctccgcgcgcagccagagccctcgtgccgaattcaacacccaggcctcgctacctagccctgaggggt

SEQ ID NO: 123471 - DNA, 699 bp, Homo Sapiens
  misc_feature (515)..(619): n is a, c, g, or t
ctgaagaatagcatctttaatgagtgttctaatccttgtcatctgaagttttgaaatatattcaccagggtcagaacaatacagagatagtatttgtataatatagcttattttaaatttcatttaagccctctcatttctcctcccacagctgctgttttgttttgatgaaagagaaataaggaataaataaaaggtcaatgcttcaaactaatctacctgtgtactccctgaaaactctgggactgtatccacagaatagggaaaactattctcaaatgcacagtcactcatgcctcaggcatgaactgatgttctttcaaaagaaaaaagaacaggggcaaacttccagtcctatgtttgacacatactaaaaccccaaagagaagactgaattgtatttgttctcagacaagacacccctgtgaccacagcataatgaattctgctctaacattttagtggttcaatctcccgacaagagtaagtattccagcccggcctggtggttcatnnnnnnnnnnnnnnnnnnnnnnnnnnnnnnnnnnnnnnnnnnnnnnnnnnnnnnnnnnnnnnnnnnnnnnnnnnnnnnnnnnnnnnnnnnnnnnnnnnnnnnnnnccaaaattactgggctggtgcgggcacctgtaatcccactgcttgggaagctgaggcacaagaatcgcttgtacccagga

SEQ ID NO: 123472 - DNA, 1622 bp, Homo Sapiens
  misc_feature (271)..(516): n is a, c, g, or t
ccggtttccctgtgttggtctttccctgtgtggttcctgttttaaagcccgttccgctgcttcggctgacgtgtgttctttccatgcttagacccgggccaacgttcagtcctatgttgacacagcgttatctccctatggtgaggctgaattgtatttgttctcagtgccaggacacccgtgtgaccccagcatatggattctgctctgacatttagtcgttcaatctcccgacagagtaagtattgccagccaggcgtggtggttcatnnnnnnnnnnnnnnnnnnnnnnnnnnnnnnnnnnnnnnnnnnnnnnnnnnnnnnnnnnnnnnnnnnnnnnnnnnnnnnnnnnnnnnnnnnnnnnnnnnnnnnnnnnnnnnnnnnnnnnnnnnnnnnnnnnnnnnnnnnnnnnnnnnnnnnnnnnnnnnnnnnnnnnnnnnnnnnnnnnnnnnnnnnnnnnnnnnnnnnnnnnnnnnnnnnnnnnnnnnnnnnnnnnnnnnnnnnnnnnnnnnnnnnactaagtgagactctgtcttaaaaaaattagaaaaagaataaggaattcctatctgtggtggttgactgctataggatgaagtgtgagattactactcaggatagaaatggtttgtatctgtcatttttgttcaagtcctctttatatttggttccattgaggaaaaccaccctctctaatcaggagatcacgttctttctgttatcctagtcattttgtagagtgtgttctggcccatgggctgtgtcaatcatacttaataaaatgataggcctgaatggagcattcaagtttctctagtgcaatcctctaattttacagattttaaaaaaccaaggcccagagaaggtaacacctatttcaagaacacgcagccagcctgtgcaaaggctcatatccttactgacattaaaaaggaggcaaaagagtaattcgattcagatttgggagaacaaaggattgtgtttatacagatggctgggagttgaggaggaaggtagacactggagaaggaaaagctgtccagtgcccagttgtgcagatgttttcactcagccccagctgcctgctggattccaagcaagctgaccagggcctccaggagcctactgggtttccgcagcacaaggccttatgctggtgacagagatgctctgccctctgcatctcagagcgcccgcctcacactcagacatcgtctgctccttgccgttcacttccacacaaatgctaaacccttcttcctcgcactccgatgcttctcggcagacacatttgctgctctcagcatcacattttccccacagtgggcaggcaccacaagctttctcagctgaggcaggcagagtacagctgtccctaccagtaagggtgtaatttctaccctgacagtggagaacatgcatcttgcaaactgtcagaggcagtatccttttgcttctctcatcttgagcacatacatccaaggaaggtccacattcgtagggcattttacaaacacatcttgaattctgcagtttctcccagcgctgacatttaggcactgcctgtgttaacggattttctttttgtacacagcgggcattcttcatctcaggactccact

SEQ ID NO: 123473 - DNA, 727 bp, Homo Sapiens
  misc_feature (628)..(628): n is a, c, g, or t
  misc_feature (636)..(636): n is a, c, g, or t
  misc_feature (664)..(664): n is a, c, g, or t
  misc_feature (695)..(695): n is a, c, g, or t
tttttttagagtccacaactttatttagttccattacatataacttttatagttacctagtatttatggcaagtgatacgctccttttaaggacatgatataaagttttcatttttaagttatttttatgtcagacttttaaaaaatgagtacacaatatggataatacaaggacagagtaaaaatcatgaaggtggcatggaatcacccctgtttgggagaacatttccaccatcaggaaatgtggggaatcttaatcctctgaggtctgtgatctgtgcccttctccagtgaggggtataggagaggtcagtgcatgtcaaatcagtctgagtctttaacatcctcaagtatcttcttcggcccactgctaaacatcacattttccccacagtgggcaggcaccacaagctttctcagctgaggcaggcagagtacagctgtccctaccagtaagggtgtaatttctaccctgacagtggagaacatgcatcttgcaaactgtcagaggcgagtatccttttgcttctctcatcttgagcacatacatccaagggaggttcacattcgtagggcattttacaaacacattcttgatttctgagtttctccccgcgctgacatttangcacctgnctgtgtaaacggatttcttttgacacangcggcattcttcatctcagggactcacttanggggctgagcacagagaaatgctgaaggacct

SEQ ID NO: 123474 - DNA, 815 bp, Homo Sapiens
tggattacaggtgtgaccaccatgcctgggccctggggacacttttttcagaggccagatgtcaacttccatctccacatgcctcagtttacacatcattgcatctcagcacagagccccatcatgtagggttactttgggttattctgcccctgtgagaagaaactattggcagcaaagccatactgccctctgccacctctccccagctcaggccagctgcgcctctgccgtgcagtcaatcgttggctctgtgggtggcctggagccaggccagcacccctgctaagccagtgccttcacgggcgctgatttctgccgtggtgatgttctgcttggcacaagcaatgatgtctggaagcctgattaatgacttcatctcctccgtggacatgtaacagggtaggtcgattttattgaagagtatcagcaccgatgcttctgcaagttgttctgcagaaaggagacctaagagctgcacacaggatgcagagagctgggtggggtcagaggcgtccatcacaaacaggagagaacggcagtttccatagtaactggaccagatggggcccatgcaccccccaagctcccggatggtgatctttctctgtgccacgatgtcagtaagattggtgcccaccgtgggccgtgtcgggggcggctcccccaggtcgcctttcccatcccgggagctcacctcctgcagccgtttcaccagcagcgtcttcccgacgcccgtggcccccagcaggagaccctcgtgccgaattcgccacccaggcctcgctaccttaggaccgttatagttactgccg

SEQ ID NO: 123475 - DNA, 1104 bp, Homo Sapiens
  misc_feature (37)..(37): n is a, c, g, or t
  misc_feature (62)..(62): n is a, c, g, or t
  misc_feature (116)..(116): n is a, c, g, or t
  misc_feature (247)..(247): n is a, c, g, or t
  misc_feature (431)..(731): n is a, c, g, or t
gaaggggcccagttggcgctttttggcggtgccagtncaattggttggcttcggtgggtggncctgggagccagggccagccaccccctggttaaggccagtgctttcacgggcgntgatttctggcgtgggtgatgttctgcttggcacaagcaatgatgtctggaaagcctgattaatggacttcatcttcctccgtgggacatgtaacagggtaggtcgattttattgaagagtatcagcaccngatgcttctgcaagttgttctgcagaaaggagacctaagagctgcacacaggatgcagagagctgggtggggtcagaggcgtccatcacaaactggggaaaaagaaaaagacagcagcaatgccccgctgccaaacttcctcccctgggcctcacagacctggcactgggagagcaaaactgcnnnnnnnnnnnnnnnnnnnnnnnnnnnnnnnnnnnnnnnnnnnnnnnnnnnnnnnnnnnnnnnnnnnnnnnnnnnnnnnnnnnnnnnnnnnnnnnnnnnnnnnnnnnnnnnnnnnnnnnnnnnnnnnnnnnnnnnnnnnnnnnnnnnnnnnnnnnnnnnnnnnnnnnnnnnnnnnnnnnnnnnnnnnnnnnnnnnnnnnnnnnnnnnnnnnnnnnnnnnnnnnnnnnnnnnnnnnnnnnnnnnnnnnnnnnnnnnnnnnnnnnnnnnnnnnnnnnnnnnnnnnnnnnnnnnnnnnnnnnnncaaagtagctttaaacaaagctttgggaacaagcagaagcagagggaatcgagttttatgaagacgacctggtgtcactcgtctctgtcctcatgtggccatcagttctccatactggtatccgcggcacaggccaggagagaacggcagtttccatagtaactggaccagatggggcccatgcaccccccaagctcccggatggtgatctttctctgtgccacgatgtcagtaagattggtgcccaccgtgggccgtgtcgggggcggctcccccaggtcgcctttcccatcccgggagctcacctcctgcagccgtttcaccagcagcgtcttcccgacgcccgtggcccccagcagatcccgggaattcc

SEQ ID NO: 123476 - DNA, 2443 bp, Homo Sapiens
  misc_feature (31)..(31): n is a, c, g, or t
  misc_feature (68)..(68): n is a, c, g, or t
  misc_feature (72)..(72): n is a, c, g, or t
  misc_feature (125)..(126): n is a, c, g, or t
  misc_feature (194)..(194): n is a, c, g, or t
  misc_feature (223)..(223): n is a, c, g, or t
  misc_feature (809)..(842): n is a, c, g, or t
  misc_feature (2170)..(2208): n is a, c, g, or t
ggcggagtgcatatatgttgtatgatagtgntcagacgaagcagagaagagatatcgacgcgtcgcgnaggnggggtactgataggatgtgatatcattcgtgtcgcactcgacgagatactgtnnatgtcaaccgacgtcggttcagtacatgctgcgcccgtgcgcgctgcggtatacgcagatgcgggctntagatatcggtcgtgagatgacggtgtgntcttcgtattggcaggataggttctctgcatcgtacgttggctctcagagggagggtcgtcgctgagtagcgtcaaatgtctcgtctctctaggacgcgctcgcaccgatagtgagcgggcgtgcggggtgcgggcgtgccgtctaccactgttcgtggtccgagggaagggtccccgcgggggcgtgtgttttttctggggatgaagtggcagggagatgaaacaccatcgatggatgtggcggcgcgtgggggtgtggcgtcttagaggaaaagtgtggtgggtactcgcatcccggccgtcatatatttagggcggcggcggatcgtcaaaaggcgctgagtgtgtgttactaaagacccgcagcaggggcgcagtgttacgggcaaaggcgatgttggcggtatacggcggcgccggcgcccccagcctgagagttttgattggctttttttgcggatctgttaccggacgcccacggaaatggtcgtgtggctgcattaggtcgttcgcgcgttttgttgtagcggttgtcgcacgcgggtatggttttttgcttggctcgttgtgtccgtgtttctctcnnnnnnnnnnnnnnnnnnnnnnnnnnnnnnnnnngtcacgcataggcttgtattcaggaacaattttacaaactccagaaaaggcagcaggagatccagaatctctgtgtgccttctcttcatcctacccccagaaaaatggccagtccagcccagcacctgctgcagcctcaatattaagggactgcttgtcccatctcttgcccaggggaagtcggagagaaagctcgcccgtgtgcatgtttgatataggctgtgtgtgtaggcagggagtgggctagaggaccctggacaccttggccagcctcctaggcagtgagttagaggaaagaggactaggtcttgcacctctgccatacctcgggatccagacagaccaggcagcgtgttaatattggtgttctgcatggtggacccaagctaaagtgttgcctgcagccaagggcctgggcacggaccatcttccatcagcccagggcccaggcacagggccaccagctggggatggtggacaccgtgtccccattcccagcccggctctagaaggcactgttttgtggactgcgacccctggagggtgggcagggcctggacaggcacaggcggcgctgggtctccagtcggcagaagcgggttctggttggacacccgggtggccatgcccagcccacaggtggtcgagcagggtccccaggcccgtgctccattctgggcaggggacaccagggggcagggaagagacaaggccagaaaactggggtccttgggctggaaggggctgggtccccagtccccctccttggccgcacacccactcagggcagcacttgcccaggacctcgaccctcctggggtgggggcagtcccagctgggcagccgcacatcctcgctgcacagcggcacgcaggtgaagccgccgtcctcgcagcggcagcggatgctgcagtggggctggaaggtctccccttcccgatacaggcggccgttcacctcacagctgctgtcgtcctctgccaagaggcacagggccccccgtccaccgggtcctgccccgggctggcagaccaggccctggctggcgtcgcagacgtggagttggtcgcagggctcccccagccgccgtgcacatacccggcagcagccacagccatccagcaccaggggtactcccagcgggcatcggggaggtggccaggggcaggtacatggtgtcgggcacagctgggtacgcacctttgagaggaggcagaggagggagaaggccaggaggtgggtcttcggtgtgcctctcatgtcccctgcagagccagctttgagcctgaaggtgaaactgtgaaggccaccaagggggtgcctgtccnnnnnnnnnnnnnnnnnnnnnnnnnnnnnnnnnnnnnnnaaagcctgagccagtgccagcaccaagagcctgtgacagcttgcagaggcctctccagctccttccagcccaagagggtcctagccctgctgtagttgtgaagccctattccagaccccctgtccgaaccccagcggggctgcagataccagaagcattcagtaaacacccctttgcagagctgacccaaggtctcctaagctccgtggcctgactctgggtagccgcggcccag

SEQ ID NO: 123477 - DNA, 699 bp, Homo Sapiens
tttttgcaggtttcaaagaggaaaaaagcacgtttgttgttggtaggcgggcgtgaatgggagggttcttcaccttctccaacacctcgtatagatgggacgttgcagggcaatagaaaaggcagcagatgggggcgtgttttgccccactctgtacaatatagaagaatctcatatagatactttgtataaaagccacgtgtcctcatttgtgtcctcttattggctggctgggctgggggtactgggggacaaagaagctggggtgatagaccaggacacagggataccccatggtccccttcctctggctgtcccctggtggggtcactttggatccttggtgggagcatagcacagctccagtggccgggacaccttccagaatttctcattcaccagctccagggtcagcgagccattcaacgtcgtgaacgccccgcctccaggtgcgatgtagatggtgtactgcttttcactgacgccctccaggctgggcaaagcaggctcctcaggaccgtcacctcctccggcacccccaccctccccgccacacccatcaggtccttcggtgtcagaggcagcccctccaggccctcctggctcccctgcttcctgctgttgcctccgctcgatggcaatgcgcatgggccaagtacttggagagtggtccactgtggcatttccagttgtctttac

SEQ ID NO: 123478 - DNA, 1058 bp, Homo Sapiens
gagtttctttataaagaaactgaagcagacttttattctttattgcaagcagattcaggtctcctgcttagataatctagagaaaagtccaatataatattatccagtcagtttatctacagaaataaaagttaaaaacagaagcatacaaaataaactttactgaaatgttagattggtttaattaacaatttaatttttcaaagctgattaatgaattatcagttaaatgttactgtgtggagactgatttatgttaatgcacctactatgtttaataatttaaaaataaactccagtatttatgatgatgacaactatggataccattcatgttaaatacatttttgaagaccttcttttattacattacataatgaacagacattttaaatggtgacgcagacattataattttaagtcagacacaatatatgcatattaaaattctgtatactttgataaagtaaaaaataaagctatataaattgatctttagatttttctgcaaaagtagaatcacactttcatgacacttctaacatatcccatcaaggctgcttatagacacaacatcagaaagattttcattccagttcacccacctttagcttaaaaagaaaaaagattgcatttgccaactgatatttttcctgtttttaaagttacaaatgggtaacttcctaaagaaatgtaggatgcaaggacctgcatatcaagctgttagacactgagttgtcaaataaataatactaacattaaataagagtggttgtattattcagtactagtcagtgcaaaacacatgagctgagtggtttgaagaacaaggctggaggtttcccgcgacagcaccggacccctggccaaggctcaactcaggggagtccccacagcctgtctaaacatttgtttaaacgctcagcaagccgagcggatggtcaccctgttggagacgctggccgcatctggcctcctccctcgagacggtgtggcctgcttgttcgccctgtctgctcagacacaggctgggttgactggggctttaggcggccgca

SEQ ID NO: 123479 - DNA, 2142 bp, Homo Sapiens
  misc_feature (312)..(423): n is a, c, g, or t
  misc_feature (449)..(579): n is a, c, g, or t
  misc_feature (583)..(583): n is a, c, g, or t
tgtgaacagaatgtactggtttttgtaaaagaaaaatgggtttatgccaataaaaggccatatggtagaatattcacccaagctgccaggaatcagggtccccgaagagaagggatagaaagcactctcactttatatacacacacgcctttttaaaatgagtatatatttgtctaataagcagaaaaatacaaataaaaacaaatcattagtagagcgtttctcataattactttaaaatgtcttagcataatgaatggtgcatacgctacaatttatccatccttatttatttattgagtcggggtctcnnnnnnnnnnnnnnnnnnnnnnnnnnnnnnnnnnnnnnnnnnnnnnnnnnnnnnnnnnnnnnnnnnnnnnnnnnnnnnnnnnnnnnnnnnnnnnnnnnnnnnnnnnnnnnnntgcgccaccaggcccggctatattannnnnnnnnnnnnnnnnnnnnnnnnnnnnnnnnnnnnnnnnnnnnnnnnnnnnnnnnnnnnnnnnnnnnnnnnnnnnnnnnnnnnnnnnnnnnnnnnnnnnnnnnnnnnnnnnnnnnnnnnnnnnnnnnnnctantccatcttattcatattatgtaggaatcagagctctccataatgtccactattataaatgaacagcataattcccttggtcataacttccattccaaattcttgctcagctctcggccccgtgtgacacctgggggtaagaaccaactacgtatgcgctcagaaactcacctggggtctcctggctgccgtgactgagtaccaggggcctaggcagagggagcaaccgagagaagagaaggcaagaccaggcccagccccttcatcggccctcgccagatcactctctctcaaggggtcaggattcagactttcgtgtttctctccaaatctgaagtttacaaaagtagccgagctgctcatcagggatatgcaagtctgctttctgcagcagagaacagaagtgaaagggagaagggatgagcaagaaagtctctggatttcaggagaaggaagacagccccaagggcaggagaaacacttgtgaagggtccattgaagagacagagagggggcagctctggcctctctgctgccacttccctcattcgatgcacagcggtggggctcacaccattttccactcagcctcttccgcacaacctgcacatctatcgtttcttcaggggctggagcctgtttccacgatgcctagccaaaatcaggaggggggtcctggggccagcgactaccactgtgaccagattattataaagatgggggaaatgtggctttaaaaaagtggggaaaggaccccattttcccaaaatgcaaattttttcttctattgccccccatcatttgcacctatttttgtcaagtccaaacataatttgaagtgaggtaggtagtttctctctacttctgccgttgtccttggggtgatgtcggggcctgtgccctaaatgcacttgtctcctgtgcaggggcagtgccagggctggcatcagtggctggtggagcttctcagttggctattttctcaatctcgtccaaatcatctgtgtccaatctttctatcttcttattaaaatgctcctggattctgttcaggatgttcatgctgtgcttgctgtccaccatgttcactgccaggcccctcttgccaaagcggcccgtgcgcccgatccggtgcaggtaggtctcattgtcaggattcccgtccttgtccacgggaagatcaaagttgatgacgacagacacttgttcaacatcaatgccgcgggcacacacgttggtggtcaccaaaaccttctctttgccctctcggaagcgctcaatcactgcagccttctgttccaccatcatctccccactcagcagagccacctggtggccttcttttgagagctctgctgccagccaactagctgttttgcgagtatggcagaagatcatggcttgagcaatggtgatggccccgtagaggttacacaaggcctggaacttctcgtctctgctgctgcacaggacatagtactgcttgatggtgtccagggtctcttcctcacgcttcagtttgatcctcgtgccgaattcgccacccaggcctcgctcctt

SEQ ID NO: 123480 - DNA, 1462 bp, Homo Sapiens
  misc_feature (611)..(622): n is a, c, g, or t
tttttgacgggacacagcaccgggcagttttatgtactgacttcctttaagcgttatctaataaaaagtgtgttatctaataaaagttccacacagtatttaaccgtcttaattcatctagggtagcaggggatataacagaactgctgggttccacaggaggttgaggggccaggatccccaacactagatatcttccttagcggggagaaagctggaaattacaagatgactcaacggagaaatgggcttcagtgggtaactttcagaaaattataaacccatatcagtgcacatagcgagggaaaggggagtttacttgaggtttgggttactgtgagcagactacttggggtgactagtattggcatcagaaccagaaatccaggcgctcagggcagccctgcaggtggggtgggtctccaggctgctccatactcagcgcctgtgttcctctccattcttcgggatccatcagacatactccattgagtacccccatcccacccccttttcagcttcacaggtttcacagaaatttctcaccacctgtttaaaaataaaaataattcagcctcttgacatagcttcttctaggtaaacggtcttcnnnnnnnnnnnngtttccttctgctcataaaagaagggtatttccttgtctggtttttagacagaacactagcagtctgcagagtgtcaaagatgttctcctgggggattacactggcgctacagggtggcaggatcgtggagtcagcattagttggtgtccatgctgcaagcctcatcatccccaaagccctgctgagagctgcttggtcgtgtccctccatcagaggaaccagaactgctaagtgaaggtgtcttataaaattcatcatctcgacgttggtaaaatagcacataagctgctttagtcactatctgatcctcagaggccagggacacgttgctatcatcaaagtaataccatttaccattcagtttgttcttcgcatatgcagtgtagtggccaacccccatggctccataatgattggacacggcaatgaggtcgtacacataaggccttgctgacaggttacagacaaactcggacatgttcagccctctgattgggaattctacgactgtgtcgagcttatccctccagtatctgttgtaggagaaacgtttgaggtggacaccaggatcttgggcaaggaccataggtcaaacttttttgtggcctgttgatgcttcttacagttgggacagtaccaggggtcatgctccccaagggtctccatggtggtgaagagctcgatgcagtctctcagggccactgtggtcttcttcttcttctgaggctgcaacatgctcacatgcttctcgtaggcctcagattcttgctcatcatagtaaagtctccgagtttcactgtcccaatccatggccagtgtagatcgaaagttggcggccg

SEQ ID NO: 123481 - DNA, 717 bp, Homo Sapiens
tttttttccaattcattttgcaaatttaatgtaactctgataccaaaatatgacagcacacagaaagcaaacaataaagcaggaacagcaaacagatttttccatcacatgacaccctcagctgattggccataactgccttgactgctgtgtggacaaagattccaaggatgtactttggctccatgggaaggactactgcaatttattagcggtatctgtaaacatggggaataaatctgaaacctcactagccatacgagaagccacaggcaccaagactggcggctccactgccaaagccagcactggtgctcggtccaccaccaaagccagcaccagtgtttggtccaccgccgaagccagctcctgtgctcggtccaccgctgaagccactggtgcttggtccactgcagaagccaacaccagtgcttggtccaccgctgaagccaacaatagaactgggtccactactgaagcccgtgctggtgctgggttcgccagtaaagccagtgctggtgttggaaccactcagccctggcttcagcctcagccacagccacagctgcagcttggacttccatctccactgcctcgcggtactgcacagcccagtccttggggtctttcttctgcaccctgcatgcaaacttgaggactttcatcttgctagtctcgtggtaggagcgcaagcccccagaagaactcatattcagg

SEQ ID NO: 123482 - DNA, 692 bp, Homo Sapiens
tttaaagcatagcgtatatatttattttataaaatagaaaaaaaattaaagtatattgattgttctttacacattttgattacactgaatttgttaatttaatattagttcaaataaacattgttatttaaaaaatgctgagtacacgattaagctgaattttgttttccatcagaaaaagaacttcaggagtatataatggtctacaggtgcttcccatccaaaacactaggtcttcatcttttgtttcttagaccactcaggtgcttcttttttagtaaagagtgttggtttaggtgtaaatatattgtcttcatgctctttaggcacattcaaagtctttgatttctgattttctgtcacatgttttggttctgttttagtgagaagtaagctgttctcagaatgtttactatgcatcttaacgagaatctgtttcattgctgccaattcctcacgatgatttagaagttgttctaaatctaatgccatttgattcttcgtctgtagtaaagctgacttttctttatttaagttgctgacatctttctcaagttgtgcaatagattccgtcagtgaatcaatcttagaatctctctgacgcactgattcaatgagatacctgtaaggctgttgagtctggtttaatagcgaattggctctgtcaagctcttgtgaaagctgtgttactt

SEQ ID NO: 123483 - DNA, 1066 bp, Homo Sapiens
  misc_feature (82)..(116): n is a, c, g, or t
  misc_feature (444)..(444): n is a, c, g, or t
  misc_feature (993)..(993): n is a, c, g, or t
  misc_feature (1005)..(1005): n is a, c, g, or t
  misc_feature (1014)..(1014): n is a, c, g, or t
ctcgatagatcactatagggcgctagctcgttgtagccgaacgacgagcgcagcagagtcagctgagcgaggaagcggccgnnnnnnnnnnnnnnnnnnnnnnnnnnnnnnnnnnncagtcgacggtaccggacatatgcccgggaattcggccattacggccggggcagcaagatggatctactgtggatcctgccctccctgtggcttctcctgcttggggggcctgcctgcctgaagacccaggaacaccccagctgcccaggacccaggaactggaagccagcaaagttgtcctcctgcccagttgtcccggagctccaggaagtcctggggagaagggagccccaggtcctcaagggccacctggaccaccaggcaagatgggccccaagggtgagccaggccccagaaactgccgggagctgttgagccagggcgccnacttgagcggctggtaccatctgtgcctacctgagggcagggccctcccagtcttttgtgacatggacaccgaggggggcggctggctggtgtttcagaggcgccaggatggttctgtggatttcttccgctcttggtcctcctacagagcaggtatcgggaaccaagagtctgaatctggctggggactgagacattgcaccagcttactctccagggtaactgggagctgcgggtagcagctggaagacctttaatggtaaccgtactttcgccactatgcgaccttccgctaatcggtgaggtaagaccactaccagctggcacttgggcaagttctcagagggcactgcaggggattccctgagcctccacagtgggagcgccctttaccagctatgacgctggccacgattccaggcaacagcaactggtgccgtgattgtccacggtgcctggttggtatgcatcctggttaccgatcaaatcctcaatgggtcgctcatgcagtgtctgaggctgccgcccacaaatatgggcatttgactngggcctcaggcnttgggtgtngggccaacccttacccgcagggtttcgggatggatgctttcgatagggggca

SEQ ID NO: 123484 - DNA, 1175 bp, Homo Sapiens
  misc_feature (1064)..(1098): n is a, c, g, or t
aggtgtggcaacgcaagtggcttcgtctccggaccgtaactggaggaattaggacttgctgcagagtgcctaattcgaggcttattcgtaccttgcgtagggttgcccacaccacggcttgaggcccagtcaaggcgatatctgtggcggcaaccttcacgacactgcatagcgacccattgagattgaatcggtaacaggaatgcataccaccaggcacccgtggacaatcacctgcacagttgctgttgccttgaattcgtggtcagcgtcataggtggtaaagggcctcccactgtggaggctcagggaatcccctgcagtgcccttctgagaacttgcccagtgccagctggtagtggtctacctcaccgaggaggcggaaggtcgcatagtgggcgaaagtacggttaccattaaagtcttccagctctacccgcagctcccagttaccctggagagtaagctggtgcaaattctcatttcccagccagaattcagactcttggttcccaaaacctgctctgtaggaggaccaagagcggaagaaatccacagaaccatcctggcgcctctgaaacaccagccagccgcccccctcggtgtccatgtcacaaaagactgggagggccctgccctcaggtaggcacagatggtaccagccgctcaaggtggcgccctggctcaacagctcccggcagtttctggggccttcctggcaccggagcaggttcactggatctcctggctcacccttggggcccatcttgcctggtggtccaggtggcccattgaggacctggggctcccttctccccaggacttcctggagctccgggacaactgggcaggaggacaactttgctggcttccagttccctgggtcctgggcagctggggtgttcactgggtcttcaggcaggcaggccccccaagcaggagaagccacagggagggcaggatccacagtagatccatcttgctgggcccaccaggggaaggatgccagattccccggccgtaatggccgaattcccgggcatatgtccggtaccgtcgactgnnnnnnnnnnnnnnnnnnnnnnnnnnnnnnnnnnncgccgcttcctcgctcactaactcgctgcgctcgtcgttcgctgctcaacgctaggccctatatagtctatacagtt

SEQ ID NO: 123485 - DNA, 1161 bp, Homo Sapiens
  misc_feature (1084)..(1118): n is a, c, g, or t
ttgaaagggctaaaatgattttatttttaaatgtggacaggcaagcagaggtggttggcaaaggcaaggtggctgacgatccggaagctgtacaggagagataagggcactggctgccagagtgccctatcgaagcatcatccgaaccctgcggtaggggtggcccacaccacggcctgaggcccagtcaatgccatatttgtgggcggcagcctcagacactgcatagcgaccattgagatttgatcggtaacaggatgcataccaccaggcaccgtggacaatcactgcacagttgctgttgcttgaatcgtggtcagcgtcataggtggtaaagggcctcccactgtggaggctcagggaatcccctgcagtgccctctgagaacttgcccagtgccagctggtagtggtctacctcaccgaggaggcggaaggtcgcatagtgggcgaaagtacggttaccattaaagtcttccagctctacccgcagctcccagttaccctggagagtaagctggtgcaaattctcatttcccagccagaattcagactcttggttcccaaaacctgctctgtaggaggaccaagagcggaagaaatccacagaaccatcctggcgcctctgaaacaccagccagccgcccccctcggtgtccatgtcacaaaagactgggagggccctgccctcaggtaggcacagatggtaccagccgctcaaggtggcgccctggctcaacagctcccggcagtttctggggccttcctggcaccggagcaggttcactggatctcctggctcacccttggggcccatcttgcctggtggtccaggtggcccttgaggacctggggctcccttctccccaggacttcctggagctccgggacaactgggcaggaggacaactttgctggcttccagttcctgggtcctgggcagctggggtgttcctgggtcttcaggcaggcaggccccccaagcaggagaagccacagggagggcaggatccacagtagatccatcttgctgccccggccgtaatggccgaattcccgggcatatgtccggtaccgtcgactgnnnnnnnnnnnnnnnnnnnnnnnnnnnnnnnnnnncgggccgcttcctcgctcactactcgcctgcgctcgtcgttcg

SEQ ID NO: 123486 - DNA, 1024 bp, Homo Sapiens
  misc_feature (906)..(940): n is a, c, g, or t
  misc_feature (944)..(983): n is a, c, g, or t
gccatgtatttgtggcggcgagcctccagacgtcgggcatttgcggacccttggcgatgttgtatccggttgaccggatggcattgcctctcagtgccccgtgggaccgatgcgcgtgccgccagttcctgtttgctttgcacttcggtggttcagccgttcatagctggtataaggggccttctccactgttgtgaggctcagggagtccccttcaggggccctctgagaacttgcccagtgccagctggtattggtcttaccctcaccgaggagtcggaaggttcgcatagtggtcgaaaggtccggtgaccagttgaagtcttccagctcgtacccgcagctgcccagttagccctggaggagtaagctggtgcatattctcatgttcccagccagaattgcagactcttggttccctgagaccgtggctctgtaggaggaccaagagcggaagaaatccacagaaccatcctggcgcctctgatacaccagccagccgcccccctcggtgtccatgtcacaaaagactgggagggccctgccctcaggtaggcacagatggtaccagccgctcaagtggcgcctggctcaacagctcccggcagtttctggggcctggctcacccttggggcccatcttgcctggtggtccaggtggcccttgaggacctggggctcccttctccccaggacttcctggagctccgggacaactgggcaggaggacaactttgctggcttccagttcctggtcctgggcagctggggtgttcctgggtcttcaggcaggcaggccccccaagcaggagaagccacagggagggcaggatccacagtagatccatcttgctccccggccgtaatggccgaattcccgggcatatgtccggtaccgtcgactgnnnnnnnnnnnnnnnnnnnnnnnnnnnnnnnnnnncggnnnnnnnnnnnnnnnnnnnnnnnnnnnnnnnnnnnnnnnnctaatacacgctacgccctatagtgatctatcagtctcccg

SEQ ID NO: 123487 - DNA, 544 bp, Homo Sapiens
  misc_feature (45)..(45): n is a, c, g, or t
  misc_feature (158)..(174): n is a, c, g, or t
cgcttccgttggtagcttgagtcccatgcctcccaccctgccatntgaggaaggggtgacaagtggtcaaggagctgtggccacagacttttccagggtggtccttggcaggtgaggtgcgtctgtgccacccttgtcaggagtcattgacgacgggnnnnnnnnnnnnnnnnngggacctcagagtgggggcaggcagaagggagaaccagctcaagacattttggaggatctggccctggggttcttcagagaacaccctctaggggctttggggacatggcctgtccccacatccagcacttgcctccgccatggtcactcggcagcccttttcccaggagaagacacctctgggagcctgctcagtgcttgtcctgccatcctgtgtcctgggactgagggttactccagttgctctgtgttgcatactctcccccgcaagcctgtgtatgaagaattgtcccctggcttccagcaggccatggctggctgttttgtgactgttacattgtgcaggggtaattattagcgtggcttttac

SEQ ID NO: 123488 - DNA, 738 bp, Homo Sapiens
taaactttgaaataataacaatttaatagacaaacaaaatagtatcacagtgaataaaatattaaagcattatctttttatcattcaatagcatgaagagttttctggtgtcatacaaagattgctctctaaagccaaattaactagaaaaaaagactgccacaatacacggagacacaagtttatcactgtagacattatacagagaagcaaaacacatcgtacccatgtccagagctttctagaaatctcattatataactcaccaatttactcaatgttacatttcaaacaaaacgaacatttttttaaaaaaaccttacaaatatataaatccaaaccacaaaacatcttctaaacatggtatttactctaaacacaaatggatttctggaaattgcatcacaatgctatctaaactagattttatgaaatcataaatgtatttagctgtatcttggggcttaaattcattggaccatatcccatgtatactattctcatcctacttactttgggcatacatattcccgaagtttagttttacaattaaaatcaaactgctattccagttggaatgggcgcactgtacctgcatcacacaacaaagatttcataacaagttaaagtcgtcttagtaatgcccctttctaagagttccaatattttaatgttaatcattagtaatgggttttagagactagaatgtttttttaaatttgtgcctagtttctgtga

SEQ ID NO: 123489 - DNA, 674 bp, Homo Sapiens
  misc_feature (632)..(632): n is a, c, g, or t
attttctcaagttgattttattaacaaaaagtgcaaactattttgaacaaaagtaaactatgagtcacagcattcagcaagacatcagacacggaagagtgaacaatattcactaagtaaaatacagcagatgagatgtctctcacatgtatatttaattattcatgctttttcaatagtctcttagtcaactttcagtgtaatttccacaaatatatagcagctcaaacacaaatgcaggagcacaatggcaaagtttggcaactgttttgggctaattatgagtatgaaagaaaaccttatatcacagtttcacgttcatgtaagccactgtgcaacatgaatgaatctttaaatgtgttgacactgaaatcaatgtacaactaatgaaaataaagaagaaaagggggctttaaaatatttgttgcactacagtcgtatagtaagaggcagaaaaaaatgaaagaattttaaataatcttacacgtgtctacagggccaggaacgtaatgaatccatgttaacttaatttcatttaaaattacatttgtagaagtcacacaacagaaagataccatgcggttgaacagtgtgcctgtactttgacaagtgagagaagatacatactccanaaaggagattcagtctagtgttacttcagttattcacatagt

SEQ ID NO: 123490 - DNA, 1268 bp, Homo Sapiens
  misc_feature (1156)..(1190): n is a, c, g, or t
tttttttgcctggcccagactttactcgctcccggccccacgggcacaaggaacactgccgcaaacgtcggggcccagcctgagaggagcctctgggcggcccaggcctcctggggatccctgccaagctggccccgggctggaaggtgcatgggcagcacacgaaaccaggatccacccactgcccaccggtggccctcacagctccccgggatctgtgtcctcagtgcaaagggcctggcagggaaagctgggcctgttggtcaggcatggaggagctgtgtggtcactggccactggctctcttctgcaccaccgccggctctgacagtgcctgctgctgcagctgctggatcagctccgccacatagatcttgaacaggggtacagggtccttctcctccaaaagtctctgcttctcaatggcctcctccagcgtgaggcccacccactctgcctcctcctctgggatggcaaattccttgtacttgtcgtagatggctgcccgccgctcggggtcctcggggtgcagctgggggtcctgccgggcaagccgcagcagcatccctcgcttcaggtccatcccaaacttggagcacaggtcctccttcggggtcttgaggatgtaaaagtcgagcccataagcctcatcgatgaggtccagggtccgcatggtcacagtcactgtgaacttcttgtccaggatctcactgtagaactctcgctcaaacagctgtggcttccacactttcttcagcctcttggagagcttgtcgttgttggcatatatttggcccaggatccagccctcgccgccccacaacccccgctgggattcggggggaaagtagatgggaatgggcacgtcctccacacgctcccgctgcccgttcttggggttgatcttgaacttggccccatgaggcctatagtgcacgggagtgggcgtccgctcctcctccagggagcgcaggtagtggccgggcaggcgggaacagatgccctcccgcagctgcagccgcttccagagccacacgggatacttgtgtagaggcatcgcgagcctttcagggttcagagcccaccggaaccggaagccgatctccccggccgtaatggccgaattcccgggcatatgtccggtaccgtcgactgnnnnnnnnnnnnnnnnnnnnnnnnnnnnnnnnnnncgccgcttcctcgctcacctgactcgctgcgctcgtcgttcggctacgacgagctagcgccctatagtgatctatcaa

SEQ ID NO: 123491 - DNA, 918 bp, Homo Sapiens
  misc_feature (50)..(50): n is a, c, g, or t
gggatctggtgtcctccagtgcaaagggcccgggcagggaaagctggggnctgttggtcaggcatggaggagctgtgtggtcactggccactggctctcttctgcaccaccgccggcttctgacagtgcctgctgctgcagctgctggatcagctccgccacatagatcttgaacaggggtacagggtccttctcctccaaaagtctctgcttctcaatggcctcctccagcgtgaggcccacccactctgcctcctcctctgggatggcaaattccttgtacttgtcgtagatggctgcccgccgctcggggtcctcggggtgcagctgggggtcctgccgggcaagccgcagcagcatccctcgcttcaggtccatcccaaacttggagcacaggtcctccttcggggtcttgaggatgtaaaagtcgagcccataagcctcatcgatgaggtccagggtccgcatggtcacagtcactgtgaacttcttgtccaggatctcactgtagaactctcgctcaaacagctgtggcttccacactttcttcagcctcttggagagcttgtcgttgttggcatatatttggcccaggatccagccctcgccgccccacaacccccgctgggattcggggggaaagtagatgggaatgggcacgtcctccacacgctcccgctgcccgttcttggggttgatcttgaacttggccccatgaggcctatagtgcacgggagtgggcgtccgctcctcctccagggagcgcaggtagtggccgggcaggcgggaacagatgccctcccgcagctgcagccgcttccagagccacacgggatacttgtgtagaggcatcgcgagcctttcagggttcagagcccacccctcgtgccgatttaacaccaggcctgtactgctatg

SEQ ID NO: 123492 - DNA, 589 bp, Homo Sapiens
  misc_feature (45)..(45): n is a, c, g, or t
  misc_feature (100)..(100): n is a, c, g, or t
ggtgctgtggtacggatacaattgatgtgaccaggtatgatgagngagaagattgcttgcctgtccacaggggccggggctttaggatggccggctgtgnaccttcccatcccacgtcgacaggaacatcaggaggttcatcacttcaccccgctccaggaagacgtctctcttggtgaatttgcgcactgctgtgagtgtgtcctgcacaatacccatgacaggccgattgctctggggggtgacaatcatgcgaggaaccatggccagctcctggatctctgctcgcgtctccagagactgtggcaggtgcaagttcatctcatccccgtcaaagtctgcattgtacggagttgtcacactaagattcaagcgaaaggtagaccatgggagaatgcggacccgatgccccatcatggacattttgtgcagagttggctgccggttgaagataacaatgtccccatcacacatgtgccgttccacctagagaggtgaggtaaggaaaaggtctcagtgaaggaggtatctaagaataaaaggacaatggacctaaagtcctttgcaagtccagtgcagtggctcacac

SEQ ID NO: 123493 - DNA, 905 bp, Homo Sapiens
cttgtttgtaaagtaaaatttagttttatttttaatgctccaaattttaattttgggtgtcatctcaaaagataccagcctataacaatttagtggagttcttacagtctagtgtacttataagcatttataactactatttgaggcatatggtagttttcaggggtagcttggtggcctgttggcaaaggaaaaaaaagtggagcctctggtactagatgaacatataaagccactcagtacaattctgctctttaattttgctcacttgtgctttcgtacccattggtttcttcagacttacatgtgttagctgttttaaagcagacagagcctacgtagatttacattactagataaggcaagaattgagcagtgactaaagcatttgaatagtaacaggttgtaacattgaaagattgaaagtacgggtagtgtgtttttcttggcagtgattttatataatcagcaggaagtacagactgtcctcattttagaatttgtttctgtgaagtttggcatcaccatagtcaccatctttagtatgtccataggtgctgagtggtttagtttttcattttcctagactgtttgtttcaaagtaacttccaagtcaagtcttgaaagttaaattatacataattatacataatcttggcaaacaccatgctggctgaaaggttcgtacaatttgtaaagacaaattaatgtgctcagaaatggaatataaggtactatttttgccgtttatactgttgcttactgtcgccaaaataagacagtaacagcctggctcaacttgccttccatagcagtaatgacaaggcactgctgcaataaggatatattgttttgtatgcctgggctaaaggattggatgagctatagagcttcctggtacattt

SEQ ID NO: 123494 - DNA, 1494 bp, Homo Sapiens
  misc_feature (149)..(216): n is a, c, g, or t
  misc_feature (270)..(342): n is a, c, g, or t
  misc_feature (389)..(427): n is a, c, g, or t
  misc_feature (436)..(453): n is a, c, g, or t
taaagggggtggggccctaaattcgggggttccccttagaaaagacccagttttttggtattttggcgcttcggcggaaacccagttccccttggaaaaaaagaggtgggtagctcttggatccgggcaaacaaacccccccctgggannnnnnnnnnnnnnnnnnnnnnnnnnnnnnnnnnnnnnnnnnnnnnnnnnnnnnnnnnnnnnnnnnnngatccacaaaaaaaagcccgctcattaggcgggttaaattcccgggtactgcannnnnnnnnnnnnnnnnnnnnnnnnnnnnnnnnnnnnnnnnnnnnnnnnnnnnnnnnnnnnnnnnnnnnnnnnaccactttgtacaagaaagctgggtcaggaaacagctatgaccatgnnnnnnnnnnnnnnnnnnnnnnnnnnnnnnnnnnnnnnngcctcgagnnnnnnnnnnnnnnnnnncaaaacagatatagctggtttattttggaaacaagtctcatccagaaatgttatttactgcatttaaaaaccatggaaggcgatttgcatggttcctccccacgccctcactcccaccaagtacagctttaccacccaaggtcctttcaggaccccaggcctggcggctgtaggagagagcagtgaatcctaagggcaagagaatggcgtccacttgccagagtttctcagagcagagccagctgctcctccagacaggccggtgaggctactcgacaccctcacaaaggggaaaccctgaaggaagtacttcagggggtgcctgcccgatgcgggaggttttgggctagccctccccagatccccggcctgaggggcctcctccagctgcagaagtcaagctgccaaactgccaaagtactcctgcagctccagcagggcccggaagcgatgggagacagcgttcttctccgccttaggcatctctgcgtacgtctgctcatatccatcaggctgaaagcaggggtcccagccaaagtcctggcagcctctgggtgccacgatccggcccgaggtccggcccctgaacaggcgcacgggctggcttgggtccccggtgctgagtgcaaacgtgcagagcgcataggctgacttgtcctcgaacccggccaggagctggtggagaccttcaggctttaacttctccagaaaccactttatgtaggggccggggagccctccaagggcattgaagcacagacaagtgtcctcaaccagcacgggcccctgtacctggcgaactgcctcctgacatttctgtatggaaatctcatccggctccccttggtactccggcaggtcaattttctgtgccaccaaagtgcatggaaacttatctcctagaatctgaacgacctcctccagcttcttggcgttccccgttacaaacacgatcttcttccccaccaatgaggccgccatggtgatccccggttacccagctgagccaccgaaaactccttggcgtccagtgacagaaaa

SEQ ID NO: 123495 - DNA, 1500 bp, Homo Sapiens
ggcaggctatttttccagcaaggaacttgggggcgccgggtcctccaagatacggtgccccgcatggggttcccggcccctgaggggttctggaagttgtgccagggtctcctttttcatccaaccggggggtccagtgcccgcatcagcaggatgatggtaagccgggcaccatttattctcaggctccagttcctgcagctctttacaggattccagctcagacgccagcactgtggacttctccactgacagtccacacctgaatagctgctcgtctgtcgtggagtcccggcaccagccctcctggcggccttttaaaagcacgcattctttctggacatcgcctgctgtccaaatgacgcgaaatgtatgttggggcaactggtcgttgagggaggcagcaggcaggtcacagagcccagacatggctgggccggttccctgccatttggggtccttccactccaccaatcaggggagaatcatcaaccatgagcagcaagatttccatccctggagcccactaagaggggccgagagaaggagacagtcagacaggcctcgtcccggctcacatgcaggcagcgcagtgcatcctgggggtcagctcggcctaggagccaacggtgataaaaccaggcactctggtcattggggtcagtgaagaaggcattctgcaccagctccagctctttgagcagcacatcctcagggaggcgcccctgtggtccagaatccggctgggggtgcagctggggcaagagacaggagcggtaatgccaggaagagtagttggagaagtttcgggtgatgaggctgtcagtgaaggctagctcttctgcagggggcacggctgcctgtgtggccacaaaccgccgatagtcccagcagtgaaagttccgctcatccacctccaggaaacgggcacagagctccagctctcgggtccagttgggctcaggcaggcggcctagcagccagcatcggtggtgccaggtaccataagacttggggttcacccgcaggcagctctccaggaagcccagttctgccttcaccagagcagccaactcttcaggagacttctgagtctccagctgctggagcacctctcgtcggcagttccagagggtggcaaaatcagggttggctcccagaatctggcttgtcagttccagcacggactcatccagctcaccagcctggcgcttctggaatacggcctgggtggctgactggtatagcttcagcttctgctctcgctctagccttttggcctccgcctgctcttctgacgtcttcaccttcaggcgtccgtgcatggtgccggctcagggttcaagacaggggaagggtccagtggtagcccttgaagtctgcgctgggaggaggcgcgggggacgcggagctgcggcgcccgccacagagcccaggcgctggctagagcggcgccaccctcgtgccgaattcaccacccagcactcgctacctagcgca

SEQ ID NO: 123496 - DNA, 1248 bp, Homo Sapiens
ttttttttggtagcctgagagggcctctccattctttattcagtcccaataagttaaagggcaagggtagggggcagggcctcttaggtgaggacgctgctaactgaaggcagcagttcagccagttgctccaagatgcccaccgcttggcacagcgggttaccctgcaggttgaggaggaccagcctggggcaggaggcaagaggctggagcactgcaggctgctggaggcggttgttgcacagtagcagctcctgcagccggggtaggttggtgacgccgtccagggactctatggcattatcactggcctgcagcacctcaaggcagcgcagggcagccagtgcaggtggcagggttcggagacgattgtgtgacaagtcaagatgggtgaccaagagcagctgttccagatggcagagcactgtcagatccttgtgagccaggtgcagcacacgcacctcggcatactccatcttgagcacgctattctccagcaagaacttgctgcgcaggtcatccagatacgctgcccgcatggggtccacggccttgagggtctggaagtactgcagggtctccttctcatacagcagggggtccagtgcccgcatcagcaggatgatggtaagcaggcaccatttattctcaggctccagctcctgcagctccttacaggattccagctcagactgcagcactgtggacttctccactgacagctcacacctgaatagctgctcgtctgtcgtggagtcccggcaccagccctcctggcggccttttaaaagcacgcattctttctggacatcgcctgctgtccaaatgacgcgaaatgtatgttggggcaactggtcgttgagggaggcagcaggcaggtcacagagctgggagtactgggtcaaggaaatgccccagcctaaccactttttttgactgtcccacccagccctgccccagaccccaacttctgccccaccaatcctgggatacccagacatggctgggccggttcctgccatctggggtcctccactccacaatcaggggagaatcatcaaccatgagcagcaagatctccatcctggagcccactaagaggggccgagagaaggagacagtcagacaggcctcgtcccggctcacatgcaggcagcgcagtgcatcctgggggtcagctcggcctaggagccaacggtgataaaaccaggcactctggtcattggggtcagtgaagaaggcattctg

SEQ ID NO: 123497 - DNA, 1680 bp, Homo Sapiens
cagtcgacggtaccggacatatgcccgggaattcggccattacggccggggaacttcaattcaggcaccatattccttaactactcaaaatgaaaaatattttgagaattcagctgaaacagacattccaaaaatcaccaaaaaactatctcaactaggagaatcagagctttttgcaagttctggatcattttcattacagagctctataccagtctgggaaacagaaactggccatggtataatggaagaaccagaacttactttaataagcaccactgataccagtattgctgaaatggattttggcaaatttaaccctagaagagaagagcgagaatgaagcaaaatgcttctttcaggtgagtgtgtttctgcctcttgtatcagcaacagaagcctcagattatccagctgtatcagaactttccatagaaaaaccaaggacagcatctacagcagaaacccctcgcaggcttacacctgtaccagggagcttacaagaagcatttataaagaggaaaaaatcatttatggagagatcccaccagaggcagaaagaaataaggaataaaattcatgtctctgaaaattctcaaatcaaaacagttaaagagaaaccatctataagttcatctgtgagtcgtctaaagggcgtgaataaagtcagagcatcttttcctgaagacagaaagactacacaggctctaaggcaccaaaggggtctaaggttatacaatcaactagctgaagtgaaacaacaaaaggaagaaaaaacaaaacaagaagcttatgcccaaaacagagcaagggcaaaagaattccataaggtgagtataactgagggggaaggacttaatttttcaagcatgaagtacacaactgaaactcaaatttttattccttccacagaaaacactagagaaacttcgagccaaaaatacatgctgactttctagaaatagtgtaaaggttttttaattgtgtatatgtagcattagacaaaattatttaaagtcaataaattgttattcgaggaattccatgttgtgatttcttccactgtccatcaaggtcactttagatcctctaaagagctggagtcaaaagatttatcttcaagtttgccctttttaatgaaactgatccagttgtcctgtcagcccataattactttggcttctgtcatctcgttttaatatggatatactgatgaagacttcaaaattcaccaagaatctttgggatctaatttcttcaaccaatttactttagggtcctttttactgtaggtggtggggatctacctggttctcaatttgacaccctctcaacatgaatgagttcaaatcacattcattcctaagcgatcactcaagaatggtacagatgtgtggagtatgccaatacctttaactccagacaccatgttctcaagataaaagcctttgacattcatgatcctgtcacattttcaggcctctctgtccagtatttttggcttttgtagctctctttttagacaaagcagcttcttcagtaatatcctcttcttctaagtatacactcagtcttacagggaattcagaacttactatgaaactatctcctgccaatttgatatcacattcgttatcttcaagatgtgttgcatcctcatcctctgctgttgactcctca

SEQ ID NO: 123498 - DNA, 737 bp, Homo Sapiens
  misc_feature (670)..(678): n is a, c, g, or t
  misc_feature (701)..(701): n is a, c, g, or t
ttcgtgtaaaggttttttaattgtgtatatgtagcattagacaaaattatttaaagtcaataaattgttattcgaggaattccatgttgtgatttcttccactgtccatcaaggtcactttagatcctctaaagagctggagtcaaaagatttatcttcaagtttgccctttttaatgaaactgatccagttgtcctgtcagcccataattactttggcttctgtcatctcgttttaatatggatatactgatgaagacttcaaaattcaccaagaatctttgggatctaatttcttcaaccaatttactttagggtcctttttactgtaggtggtggggatctacctggttctcaatttgacaccctctcaacatgaatgagttcaaatcacattcattcctaagcgatcactcaagaatggtacagatgtgtggagtatgccaatacctaaggtaaaaaagtagattatctggtttttcataacgtttagcaaccgtctttttcaaacttttagcaactgtcttgtaattccttcccacagatctaacaatagtcctgtgagtaaagtaaaaccacagagttactctatgaggcgtttccaacgatgtgcaggctacaggaaaagccccatcgggatagacctcaaccactatttacaaggttttgannnnnnnnnaaagacacaggatctgccatgtncttttaaaatcgtgtgattcttgctgaatcacttga

SEQ ID NO: 123499 - DNA, 694 bp, Homo Sapiens
  misc_feature (557)..(605): n is a, c, g, or t
aaagtcaataaatttttattcaaggaattccatgttgtgatttcttccactgtccatcaaggtcactttagatcctctaaagagctggagtcaaaagatttatcttcaagttagcctttttaatgaaactgatccagttgtcctgtcagcccataattactttggcttcctgtcgtctccttttaatgtggatatactgatgaagacttcaaaattcaccaagaatctttgggatctaatttcttcaaccaatttactttagggtcctttatactgtcggtcgtggggatctgccaggttatcaatttgacaccttaagccatctcactcaagaatagtacagatgtgtggaatatgccaatacctttaactccagacatcatgttctcaagataaaagcttttaaaacaaaaagccatcgtatgtctcatcaacatgaaattggaatgcaaaattaatactgctgaggatttccctcatatcccatgctgtttaactatctattctacagtcctagaatcaatcttttttttaggagacaaggtctttgttacgannnnnnnnnnnnnnnnnnnnnnnnnnnnnnnnnnnnnnnnnnnnnnnnntgggctcaatccttttgcctcagcctcgccttcctgagtagctgcaactacaggcacacgccccactacccagctagtttttacatttt

SEQ ID NO: 123500 - DNA, 563 bp, Homo Sapiens
  misc_feature (427)..(427): n is a, c, g, or t
  misc_feature (478)..(478): n is a, c, g, or t
  misc_feature (519)..(519): n is a, c, g, or t
  misc_feature (522)..(522): n is a, c, g, or t
tttactgttttttaccttttaattttacccggagaaacatggtggcttacctttccaactcatattctttcattcccacttttacagccttcattacctcacggtgggcctcgctggagattttattggtatagcgcagaacctccagctccatatccgtcttaaacactcggccagccactgcctgtctctccaactgttctcgggctctgctccctggctccgcactggccacacagagccaccaccctttctcttgtttctgtgaacgagtggtccttttgccagggtcactctctcctactccttctttttccacagccgatgcccattcatctttcaggatacctccttggtcccaagctctaagacgaggcgagtcagagctcccagcactcaacgatctctgggtgaagaatggtattgntgacttcgaacttgctgatgccgtcaaaggaggcctccctgcagaccctgncgcttgtcgtgttgacgccacgcaaagtgaggaggacaganggnctctgtgacgtcaggacgctgggcatctcatctacgtactg

SEQ ID NO: 123501 - DNA, 1735 bp, Homo Sapiens
  misc_feature (46)..(59): n is a, c, g, or t
  misc_feature (71)..(71): n is a, c, g, or t
  misc_feature (74)..(224): n is a, c, g, or t
ctttggggggccgggccccccaaaaagttgtttaaaaaattttttnnnnnnnnnnnnnnccccacattttnttnnnnnnnnnnnnnnnnnnnnnnnnnnnnnnnnnnnnnnnnnnnnnnnnnnnnnnnnnnnnnnnnnnnnnnnnnnnnnnnnnnnnnnnnnnnnnnnnnnnnnnnnnnnnnnnnnnnnnnnnnnnnnnnnnnnnnnnnnnnnnnnnnnnnnnngaccattttaggaaaccttttattgcaaatgccattctgcatattgatttttgacagaaagtatcagaaatgcttctttcctgggaaaaggaatataaatgacagcaagacacattttagttgctactaaagaacagcattattttcaatcattttaagtcgctcatttaataagcaaggtataaaacagattaaaggtgggagcctgcaaaagggtaattaaaaaagtgtttcctccccgggaaacagcactgtttggtctgatcaaatgccgaagctgggatctgattctgggtgccgtctctcgctactggagtgctgaccagcaggctgcccatcacgaaaagaggttgcaaggccaggcccccaggtgcgctgggatttctggctggctctacttggggccagagaagggggtaaaggccttgtcacagcctgccatgcatgcttcaatctcttccacagtgcggggcacgcaggtcagcagctctatgccgctgtcagtcaccacgacgtcctcctcgatgcggaccccgccaaaaccgcgaaagcgctgcaggacctcgacggttaaggaaggaggcgcgggccgggtccgccagggcctcatccaggaggtggtcgatgaagtagatgcccggctccacggtgagcaccatgcctggctgcaggtgccgtgcagtgcgcaggctccgcaggccgggctcgtcgatgcgctccacgtcctctgggtagcctcccacgtcatgcacgtcaatgcccaggaagtggccaagcccgtgaggcataagcacggcccccaggtgagcctggaccatggcgtccacgctgccgctcaggatgcccatgtgggccagctcctccaggtggatgcggtcagccagcggtgcatgtcaggccaccagacacctggcttcatggcacccatgacggcacgggagctccgcagcactgcctcatagacggccttctggtctgcagtgaacttgccgttggcgggaaaggagcaggtgatgtcggaagcgaagcagtaatactcaccgcccatgtcgaacaggcacatatccccattctggatcgttcggtcgttgggagctccggcgtgtccgtagtgtagcacggctgagttctcaccactgccgcagatgcaggtgtaggagctgtggcgcatgccgccccgggagtagcagtagtgctcgaagaggctttccaactcatattctttcattcccacttttacagccttcattacctcacggtgggcctcgctggagattttattggtatagcgcagaacctccagctccatatccgtcttaaacactcggcactcaacgatctctgggtgaagaatggtattgttgacttcgaacctggaccccaggaatgcagacaagactgtccacagggaagcggctgggagcagctggaggcaaaggctggggccccatgtcaaggcccacggcatgcagggtagggggcaccagccagagctcctgcctcagtgaaac

SEQ ID NO: 123502 - DNA, 1007 bp, Homo Sapiens
  misc_feature (47)..(47): n is a, c, g, or t
  misc_feature (128)..(128): n is a, c, g, or t
  misc_feature (132)..(133): n is a, c, g, or t
  misc_feature (156)..(156): n is a, c, g, or t
tggccgggcccagggaagtttccggaagcacattgccttcaataggnggcggctttctgttctgccagtgaacttgcccgttgggcggaaaaggggccaggtgatgtcgggaagcgaagccagtaatnctcnnccgcccatgttcgaccaggcacnatatccccatttctggatcgttcggtcgtggggagctccggcgtgtccgtagtgtagcacggctgagttctcaccactgccgcagatgcaggtgtaggagctgtggcgcatgccgccccgggagtagcagtagtgctcgaagaggctttccaactcatattctttcattcccacttttacagccttcattacctcacggtgggcctcgctggagattttattggtatagcgcagaacctccagctccatatccgtcttaaacactcggcactcaacgatctctgggtgaagaatggtattgttgacttcgaacttgctgatgccgtcaaaggaggcctccctgcagacactgccgctgtccgtgttgacgccacgcaaagtgaggaggacagagggcttctgtgacgtcaggacgctggcaatctcatctacgtactggacgtcgtccacggcatacttctccttgaagtgctccttggaatggatctttcccatccaggtggcatggctggcaggaagcctgggcacaaacagggtcgacttcccagtgtcaacatcgatgacaccatagcagcctggctcagtgacaccgaacgcccagtgaaagaaggactcctggcggaagaggaccccggtgtcggtgcagtagcgctgagtctcctccccgccctgcaggaccacgatggagccggcctgcacagcagggttcttccgcagccgctcacacaggcgctgccggttcaaggcaaagagcgccagcggcaccttcagggtttcattccccagccaaaacgagggtccggtggccgccgccatgttcgcccggcaccgatcccgggaattccggaccg

SEQ ID NO: 123503 - DNA, 1259 bp, Homo Sapiens
  misc_feature (66)..(101): n is a, c, g, or t
  misc_feature (115)..(270): n is a, c, g, or t
ggggcaaagcattgttcccccgtttcctcttttcttctgggcgggccccgcccccccaaaagaagnnnnnnnnnnnnnnnnnnnnnnnnnnnnnnnnnnnncccccacagggggnnnnnnnnnnnnnnnnnnnnnnnnnnnnnnnnnnnnnnnnnnnnnnnnnnnnnnnnnnnnnnnnnnnnnnnnnnnnnnnnnnnnnnnnnnnnnnnnnnnnnnnnnnnnnnnnnnnnnnnnnnnnnnnnnnnnnnnnnnnnnnnnnnnnnnnnnnnnaaggtaagaaagtttctgcttttattgaaaatttatatatgactcagtattgtaataaataaacataaccattttcacaaaaaatgacagtgctatgctaaagaagaaaatattaaatgggggatttacttgtagtggcaagacagactttttatcaatacagaataaatattaacagcattcgtgagccaatgttgagacccaacaaaatgtaggaatcaagcatgatgtaagaaataattatccagagaaaaagatggtgtattctcggatgataagactgtctttgtaaactggtgcatatcaattagtcccatcctcacagctcaccttcaaaccacagggcttgtttctggctatgttaaaggaccatcctctgaggaaagcagaggagaggaactccattatccttacagtgaaacgcaaccactgcagaaaaactccactggtaaatagaacacagtttaataagtagattggatatgatctaactataaaatttaggtaacagagtaagtgttacatgtggcaggaccggaaaaaaatcatgacatttttcttatccccttgtacccctcccactgtcattatgctattaccaacaacaacaagaataatgtttcaaattttcctctcatcaaaaaatgagagaaaataacgagggaagtgtttttgttctttttcgaacagtttcttgaacacctccaataccaatcactcacaaggtgtctgtgcaaatctatttcacaggatttcaaggaaattgttaactcacaaaaaaatccttaaatgaagctattttggagttctgtatattatttggaaaggagggaggaaaagggtggtggtggtaaagtagaggtaaagtagtacaatccagccaaacaaaatgttaaaagttttaaatcaaccgacgcgtggtcgacgatatcccgggattccgaccggtaccagcctgcttttttgtaacgactgttcataggtccata

SEQ ID NO: 123504 - DNA, 705 bp, Homo Sapiens
tttagaggtaggtagtagaagattcttttattttaaaaaaaattacacgtggttctacaataatttttccttttaaaaagcttcaagatatacagggagatgcactagtccaagaaatccagcttgtcctttaacaaattatacagtttaactttcttcacatattgccacaatagttaattcacagtataatcttatttgtatttggaaaagaagaaataaatatacaataattgaaataggttcaagaatcaagctcgatttgtttccaagacttggaagaacttcttttgtactgttccagttccagatccttctgaattctcatctcatcgacttcattttcagcatactgaggatctctcgcagggtccttgatatctttcagcgtgttaatactctttggtggaaagagcttttcatacacttttttccacaactccataggtgagtgggcatgaagctttccaatgtcattttcaggaacaggaggagatcctatttgaccgaaagaatccaatcctgctgtgataaacagcggtttattctgatccacacatattgatttgcttttgtcaatgccaaatgccaactggttgataactccacgtatttttagtaatagagcttctgatttactgggtaacattaatgatgctccataataatgtgcaacaaatcgaagtgtcttgcatattaccttct

SEQ ID NO: 123505 - DNA, 681 bp, Homo Sapiens
  misc_feature (626)..(626): n is a, c, g, or t
  misc_feature (634)..(634): n is a, c, g, or t
tttttttaaaatattatcagattattttttaaagacacaatcaatcagaaaactttagaaaacgccagcatgcatcatccaaagtaatagattccagttcaaaaaaagagagagaaagacaggaatacagcagaaactcagaggtaagtgagatttgggaagacagttactttgtaggatgctgtgagcaacctgcacttcagtccaaaaagacagctggagtcaaagagagaatgaagcagaagttgcaccccaggcaaataaatatttggtgagaaaagcttctaatatcatctccaggaagatctggtcataaaatccttccagagagaggtcctcaaacccaaattcacttcttggggccaaacactgaaattggctgaacccctgtctacccccaccatgtttcacctgcaaggcttttctctcctttaaatgagatgagctaagaatggaacccgtgtttgaggatggtacttcatcttcacttgaccataacttgcttacacctttagggtaaatgtaatactttcaatacttttgctctctataattaaaaaccaaagcaaaaccccacaccaataacttcatcaagagattctcacttgggcattggacccattggncacatcanactctgatctgtatactctggggggattagaatatgcccagttggta

SEQ ID NO: 123506 - DNA, 1528 bp, Homo Sapiens
  misc_feature (656)..(667): n is a, c, g, or t
caaagtctaacgccaacacactttatttcccttcggacgcatctgcaagcttctgccacacctgaacccacggcctggcaccaacgctaccatcactccccagaggtcaatcctgggggctgaggagctgcaatttccctttcttcctgaaaattaagagaactgagactaattgaagaaacctcactgccattcctcactcagcagtctcagcaggtctgaaatgtggctgtgggaagttgccattttgggaaggcgtttattctctgcggctacagggattgcctgctttagaaatccccttacgctgattaactcaaaagtcccttcagagtcaagaaccaacctttcatggtccataaatgtggtatttctggtttcctgatcaggaggcttgcaaacctaaaaatgttcttccttccaaaaactaactaacctgaagtataaaacctcagacggcagaattttctatttctggaaaagctggctgcgatttgtttttgggacacagtgaggcaagtccctgtggcagagaacgaattggcccctcggcctctgtatgtgagagcagcccagccacacccaggaagaaacatcccccatgcactgcagcacatcctccttagagagagaacgcctgcaggtttcggcaaagnnnnnnnnnnnngggcctgccagactcccagctggatggaaagcagccgacagctcctcagccagagggtgaggcccagtcctggcgcctagctgggccccgtccatgcgcgtcactttccagtgagttccagcaccttcctcaccatggctccgatcccatcatggatgtagtggagtgccgtctcgcacatgaaggctggggtcgtgaccaccttgtttttctggtccacgtgagcttcgaccacttccttcacgcagtgcttggcacccagggccttgatggcctctgcggtcccggcataaggccacttgccaccttcctcctgctcgtggcccacagtcacctcgacgcctctgagcaccttggccgcgaggacaggtgcaatgcagcacaagccgatgggcttcccggcctggtggaactccgttcaggacacgctccacttcgtttattcaccttgcaatctttcccgtccacggcaaacgtgctcaggtttttagccgctcctaagcctcctggaaagatggcagcatcatggttggctgcactgaggttggccaggtctgtgattttgccacgggcgatcctcgcagactcggtcaaaacattcctgctctcgccttcggacggctgccccttggtgtggtcaatcacgtgcatctgagggacgtcaggagcaaagatctggacttcagcccctccacggctcaggtgcaccaggatccagcgcgacctggccgcggggcgcggcacggagaggtgaagggctgcgcgctgggaaggcgtccgaccgaccgggggacagggacgtgaatgcagatgccgcagcgagcctcgaggccaccagggccctcacagccgccattgcgg

SEQ ID NO: 123507 - DNA, 1004 bp, Homo Sapiens
gtggaaggaaagcaccgacagctcccaaccagaggtgaggcccaagtccgggcgcctagctgggccccggtccatgcgcgtcaaccgttccagtgagttccagcacccttcctgcaccaggctccgatccgcatcatggagtgtagtggagtgccgtctcgcacaatgaaggctggggtcgtgaccaccttgtttttctggtccacgtgagcttcgaccacttccttcacgcagtgcttggcacccagggccttgatggcctctgcggtcccggcataaggccacttgccaccttcctcctgctcgtggcccacagtcacctcgacgcctctgagcaccttggccgcgaggacaggtgcaatgcagcacaagccgatgggcttcccggcctggtggaactccttcaggacacgctccacttctttattcaccttgcaatctttcccgtccacggcaaacgtgctcaggtttttagccgctccaaagcctcctggaaagatggcagcatcatggttggctgcactgaggttggccaggtctgtgattttgccacgggcgatcctcgcagactcggtcaaaacattcctgctctcgccttcggacggctgccccttggtgtggtcaatcacgtgcatctgagggacgtcaggagcaaagatctggacttcagcccctccacggctcaggtgcaccaggatcgccgaggcctcgtggatctcggtcccatcgtagactccgcatccagacagcaccagcgcgaccctggccgcggggcgcggcacggagaggtgaagggctgcgcgctgggaaggcgtccgaccgccgggggacagggacgtgaatgcagatgccgcagcgagcctcgaggccaccagggccctcacagccgccattgcggtgaggacagcggggtcggaaggtcacgcagggacagagcgtgcgcacccacccctctacaaacgcgcctcgtgccgaattccaaccacccagcctcgtacctagcc

SEQ ID NO: 123508 - DNA, 1009 bp, Homo Sapiens
tttttcgcggggcatttcgtggggctccccggccccgccctttcccttgtcccctcttttacccctgggccttcaaagggggatggcccccggatttcgccccccttttttgtgtttgtttgattgtgtgtttccacccagacccgttattcctggacgctcgcagctttgccacactgaccccggcctgcacaacgctacatcactccccagagtccatctggggctgagagctgcattccctttcttccatggctccgatcccatcatggatgtagtggagtgccgtctcgcacatgaaggctggggtcgtgaccaccttgtttttctggtccacgtgagcttcgaccacttccttcacgcagtgcttggcacccagggccttgatggcctctgcggtcccggcataaggccacttgccaccttcctcctgctcgtggcccacagtcacctcgacgcctctgagcaccttggccgcgaggacaggtgcaatgcagcacaagaggtttttaccgctccaaagcctcctggaaagatggcagcatcatggttggctgcactgaggttggccaggtctgtgattttgccacgggcgatcctcgcagactcggtcaaaacattcctgctctcgccttcggacggctgccccttggtgtggtcaatcacgtgcatctgagggacgtcaggagcaaagatctggacttcagcccctccacggctcaggtgcaccaggatcgccgaggcctcgtggatctcggtcccatcgtagactccgcatccagacagcaccagcgcgaccctgccgcggggcgcggcacggagaggtgaagggctgcgcgctgggaaggcgtccgaccgccgggggacagggacgtgaatgcagatgccgcagcgagcctcgaggccaccagggccctcacagccgcccgacgcgtgggtcgacgatatcccgggaatatccgaccgtaccagcctgctttttttacaacttggttcatattacatgcct

SEQ ID NO: 123509 - DNA, 687 bp, Homo Sapiens
ttttctgggtggtaagatttttatttttagattaaattgacaatacagagaaatgcagatctttagtgtacaattcagtgaattttggcaaatgtattcacccatgaaattaccactggaatgaagatcaagaacattttcatacccccaaaaccccttctaatcaatcctcactccccaaaggcaaccacagttctgttttttccccacaatagttttgcctgttcttaaccttcatataaatggaatcattcagaatgtccccttcttgtgtctggcttctttcatttaacatgggtgataaggtttgagctgagcctgaaagcactgctagggttgaataagcaacaatggaggcaggggagaaaaggtgaggtatagagaatagcttgagaaagaaaaggagacggataaagtgaattggggactggtgtgactagagtaaggggtacccaatggggaagagaaagaaggatggaaagctaggttggagctttgttttgcagagttttcaatgccaggacaaaggcatgtagactttatcctgaaggcaacagggagccagccagggaacagaagagtggactgatgagatctgggttttgaggagatatatatgtggccacagcaggtagatacaatgaagttcagaaagtctggaggcctggagacagttatttgattgtt

SEQ ID NO: 123510 - DNA, 1226 bp, Homo Sapiens
  misc_feature (1115)..(1149): n is a, c, g, or t
acagaactcagggtctatttattaggaaggagatgtcagtgctttatcaaagatgaaggggtcacagagggacaatgggacaaaggccctcagctgggacatttcttggccacaatgagaacagcagaaggcacgagtcccagctcctgcagaggccgctccatgtcagcttctgaaaaggcccgtctggggaagccactgagcaattgcacagggtcctggcccccacctagttcctccccacggtggagctccacatagagcctcacagctgccagctgttcccgggccccggaacgtctgggtcagtgaggtcccatctggcagcctgacctgtatgcgacactggtcatactcccgcttggtgggaggctcctggcttcttggctctctctgctttgtccctctcgatcttttctctaactctttgtctggctgctaactcctcggccttttccctccgcctctcctcagcagcccggcgcatctcatcttcctgtagccgctgtcgtgctgctgacaactcttgcccttgtctcctgcgctgccgttcccgttccaatgcctcccgttcctctctttcttcacgctcccgctgcttctgggccaccagctccaacatcctcttagtttgttcctgtctttcctcttcactcaaagcgggtttgccttctccggcagcagaaccagatccttcaaggccgccttgctctgaggaagtgggctcccgtcccaggatatgtccaaggggagtctctaaaggctcgtccacatcggggtcgtcttcgtgctccatcagccagtccatcgcagcctcgatgccctggttccctgtgagggccagagccttctccgcgcgtcccctggggaagcccatctcgatgagactctcaagagccgtcagctccgccatggcgccgacaccgcggcttccgcggggacctggtgtgtgacgagaaggagggcgggaagggtcagcgcgaggcaacccgccctcgacacccgccgacgggcgctcgctctctcacccggctctatagcagccgggaacaccgacgagaagccccggccgtaatggccgaattcccgggcatatgtccggtaccgtcgactgnnnnnnnnnnnnnnnnnnnnnnnnnnnnnnnnnnncggccgcttcctcgctcactacttcgctgcgctcggtcgttcgctacaaacgagctagcgccctatagtgatgatta

SEQ ID NO: 123511 - DNA, 962 bp, Homo Sapiens
aacttatggctaggtacgaggcctgggtgtttaattcggcacgaggcccggctgctatagagccgggtgagagagcgagcgcccgtcggcgggtgtcgagggcgggttgcctcgcgctgacccttcccgccctccttctcgtcacacaccaggtccccgcggaagccgcggtgtcggcgccatggcggagctgacggctcttgagagtctcatcgagatgggcttccccaggggacgcgcggagaaggctctggccctcacagggaaccagggcatcgaggctgcgatggactggctgatggagcacgaagacgaccccgatgtggacgagcctttagagactccccttggacatatcctgggacgggagcccacttcctcagagcaaggcggccttgaaggatctggttctgctgccggagaaggcaaacccgctttgagtgaagaggaaagacaggaacaaactaagaggatgttggagctggtggcccagaagcagcgggagcgtgaagaaagagaggaacgggaggcattggaacgggaacggcagcgcaggagacaagggcaagagttgtcagcagcacgacagcggctacaggaagatgagatgcgccgggctgctgaggagaggcggagggaaaaggccgaggagttagcagcccagacaaagagttagagaaaagatcgagagggacaaagcagagagagccaagaagtatgggtggcagtgtgggctctcagccacccccaggtggcaccaagagccaaggtcctggttccctctttctcccaggcaggaggcttccaaccaagcgggagtttgagccgctgtcgcatacaggtcagggctgcagatgggactcactgaccaaacgttccgggccggaacagtggcgctgtgagtccatgtggagtcccgggggcgaactcctgggggccgaccctgcatgtccgggtcccca

SEQ ID NO: 123512 - DNA, 1893 bp, Homo Sapiens
  misc_feature (49)..(49): n is a, c, g, or t
  misc_feature (499)..(507): n is a, c, g, or t
  misc_feature (608)..(718): n is a, c, g, or t
caatgagagaagcggtgggggtgtgtgtatgccgcgcgcggcgggttgngcagcgagttttgggcggcgttcgcttgtgttcggtggggtggtggctcttgtggcggtggaaggaatgatataatatgtgacagcctgccgcgcgcatcggatcgggcgggcgggggcaagtagggggggataggttcgggatactgggtatggacggggaggattgtcggggggcggggtgggcggtcgcgggaaagggatgggtgaaaagcgctccttgcgtggaggaggggttggggaggatcctcggaggcgttgcactcgcaggctcataagtggggttgaaggggggggaggcgaagaaggctatgtgtaagatcgggcggtatgttgtttttttatagaggggacggtatctgtgtgcgttgggtgccgttgcgtctgcattatcgggcgctggccgcaaatcgaaagaggatttggtagatatattggtttaatggcggannnnnnnnnagaaagaaaaagaggtttaagaggatatgtttttaaggggtagttttgggaaggtgttggaggggtggtaaaagagtaggtggtagggtatgtgttgtaannnnnnnnnnnnnnnnnnnnnnnnnnnnnnnnnnnnnnnnnnnnnnnnnnnnnnnnnnnnnnnnnnnnnnnnnnnnnnnnnnnnnnnnnnnnnnnnnnnnnnnnnnnnnnnacagaactcagggtctatttattaggaaggagatgtcagtgctttatcaaagatgaaggggtcacagagggacaatgggacaaaggccctcagctgggacatttcttggccacaatgagaacagcagaaggcacgagtcccagctcctgcagaggccgctccatgtcagcttctgagaaggcccgtctggggaagccactgagcaattgcacagggtcctggcccccacctagttcctccccacggtggagctccacatagagcctcacagctgccagctgttcccgggcccggaacgtctgggtcagtgaggtcccatctggcagcctgacctgtatgcgacactggtcatactcccgcttggtgggaggctcctggctgggagaagagggaacaggacctggctctggtgccactgggggtggctgagagcccacactgccaccatacttcttggctctctctgctttgtccctctcgatcttttctctaactctttgtctggctgctaactcctcggccttttccctccgcctctcctcagcagcccggcgcatctcatcttcctgtagccgctgtcgtgctgctgacaactcttgcccttgtctcctgcgctgccgttcccgttccaatgcctcccgttcctctctttcttcacgctcccgctgcttctgggccaccagctccaacatcctcttagtttgttcctgtctttcctcttcactcaaagcgggtttgccttctccggcagcagaaccagatccttcaaggccgccttgctctgaggaagtgggctcccgtcccaggatatgtccaaggggagtctctaaaggctcgtccacatcggggtcgtcttcgtgctccatcagccagtccatcgcagcctcgatgccctggttccctgtgagggccagagccttctccgcgcgtcccctggggaagcccatctcgatgagactctcaagagccgtcagctccgccatggcgccgacaccgcggcttccgcggggacctggtgtgtgacgagaaggagggcgggaagggtcagcgcgaggcaacccgccctcgacacccgccgacgggcgctcgctctctcacccggctctatagcagccggcctcgtgccgaattcgccacccaggcctcgctaccttaggaccgttatagttactgcc

SEQ ID NO: 123513 - DNA, 922 bp, Homo Sapiens
gatccatataagccccatgctttccttttgaagctgggaaaagattttactaacctgccccatcccattacccgtggggtcttctcagtcacctactttcttggctctctctgctttgtccctctcgatcttttctctaactctttgtctggctgctaactcctcggccttttccctccgcctctcctcagcagcccggcgcatctcatcttcctgtagccgctgtcgtgctgctgacaactcttgcccttgtctcctgcgctgccgttcccgttccaatgcctcccgttcctctctttcttcacgctcccgctgcttctgggccaccagctccaacatcctcttagtttgttcctgtctttcctcttcactcaaagcgggtttgccttctccggcagcagaaccagatccttcaaggccgccttgctctgaggaagtgggctcccgtcccaggatatgtccaaggggagtctctaaaggctcgtccacatcggggtcgtcttcgtgctccatcagccagtccatcgcagcctcgatgccctggttccctgtgagggccagagccttctccctgggggcagaaacaccatgaatagcgcccacgagccatggtgacggtcaggctggggcaaaggccgagacaggtccgcgaccccccacacccgcaggccggggttggggaactcccttacgcgcgtcccctggggaagcccatctcgatgagactctcaagagccgtcagctccgccatggcgccgacaccgcggcttccgcggggacctggtgtgtgacgagaaggagggcgggaagggtcagcgcgaggcaacccgccctcgacacccgccgacgggcgctcgctctctcacccggctctatagcagccgggaacaccgacgagatcccgggaattccggaccggtcc

SEQ ID NO: 123514 - DNA, 983 bp, Homo Sapiens
  misc_feature (813)..(821): n is a, c, g, or t
caactttacggagcaaatgttttatttaataagttataagatacaatttacagtcggcgtttgattccagtttggcttccgtgtcccagcttacaacacccgtggtcctttcacatcaggctccgggctgttccactttctgtagggtgggcttttacccccaacactcgccccagatactacacctgccacaagagtggccacttcctcaggactaagcagcaaaacctaaaggtctgcctgcccagaccacactacacatttgggctcaggcaacgtccctgacactttaacctcattccaaagccagctcaggtctgcaggaaggcaggcaaaattccctacacctcatttctggatttctgcaccacacagctctcactgtttctgccaatggtgaaaagaccaccaataagctgctgcccttctctcccccaaccattcccaactttcaggccaaagacccgcaggagtttcattctgtcctgtctgtacagatcattattttccagaaaaagtgacccatgaagttggctggggcgggtgtggagtgttatgtcatgggacggaccttgggatgagggcgttaatccatgggcccctctgagatcactttaaacattttggtaagactgcccaggctgatgaagggctggagcgtgtgttaaaaacaagggctagtgttggttaaaagggatctttggcaagtgggaaactgctcgccactgcagaatttcttcagaccaaggaaaggggactgaaacggacttggaaaactaaagcaaaacatgacctgccgggaaagggcccccnnnnnnnnnattctccaagaaataattcaccagaaccgaggggaacgggtaccttgaagaaaattggtggggccctgggttgccacctctggcccctctgggaattcctggaaggggagcccccggtttgccattttgtgcccctcttgaaaaagtgtaaaaaaagcccac

SEQ ID NO: 123515 - DNA, 1053 bp, Homo Sapiens
  misc_feature (936)..(970): n is a, c, g, or t
aatttggaaaagaaggggttctgtatccagagggggttccatacccacatcgtcggtggtgggcagtgtggccacatgcccggatggcaaagccggctatctagcaggcagctatctccgcctggtttttgtgcttgggctcgctggccctttctctgggagcctggagggttggtgagtcctggtagttctgggtcatgaactgggtgcttgcttcaggttcgcccaggtggaaacggttcagaaatctgtccattttccaagagcctcgagttttgttttccttgggaaggagagagatgacttttccttcctgaagatagacaaagaactggtagcgatggaagccactgtgtgccggtggggagggagcctggtaggctgataactcctggccctgaatcttccctttcttcaggtcggcgcccttgatatctgttaccagccaatgtctccagaatctctgtctgggttctgctctgctaggggcatctggatccaccatcaccaggatataggttgcgccgtccacggcccccgggaacttgactatcggctccatccaggaggtgatcttctgtctgtagttgttacaatcaggaacaaccttgcagccaatgttccccaactctgggtagaaaacttcaaggccctggcaaaagagggtgtcctcgtccaagagggcctcatgggcacacgggctgttctcatcctcgtctccagtgaccaccatcatgagacccagtaacagtgctgctgtgaccagcctcattgtccaacccatgggcacctctggttaagcacagggagaaggaaaggcagcttccagggctccgcagcgaatccagtccaccacccggacacaagtactttgggaggactgcccccggccgtaatggccgaattcccgggcatatgtccggtaccgtcgactgnnnnnnnnnnnnnnnnnnnnnnnnnnnnnnnnnnncggccgcttcctcgctcactacttcgctgcgctcggtcgttcggctacaaaccggctagcgccctatagtgagtctatacacc

SEQ ID NO: 123516 - DNA, 484 bp, Homo Sapiens
gtccggtgttatcgatgccagcatcatgatgctggtcacagcagccttactgggtctcatgatggtggtcactgggagacgaggatgagaacagtccgtgtgcccatgagtgccctcttggacgagtgactccctcttttgccaggggcttgaatgtcttctacccagagttggggaacattggctgcaaggttgttcctgattgtgacagctacagacagaagatcagctcctggatggagccgatagtcaagttcccgggggccgtggacggcgcaacctatatcctggtgatggtggatccagatgcccctagcagagcagaacccagacagaggttctggagacattggcctggtaacagatatcaagggcgccgacctgaagaaagggaagattcaggtccaggagttatcagcgtaccaggctccctccccaccggcgcacggtggcatcgattaacaccggtaccgagctcgatcta

SEQ ID NO: 123517 - DNA, 1120 bp, Homo Sapiens
  misc_feature (79)..(220): n is a, c, g, or t
  misc_feature (243)..(244): n is a, c, g, or t
  misc_feature (246)..(246): n is a, c, g, or t
  misc_feature (248)..(251): n is a, c, g, or t
  misc_feature (253)..(259): n is a, c, g, or t
  misc_feature (261)..(266): n is a, c, g, or t
gcgttcattatcaggtgcacgcaggtttccgaatggaagcgggcatgagccaacgcaattatttgagtagcccatcaannnnnnnnnnnnnnnnnnnnnnnnnnnnnnnnnnnnnnnnnnnnnnnnnnnnnnnnnnnnnnnnnnnnnnnnnnnnnnnnnnnnnnnnnnnnnnnnnnnnnnnnnnnnnnnnnnnnnnnnnnnnnnnnnnnnnnnnnnnnnnaagaattcggcacgaggtttttnntntnnnntnnnnnnntnnnnnntgtaatttcatagttattttaataaccaggtttacattaacagtcacgtgatgaacttttttctttaatgtcagctaaactcaaaacacagttttgttcacggttcaaaccaaacagctcttcacgttccagagctgcctcacagctagcacagatcacaggagattactgtctgtccatacccaccagacacagaactgaacacccacacaccagttttcaaagagggaacttacaatgaatgctggctgcccagggcagcccatgagtgtatctgggactcaagctggagttttccaggggagaaagcctgggaagcttgtggcaaggaagttgggaattgcccaccctactggaaagggcttctcagggatgagtgaaaatccaggctcaggtgtcagccctttgtggaaacatgacactctcagtatagacagtcgtgaagaacaaggctgagggattttgaagtaaacccattttcaggatgactacaatccttccacttctagaaaacttagaagtacaagaaatagctctactacgggtaactgatttaacaatttcccaaacaccctttccactacccaagcccgtggccctcagagagaaccgggatggattgccatctgggttcagaggcaatatgaggaggttggggggatggcaggggcatcctcagggttggggggcaggccaagggatgagatggcaaaggacagctttggaatcagatagacgatccagcgtgccttcctacacttgcatgaggtgccagtgaattcgaagagggccgggactcaccattgttttcttttcctaaaccttttgtataggcctgtttgatgtgtcttatg

SEQ ID NO: 123518 - DNA, 513 bp, Homo Sapiens
  misc_feature (429)..(429): n is a, c, g, or t
  misc_feature (487)..(487): n is a, c, g, or t
tgtggaaaacaacaccttatttattcagggtgtaatactgtctacttcctttcagaagacttgaaaaagatcaaaataggataaatggacagttactactaaacgattcaaatacttgggcagtatctttccctcttaaccctttcacacgtttttaaagtgtcaaaattgatgaatggtataaattcaaaaggaaaattcttttctactgaaaaggacatccagctcgcacaaacggtggttcagctgaaggcaaggcgtttctggttttcctctgcactcgggcggatcgttaacttccccaagttacaactgagttgctctttccaggcttttcgaagcatctttaagttccccaccaagtcctgtaattgttccatgctgcaactaaaactaactctggataggatggggaacagtgtctgtacnttaaggcaccaaatatgcaggctgtcacctatgaagtgatggctttactgatatccancgcagaacaccgtatatgaggagaga

SEQ ID NO: 123519 - DNA, 922 bp, Homo Sapiens
ttttttttgtggaaaacaacaccttatttattcagggtgtaatactgtctacttcctttcagaagacttgaaaaagatcaaaataggataaatggacagttactactaaacgattcaaatacttgggcagtatctttccctcttaaccctttcacacgtttttaaagtgtcaaaattgatgaatggtataaattcaaaaggaaaattcttttctactgaaaaggacatccagctcgcacaaacggtggttcagctgaaggcaaggcgtttctggttttcctctgcactcgggcggatcgttaacttccccaagttacaactgagttgctctttccaggcttttcgaagcatctttaagtttccccaccaagtcctgtaattgttccatgctgcaactaaaactaatctctggataggatggggaatcagtgttctgtacacttaaggtcaccaaatatgcaggtctgtacatcctatgaagttgattggtctttatctgatattccaagcgccaagaaacatccgttatatgagggagagatctgcctatacttcccagtaggatttctagggaattcttattattctgatattccgtgcaaaacagttctattcgctctctgtcaaatttacagtcttctagataagtgcttagagttgacttgtcagctcggtgctttcctgcctctagtatgtaagttgcagctgctgcatgacaatgttttaaaaccactgggtcgatatgtttcaagtctggatgatctaacacggcctcgtccgcctgggcgtccagcagactctggaatgccgcccggaggagaagcgtgaaggcgttggagtcgaaggacggggatccgccagcatctggaagcctttctgcacagactccgagagctccattgtgagcgtgccgtgaccttcg

SEQ ID NO: 123520 - DNA, 582 bp, Homo Sapiens
aatttaaaccattgttaaactttattttcaaattatgaatggtaaaggagcatttcaaaatcatctcaataaacgatctttaaaaacatgagcttaacttcaattgcttgacatgccctttggctccttttctttgggtcaagatcccgaagatcttgtttcacaccaacactctccattcatacctgcaagtgaaaagtgcctcagcttgacaccttatacagtacctaccttcccagtaggatttctagggaattcttattattctgatattccgtgcaaaacagttctattcgctctctgtcaaatttacagtcttctagataagtgcttagagttgacttgtcagctcggtgctttcctgcctctagtatgtaagttgcagctgctgcatgacaatgttttaaaaccactgggtcgatatgtttcaagtctggatgatctaacacggcctcgtccgcctgggcgtccagcagactctggaatgccgcccggaggagaagcgtgaaggcgttggagtcgaaggagcggggatccgccagcatctggaagcctttctgcacagcctccgagagctccatt

SEQ ID NO: 123521 - DNA, 819 bp, Homo Sapiens
  misc_feature (322)..(415): n is a, c, g, or t
agggagcgaggcctgggtggcgaattcggcacgaggctgagatcggagcttcccgcaggattcgcgcagagcgaggagcggggaggacgccgtttgcgggaggcgggggccgggatcccgacaccgtccgcagtctccccggggtctctcagggaaccgagctggtggccgtccgaggtaagcgccgaaccaaggagaaagcgccgagcgcgtccacaaaacgcccgaggccgcccttctcgccaaggctcggcagctcccgcggcctgcgctggacaagcgagagctggacggaaacggtgggaggccgtaggcggcggcnnnnnnnnnnnnnnnnnnnnnnnnnnnnnnnnnnnnnnnnnnnnnnnnnnnnnnnnnnnnnnnnnnnnnnnnnnnnnnnnnnnnnnnnnnnnnngccgcatcaactgagcgcgcggcgcgtgtcacgtggtgtgcgtgtcgaaggtcacggcgcgctcacaatggagctctcggagtctgtgcagaaaggctttcagatgctggcgggatccccgctccttcgactccaacgccttcccgcttctcctcggggcggcattccagaggtctgttggacgcccagggggacgaggccgtgttaggtaagccgctcggtcggctcggagctggatccgccggggtggaggggcgctcggagaagaggagccggcggacgatgaaggggaaagccccgggaagaggaagtctccgggctttgctgtcgctccggacgggtgttggggacgtggctctgcaggaactcggagcagactctgagcattgttttggccccacttg

SEQ ID NO: 123522 - DNA, 648 bp, Homo Sapiens
  misc_feature (446)..(490): n is a, c, g, or t
tttataatagtaattatggaacatggacattttaatgaatttcatattgcaatgaagacagtcaacacttagagacaattatatcgatacaataaaaactgattccatggaacacttataaatgcatacattttcctccaaagaaatatgtttttcacagacttaagtaacaaatgatttacataggattcttcagattccaaaatatgtacagagtttttgtctctacagaaactgatgagcagtggttgaaaaagagttgctttgcccaacagcatggctcttatgaaattctgtatcatatacagttttcagtaaccacacattttccgtctatcattaaatgaaattctggacacatcagcatacaggacaaaactgttcccacttccaaacactgtttcagacgagatcacgtgtggttgacagtatgacttaatttagcnnnnnnnnnnnnnnnnnnnnnnnnnnnnnnnnnnnnnnnnnnnnncatccccgatcttgtctgtgactcctgatcaccacgctgcagcagcagtggatgagctcacattagaagacgacacagcagcgaacagcaaggtgccccggctcctgagagctctgcctgagcccacagggctgcgcccccaaggacatgcaggagtc

SEQ ID NO: 123523 - DNA, 747 bp, Homo Sapiens
  misc_feature (220)..(264): n is a, c, g, or t
acagaaactgatgagcagtgtgttgaaaaagagttgctttgcccaacagcatggctcttatgaaattctgtatcatatacagttttcagtaaccacacattttccgtctatcattaaatgaaattctggacacatcagcatacaggacaaaactgttcccacttccaaacactgtttcagacgagatcacgtgtggttgacagtatgacttaatttagcnnnnnnnnnnnnnnnnnnnnnnnnnnnnnnnnnnnnnnnnnnnnncatccccgatcttgtctgtgactcctgatcaccacgctgcagcagcagtggatgagctcacattagaagacgacacagcagcgaacagcaaggtgccccggctcctgagagctctgcctgagcaccacagggctgcgcccccaaggacatgcaggagtccagtttctgaggtccctccagtttgccagacaaggtgagcagctgtggcagtaaagggcaccagtgtgcctggaactcagtggccactaggaatattgacttttaaaagcttcaaaaatgtttaatctggcagagatctggttcttaagtttgatttggctatttgcagccatttttcaatgttcctaaccatcatcctaagacacccagactttcaaattaaactccgaggaacccaagcaggtggcctgtgcagtggccccagaagctgccctgggctcagacctttgtatgtgcagtgtgggaggctctggcaattggacc

SEQ ID NO: 123524 - DNA, 1074 bp, Homo Sapiens
tttattaactaattttattttattttttacaaaaataaacaatttaaccaacaagaagtacaaaagattctggatattcaaactcgaggaagggggaaagcctggttttggctgctttgaggctttcattgaaagcaaatgaggcagaaaggccccggccccacccccgccccaggtcctggctcaaaccacacctgctccctgaccccagtcttggctcatgctgaggtgtgcacctctgcccctgacccctgggctggcctgggagtgtcccctgtcgggaggtcagagatagcctccccaggtacagaatcacccacatcctggagcatctcccgccaagtctcctgtccagacctaagctgagagaacactccacgatggattgtccccacgcagcccccaccgcctgctgtggcatgtgcagcagcagcagcaggggctttagctacattctcacactattgaacacagtgatggggctgcccacggaaccgtcccagggaggggcacagcccccagtggggagactagcctgagcttgcttacagcccacagggttggagaggcagtcatacccccatgattcctggactaggagccagcagtcccatagctaggctggtaaactcacattttaacatttggcattattgcacgtttgtcctggtcacatctgtctgtctgggatgttagctttgtctgcaggggttcccaggtgacatgcagtgctgccagtgcaagtcactccctccacaggcaagcccagctgctgaggatagtcagctggtcagccgagccctcagataggtcagccagaggccttcacatatgtggtcttgttgggatcagggaccacttggctccatccagtcttgaaaaagaccagctgccgacctgtccaggtggtctggttggtgaccacaaaggcccgacactgggcatggctctcacagacatccacagcctcagccaggttgaacactgaaaggaggcagctcccgtggtggtaggatggccagcagcggtagtcttcctgggggatggtgctggctgagatacactggtactcgg

SEQ ID NO: 123525 - DNA, 598 bp, Homo Sapiens
ttgggtggtgggataacatgaggtttttattttcttttaggtgtttatctatgctttccatattttctcagtgtaaaatgaagtgtctagcacataacagatggtcagtaaatgcgaatctcctttctcccccaactcctgctctcttctctgaaaggacaatgaggaaatagaaggccaagggcttcccgaggacttctccatcaggcaggaacctactgaagctttgctctttctgtggtctgtagctgtcagccctacaatagttcatgttcagccaacatctgacccagagccagggtcaggagcttagtagaagggcctgaagtagcccctgggatctgggtactccatgtagtaaccctgcctggggctgaactgagatctccacagggacttgtttctgcagaggtggcaagttgttcagagataaaagagatttttgatggaagaagtaagcaatacacctcagccctagcaaccatagttcccaccctggggaggggaagaacacaggatttcaaatgagaaggcctgggttctattcctacctctggccccaattcagaacctgggcaataaaacaaaattataactt

SEQ ID NO: 123526 - DNA, 973 bp, Homo Sapiens
  misc_feature (871)..(905): n is a, c, g, or t
taagtggatgcgcttaagagatgataattgtaaagccaaacctggatatatcatgggtagttataccgtgagtcttataagaagctgggaggcaacccccgttaactttacccagaatattagaactcagtctcacaccttagatatgattcctctcaaaccttttcctcaaagattgaattctgaagataatcttgtgattaagagaagaagggctgttccacccatgggacttatctgttatttcttccttattgtgagcttaatggcatgacaaagcagaggcaaagaggcatacatcgattcgttcgaagtatgaagtcgaaaaggtcagagcttccacagcatggcaacagctttgcagatgcccacatcgtgatagttgaaatagcaaagcccagcaaaggttaaagctgaaagtgccaaaagccctgccttggcagctttctgcaaggcatccccatgaacatagtcagtaactacttgtccaaggccccagtgaccatgaagagtgagggctgcagccagggaatagtccatcgcagagcaaggattcaaataagcagccggaagcagacccaggagcaaaacactgacaaccctctcgctagtccagtggagagatgcagccttggagccagaatggtggctcggtgacaagtgtatgtgctgcactccacaccattctgggataggtcggtcctgaagaaatgctgagatatgagcaggtctgaccactggagttcgaagcaacagagctcggcctcctagggcaccgcaaacggcactcagcctccagagaaccgccatctcgttcctccccggccgtaatggccgaattcccgggcatatgtccggtaccgtcgactgnnnnnnnnnnnnnnnnnnnnnnnnnnnnnnnnnnncgccgcttcctcgctcaatgactcgctgcgctcgtcgttcggcaggacgggagcgcccatagagtcaa

SEQ ID NO: 123527 - DNA, 1453 bp, Homo Sapiens
  misc_feature (1380)..(1412): n is a, c, g, or t
ttttttattatataacattttatttaaaaaaattattttcatagaatacattttcacattagagattcccattgtgcgaaaataacaatttattacttatagttttatatttgtggacagattgttttagaacaagtagaatacatttgggaattaaatctcaatttacagttggtagtattttgatacatctacggggaaacttgcccttaaatggaacttctgtatattcagaagcactccaagcgtttcttcctaggatttagaaatttataatatgagctatcagcatttcctaattttaaaatttccctagtatatgtaaccatcagtaggtggtatctactgtctagagagggaagttttcgaaaattaaacactgtctaattttctgcaaagtttttattcatgaattaagagtatttccctttgtccattattcccaaggcaaatatggaagtttgatcatatactaatcgtaataaagttggattctctttaagagattgataaattgaaaggcaaaagctgatatatcatgtttagttatactgtgagtcttataagaagctgggaggcaaccccattaactcaccagaatatagaactcagtctcacaacttagatataattcctctcaaaccttttcctcaaagattaaattctgaaaataatcttgtgattaagagaagaaggctgtccaccaatggacttatctgttatttcttccttattgtgagcttaatggcatgacaaagcagaggcaaagaggcatacatcaattcttcaaagtatgaagtcaaaaaggtcagagcttccacagcatggcaacagctttgcagatgcccacatcgtgatagttgaaatagcaaagcccagcaaaggttaaagctgaaagtgccaaaagccctgccttggcagctttctgcaaggcatccccatgaacatagtcagtaacaacttgtccaaggccccagtgaccatgaagagtgagggctgcagccagggaatagtccatcgcagagcaaggattcaaataagcagccggaagcagacccaggagcaaaacactgacaaccctctcgctagtccagtggagagatgcagccttggagccagaatggtggctcggtgacaagtgtatgtgctgcactccacaccattctgggataggtcggtcctgaagaaatgctgagatatgagcaggtctgaccactggagttcgaagcaacagagctcggcctcctagggcaccgcaaacggcactcagcctccagagaaccgccatctcgttcctgagggctcaaggtcatccaccaacccggaacccccggccgtaatggccgaattcccgggcatatgtccggtaccgtcgactgnnnnnnnnnnnnnnnnnnnnnnnnnnnnnnnnngtgcggccgcttcctcgctcaaagactcggcttggctgctt

SEQ ID NO: 123528 - DNA, 1093 bp, Homo Sapiens
  misc_feature (172)..(172): n is a, c, g, or t
  misc_feature (203)..(203): n is a, c, g, or t
  misc_feature (978)..(1012): n is a, c, g, or t
gggggcagttttaatcgacgatgtgctagacgatctcgttgctcgacctagatgatcactcagtttcgatgataaaagctccatctattaattctagaagtacacagagtgtcacgtcaggaggagttgaaataaaccgtctattttgcaagtttatcagaatagagtattnccttgtcatatccccaggcaaatatgaagtntgatcatatactaatcgtattaaagttggattctctttaagagattgataaattgaaagggccaaaagctgatatatcatgtttagttaatagctgtgagtcttaataagaagctgggaggcaacccccattaactcaccagaatatagaactcagtctcacaacttagatataattcctctcaaaccttttcctcaaagattaaattctgaaaataatcttgtgattaagagaagaaggctgtccaccaatggacttatctgttatttcttccttattgtgagcttaatggcatgacaaagcagaggcaaagaggcatacatcaattcttcaaagtatgaagtcaaaaaggtcagagcttccacagcatggcaacagctttgcagatgcccacatcgtgatagttgaaatagcaaagcccagcaaaggttaaagctgaaagtgccaaaagccctgccttggcagctttctgcaaggcatccccatgaacatagtcagtaacaacttgtccaaggcccaatggtggctcggtgacaagtgtatgtgctgcactccacaccattctgggataggtcggtcctgaagaaatgctgagatatgagcaggtctgaccactggagttcgaagcaacagagctcggcctcctagggcaccgcaaacggcactcagcctccagagaaccgccatctcgttcctgagggctcaaggtcatccaccaacccccccggccgtaatggccgaattcccgggcatatgtccggtaccgtgcgactgnnnnnnnnnnnnnnnnnnnnnnnnnnnnnnnnnnncgccgcttcctcgctaaactgactcgctgcgctcgtcgttcgaaaatacgcctagcgccctataggatcgatccgagcgtc

SEQ ID NO: 123529 - DNA, 1002 bp, Homo Sapiens
  misc_feature (77)..(111): n is a, c, g, or t
atgataatcactatagggcgctagctctcgcagccgaacgacgagcgcagcgagtagtgagcgaggaagcggccggnnnnnnnnnnnnnnnnnnnnnnnnnnnnnnnnnnncagtcgacggtaccggacatatgcccgggaattcggccattacggccggggaggaacgagatggcggttctctggaggctgagtgccgtttgcggtgccctaggaggccgagctctgttgcttcgaactccagtggtcagacctgctcatatctcagcatttcttcaggaccgacctatcccagaatggtgtggagtgcagcacatacacttgtcaccgagccaccattctggctccaaggctgcatctctccactggactagcgagagggttgtcagtgttttgctcctgggtctgcttccggctgcttatttgaatccttgctctgcgatggactattccctggctgcagccctcactcttcatggtcactggggccttggacaagttgttactgactatgttcatggggatgccttgcagaaagctgccaaggcagggcttttggcactttcagctttaacctttgctgggctttgctatttcaactatcacgatgtgggcatctgcaaagctgttgccatgctgtggaagctctgacctttttgacttcatactttgaagaattgatgtatgcctctttgcctctgctttgtcatgccattaagctcacaataaggaagaaataacagataagtccattggtggacagccttcttctcttaatcacaagattattttcagaatttaatctttgaggaccaggttcgacgaggacttatatctaaggttgtgagactggagttctatattctggtgaagttactgcggcgttggcctcccggcttcttataagaatccacagtataactaaacattgatatatcaggtttggcctttcaattatcaatctcttaaggagaatcccaacttatacgataggtttggtcc

SEQ ID NO: 123530 - DNA, 1123 bp, Homo Sapiens
  misc_feature (1004)..(1038): n is a, c, g, or t
taggccctagggtttcttttaggggaatttggaaataacgcccggcaatttggccaagtgtaactcagataagggatttccctgggcagtatcgccaaggcaaatatggaatttgatcatatactaatcgtaataatttgattctcttaagagattgataaattgaaaggcaaaagctgatatatcatgtttagttatactgtgagtcttataagaactgggagcaaccccattaactcaccagaatatagaactcagtctcacaacttagatataattcctctcaacctttgtcctcaaagattaaattctgaaaataatcttgtgattaagagaagaaggctgtccaccaatggacttatctgttatttcttccttattgtgagcttaatggcatgacaaagcagaggcaaagaggcatacatcaattcttcaaagtatgaagtcaaaaaggtcagagcttccacagcatggcaacagctttgcagatgcccacatcgtgatagttgaaatagcaaagcccagcaaaggttaaagctgaaagtgccaaaagccctgccttggcagctttctgcaaggcatccccatgaacatagtcagtaacaacttgtccaaggccccagtgaccatgaagagtgagggctgcagccagggaatagtccatcgcagagcaaggattcaaataagcagccggaagcagacccaggagcaaaacactgacaaccctctcgctagtccagtggagagatgcagccttggagccagaatggtggctcggtgacaagtgtatgtgctgcactccacaccattctgggataggtcggtcctgaagaaatgctgagatatgagcaggtctgaccactggagttcgaagcaacagagctcggcctcctagggcaccgcaaacggcactcagcctccagagaaccgccatctcgttcctgagggctccccccggccgtaatggccgaattcccgggcatatgtccggtaccgtcgactgnnnnnnnnnnnnnnnnnnnnnnnnnnnnnnnnnnncggccgcttcctcgctcacagactcgctgcgctcgtcgttcggctgtacagacgtgagcgccctatagtgagtcgatacgacttc

SEQ ID NO: 123531 - DNA, 899 bp, Homo Sapiens
  misc_feature (789)..(823): n is a, c, g, or t
tttgatgtaaagaaacttttggtaacaatggtcttagaaaatggattctgcaactgggtgaaccggttgtttgaaatccggattagccgggcttggcggggtctcattcccagtacctggaggcttaggccggagaatggcgtgaaccaggaggcggagctttcagtgaccgaagttcgccccacctgcaactcagcctgggtgacagagcgagacgtccatctcaaacggcgacgaccgagaacgaaagaaaaaagtggcacaataaattaacaaatagcatgatcatcactttcacatacgtatttataaaatacagggtagaattattaaagttctctgttagtggcttgcatctcctgttccaaacatttccatattaaaataaagatttatagttcaaaaagtacattgtgttaaccaaaacatattatgctttatactttaaaacagcacattagcaaacccatttatcacacacatgttcagaggtgtattgcctgggaagaaaaaaacaaatataattcccaattatggtttaattgtactctgtgtagtatatataatgccttctgctttaattcgctccaatattggtccatagatctcctttgaaaagggccccattaggcctttggctccaatttcaccatcaagcaacattttggctgccatggcggtgggtaaccccacggttttagccatggctgaaaagccattgatgtccccataagccaccccggccgtaatggccgaattcccgggcatatgtccggtaccgtcgactgnnnnnnnnnnnnnnnnnnnnnnnnnnnnnnnnnnncggccgcttcctcgctcactactcgctgcgctcgtcgttcggctgcgagagctagcgccctataggatgtatcgat

SEQ ID NO: 123532 - DNA, 925 bp, Homo Sapiens
  misc_feature (808)..(842): n is a, c, g, or t
atcagttgtaacggtttaaaaaatggggcaaccccttacttcccagatttggactcagttcacaactagatataatccttgtcaaaccgtttccctcagaggattaaattctggaaataatctggtgattaagagaagaaggctgtcccaccaatggactttatctggttatttcttccttattgtgagcttaaatggcatgacaaaggcagagggcaaagaggcgatacatcaattcttcaaagtatgaagtcaaaaaggtcagagcttccacagcatggcaacagctttgcagatgcccacatcgtgatagttgaaatagcaaagcccagcaaaggttaaagctgaaagtgccaaaagccctgccttggcagctttgctgcaaggcatccccatgaacatagtcagtgatacgaacttgtccaaggccccagtgaccatgaagagtgagggctgcagccagggaatagtccatcgcagagcaaggattcaaataagcagccggaatgcagacccaggagcaataacactgacaaccctctcgctagtccagtggagagatgcagccttggagccagaatggtggctcggtgacaagtgtatgtgctgcactccacaccattctgggataggtcggtcctgaagaaatgctgagatatgagcaggtctgaccactggagttcgaagcaacagagctcggcctcctagggcaccgcaaacggcactcagcctccagagaaccgccatctcgttcctccccggccgtaatggccgaattcccgggcatatgtccggtaccgtcgactgnnnnnnnnnnnnnnnnnnnnnnnnnnnnnnnnnnncgccgcttcctcgctcactacttcgctgcgctcgtcgttcgctacacgcgatgggcctattagtcggaggggtcagtatttac

SEQ ID NO: 123533 - DNA, 796 bp, Homo Sapiens
gctggatatatcatgttttagtaatacctgggagttctaataagaagttgggagggcaacccccatttaatttcaccagaattatagaactcagtctcacacaacttaggatataattccttctcaaacctttttcctcaaagattaaaattctgaaaataatcttgtgattaagagaagaaggctgtccaccaatggacttatctgttatttcttccttattgtgagcttaatggcatgacaaagcagaggcaaagaggcatacatcaattcttcaaagtatgaagtcaaaaaggtcagagcttccacagcatggcaacagctttgcagatgcccacatcgtgatagttgaaatagcaaagcccagcaaaggttaaagctgaaagtgccaaaagccctgccttggcagctttctgcaaggcatccccatgaacatagtcagtaacaacttgtccaaggccccagtgaccatgaagagtgagggctgcagccagggaatagtccatcgcagagcaaggattcaaataagcagccggaagcagacccaggagcaaaacactgacaaccctctcgctagtccagtggagagatgcagccttggagccagaatggtggctcggtgacaagtgtatgtgctgcactccacaccattctgggataggtcggtcctgaagaaatgctgagatatgagcaggtctgaccactggagttcgaagcaacagagctcggcctcctagggcaccgcaaacggcactcagcctccagagaaccgccatctcgttcctgagggctcccc

SEQ ID NO: 123534 - DNA, 667 bp, Homo Sapiens
ggcagtcaaagctccctttattgggtcataaagtataataaattgtccttcactcctttctggctgcctaataaaaagacctattggtcctcccttggaacttacagttgattgagtcaagaccttgggggacaggactgaggttaatactgcaggttggcttcatcctgctgctgtgtctgataatagcctgcattaattgctatatgagaccaaatgaacaattttggtcctgactaaacaacccgactgtcaggttaatcagagtagctgatagagtggcatactcatgtgaaaattcaagtttggccaagaacatctcaggctgaggagcagactgttggaagagactatccactatgggctctgagtgtccctgcatacttactgggtatgtcaagaatgcaaggactttgtctttacctagtccatgtcctaggcttgtgtttacactaagctatcttcaagtatggggtaataactccctttggacaaagaccaggatttttttgcttactataaaagcagttaataacccaagcttacaacataacccactgtgtgcaggctttcatcatgggccctttgtgttcctcctgtgggaactagaaaaatgaggaactgaataaaaccaacatgaagctctggctacagcttttgctgtgag

SEQ ID NO: 123535 - DNA, 833 bp, Homo Sapiens
attaataaacaaatttttatgagctattactacaaagaacttcagcaagaggggagatagtttagtgatcttttagtaaacatttttagcgtaacagtctttgtgaccagatagtttaaaaaaacgcttataaacaccattgctccgtattcagctggtgtacactaaaaataggataatggaaatacatgttcttaaagcatttccacaggaaatgttcatatttttcatgacattctaaatcattttgcaattacatatgctacattagctaaaacacaggtattctttattgcacatttcaaagttgtaaggacgctctagcttaaaaggtgatttttatttagggaagaaatgacatttttgaattgtttggctcaaaaatgcacactgccaaggcagcttagttctaacaacaaaccttttaaaataaacttttggattttgaagccaatgaaatcctttactgtaatggataatgcacagtacactttctttccaatgaaacctcagaggtcatagttttatgggctctgttttaaagcctgtgaacagtcctggctagtgctctgagaggcaggtggaggctcatctctagagcctgacggcagtaagtctcttacagcaggtggtggtgggtattcctggggaccatgggttgggggtggtaatcgggtaccaggaataaagtactctcttgggccaagtgaacctaaaggtctaaatggtgcgtgtccaggtaaaaatccccgagggtggagaggcaggtcccgtcttcctggtggaacgcctggtgcagattctcttaagcatagtggcggcctcgtgccaat

SEQ ID NO: 123536 - DNA, 1761 bp, Homo Sapiens
aggcttgtactcctgcctttatttcaaagcgtcatcaaaggaaacagagcagcagcagcacctagctgaattctagatgggatataaataaaatatatatagaagaaatctaaaaacaagctaagtaaagaatccttgcagtgaggtgtaatgcaacttcatcactttattcaaatcttcaaaatagtctttattctacatttttagtataaaaattccacaagttaagtgcaccacagtgtagagagagacatacaacgctgaacttccataacagtcaatggtacagtcaaacatcacatgtacagaacacacaatttagatgaactgaaattataagataaaataaactaaaatccaatttcagaaaacaaaaatcaaaacattaaggatccctgaaatattcttaaaccctaatgagatttcactggactcaagtcattttgtagtgagacattcacaatatgaccctattaacccagtctaggaattctggggagccgaatgagtggccgcatcagacactctgacaaaaaatggtaaccagtttttgatctgaaaactcctcttaatttagctctgaacacatcaatcaagcttttgaaatgcatcctcctccttgcccctcatattttaaaccaactgttgttcacagtacagtttgcacgacatctttgttcaaacatagctcagtttttctggcaccaaagcaaatttgggttaggttcgtgtatgcagagacaacctatgaggagggcccataaggcaccctccacttttgcctgaggagatacgaaagcagaagtaatgggatctgtacttggggcacagagagggtttcagaggatccttgtgaaacactagttaaaagatgacgagtggggagaagtgcgaggaaagaaggaaattagtctgactggctttctgtcctgcaccattgattcaatggagactggcgggaggaaatggaagactagggttggagatgggatgggtggggcaagggatggaaaggaaaaggcagacaactaatgcgttccatttataacaagtaatatatatcaaagacttaaaggagattaaagaccaatcagaataatttggcaactttaattcttaggaagatcaaagttccctccaaacctaatttgatgttttattactaaaagcaaagaccagtatggtacagtattactccagagaaattaaaggaaaatccttagggcggcttcacccacattcattttatgaatggatacctcccctacctcaaaatgctttagggaggtactgctaccattacatggttccttattaaatttgaaaagtgcctgaaagtttgggcaccagaaagacaccccaacaacatgtgtctaaactgcaacttcaggttaatatgactaaagcagttacattgtgagaagtgctgaaggtatgtgatgtctttcccggcacaaaggtggccttggttcctcaccagatggtgtagccaccatctgaaccacccatgaagaagttccccttccgctgagttacgaggacgttggctccctgcatgactgcaagctgagcagcattgggagggcatccaggaggtggaggaggaatgttgccagcagtagccccagctccaaatctggcacctgcatcataccctccttccaccagcactgtggagccaggtggatagatgggaccgactggcctcgtgccgaattcgccacccaggcctcgctaccttaggaccgttatagttactgc

SEQ ID NO: 123537 - DNA, 1138 bp, Homo Sapiens
  misc_feature (104)..(104): n is a, c, g, or t
  misc_feature (118)..(765): n is a, c, g, or t
  misc_feature (798)..(817): n is a, c, g, or t
  misc_feature (1015)..(1058): n is a, c, g, or t
catgctctccatgcgatagtgtttaaccggtgactcagagatagtaccgataagcgcagcgtcggctgacgggggtcgtcacacagccagctggagcgaagacntacaccgactgagnnnnnnnnnnnnnnnnnnnnnnnnnnnnnnnnnnnnnnnnnnnnnnnnnnnnnnnnnnnnnnnnnnnnnnnnnnnnnnnnnnnnnnnnnnnnnnnnnnnnnnnnnnnnnnnnnnnnnnnnnnnnnnnnnnnnnnnnnnnnnnnnnnnnnnnnnnnnnnnnnnnnnnnnnnnnnnnnnnnnnnnnnnnnnnnnnnnnnnnnnnnnnnnnnnnnnnnnnnnnnnnnnnnnnnnnnnnnnnnnnnnnnnnnnnnnnnnnnnnnnnnnnnnnnnnnnnnnnnnnnnnnnnnnnnnnnnnnnnnnnnnnnnnnnnnnnnnnnnnnnnnnnnnnnnnnnnnnnnnnnnnnnnnnnnnnnnnnnnnnnnnnnnnnnnnnnnnnnnnnnnnnnnnnnnnnnnnnnnnnnnnnnnnnnnnnnnnnnnnnnnnnnnnnnnnnnnnnnnnnnnnnnnnnnnnnnnnnnnnnnnnnnnnnnnnnnnnnnnnnnnnnnnnnnnnnnnnnnnnnnnnnnnnnnnnnnnnnnnnnnnnnnnnnnnnnnnnnnnnnnnnnnnnnnnnnnnnnnnnnnnnnnnnnnnnnnnnnnnnnnnnnnnnnnnnnnnnnnnnnnnnnnnnnnnnnnnnnnnnnnnnnnnnnnnnnnnnnnnnnnnnnnnnnaagaattcggcaagagggccgcggctgtaggcnnnnnnnnnnnnnnnnnnnngaggtgtaatgcaacttcatcactttattcaaatcttaaaaatagtctttattctacatttttagtataaaaattccacaagttaagtgcaccacagtgtagagagagacatacaacgctgaacttccataacagtcaatggtacagtcaaacatcacatgtacagaacacacaatttagatgaactgaaattataannnnnnnnnnnnnnnnnnnnnnnnnnnnnnnnnnnnnnnnnnnncattaaggatccctgaaatattcttaaaccctaatgagatttcactggactcaagtcattttgtagtgagacctcgtgcc

SEQ ID NO: 123538 - DNA, 621 bp, Homo Sapiens
tttttttaggcttgtactcctgcctttatttcaaagcgtcatcaaaggaaacagagcagcagagcacctagctgaattctagatgggatataaataaaatatatatagaagaaatctaaaaacaagctaagtaaagaatccttgcagtgaggtgtaatgcaacttcatcactttattcaaatcttcaaaatagtctttattctacatttttagtataaaaattccacaagttaagtgcaccacagtgtagagagagacatacaacgctgaacttccataacagtcaatggtacagtcaaacatcacatgtacagaacacacaatttagatgaactgaaattataagataaaataaaataaaatccaatttcagaaaacaaaaatcaaaacattaaggatccctgaaatattcttaaccctaatgagatttcactggattcaagtcgttttgtagtgaggcattcacaatatgaccctattaacccagtccaggaattttgggggaccaaatgagtggctgcatcagacactctgacaaaaaatggtaaccaatttttgatctgaaaactcctcttaatttggctttaaaccatcaatcaggcttttgaaatgcatcttcct

SEQ ID NO: 123539 - DNA, 763 bp, Homo Sapiens
gatgatgacgagaataggtttttaattaggccagacatacagataggaaattcaaagaagaaagactgcagatgtaagatctagtatccagttgctttgacccagatctcttagacagtcatgtcattttcaagtgctctcgttgagtcaagacctcagaccccacaccaagggtttgatgatgacatatcctctgatttcatagttcagagcctgccagtccaggatattggcagggagaggggtaccctgataggcagacaggatattttctgggggcagcacagagtcccacatgtacaaatccccgatctctcccacaaaggactggctcctatcaaacttgcccccataggaatcctgttcctgccccaggacaatcttgggctgagcttccacaaagtaaccctgtcgcagaccctttttcaccaaaggtgtcccattgatccaaaattcagcaatacctgatgaggacttctcgagcggtgtgatcaagtttacatgatcagtaacagattctctaggaaatacaaacaccttcccactgaggtctgtgtgagcaaaggcttccaggaggctggtgaggacagagatccaaagcagcggcttgttcatattcctggcctagggctgttatagcagaagcagtgaccaggatgagggtagcagacaacacagtggctgtccccctagcgtctgatattcatgccccccccggccgtaatggccgaattcccgggcatatgtccggtaccgtcgactg

SEQ ID NO: 123540 - DNA, 1004 bp, Homo Sapiens
gtttttgtgttgaatgtgtgtggcaaaaagtttaatggcaacacagatggaatcaagagaaggcccagaagagatctgtaccctgcttgaccggtttctagacagcattcatgtcaaggcttcgtgagtcaggccctcagacccacaccaagggtttgatgatgacatatcctctgatttcatattcagagcctgccagtccaggaatattgtcagggagaggggtaccctgataggcagacaggatattttctgggggcagcacagagtcccacatgtacaaatccccgatctctcccacaaaggactggctcctatcaaacttgcccccataggaatcctgttcctgccccaggacaatcttgggctgagcttccacaaagtaaccctgtcgcagaccctttttcaccaaaggtgtcccattgatccaaaattcagcaatacctgatgaggactcccagctcacacagatgtgcactggagccgggaacttttcgataactttggatgtaactttgtgtcttccaatgtatagactatactctccaactctttctttataaactagtagctcattatccctgccttgggtattgtaggagaagaggctgtaggcacgagagagatcactataggctcgaaaacacaaggtaaagttctgtagaggcttctccagcggtgtgatcaagtttacatgatcagtaacagattctctaggaaatacaaacaccttcccactgaggtctgtgtgagcaaaggcttccaggaggctggtgaggacagagatccaaagcagcggcttgttcatattcctggcctagggctgttatagcagaagcagtgaccaggatgagggtagcagacaacacagtggctgtccccctagcgtctgatattcatgcccccccggccgtaatggccgaattcccgggcatatgtccggtaccgtcgactaaaaggggggtataatgtatgctatacgaagttatgcgccgcttcctcgg

SEQ ID NO: 123541 - DNA, 927 bp, Homo Sapiens
cacggcatgttatggaggatacttcctgcgtcaaatgctttagggagtactgcgaaccatacagggttccgtggtgaaagtggaaagtgcctgaaatttgggcacccagaaagaccactcccacacaatgtgtctaaactgcaacttccaggttaattatgacttaaagccaggttacattgtgagaaagtgctgaagggtatgtgatgtctttcccggcaccaaggtggccttggttcctcaccagatggtgtagccaccatctgaaccacccatgaagaagttccccttccgctgagttacgaggacgttggctccctgcatgactgcaagctgagcagcattgggagggcatccaggaggtggaggaggaatgttgccagcagtagccccagctccaaatctggcacctgcatcataccctccttccaccagcactgtggagccaggtggatagatgggaccgactggataataagccatggggattgtggaacctaaaggcccaacagccacagactgggccatgggaagatacagagaggctccaggaaatgcggctgacatggtggggactgtggcagcccctgggtgcacaaagctcggacgatagagctctgagtaggcaggtggagcatcggtatagggtggagcctgaggaagatgcaaggtctgagggtatactggattcccaggaggctgcacagggtaggttggctgtgttggatattgacctttgctgttcatggtggttgcgggtccggtttgtctcggcgtcgcggacggttatttttttcgtcctcttcctgttcggagctacttccgtgtcccccggccgtaatggccgaattcccgggcatatgtccggtaccgtcgacagaagggtcgtataatgtatgctatacgaagttatgcgccgcttcctgg

SEQ ID NO: 123542 - DNA, 1305 bp, Homo Sapiens
  misc_feature (1162)..(1196): n is a, c, g, or t
  misc_feature (1200)..(1241): n is a, c, g, or t
agaaagatttaggggttggagattgggatggggtgggcaaggggatggaaaggaaaaaggcaggcaactaatgcgttccatttataacaagtaatatatatcaaaggcttaaaaggagattaaaggccaatcagaataattgggcaacttaattcttaggaagatcaaagtcccctccaaacgtaatttgatgttttattactaaaagcaaagacccagtatggtaccagtattactccaggagaaaattaaagggaaaatccttaggggcggcttcaccccacattcattttatgaatggatacctccccttacctcaaaatgctttagggaggtactgctaccattaccatggttccttattaaatttgaaaagtgcctgaaagtttgggcaccagaaagacaccccaacaacatgtgtctaaactgcaacttcaggttaatatgactaaagcagttacattgtgagaagtgctgaaggtatgtgatgtctttcccggcacaaaggtggccttggttcctcaccagatggtgtagccaccatctgaaccacccatgaagaagttccccttccgctgagttacgaggacgttggctccctgcatgactgcaagctgagcagcattgggagggcatccaggaggtggaggaggaatgttgccagcagtagccccagctccaaatctggcacctgcatcataccctccttccaccagcactgtggagccaggtggatagatgggaccgactggataataagccatggggattgtggaacctaaaggcccaacagccacagactgggccatgggaagatacagagaggctccaggaaatgcggctgacatggtggggactgtggcagcccctgggtgcacaaagctcggacgatagagctctgagtaggcaggtggagcatcggtatagggtggagcctgaggaagatgcaaggtctgagggtatactggattcccaggaggctgcacagggtaggttggctgtgttggatattgacctttgctgttcatggtggttgcgggtccggtttgtctcggcgtcgcggacggttatttttttcgtcctcttcctgttcggagctacttccgtgtcccccggccgtaatggccgaattcccgggcatatgtccggtaccgtcgactgnnnnnnnnnnnnnnnnnnnnnnnnnnnnnnnnnnncggnnnnnnnnnnnnnnnnnnnnnnnnnnnnnnnnnnnnnnnnnncaacgagctagcgccctatagtgagtcttcactttgcggtctgtgttgttgctgctgctggtta

SEQ ID NO: 123543 - DNA, 1035 bp, Homo Sapiens
taaagggggtttaaagcccaatccggaataatttggccactttaaatccttaggaggatccaaagttcccttccaaccctaaattggaggttttattctaaaagcaaaagcccagtatggtacagtatactcccagagaaataaaggaaaatccctagggcgggttcccccccattcattttatgaatggatacctcccctccctcaaaatgctttagggaggtactgctaccatttacatggtcccttattaaatttaaaaagtgcctgaaagtttgggcacccaggtagacaccccaacaaccatgttgtctaaactggcaacttcaggttaatatgactaaagcagttacagttgtgagaagtgctgaaggtatgtgatgtctttcccggcacaaaggtggcttggttcctcaccagatggtgtagccaccatctgaaccacccatgaagaagttccccttccgctgagttacgaggacgttggctccctgcatgactgcaagctgagcagcattgggagggcatccaggaggtggatggaggtaatgttgccagcagtagccccagctccaaatctggcacttgcatcataccctccttccaccagcactgtggagccaggtggatagatgggaccgactggataataagccatggggattgtggaacctaaaggcccaacagccacagactgggccatgggaagatacagagaggctccaggaaatgcggctgacatggtggggactgtggcagcccctgggtgcacaaagctcggacgatagagctctgagtaggcaggtggagcatcggtatagggtggagcctgaggaagatgcaaggtctgagggtatactggattcccaggaggctgcacagggtaggttggctgtgttggatattgacctttgctgttcatggtggttgcgggtccggtttgtctcggcgtcgcggacggttattttttcgtcctcctcgtgccgaattcgccacccagcctcgctaccttaagaccgtgagagttactgccgt

SEQ ID NO: 123544 - DNA, 725 bp, Homo Sapiens
tcaggttaatatgactaaagcagttacattgtgagaagtgctgaaggtatgtgatgtctttcccggcacaaaggtggccttggttcctcaccagatggtgtagccaccatctgaaccacccatgaagaagttccccttccgctgagttacgaggacgttggctccctgcatgactgcaagctgagcagcattgggagggcatccaggaggtggaggaggaatgttgccagcagtagccccagctccaaatctggcacctgcatcataccctccttccaccagcactgtggagccagggtggatagatgggaccgactggataataagccatggggattgtggaacctaaaggcccaccagccacagactgggccatgggaagatacagagaggctccaggaaatgcggctgacatggtggggactgtggcagcccctgggtgcacaaagctcggacgatagagctctgagtaggcaggtggagcatcggtatagggtggagcctgaggaagatgcaaggtctgagggtatactggattcccaggaggctgcacagggtaggttggctgtgttggatattgacctttgctgttcatggtggttgcgggtccggtttgtctcggcgtcgcggacggttatttttttcgtcgtgttcgcggacgcgtgggtcgacgatatcccgggaattccggaccgtaccagcctgctttttttaccactggtcaa

SEQ ID NO: 123545 - DNA, 736 bp, Homo Sapiens
  misc_feature (171)..(171): n is a, c, g, or t
  misc_feature (661)..(661): n is a, c, g, or t
gtagtgtagcttggttttatttatgtccacaaatatttcaaaaaaattacaaaatactcaaatggagagaacacagaagtcacgatttctgggtgtctactgtttacactgtgttatctcatggcaaactactcatatatacatttagcttcaagatatatagaaacgtancaaatccgagtgtgcacgctgcctctgccgcagtggagtgaagctcaacctcgaggacaccgaacaagatacggacaaagggaggaaaatccgaaggaaaccgagtggttgggcttcaaagacaccatgaaggtcagggcctcctaaacaaactgtagtttatctggtgagggtttcgggtcgagggttttttagatggaagaatctcagcgcttcgccttgggatatggggagaaaagcaaagctaacaagaatgccttcggacggctttcaagcacagacctcagaggactcgactcttctttggaaaaatggatgccagaggaggagataaagaaggtttaactgaatggtagatgttgtgttctaccaaaaagaaagaaaaaccagaagccgagaaggtgggggcctggatgcaggagtctgggagcccagcaggaagaggcctcgctcagagccacgggaacaagcctgccatgagggcctgtcnccaccccagaaggaaacgaatgccttcaatccaatgtggcctgaagtccacgacaaaggttcatgtcagctttgc

SEQ ID NO: 123546 - DNA, 1955 bp, Homo Sapiens
  misc_feature (821)..(839): n is a, c, g, or t
tttttttggatagtagcttggttttatttatgtccacaaatatttcaaaaaaattacaaaatactcaaatggagagaacacagaagtcacgatttctgggtgtctactgtttacactgtgttatctcatggcaaactactcatatatacatttagcttcaagatatatagaaacgtagcaaatccgagtgtgcacgctgcctctgccgcagtggagtgaagctcaacctcgaggacaccgaacaagatacggacacacacagaggagccaaaccaaaccccgaacaaagggaggaaaatccgaaggaaaccgagtggttgggcttcaaagacaccatgaaggtcagggcctcctaaacaaactgtagtttatctggtgagggtttcgggtcgagggttttttagatggaagaatctcagcgcttcgccttgggatatggggagaaaagcaaagctaacaagaatgccttcggacggttttcaagcacagacctcagaggactcgactcttctttggaaaaatggatgccagaggaggagataaagaaggtttaactgaatggtagatgttgtgttctaccaaaaagaaagaaaaaccagaagccgagaaggtgggggcctggatgcaggagtctgggagcccagcaggaagaggcctcgctcagagccacgggaacaagcctgccatgagggcctgtccccaccccagaaggaaacgaatgccttcaagccaatgtggcctgaagtcccacgacaaaaggttcatgtcagctttgcctccctgtgaacaaactaaagttaaggcagaaatggaatgagagnnnnnnnnnnnnnnnnnnnctagaaacattttcaacagacaaaacaagcctatcccaactgaaaccaaacacggtttttaagagaaactggaaatgtcgctatttgacgccagaacctgaatttgagccagtagctgctggtttctagatcaaactatcagcatctcttcctgctccctctgcggcctgggtcctggatggactttgtgtccgccgacccagtgtggtctctgtcctacaattcttgggatgggaccagcacaatggcagaagagacctccagtgtctgagagaaaaggatcggaagaggccacgtcctggcaggaagcagggccgacagagggcagacaccccagaacacccgccctcagcctgggagaaagtgcgttacggctgcagcctggaaacgagggcaggctctctccaggacggttccgctcagaagggcctggcctcctgagaagcagcccccacacagcatgctttctgaatgcactgtgggtgggactccagttcccacttccaggatgaagagtgggactcaaatggtttaccagtgcaatgtggggtcaccatgcagacctgcccctagggtaaaatacaggctgcccccaacacctgtcttaactccaggatctcccttgctcaaaagtggcctcaatctgtggcaagaaagatggggccgtcctcaccacaagatccaagtgacaatgcgcatgagaaggcagccttctaacacatccctttggcaggcatatgtcctgggtcacttgtgtgctgagttatttgtatggaatcattttcttagatgatgaaattttcggagtattaaaaaagacattcatccagaacaatcaagtgtgtgtacacagaaatctagaaggaaatctacaatggacacaggcccatgcgctttccatcccgtggaaacagaacagtgacactggagaacagaaagtgaacattcacctcctgcactccctgtgcaaaatggaagaggtctgatggagcagatgtctgtgctgctggcagagcacaggctaggagcagacacaagtgaacgcggacgcgtgggtcgacgatatcccgggatatccggaccggtaccgcctgcttttttaccctggtaatgacc

SEQ ID NO: 123547 - DNA, 1239 bp, Homo Sapiens
  misc_feature (174)..(228): n is a, c, g, or t
  misc_feature (1036)..(1037): n is a, c, g, or t
  misc_feature (1106)..(1106): n is a, c, g, or t
ccttgtggaaagcccgaggttgggttgatccactgaaagcccaggaatttgaggacccaggcctgggccaaactaggcaaaaaccttgtttgtgagtacaaattatgccccaggggctaaggtggggtgggaccacacccgtaatcccagctacccaggagaatcggctaaacnnnnnnnnnnnnnnnnnnnnnnnnnnnnnnnnnnnnnnnnnnnnnnnnnnnnnnntgacagggcaagactcaaaaaataaaaagggaacattactaggggttagaaactaacttcattctttttagaattcaacagttttcctaggtcaccaattccaccttttgttcttattaaggcgcaaagtcacaggacccccttcctgggagtcactgtcattaaatctattgccgtcagctcagcccagggtaggcaaggttcaagaatgggaagtgcttttgtctggggaaacacgcaggtaatgtgatgctaggaaggaggatgtgcaggtgggtgagagcccaggagggagcagctggtgcctgacagggtgagccatcagggctgggcctgggtacagccccaggagaaggagcctgtgcagaagtagcagttcagtggattccacctcctatgtcacaatccagcaggtggccaggactcagcctgggttttaagtgagtaatgccttccctgtctcagagattagctctaacagtgtcactagaggaagccctggcgagggtgggggggcgtagtgtggggacaaggaggccagatagaaagtgctggaatgttctggaacagatctgtttctggaggagaggctgagtatggagagtcaacagaatgtgaccaccttcagagggaggagctgggccgtctccaataaatccagggacaaatgccttcagtcctcagactgttccaatagaggggacgccacgtatcccagggttccctttccaactcatgtcaacacctgcagttcctttgaggagactaaatgtatttcatgctggaaagacagattttctctcattannaatagccccactaaggagaccacatgctagaagtgcggacagggcctcagactaacttcggaaatgaanaggttggggacgtcggccagtctggtttgtaccacaatgcggactgcgttcactaggaagaagcaaccggctggatcatttgcgatcttcaaaggcaatcaaaaagtttcatggactccaatgagatcaaagc

SEQ ID NO: 123548 - DNA, 804 bp, Homo Sapiens
  misc_feature (604)..(604): n is a, c, g, or t
ttttttaggttaaattacttcgaaactttaattacagatacttttccacgcaacatttctgaaatgaaagctttgattctcccctttttttgcataaaggctgggaaggtggtttggccagaccgtacatctttttgtatatacatatctacacctgtgtctcttctttattaataaaaggtgtcttgatcacagtcccaaaccaactctgcattggattccagcatataaaactcagagagtaaaacaatttcaaaggaagacaggctgcaaccacaggaaaatggcaggaaaagttgtagcttgatagttgtttcttctaagtttaactcagaaatataataataattaagagaaaaaaataagaggccctagctttcatccctgctaccaaacacgctcgtccagaactctaggctgtcttaaagtgcaattactgttgtgaagttgctcaggccagggatcaggctggacggagttcaaagcagaaacttcaaacactccttgctgttcatgactcaggggctgggagggagggagaggagaaaaagaaggacagttctctggcattcaagtgcatcaaaagaataaatgtcttttcttnttggtaaagcaaatctgtcaatagtaaggaatcctggtttggaaaaatagaactttctaaaacttctatctgcggatgttccaatgcagcagagggacaaggcaggcaagtgcagccagcagcagggaccaagggcatctggtaggacgtggctctcttctctggcctgtctgggctggaccgtcgctgggctctgacgt

SEQ ID NO: 123549 - DNA, 1238 bp, Homo Sapiens
gccgggcatggggcgcgcggcagccgcctgaagccccggcctggcccggccgcacccggccggaggcggagggcagagcgcgcgcccagttgcccgggcaccaaatcggagcgcggcgtgcgggagggcccagagcaggactggaaatgtcctggccgcgccgcctcctgctcagatacctgttcccggccctcctgcttcacgaaccacgaccatgcctgcatcgcctgtcggatcatctatcggtcagacgagcaccaccctcccatcctgcccccaaaggcagacctgaccatcggcctgcacggggagtgggtgagccagcgctgtgaggtgcgccccgaagtcctcttcctcacccgccacttcatcttccatgacaacaacaacacctgggagggccactactaccactactcagacccggtgtgcaagcaccccaccttctccatctacgcccggggccgctacagccgcggcgtcctctcgtccagggtcatgggaggcaccgagttcgtgttcaaagtgaatcacatgaaggtcacccccatggatgcggccacagcctcactgctcaacgtcttcaacgggaatgagtgcggggccgagggctcctggcaggttgggcatccagcaggatgtgacccacaccaatggctgcgtggccctgggcatcaaactacctcacacggagtacgagatcttcaaaatggaacaggatgcccgggggcgctatctgctgttcaacggtcagaggcccagcgacgggtccagcccagacaggccagagaagagagccacgtcctaccagatgcccttggtccagtgtgcctcctcttcgccgagggcagaggacctcgcagaagacagtggaagcagcctgtatggccgggcccctgggaggcacacctggtccctgctgctggctgcacttgcctgccttgtccctctgctgcattggaacatccgcagatagaagttttagaaagttctatttttccaaagccaggattccttactattggacagatttgctttaccaaaagaaaagacatttattcttttgatgcacttgaatgccagagaactgtccttcttttctaacctcttccatccctcccaggccctgagtcatgaacagctaggagtgttgaagtacctgctatgagctccgtccagcctgatgcctgggctagagcaacttcacaacagtcatggcactttaggacaggctagaa

SEQ ID NO: 123550 - DNA, 812 bp, Homo Sapiens
tcccaggcagtgggcaccagacccgggctccagcgtcacttcttcttgcgcggtctgctgcgtccaggcagccatgttgcgggcgccgtgatcaggtggatgacgctgatgagcgacttcagcaaggcgatgggggcagtgacccagaggcccatccggaacagtcccacagagccaactaaaggtccctcagagaaatgggaccaggtagaggaggcagtagaggagttcattcccagcacacaaggtgaacagagcagggcctcgaggtttagtagatccgaagcaccggattcccggacaagtcgatcatcttgtgactctcactgcctcggaccacagaactgtggaggtgcagccagtgactggccacatccaaactcatgctgatttggaagaacagcgtggctccagggtacagcagggccaggttgaccaacaggcacatggtggagcagcggtccgtcagcatgtccagcatggccccaaaccgggttccgatgaggttgggcacgaacaggaagatattttcgtctggcatcgcggcgcctcccttgctgccccgggcctgctctggagatgccagtgctgtcccagccccgcagcgcggcctcagcctccggcccggcgcatcggccgcaccacctgcggcctggaccccgccgccccaacctggccccagatgctgaagcccgcagccgtcgggagcatggaccggccccgaggtgcgcgggacgcagggggcgcgcgcagtccgcccttcctacccgcaacctcctcgtgccgatttaaacccagtctcgtactagctt

SEQ ID NO: 123551 - DNA, 926 bp, Homo Sapiens
cattgttctggccggtctgctgcttccggcaccatgttcgggcgccttgatcaggtggatgacgctgatgagcgacttcagcaaggcgatggggcagttgacccagaggcccatccggaacagtcccacagagccaactaaaggtccctcagagaaatggaacaggtagaggaggcagtagaagagctcattcccagcacacaaggtgaacagagcaggcctcgaggtgtagtagatccgaagcaccggattcccggacaagtcgatcatcttgtgactctcactgcctcggaccacagaactgtggaggtgcagccagtgactggccacatccaaactcatgctgatttggaagaacagcgtggctccagggtacagcagggccaggttgaccaacaggcacatggtggagcagcggtccgtcagcatgtccagcatggccccaaaccgggttccttgattaagagcgcgagcagcgtgtccatcgaaagcgtccagcaggccgcgatgaggttgggcacgaacaggaagatattttcgtctggcatcgcggcgcctcccttgctgccccgggcctgctctggagatgccagtgctgtcccagccccgcagcgcggcctcagcctccggcccggcgcatcggccgcaccacctgcgccctggaccccgccgccccaacctggccccagatgctgaagcccgcagccgtcgggagcatggaccggccccgaggtgcgcgggacgcagggggcgcgcgcagtccgcccttcctacccgcaacctccctcgcctctgccagccccgcaggcgctccgggcctccagctgcggtcgccgctgctccagctgcgcgtggcttccgggaacctcctcctccgcgcccgtcgtcctcgtgccgaatttaacacccaggcctcgtacctagcc

SEQ ID NO: 123552 - DNA, 1898 bp, Homo Sapiens
tttttttcattgacagacgagtatttattaagcagctactatatgccaggttcaagttggtcttactctagggatagagaagagaacaagaaaagtctgtgccttcatggagtttacattctagtgagggtagaaaatatcaagaatataaatacatgtagacagtcagtgacatcaaacaagtgggcggtggggacaccacatgagcatgggtggcaggagggcctctctgtgaggtcactgtgggtagacggagaagccagccagcaaactggaggaaaagcacccagacggacgtccttccctaagctccctcaacccaggccctgagccaagaatatctgaaaggaaaccaagtcaaatagtgaagtcccgccaggaccagggtaggcaggacagaggagccggtgacagggaaggctgtggatggcttcttccctcctgggcatggtgccccaagcttgctctggctgggggcggaggtctgactcccgcctttcaggaaacctggccctcacaccacctccctcactcaagcgtccctagcatctcggaccccaggactgagcaggcagggtgtgacactgcccggtcccggcaccccaggagcaccgcctggatggagggggcctcccgcgtatcctccctgatttgaggcccgggtcctcaggatcccagagaacgtgacgtcaccaaagagaggctgacccccatcccagcaggtagaacaacacatgaggaaggcgtgagactgggacctcctagcagggggtggggagctgtgtggcacagcaagactcccagggcaggtgggcagccaggacccggggctccagcgtcacttcttcttggcgcggtctgctgcgtccagggcagccatgttgcgggcggccgtgatcaggtggatgacgctgatgagcgacttcagcaaggcgatgggggcagtgacccagaggcccatccggaacagtcccacagagccaactaaaggtccctcagagaaatggaacaggtagaggaggcagtagaagagctcattcccagcacacaaggtgaacagagcaggcctcgaggtgtagtagatccgaagcaccggattcccggacaagtcgatcatcttgtgactctcactgcctcggaccacagaactgtggaggtgcagccagtgactggccacatccaaactcatgctgatttggaagaacagcgtggctccagggtacagcagggccaggttgaccaacaggcacatggtggagcagcggtccgtcagcatgtccagcatggccccaaaccgggttccttgattaagagcgcgagcagcgtgtccatcgaaagcgtccagcaggccgctgagcaggtagaaggaggaggccgtgagggggcagcagggcatgaagtagaaagaaatgatggcgaagacaatccgggcataaccgatgaggttgggcacgaacaggaagatattttcgtctggcatcgcggcgcctcccttgctgccccgggcctgctctggagatgccagtgctgtcccagccccgcagcgcggcctcagcctccggcccggcgcatcggccgcaccacctgcgccctggaccccgccgccccaacctggccccagatgctgaagcccgcagccgtcgggagcatggaccggccccgaggtgcgcgggacgcagggggcgcgcgcagtccgcccttcctacccgcaacctccctcgcctctgccagccccgcaggcgctccgggcctccagctgcggtcgccgctgctccagctgcgcgtggcttccgggaacctcctcctccgcgcccgtcgttgcaaaattggagagaggcctcgtgccgaattcgccacccaggcctcgctaccttagaaccgttagagttactggcctt

SEQ ID NO: 123553 - DNA, 170 bp, Homo Sapiens
tgcagtccacatttttatttccccaaaagatgtttttcggaaaggtccctttcccttaccatagctagcaccataccccaagaccaggatgaaataagccagggaaaggagacacatcttattcccttctgtcgtcttctcgcagccgtatagtagtagtaggcggccgc

SEQ ID NO: 123554 - DNA, 2622 bp, Homo Sapiens
  misc_feature (85)..(93): n is a, c, g, or t
  misc_feature (110)..(119): n is a, c, g, or t
  misc_feature (152)..(341): n is a, c, g, or t
  misc_feature (366)..(379): n is a, c, g, or t
  misc_feature (387)..(511): n is a, c, g, or t
  misc_feature (1934)..(1934): n is a, c, g, or t
cccaagggggcaaaaaggtgtggtataacccccgcggggggtttcagggtctttcccaccccccgttgggggggcggttcccaannnnnnnnnaaaggttttttaaattnnnnnnnnnntttcccaaaaaggccccggcgggggctaaattnnnnnnnnnnnnnnnnnnnnnnnnnnnnnnnnnnnnnnnnnnnnnnnnnnnnnnnnnnnnnnnnnnnnnnnnnnnnnnnnnnnnnnnnnnnnnnnnnnnnnnnnnnnnnnnnnnnnnnnnnnnnnnnnnnnnnnnnnnnnnnnnnnnnnnnnnnnnnnnnnnnnnnnnnnnnnnnnnnnnnnnnnnnnnnaaaaaaaggttttaaaaaatttttnnnnnnnnnnnnnncccccaannnnnnnnnnnnnnnnnnnnnnnnnnnnnnnnnnnnnnnnnnnnnnnnnnnnnnnnnnnnnnnnnnnnnnnnnnnnnnnnnnnnnnnnnnnnnnnnnnnnnnnnnnnnnnnnnnnnnnnnnnnnntttcacagtccacatttttatttccccaaaagatgtttttcggaaaggtccctttcccttaccatagctagcaccataccccaagaccaggatgaaataagccagggaaaggagacacatcttattcccttctgggttagtctttgagagggaagtggccaaacttttgtcaccgttccatggtctgaggcttagtgtcttcagaggtttcttcctgtccctgctgcagctgccacatgtcagcatacaccccacctcgggacaacagagcctcgtgtcgtcccctctccacgatgcagccatccttgatgacgaggatctggtcagcattgaccacagttgagagcctgtgtgccactacgatggtggtgcggttggcacagactttggccagagaagcctggatggccctctcattagatgtatccagcgctgacgttgcctcatccagcagaatgatgcccggagccttgaggatggtgcgggcaatggcgacgcgctgcttctccccgccgctcagcttcagtccccgctcgcccacctgtgtcctgtacccttcagggaaagccataatggcatcatggatgcctgcagcctgagcagcagcctccacctcatcattcccagctgtgacacggccgtaacggatattgtcggcgatggtgtcattaaagaggacagtgtcttggggcacaactccaatgtgagaccggagagaggcctgggtcacctgtgaaatgtcctgcccatctattcggatgcagccagagctgatgtcgtagaagcgaaacagcaggcgcaaaattgtgctcttccctgccccagatgggcccaccagggcaagtgtctgtccaggcatcacagtgaaagacacgtcctgcagagtctcccgcccatcggcatagctgaagtgcacgttctcaaactcaatacggcccttctgaaagcgaaggggccctgctccaggaaggtccttcgcttctgtctcgtctttcagcaagtcaaacatgttctccatgtcaatgaagttggtctggatcatcctgtagtaggtgccaaaccaattgaggggcatgtacagctggataatgtaggtgccaaagagcacatagtccccaacctgtagcttctgctcagtgacaaagtatgcgcaaagcagggagccggcgaggagcccgagcccaatcaccaggttctgggtctgatttagtaaaaccagtgaagcgctcgacttccactccaaaccctgatatttgatgatggcctctcgatagcgttccacttcggtaactctcggcgttgtaatacttcaccgtctcgaaagttttagcagagagtccacctgctcgtgccccgggtagcgttctcctgtgtgttcatagcacgacgaaacttggttctccactcagtgaccacaatggtncagggtgaggtaaagactcatgcacaggaacacaatgaggccaaaccaggcgttgaagaacatgctgaagtagatgatgccaatgatgatgtcggccagcgtggggatgacattgaacaccaggtagctgagcagccctgtgacactggatgtgccccgatccgcgatccgcagcacctcccctgtgcggcgccccaggtgccagcgcagtgagagctcgtgcaggtgggagaagatgagcagctccacccgccgagacgtgaactgctgcacccggatccacaggaaggtgcgcaggttgctcacgaagcctgtactgccagtgccacccccctggaggaacttgaggaagacgtaactggtaacagtccaggccagagagttccaaggtgccttctcagtcagcaagttcacaatgttcctatagaatataggcaccaacacattgagtgcccgttccaaacccatgagccccaggcagatgagcaccaccagctgcagagctggactccctcgaggccacaggtagccactcaggaggcggagcttcctgccaaatctcgccaggtagactgttgggctgctgaccgaacctggctcctttccacatcgacgcgtgggtcgacgatatcccgggattccgaccgtaccagcctgctttttgtaacaactggttatagtcacaatt

SEQ ID NO: 123555 - DNA, 1685 bp, Homo Sapiens
  misc_feature (1600)..(1630): n is a, c, g, or t
cctttaagtgatatgtttttataaaactaaacaaatcaacaaataaatcttgaaggcggatggttttcccagcagtgcaggggttggagggaggctgctggcactcctggggccaagggggacaggcagtggtcctgagtctgctcagagaggcaaggcagaaggagctcgccaggcaggtcagctcacatctgtccaagtcgctctggtcagaaacagcgactctcccccattcccccagcgttcccaccaggcctgggctgctgggaagcccttgctgtacccaggagcccgacccgcagtatcctggcacagagccacttgtcactcagaacagtcagtgtctccaacgcacaaacatccactcctctgttaccagttaaagcactttaatgctttaaggtgaaaacgaaatcccatccgtgtttttcgtgtaagatcgtgcttctccgagcagtattaatggacgccctccaatgacataacaactgtttttggtaatgtaatcttgggaaaatgtgttatttttttagctgtgtttcagtggggatttttgtttttgtaacataataaagtgtatgttccaatgaccggttctcatgactcaacctaaatctccaaagggctcagacaaacagggcggctcgtcacaggcaggaagcccgtggcctctgtggccggccctggcaccccacttgagtttctctgtgtcgtgagtctgatgggtccctggggtgtccctctgccctgtgcctcggaggacctgcgggccaagccgagtagcctcatgggactgaccgggcctctcaggcctcctgaagtacaggcccatgagccctcatccaagccctgtggggcccaggccttctggactttagctaggccaagcagggtctcagggcgtcacaaacaccgacacagaacgcactcccgtttctcagcaaaacctgtccccacgtccaccaaggagggctgggcggtggtgggcccaccccctcatagccgcaggactctggatcatgaaggtgttgaggcctcaaactagacaggaagtggagggattctggatgttccctcggcaagagggtgccacatagaacgtagaaacggggactctaaaacgccctttcaggaatgaacacagaaatgtgagtgctttcagcacaagggtgagtttgaatatctttgtttaaaaggttagttattttttttaagtatagcgtgagaaatacaggccattattttcaaatatataaaaacatctccagtaagttccacacagaattttggaaagctaagctggactcagagcaggtctgctgctccccaaggcactacccttcgaaggaaggtttccacccgcccccggctgcaaaatggaaaggagaaagcccgtttccaaaaggtctccacgcccctttgggtggaaaacagccactgttcattcccgcgttcacatccaaagaggaagcctagattcaggtgacaagaacagaatatgggcttttcataccacacacatatatttcctatttctcaggaatggtgctgtgtcattactatgcacaaaatcggattcttcaagaaaattgttttttannnnnnnnnnnnnnnnnnnnnnnnnnnnnnnggccgcaaatatttttttcgagtaggtctttctaagcctgcttggtgaaaatgtg

SEQ ID NO: 123556 - DNA, 773 bp, Homo Sapiens
  misc_feature (66)..(80): n is a, c, g, or t
ttttttatgttttaaataaattttattgtctatattaaggtatacaacacaatgttaaatgaaacnnnnnnnnnnnnnnngtaaaactatagtggaacaatgaacatacccatcatctcacatagttactgattattcccccattggcaagagcaggtataatctactcatttagcaaaaagtcctgaacacaatatacaatatgtattaactatagtcctcatgttgtacatttgatctttgatcttttcacttgttcatcctgcatatttactactttgcatcctttgacctacatctcatttcctccaccttatcctgaccttagtaattactgttttattctctatctctatatatttaaccttttttttcttgattccacatataagtgagatcacgcaatatttttctttctgtgtctggcttatttcatttagcataatgtcttctaggtctatccatgttttggcaaatgacaggactgccttctttttaaaggctaaataatattctaattatctatctattgatctctctatatcacagtttctttatccatttgcccattgatgaacacctaggttgtgtctgtatcttgactattgtgaattgtgctgcaataaacttgggagtgcagagataatctcattctctttggggatatacccagaagagggattgctgggtcatatggtagttctatttttaatttacttaggaacctccatactgtcttccataatggctgcaccaatatataatacattccc

SEQ ID NO: 123557 - DNA, 740 bp, Homo Sapiens
  misc_feature (301)..(331): n is a, c, g, or t
  misc_feature (691)..(691): n is a, c, g, or t
gaccttacaagtcattttcctttattttcttaacatataatgaaattccaactccaaagagacatatatgcagagcagacagatgcagggccttggtgtgcagcagcctagaaccaggcagggggtgggtgtgacccctctcccctccatcacaactctccccactcctggcccctggccattgcccaggcagaaactgagaagctggaaatgagaggaatcagcctcgtggtccagggagtagccagagacagggccttggttactaggcctggccaaatcattgtctagctgaaaccgnnnnnnnnnnnnnnnnnnnnnnnnnnnnnnnctagaagttcctgctagggaatggagaagagagtgtgcagatgtgatgcactggtgatagttaagggccttctggttgtccctctgcttctaaatacctgcgtaattgtgtctcttggtttctgttgccatcatggctaagtgcacagtggtggagctgctctggccctggtggaattgaaaggacttatgtagatagaatccagccttcaaagctgatcctgatctctgaactgtccttgggctgcaactatagctacctcattaggtcaaggctgacctctcccctccaggtcaatgcagagggaaggctgtggccaggggtcatacagcaagcctgtgcaggttattcagctgctcnaatgctctgatcaggagctcatgagcaagggaagagcttgctccatcct

SEQ ID NO: 123558 - DNA, 1003 bp, Homo Sapiens
  misc_feature (243)..(251): n is a, c, g, or t
  misc_feature (540)..(607): n is a, c, g, or t
  misc_feature (911)..(941): n is a, c, g, or t
ccccggtgggaatatattgtgtttctgctgcatatcgctgctctcgccgcgttgggtggcccacgtatttcttctcttcctgcgtccgcggcttctgtctgtttgtgctctgttgtggtgtgtgtaccgcccccttttcgtttctgcctcccttgcaggggattgtcttgatattgctgtgccctctctcggggggggcgcttctgatattacttctgctcggtgggcgtgtcgttttgtgtnnnnnnnnntcgtttgggttgtcttctcccccctcctccctatgtgggtggctgcttcctcccactggtgttgcttctctcttgtccgctttgtgttcctctcgctttgtatcctgtttgtttatcaccgcctcgcccgcaccgtcggcgtcggttgtattatattgtctgcgctccctctattatgtggggcccccctcttttctctcccagaaaaggtggggggcgcgcgctaagatgtggggcgcccccgcgcggggaggataatatctttggcgcgcgcgccgcccccctgtcnnnnnnnnnnnnnnnnnnnnnnnnnnnnnnnnnnnnnnnnnnnnnnnnnnnnnnnnnnnnnnnnnnnncttgaccttacaagtcattttcctttattttcttaacatataatgaaattccaactccaaagagacatatatgcagagcagacagatgcagggccttggtgtgcagcagcctagaaccaggcagggggtgggtgtgacccctctcccctccatcacaactctccccactcctggcccctggccattgcccaggcagaaactgagaagctggaaatgagaggaatcagcctcgtggtccagggagtagccagagacagggccttggttactaggcctggccaaatcattgtctagctgaaaccgnnnnnnnnnnnnnnnnnnnnnnnnnnnnnnnctagaagttcctgctagggaatggagaagagagtgtgcagatgtgatgcactggtgatagtt

SEQ ID NO: 123559 - DNA, 345 bp, Homo Sapiens
  misc_feature (122)..(130): n is a, c, g, or t
ggaccttacaagtcattttcctttattttcttaacatataatgaaattccaactccaaagagacatatatgcagagcagacagatgcagggccttggtgtgcagcagcctaaaaccaggcannnnnnnnntgtgacccctttcccctccatcacaactttccccactcctggcccctggccattgcccaggcagaaactgagaagctggaaatgagaggaatcagcctcgtggtccagggagtagccagagacagggccttggttactaggcctggccaaatcattgtctagctgaaaccgggggcctcagtttctttatctgttaaatgagctagaagttcctg

SEQ ID NO: 123560 - DNA, 963 bp, Homo Sapiens
ttttcagaaatggcaaatagatttaatgcagagtgtcaacttcaattgattgatagtggctgcctagagtgctgtgttgagtaggtttctgaggatgcaccctggcttgaagagaaagactggcaggattaacaatatctgaaaacacaagtaagagaaaataaaagggtcaattgacatccagcaaacagaaaggaatagaaatggcaaatagatttaatgcagagtgtcaacttcaattgattgatagtggctgcctagagtgctgtgttgagtaggtttctgaggatgcaccctggcttgaagagaaagactggcaggattaacaatatctaaaatctcacttgtaggagaaaccacaggcaccagagctgccactggtgctggcaccagctccaccaaggccagcgaagagcccaaatgtgagagtggcggtcaggctggcaccagcactgaagccaccactggtgctggcactggcactggcactgttattggtactggtactggcaccagtgctggcactgccactctcttgggctttggctttagcttctgctcccgcctggatccgggctttggcccagggtccgatatcagcttcgtcccagttgcagggcccggcagcattctccgagccgagcccaatgcccattcgagctctaatctcggccctagccttggcttcagctgcagcctcagctgcagccttcaaatccgcttccatcgcctctcggtactgagctgcccattccttgggatccttcttttgtaccttgcaggcaaacttgaggactttcatcttgctggtctcatagtaagagcgcaggccccagaagaactcatattcagggggattgctattggggactctggcatagtccaggtacttctgcttcacaaactcatcagtgatgagcttcttcacgtccccaaagagtgaatgatgtatcctgagagaag

SEQ ID NO: 123561 - DNA, 1116 bp, Homo Sapiens
ccctcccccggagggtgggtggggggttttcagaggcttttttggagagatgccgtggagagcttggggaaggttttttagcggggggaacccttggcccccctatgcgggcccttaggggtgattcttcagggaaggagccaagggttttcgggggccccaaaggcagcccacccgaggtcccctgaatggccctgggggggcccagaaagggctagtgggagcccccttgaaggcccttgcggcccattgaggcccattagggccttttgagaccctttcgggccacctgtggttcccagaaggcttgactctgatcactggtgcccatccttttcccccttccagatgcttcacctttcgggttttcttggctttgaccttgggccgagtatcctgattctcctgagactgggcagctgcactctcaggctcaggttcatctgctggggcctgagagggtgcagcctcagtctcctgagcctttgtattgaccttcgtatcagccacatggctgacctttttggtctcagtggcaggcattgtcacagcctgcgggtcagcattctgtttcttggtgtcagctgctagactcttgttttcagctgccagaacctgggtatcagtcagctgagtagtagacgaggcctgggtggcaggtgcctcccgagcctctggggtctttgagacctctgtggcctttgagaccccagaggcttttgagaccttcacatcctctgagacctccagtgcctttgaggccttcggtgtctctgggacctccacattctgggtcactgtcaacagagtctgcatcatcgagctactgtccttttctgaagcttcagcctggaagcgagttagacctgcaccactctcgcttgtgtcagacatgtctcaatttggcctggcaagagctgagccttccgtaggtccccaattccaaccccctccaccacccccaacgactccgttctcagatacaggaattcaaagcttctaagtctcaattctctgcagccgcaccctccccttctccaggaagatgtgccagcgcccacgcgtccgcggacgcgtgggtcgacgatatcccgggaattccggaccggtaccagc

SEQ ID NO: 123562 - DNA, 1896 bp, Homo Sapiens
ttaccttgggggtcttttaggcctttttaaggcttttctggtctacaccccgccctggagattccccgggccttttttggctccccaggggtgtccggaattatcaaagttttcggtttccccagtatggcagaggggccccggggccaggcattttttgcccggagggcgcgagaccccccaaatttgcccccatttgcgagggttttttaattcttgcgggacccgtaagcccttttgggtttgcaaggcttgccaatgccgttccaggctggccagccctttccaaatatatttgcgtttccgtttggccctgtgtggggttaactgaaggctggccccattttcctttggggattcctttcttttttgtacccttgcagggcaaaaccttggagggactttcatcttgctgggtctcataggtaaggagcgcagggccccagaagaactcatattcaggggggattgctatttggggactctggcatagtccaggtacttctgcttcacaaactcatcagtgatgagcttcttcacgtccccaaagagtgaatgatgtatctcagggcgcagccccaacttgcgcagcacctcccagatgacagcctcactggaccgatttccattcatgaagatgatgctaagaagcaccatgagcagacccagcttgggtgagtccttagtcgttcccagtatgcctgcatcagtgggctctaaggtgctgagaagaatgtacaagtgggtcattcttatcaatttccttcaattgaatcccaaataccttctccaaagaatagcctgctcgttcaatgatttcggggtacacatcagtgtattctttgatgatgtccttcagcatgtccgagcgcttgatgggaatcttcgtctggtctttagccaaaaggtacttcaccaaatcatttgccctcccttgcaaaagggccacatcccgaggtggtggtgcttcaggctcttgggatgactggagcttggcagctctacggcgagccttgcccctacgggctttaggtgatctcagggagagcaaggctctccgggcccaagcagccaaccgagtccttgatgccctgcgggcccaaaaggctatgggaccccttgaagccctgcgggccattgaggccattagggcctttgagacccttcggccacctgtggttccagaagcctgactctgatcactgctgccatcctcttccccatccagatgcttcacctttcgggctttcttggctttgaccttgggccgagtatcctgattctcctgagactgggcagctgcactctcaggctcaggttcatctgctggggcctgagagggtgcagcctcagtctcctgagcctttgtattgacctttgtatcagccacatggctgacctttttggtctcagtggcaggcattgtcacagcctgcgggtcagcattctgtttcttggtgtcagctgctagactcttgttttcagctgccagaacctgggtatcagtcagctgagtagtagatgaggcctgggtggcaggtgcctcccgagcctctggggtctttgagacctctgtggcctttgagaccccagaggcttttgagaccttcacatcctctgagacctccagtgcctttgaggccttcggtgtctctgggacctccacattctgggtcactgtcaacagagtctgcatcatcgagctactgtccttttctgaagcttcagcctggaagcgagttagacctgcaccactctcgcttgtgtcagacatgtctcaatttggcctggcaagagctgagcctcgtcctcctacaattcccgagtgcgtccactcactccaagcccctccgaaactcggcctcgtgccgattaacacccggcctcgtacctagc

SEQ ID NO: 123563 - DNA, 1062 bp, Homo Sapiens
  misc_feature (110)..(122): n is a, c, g, or t
ccccaccttcccgagcgctgcgaaggggactcttcgtcgggtcttgaggcccaaagggggtcgccccaaacccattggccctcccccggcaaaaagggccaccacccccnnnnnnnnnnnnnttccagggttttgggaatgaccgggagcttggccagctttttcgggcgaacccttgcccccttcggggcttttaggtgatctcaagggagggccaaggcttttccggggcccaaaccagcccaccggagtccctgaatgccctgcgggccccaaaagcgtatgggaccccttgaagccctgcgggccattgaggccattagggcctttgagacccttcggccacctgtgttcacagaagcctgactctgatcactgctgccatcctcttccccatccagatgcttcacctttcgggctttcttggctttgaccttgggccgagtatcctgattctcctgagactgggcagctgcactctcaggctcaggttcatctgctggggcctgagagggtgcagcctcagtctcctgagcctttgtattgacctttgtatcagccacatggctgacctttttggtctcagtggcaggcattgtcacagcctgcgggtcagcattctgtttcttggtgtcagctgctagactcttgttttcagctgccagaacctgggtatcagtcagctgagtagtagatgaggcctgggtggcaggtgcctcccgagcctctggggtctttgagacctctgtggcctttgagaccccagaggcttttgagaccttcacatcctctgagacctccagtgcctttgaggccttcggtgtctctgggacctccacattctgggtcactgtcaacagagtctgcatcatcgagctactgtccttttctgaagcttcagcctggaagcgagttagacctgcaccactctcgcttgtgtcagacatgtctcaatttggcctggcaagagctgagccttgtcctccagcgagttcgggatgcgtctgcccctcgtgccgaaatcgccacccaggctcgtacctagactgatgcggttgtagg

SEQ ID NO: 123564 - DNA, 446 bp, Homo Sapiens
  misc_feature (23)..(23): n is a, c, g, or t
  misc_feature (39)..(39): n is a, c, g, or t
  misc_feature (399)..(399): n is a, c, g, or t
ttgtagataagcattcaaatgtntgtaacgtttaagcantaatgccaaaacaggcaagtcaagaaagtggtctggtttggaggtgattttgcatctagaaggcattctcttctcgtgacctcaaagactgagcactgtagagcatgtcttcttcctcaaggccaatgatacttcagataccagatggtttcatttttcaattgcggtccaaagagagggttgagttgggccagaattgcaatcagccaaaagagatagcagcaaactgaacaggtcaccaacatggtaatgataactccccggttaggacccttagggatgaaccaaggcaccaagaagccgacgaagccccagaacacgctcatcacaatgagaggcacagtgaggccgtgatacgcnatggtcgccgcctgagcgccaacccctaccccgtcgcctcactcgga

SEQ ID NO: 123565 - DNA, 185 bp, Homo Sapiens
gccagatttccatagaaaggaggaaaatatttattccaaaagatggcagaaagaagaaattcatcctgaaagtatagtttggtgcgattctgttgagatggctcttccctctgaacgtgctctcctactgaccaccccttctgtcgtcttctcgcagccgtatagtagtagtaggcggccgctat

SEQ ID NO: 123566 - DNA, 879 bp, Homo Sapiens
ttttttcagatttccatagaaaggaggaaaatatttattccaaaagatggcagaaagaagaaattcatcctgaaagtatagtttggtgcgattctgttgagatggctcttccctctgaacgtgctctcctactgaccaccccactggagtcttgtttgtcttgcagcagtttctaaacacttcactgattcccacgtgagaaggcaggagccatcttcaaatccacagattccaaggagagagtaacgtatctctcagaagaacagcatcttctatctcagaagagtacataatcgttttgtggagtcggcacagttcaggttatggaggcacgtaattcaccaaagtgcaaaaaaggcaaaggaaaacacgctgcattgtagaataaggcattcaaatgtgctgttaacgtttaaggcagctaatggccaaaacaggcaagtcaagaaaagtggtctggtttggaggtgattttgcatctagaaggcattctcttctcgtgacctcaaagactgagcactgtagagcatgtcttcttcctcaaggccaatgatacttcagataccagatggtttcatttttcaattgcggtccaaagagagggttgagttgggccagaattgcaatcagccaaaagagatagcagcaaactgaacaggtcaccaacatggtaatgataactccccggttaggacccttagggatgaaccaaggcaccaagaagccgacgaagccccagaacacgctcatcacaatgagaggcacagtgaggccgtgatacgccatggtcgccgcctgagcgccaacccctaccccgtcgcctcactcggatcccaccaggaagtgtcaatagctgaccgcgtgaccagcgtgtgcccc

SEQ ID NO: 123567 - DNA, 1008 bp, Homo Sapiens
aaaacagttagtttgctttattttaaaacagtaacttccttatatgggggcactgtccaaaattcaatactgatacaaaaatatgtttcttttaggtcaaaatacgtttcaggtgaattttctgaattttgttacatgagaattttaagagccatataaaacaggtgacatgagaggtgaacatgaacatgtgtaacataagccacagtacaaatttacacagaacaatcaagccatgtcatttccccaaaatcatttttggttaatatttaggagaatgcatatattttcaagaacttaaaagtgaatctctactcccatctcctaatactcccagccaggaagtacaactttcttcttttactagatttaaatattccaaatattactcctggtaggatactctggtattaactatagctgagtgtatcagaaatagaaaaaccatgaagatttataaagcatttaaaaaataatcatttatagcaagtccttaaaagccccagatgaaaaaggcagttctccacttctaataacacctatggtttatgttgcgtaatattattaaacaaaacagcattctgaccaatgataatttataggaaattcatttgccaagtcaatgtttcattaaagttaatattttggcttatattaaaaaaatttttaactctattaacttagcaaagtcatctttatgatgccatttaataaactgaaaggaaacaagatggtacattctgagtaaatacttcttgcagaagaacatttacttcaatagatctgattccatcaactaactgggaaagaacttacaatcttattcttacgccatgatcagacactggagattggacacaatgaatgttggaaaagccaggattctcccatgggatatctcacacctatgcccatataaaatggggaacggcactacattggaaatttcacacggcaatgtgacgacatataggatgaggttagcgattattaaaacgccgcgaatca

SEQ ID NO: 123568 - DNA, 846 bp, Homo Sapiens
  misc_feature (167)..(175): n is a, c, g, or t
  misc_feature (194)..(194): n is a, c, g, or t
  misc_feature (201)..(201): n is a, c, g, or t
  misc_feature (292)..(292): n is a, c, g, or t
  misc_feature (295)..(316): n is a, c, g, or t
  misc_feature (319)..(331): n is a, c, g, or t
  misc_feature (333)..(334): n is a, c, g, or t
  misc_feature (336)..(336): n is a, c, g, or t
  misc_feature (339)..(344): n is a, c, g, or t
  misc_feature (346)..(349): n is a, c, g, or t
  misc_feature (351)..(353): n is a, c, g, or t
  misc_feature (355)..(365): n is a, c, g, or t
tgtggggtaggacgggacccgcgtgctttcttgtggtcccgcgccgggttttttcttctgggggacgacaccataggtaatgggcccactttttctcttctctggtgcggggcgggccggcgcgcgcccccacagaaagggggtgtgagaaaatatatttttgtgtnnnnnnnnncggcgccgccccaaaacanaccccanctctcccctcttttttctcccaaaaaaccaacgctccgctaccttaaagctctatccttctctccccccaccttctccttcttctttcccnctnnnnnnnnnnnnnnnnnnnnnnccnnnnnnnnnnnnncnntnacnnnnnnannnncnnncnnnnnnnnnnnttaacctcacacattaactttattcaaacaaacagcacttacaggaaatgtaaagtagaaaaagatttctgcccactttacctacggagacatgataaacacgcaaaaaaaacctagaaattaagcaaaaaatagcacaataatttaactgaaagcaacaagggcaaaactgtctccttttgtagtttgtggtaccttatagtagtgctcattcagtttcgtttgcttgataaatctgaggactatgagatatcagagttactagtagggtaggagtgctgtaagggtactgggagaagtaggattagttaggggcagatcttgaattctggccaagaaactgatatttaacccataaagagatagtcactatatgttatcaaataggagaataacacaaatgagaaatgactgttaattcctgatgcatagtaacagttgtgagctttagtttaatgtaatatttgtaataaaaacgttt

SEQ ID NO: 123569 - DNA, 1975 bp, Homo Sapiens
  misc_feature (164)..(172): n is a, c, g, or t
  misc_feature (200)..(215): n is a, c, g, or t
ggggggcgcaaccgcgagggctgtgtttattgaaacgagcgggggtgcctcagaggggcgggttggtatgttgttgggagggaggcacaaagtttggtggccgggcgggtatttatttgggagaaaatagggggaggtactgggagtgttttattagggtgggnnnnnnnnnacgaaaggtggtttaagagatgttgttnnnnnnnnnnnnnnnnccgcaaggagggaagttttggtgggcgtacgtggttgtggggggaggatgggatttttgcgatgtgtggggggcggtggggggatggtaaagtgatgggatataggagggccggagggtgggggaacgcaccatctgggacgaaagatggggggggtgtgaggggaggttagtgttgagggggaaaggattggtttttggaaacataagtataaatttactatccacctagtggtagctaggtaaaattgcaggcataaagataaaaaagaaatcatcaactttgtagttcctcagcttcaaacccaaacctgcaagggagaggagagacccagacgcctcagggaccaggcagataatacaaataaatgaaacaggccaggtgagagagtacaagtcttgccaaaagaagaaacccctacttagtttcaattgattgtcctcttctgaaaatgcagatcagaattgccacacattctgaccgatcgagagaggccagaaattctaattttaatgtgaaacctcttgatttcttagacggtggctcaattttcttgaaaacactaggtgagctaaataaagctgacagtccaccagttttcaatactcctcttgcagagagtgaatggcatctcccctaactgtagtattagactgccactcaccagccacagtttgcaactgcaaaagaggcataaactgacggggatctcctgctttactatgcacacacagctgaactctccagccatggagaacaactaactctataggaaaaagtagaaggctaagctgagccatccagggatggcggcaggggccttcatggctagctgctggcctgtaggcactaaattgcagactgctcctgcaggaagccttcagggcctgggaggcctttatctggctcagaagctagggctgcttctcgaaggacttccaaatgctcctcagcagccgacagagactggtcaatccagtccaggcctcccgtcagatggcaggcattccttgtcaccagcaccaggtgactgacagacaggagcagggcagtcgtccgtgcgtccaggagtttggggtccaacggagggtacatcgacttcacaacatcatccaccctggggctgatccgcttggccaccacaatgatgtcgctgacactggctgaagtcttcatcttggccccagagcccattgtcatggcaacaagcttctctgtcagagtgtgacaaatcttcaagatggcaatgcagtgggacatgagacccgaggcatcttcgatccagtcttcattctccagaatggcctcaatgtgggggttggtgataacgacatcgtccagttctaactcagagggctcagactgggtctccatggcaccaatgaggtccacaatgggcttagaatcatagcgctgcagcaggtctcgcggccggcagtagcgctgcctgcaaaccagcaccaaggctgcaaacgaagccagaaagatggtggccagcacacctatggcaacaatcaccacagtctccatgcttccagagggctcctgactcagtcccggtcacatcctcctcatgggctaaagctgctggaagtggcaaattggggaagaggatggcaggtgctaggttcctccacgacacctgcagagacctgagggcctcaggctgtggctcccgggcgcatcccgcgactgccccgccgatggcaaagtccgggcgcgggcgcgggcctgcagcggagcatgccgggaagcgccga

SEQ ID NO: 123570 - DNA, 772 bp, Homo Sapiens
cacttgtgttccgctcctgcaccctgcgcgctcccgtctgctgccatagcccgctgcacctccacactctgtcttgattgccataaccgccaccctgccaccacccttactcatggaggattgatcttgccatagttaccctccacctccacctccacctccaccaccactgctgctgtttgtacctggttctgctgtccatagccctgagggggattatagctttgctgctgtccatagctttgctgctgtccaccatagctaggctgctggctgtagctcccactctggggctgcccatagctgctgctctgagaactgctaccgtaacttcccgaggtgctgctgggagctggctgctggccatagccaggataggaggactgctgcccgtaagacgattgggagctctggctactgccatagccgccagtcgagccatatccctggggagttgactgagttccatagcctgtgttctggctctggccataagaagaatagctgctctggccatagcctgaagtgtccgtggactggctataaccactgtaactctgctgtccgtagggctgactgctctgctgggaatagccctgcccgggctgggtggggtaggccccatagctttgggttgcttgttgggtataatcgtttgaggccatgtccgcgcacgcgcgcacaggcaagcaagcaacgaagttccaacaccgctgagcaccgacgcctggagcctcgtgccgattcaaacccagcctcgtacctagccgta

SEQ ID NO: 123571 - DNA, 1147 bp, Homo Sapiens
  misc_feature (448)..(510): n is a, c, g, or t
  misc_feature (1015)..(1034): n is a, c, g, or t
tagtagagagaggggtaccccatgggggtaccagggcccagaaaaccttttttccacggaacccggggggaggccaggggtaagtaaattagggccttctggcctggggatcccggtgtggggcttcagcccctgggaatgccatctttgccagggggccaaaaggccacttctgttgcccccaccaaccccggtcccccttcggaaagcttcccagggtcccccgccggggcccccggtaagccgcctcgattcatagccctcctgtggcccaccagggcgaatccatccccggtagttacccccccatgtgagagcccacctggtccccctcctgggccatctgtttagggggccttacactggttgcattcattcctccaagagaagttcatattctcacaggtgggattaggacacttccagtcaccagctcgctgctgtcctnnnnnnnnnnnnnnnnnnnnnnnnnnnnnnnnnnnnnnnnnnnnnnnnnnnnnnnnnnnnnnntagcctccacggcccatgggtcctcctcgccctcggcctccacgaccattgccaccaccccgattaaagtctgcccggcgagtagcaaatgagaccttgataggatttccggagaattctttaccatcaaaccagtcaatagctgctttagctgaaggtgggtcatcaaaagagaccgttgcctctcccttcagcttgccagtttccctgtctgtgtacaaattaatcatgggctgtcccgttttcttgtttgtcttaataataccaatctgcttgaagtaatcagccacagactcaattgtaacattctcacccaggccttgcacaaagatggtgttgttgtctgaattatcctgttcggagtcatgacgtgatccttggtcccgagggccaccaaatttattgaagccaccacggtcacttccgcccatgccacctctgcctccacggccacctccacgacctctgggttcatagccaccactgctgcggttgtaaccaccannnnnnnnnnnnnnnnnnnnaccactgccacgcctggccgcggcctccacggtcctgctgtccatagccaccgctgccacctcacaccactctgtccctcgtgccgaattaaccccggccttcgtacctagcg

SEQ ID NO: 123572 - DNA, 1023 bp, Homo Sapiens
cccgtgaaaatagggcccttttgtttgaaacacagggtggtgtccccagactctgttactcccccggctccaaaaggggtttcggattaccgttggagccaagtatcttgttcggggcccccaatttattgaggccaccccgtcactttcagccatgcacctttgctcacggccactccacgacctctgggttcataaccaccactgctgcggttgttaaccaccacccgccgccgtcctccgccgccaccactggcacccctgccgcggccttccacggtccctgctgtccatagccaccgctgccacctccaccactctggtcttgacttgccataaccgccaccactgccaccaccactactcatggaggattgatcttggccatagtttacctgccacctccacctccacctccaccaccactgctgctgttgtactggttctgctgtccataggcctgagggggattatagctttgctgctgtccatagctttgctgctgtccaccatagctaggctgctggctgtagctcccactctggggctgcccatagctgctgctctgagaactgctaccgtaacttcccgaggtgctgctgggagctggctgctggccatagccaggataggaggactgctgcccgtaagacgattgggagctctggctactgccatatgccgcccgtcgagccatattcctggggagttgactgagttccatagcctgtgttctggctctggccataagaagaatagctgctctggccatagcctgaagtgtccgtggactggctataaccactgtaactctgctgtccgtagggctgactgctctgctgggaatagccctgcccgggctgggtggggtaggccccatagctttgggttgcttgattgggtataatcgtttgaggccatgtccgcgcacgcgcgcacaggcaagcaagcaacgaagttccaacaccgctgagcaccgacgcccctcgtgccgattcaacacccagcctgtacctagctagc

SEQ ID NO: 123573 - DNA, 2195 bp, Homo Sapiens
  misc_feature (141)..(157): n is a, c, g, or t
  misc_feature (166)..(171): n is a, c, g, or t
  misc_feature (173)..(175): n is a, c, g, or t
  misc_feature (178)..(178): n is a, c, g, or t
  misc_feature (181)..(339): n is a, c, g, or t
  misc_feature (1400)..(1419): n is a, c, g, or t
aaaaaacccaccccttttggttttgtttcccccggggttttttcttggaagaaaaaactttttgtgcccccgtttttctttttccctcttggggggccgcgcggccccccaaaaagaagggttttaaaaaaaatttttttnnnnnnnnnnnnnnnnncccccaaannnnnntnnnttnttnnnnnnnnnnnnnnnnnnnnnnnnnnnnnnnnnnnnnnnnnnnnnnnnnnnnnnnnnnnnnnnnnnnnnnnnnnnnnnnnnnnnnnnnnnnnnnnnnnnnnnnnnnnnnnnnnnnnnnnnnnnnnnnnnnnnnnnnnnnnnnnnnnnnnnnnnnnnnnntaactaaaatggtcacttttaatgggaaccagaggtatagttacaattacatagtccgacacaaaaaaacccttgggtgatcaggaattggaaggttacaaaataacgagggtaacactgggtacaggacaaaaagctgttccagaacctggggagccaggctaattaatacggcctctccctgcgatcctgtctgtgctcacccctggaatccatcttgccagggccaaagccacctctgtccccaccaccccggccccctcggaagcctccacggtccccgccgcggccccggtagccgcctcgatcatagcctcctctgccaccacgacgatcatccccgtagttaccccccatgtgagagccacctggtccccctcctgggccatctggtttaggggccttacactggttgcattcattcctccaagagaagttcatattctcacaggtgggattaggacacttccagtcaccagctcgctgctgtcctccaccgccaccacctccactgggaaatcctcctcggccaccaccaccactgccaccacctccatagcctccacggcccatgggtcctcctcgccctcggcctccacgaccattgccaccaccccgattaaagtctgcccggcgagtagcaaatgagaccttgataggatttccggagaattctttaccatcaaaccagtcaatagctgctttagctgaaggtgggtcatcaaaagagaccgttgcctctcccttcagcttgccagtttccctgtctgtgtacaaattaatcatgggctgtcccgttttcttgtttgtcttaataataccaatctgcttgaagtaatcagccacagactcaattgtaacattctcacccaggccttgcacaaagatggtgttgttgtctgaattatcctgttcggagtcatgacgtgatccttggtcccgagggccaccaaatttattgaagccaccacggtcacttccgcccatgccacctctgcctccacggccacctccacgacctctgggttcatagccaccactgctgcggttgtaaccaccannnnnnnnnnnnnnnnnnnnaccactgccacccctgccgcggcctccacggtcctgctgtccatagccaccgctgccacctccaccactctggtcttgattgccataaccgccaccactgccaccaccactactcatggaggattgatcttggccatagttacctccacctccacctccacctccaccaccactgctgctgttgtactggttctgctgtccatagccctgagggggattatagctttgctgctgtccatagctttgctgctgtccaccatagctaggctgctggctgtagctcccactctggggctgcccatagctgctgctctgagaactgctaccgtaacttcccgaggtgctgctgggagctggctgctggccatagccaggataggaggactgctgcccgtaagacgattgggagctctggctactgccatagccgccagtcgagccatatccctggggagttgactgagttccatagcctgtgttctggctctggccataagaagaatagctgctctggccatagcctgaagtgtccgtggactggctataaccactgtaactctgctgtccgtagggctgactgctctgctgggaatagccctgcccgggctgggtggggtaggccccatagctttgggttgcttgttgggtataatcgtttgaggccatgtccgcgcacgcgcgcacaggcaagcaagcaacgaagttccaacaccgctgagccctcgtgccgaattcgacacccaggcctcgctacctaagaccgtggtagttactgc

SEQ ID NO: 123574 - DNA, 1167 bp, Homo Sapiens
  misc_feature (83)..(97): n is a, c, g, or t
  misc_feature (111)..(112): n is a, c, g, or t
  misc_feature (162)..(217): n is a, c, g, or t
  misc_feature (226)..(227): n is a, c, g, or t
  misc_feature (231)..(231): n is a, c, g, or t
  misc_feature (233)..(236): n is a, c, g, or t
  misc_feature (238)..(238): n is a, c, g, or t
  misc_feature (240)..(242): n is a, c, g, or t
  misc_feature (1092)..(1126): n is a, c, g, or t
gaggaaaaaggttttggccccttgtccccttgcctaaaggggggccccgcgccccaaaaaaagtttttaagaaatttttttannnnnnnnnnnnnnnccccacaatttttnnatttgtttttttaatggggggtgtccgaaagatagtggggggtaagatannnnnnnnnnnnnnnnnnnnnnnnnnnnnnnnnnnnnnnnnnnnnnnnnnnnnnnntttgggggnnattntnnnngntnnnttttccatgagaaccaaggactttttatacttagaacacatactgaaaaatgaggaggcagtagttaagctacaagaagcaccagatgccttctgggatgagttgccttccttgcctccacaacagcagccagactggacctctggacaacatgataagtgtgacaatcacacttcctagagtaggaccaagggtaggaggccaccaggctcagcttacaagccccaagtaatcgtccatcagggagccaatagcaaaaatgtcattcttgtccacacgggtccccacaatctttaagcggatctcatcgtcctgctgaatcacaatatcctcatccattgtcttgtaacatggtgggttggagttaggatcaaactccatctctgaagggatggaatgtcgagagatgaagcaagacatgggcccaatttctgtgaagagtccaaccttgttgacctgagtgacaacagcatccacgacctcccctttaaatggccggaaaacaatggccttgtacttaactggataaaggacaaagcctcggcctggctggatcacaccagcaccaatattgtcaatggtggtgacagcaattacaaagccatacttccctgtgcaggtcccctccacctcggtgaagagcttctgcttcaccgtgttgagcaagttggggccgaagtagcgcgggtgcagcaggatttcgtgctctagggagatatggtagaacatcttcccagaccaggtaggcaggcagagtccacacctccgacagtccctgggaatccaccggaaacacttccccggccgtaatggccgaattcccgggcatatgtccggtaccgtcgactgnnnnnnnnnnnnnnnnnnnnnnnnnnnnnnnnnnncggccgcttcctcgctcacagactccgctgcgctcgttcgc

SEQ ID NO: 123575 - DNA, 1303 bp, Homo Sapiens
ttttactgttgacacaaaatctttttattccccatttgccatcttttccacaaacctctcaggtacagatcggaagaaagtgcatataaaccctgccttatttaaccaggcccaccgcctccgggacagcccctgggggagccccatcccgctaggtagaagggaaggccacaccaagtgctgagtgagccacccagacagcaggtgctctgggagggaggggcgacaaggggtaggggaaggcttcctggaggagggagaggcctggccctgagagacagggggcggtccctgaaaagggagagagaaggcacacttctccgggaaccaggccccagcacctgagcattggacccaggcggccaggaagaacacaggccaaggcgggggcctgaagcagatgggactgtgggagcttcagggaagcagcccttctcgcctcaggtctggagtctcagaggaccctcctaggcctcctgctcggctggctccagaggatgcagagggcagaccatgcctccctaggtcccaccgctgggactgcagagcttggctggcatcgccaagcggctggggcctctccagcagtgtcaggagctgggcgctcgctggccagcacagagtcgaactgcagcccccagaataatccagaaaggggcatctgggtggggctgcagtgtcgtgggctcctctcagaggccatccagggcttgctggactcggctgtccagggaggtggctgagtggatggagacgccgggggcaccgatgctggtttccaagcagtcaaagccacagctggtcagggcctgcttcgtggcctccacttctggctgctccagccctggcttgaggagtgtgatgccacagccaccaccgcctgcgccagtcagcttgctgtgaagtccgcgggccctggtcacctggcagagctggtccagagaggcgtggcccacgccgagggcattcagatggtgctggttcatgtcaatgagctcttccagcacgaggtactgctccggggctggggcttcccccatctctcccagcacgcgctcacactccagggagatggcatctattgaggtcaggaggggggccacgatctctgggaacttgagcagcctgtttctgacgccagccacaagggccctggtattgcgagggactttggtgttggtcagcaggatctggagagctggcgacctctttaaggatgaaatcttcccttgatggtatcggagggctcctccccaggtgctgacagcattgtccactccggagggttcatctgcatcagtct

SEQ ID NO: 123576 - DNA, 914 bp, Homo Sapiens
agcgcgaccatttctttattaaattatacaaaaagggaggggaggggggcagctgtggggctcggccccaaccccggccccaccccggcctggcgctgtctgagaagaggggatctgagggagatccagggatcaggcaggatagggatggggcaggacatgaggctgggggatgcagaggttaggtgggagaggctaccggaggaagaatgaggctggtaggggagggagaaagagagcaaagagagagaggagcaattgggggccagctggagagctcagatggagcaggtcaggaggtggaacaatggcagagtgagggtggagggcgcagtgtctggagaggcggaaatgagaaggctggggagaaagaagagggtggcagctctggtgcagggcccagagcagggagccaggtgaagagtggctggacttggctgcccccacccccacctccaggcccagagaggcctcccaaccccagcctgttggcaggggctcacgccgatgccccattttctgtcttctgccgtttgggatccgcttcatcctgtggagagggagagaatgggggagctgtaaaatgggaggggagacctccccctgtcccggtcctgttccagcccccacccctgccacacagggatctgggtccaaatccaaagggcgcccagcccggctgcatccctgacagcccctcaggcccagcaacccagcccaaacctcctcttcggcagctctcttcagcgcgggcccttcatcatcctcttcttcttcttcctcatctgaggagccagaaatgggtcattggggaagggcaggaagctctggcagagcccccgtggtcgccctcagccctgcttcaggtcttcaaacccacctgactctgctctcctttgagcccagactttgcc

SEQ ID NO: 123577 - DNA, 1343 bp, Homo Sapiens
  misc_feature (406)..(419): n is a, c, g, or t
  misc_feature (559)..(612): n is a, c, g, or t
  misc_feature (1203)..(1271): n is a, c, g, or t
ctcacagcacgcgccgccacacacagcacatatatatcaccacagcgccgttaatatgttttgtatataacccacacacactatatatatcaccaccctcttcgtaaaaagtattttaatatatagtaatatctgctccctcctcatatgagagacgccttctttatatatatctactctctttgtagagagtagtagatgttgttcgtcccacccacaatataatatttgtctctctccccgccccccctcgcatgagagatattaagggaggctctctcttctctcctcctcacaaagagatcgcctccacaacgttacgctacacgtgttgtctctcacctagctctcagcgaccgcgttgtgattaaccagcgccgggcgctcactgcgtcgcttctgcggnnnnnnnnnnnnnnccgcggctcccctttttatgggggacgcccacctgcttgttacacaccagaataaccgtcggaggtgctcgcgaccgaaacgttctgggcgcccctcctcggaggagtagactctttcttaggccgcgcgcgcgcccccnnnnnnnnnnnnnnnnnnnnnnnnnnnnnnnnnnnnnnnnnnnnnnnnnnnnnnaaaaacagaagcgcgaccatttctttattaaattatacaaaaagggaggggaggggggcagctgtggggctcggccccaaccccggccccaccccggcctggcgctgtctgagaagaggggatctgagggagatccagggatcaggcaggatagggatggggcaggacatgaggctgggggatgcagaggttaggtgggagaggctaccggaggaagaatgaggctggtaggggagggagaaagagagcaaagagagagaggagcaattgggggccagctggagagctcagatggagcaggtcaggaggtggaacaatggcagagtgagggtggagggcgcagtgtctggagaggcggaaatgagaaggctggggagaaagaagagggtggcagctctggtgcagggcccagagcagggagccaggtgaagagtggctggacttggctgcccccacccccacctccaggcccagagaggcctcccaaccccagcctgttggcaggggctcacgccgatgccccattttctgtcttctgccgtttgggatccgcttcatcctcctcttcggcagctctcttcagcgcgggcnnnnnnnnnnnnnnnnnnnnnnnnnnnnnnnnnnnnnnnnnnnnnnnnnnnnnnnnnnnnnnnnnnnnngcagtttcttcttcttcctcctcagccccgttctcctcctcctccaccacttctttctttcgccctcgtgcc

SEQ ID NO: 123578 - DNA, 892 bp, Homo Sapiens
  misc_feature (301)..(380): n is a, c, g, or t
  misc_feature (419)..(476): n is a, c, g, or t
  misc_feature (607)..(665): n is a, c, g, or t
tgcgcgaccatttctttattaaattatacaaaaagggaggggaggggggcagtgtctggagaggcggaaatgagaaggctggggagaaagaagagggtggcagctctggtgcagggcccagagcagggagccaggtgaagagtggctggacttggctgcccccacccccacctccaggcccagagaggcctcccaaccccagcctgttggcaggggctcacgccgatgccccattttctgtcttctgccgtttgggatccgcttcatcctcctcttcggcagctctcttcagcgcgggccnnnnnnnnnnnnnnnnnnnnnnnnnnnnnnnnnnnnnnnnnnnnnnnnnnnnnnnnnnnnnnnnnnnnnnnnnnnnnnnnttcttcgtcctcagccccgttctcctcctcctccaccannnnnnnnnnnnnnnnnnnnnnnnnnnnnnnnnnnnnnnnnnnnnnnnnnnnnnnnnncaggtccttggcgctcaactcggccgctgcctccacgcttttctccgacatggtgccggggccggggccggggctggcggggagccggggtcccggggccgagacggaggggccctggacggcggagggtnnnnnnnnnnnnnnnnnnnnnnnnnnnnnnnnnnnnnnnnnnnnnnnnnnnnnnnnnnngctcggcaagctgggtctctggaagaggcggcagaggcgcgcggggtggggcgggggtgggtctggagcggagacccgcagggctgcggccgtccggagggcgggcggaagggcggtgcaggcggtggccggcgcgctcggccgcggtagctcgatcccgggctcgccgcccccgcaccagcagagctgcccccgtgccgaattcgccacccaggcctcgctacctt

SEQ ID NO: 123579 - DNA, 679 bp, Homo Sapiens
  misc_feature (661)..(661): n is a, c, g, or t
gagtattccgctctgggagtttcagagcaacagggatcccatgaaggtgcatctttacttttccctcccttgttattctgacttgctttaggcttggataaattttttccttttttatggaggagaaacaatggtgaagactcaatgggacactcataaagagaagtgtggaccttttcagtataccgttggaaatcttcaacctccacatctctatccaccctggtaaagtaggcattacttatgcagccagtgaaattagcatactgagcactgattggtgagccaccgaagtaaaacttcttttcacttgcttgtgtctgttctattttccctttggtaggattcttactcccaactctgcttttatctactatcagttcatatcttgtgggtgagacagagctaatgacgaagtgggacagcccatcattgtactgcttatctactgactgaactttgattccctttacatccatgatgacagtaccattatccagtgagatggagaacacgtctgaccctgaagcataatagaatagtaacccatttggttgtaatgttcggaaattaaaacctccttcaaagccatcaaagaaagatattttctgaattgaagcactgaagctctgtccattgaaatatgctctgcgagatatangtgagtcttctgggcatc

SEQ ID NO: 123580 - DNA, 583 bp, Homo Sapiens
cttttcattaaccacagtgttccatttcaatttcatgagaaaacctgcttatccaacctagagtgggtcaaggtaaaatgctagctctgtggtatgtaaagaagcctttttcttttgcagatatgaactgatagtagataaaagcagagttgggagtaagaatcctaccaaagggtttttagaacagacacaagcaaatgataagaagttttacttcggtggctcaccaatcagtgctcagtatgctaatttcactggctgcataagtaatgcctactttaccagggtggatagagatgtggaggttgaagatttccaacggtatactgaaaaggtccacacttctctttatgagtgttccattgagtcttcaccattgtttctcctccataaaaaaggaaaaaatttatccaagcctaaagcaagtcagaataaaaagggagggaaaagttaagatgcaccttcatgggatcctgttgctctgaaactcccagagcggaatactccaagatactctcattgccaccttttcaacagccctagagcaatataacactctctatcaatttttgaagaaacagcc

SEQ ID NO: 123581 - DNA, 2185 bp, Homo Sapiens
ttttttttgggggccactgccctagacatcaagtttattgtgctgttctcacattgaaaacccaaccccctctcccactgggggagggcaaagggaaggattttcacagtacctgcgtgcctccctgccagtcttccccgtctaaccctcagtccctctatccatggtccactgaaatgcagctagggacaagagctaggtacaatggccgaggagaaatgggaatctctctccttgggagaataggaggaaagggctagagaatttgatatcctcccacctcccatgccctaagagaacagaggtcagcaaacagtccatgccatccagcctgggaggctgggggagaggaagatgatggtgactccagcacagccagccttgctgcgcaggtgccagaggcatagggaggaggctgaggcagcgacggaagaaaagctttctttgcagatccaagaaaggaaactatttttggagtcagaaaggaaagaccttgggacactttcctcttcccccaggtccttatgagcagcgagggcagcctcttcacactttctgtttagggggccacttagtggctgggggatcgggccttgtggaacaggtacacaggacgctggaagcctttagaggtgttgtggggtgtggccacaagctcatagctggagaagcccacgtctggggatgtcaggtaggaactgaactgctctggcttcaattggattcggtagtagttcttgtagatcgtttctgtaagagtctttctcttgccatacgacgaccagggttggggctctaggaccaggatgcccccagggcgtaggtgccggtagatccggcgaaacatgcgcttcaggccctcgtctccccagttcagatgcacccacttggtgaggctgaggcagagcaccacatcatactcaggtgtttgggcctccaccaggtcatctcgatccagcacataattacccgtgacgaagacaacattgttggggaagactgatgtgtccgctccatccaagggcacttggggggcagcgatgggaccccggctggcagtcagcgaggctgggaagcagctcctctttcgaaacggtggtggtcccttcctcaccctctgccccccgggtccccttccaaagtctggggtgggagacgcagctcctcgaaaaggtagtgtcggatgttttggcgggcagaatggatgagccgggaatcgatatccaggcccaccatgcgggacgggccccacttgcaggcaatgctcagggtcagatggcccacattgcagcccagatctaggacgtcccggccccgaaaccactcaggcttcaacacccgaaggcgcccatcctcacaggaaggattgcggtacccatagtatttgcaataattcccatactggaacttgcgctgttgctttttgaagcctgctgcaggcagtgggtggtggtggtggtggcggcctccccaactccctcggcccttttccttggaaccctggcctccacccctagcccctgcctccgacttgctggaagtcctgcgacgtttgcgatgtcgggaggaggaagatgggggtgcagagataactgaggcagctggaggggctgatagggagcctgagggaccctgcagagcagatggaaggggagacaccacttcatccctgcagttgatggctgtgttgagttcatagggttggggggcatcccggttctggcccctgtgccgcggctgctgtgaggcgccctccccgtggagtaagggggtgagaggggctgtgggcggcacggggtgactctcactccctccggctgcctgctgctgctggtggtgctgtccccggtgtctatgccgcttccgaccagtcttgagtggcgaagcaagaactacatggccctcatcagtgcaagtattgagactgagcgggtcagtaatatctttggggatgaggatctccaccggatctcgccctttggccggaaggggggatgacttaggggtctccgcgttgagagtgcggctcacttcctcatccaggaggctattcaggttcaggggatcaaagatattgccccccaggaggaagttggagggtaacacagagtcacagtccgaattcacccgcctacgcctctggaaggcccctcgtgccgaattcacacccggcctcgtacctagc

SEQ ID NO: 123582 - DNA, 528 bp, Homo Sapiens
ttttttgggggccactgccctagacatcaagtttattgtgctgttctcacattgaaaacccaaccccctctcccactgggggagggcaaagggaaggattttcacagtacctgcgtgcctccctgccagtcttctccgtctaaccctcagtccctctatccatggtccactgaaatgcagctagggacaagagctaggtacaatggccgaggagaaatgggaatctctctccttgggagaatagaagggctagagaataggaggaaagggctagagaatttgatatcctcccacctcccatgccctaagagaacagaggtcagcaaacagtccatgccatccagcctgggaggctgggggagaggaagatgatggtgactccagcacagccagcctatgctgcgcaggtgccagaggcatagcggaggaggctgaggcagcgacggaagaaaagctttctttgcagatccaagaaaggaaactatttttggagtcagaaaggaaagaccttgggacactttcctcttc

SEQ ID NO: 123583 - DNA, 876 bp, Homo Sapiens
  misc_feature (74)..(74): n is a, c, g, or t
gatctccgtctgtgctgctcggagagctccaagaatgcaaaacaaaccgcctggaaatgctgccctgagaaccnagagcgagggctttgaaagatgctttcgaacacagactccttctaggaatccagccagctttgggacgccgtttcacaaaaccaaaaacaccaagtaacatttctaaccggagaattgccggttttagcaagaaaaaggggcttcacctaaaagggagggtcaccaaacacgaagggggttccccctggcgcctgcctcttcctttctgagcagatccgtccgagactgtggagcggaatcgccacctggcaggagggggcgcagcagccggtctgggtgggcgctcactgtttgcccgcctgtctgccaggcttcttctctggctggcctctgcctgtgcccgggatcccacctcggccccggccaccaaacacacctcggccagcgccgcccatgccgcggcctttctgctgcttctgctgctgcaggcctccgcggccgcggcccttggccaccacctcctccttgaccatgtcgatgatctcgtcggggatgcgcaggtacttgatggtgctgccgcggatgtagcactcgggcatccgccagaacttgtccccgtccctggacgtgcagatgacttctcgcaggttaatgttcatccagttgtcgcagctcaccaggtgtccattgtacgtctccccatttttcagctccaccaacatggggtgattctgagccgtcttcagcagtgacaagggaagcatggtgccggcggggaccgggctcgccgccacttccgcccctcgtgccgaattcgccacccaggcctcgctaccttagaaccgttagagtactgccgtt

SEQ ID NO: 123584 - DNA, 1848 bp, Homo Sapiens
  misc_feature (52)..(52): n is a, c, g, or t
  misc_feature (156)..(731): n is a, c, g, or t
  misc_feature (749)..(765): n is a, c, g, or t
tatcttttaccgctgatcagcgtagtaccatagcccccgtcgatgacggggntgtcaccacccacctgaggagacctcaccaactagtactacagctgaggtagagaagcccccgttccgaaggagaaagcggacagtaccggtaaccgcaggtcnnnnnnnnnnnnnnnnnnnnnnnnnnnnnnnnnnnnnnnnnnnnnnnnnnnnnnnnnnnnnnnnnnnnnnnnnnnnnnnnnnnnnnnnnnnnnnnnnnnnnnnnnnnnnnnnnnnnnnnnnnnnnnnnnnnnnnnnnnnnnnnnnnnnnnnnnnnnnnnnnnnnnnnnnnnnnnnnnnnnnnnnnnnnnnnnnnnnnnnnnnnnnnnnnnnnnnnnnnnnnnnnnnnnnnnnnnnnnnnnnnnnnnnnnnnnnnnnnnnnnnnnnnnnnnnnnnnnnnnnnnnnnnnnnnnnnnnnnnnnnnnnnnnnnnnnnnnnnnnnnnnnnnnnnnnnnnnnnnnnnnnnnnnnnnnnnnnnnnnnnnnnnnnnnnnnnnnnnnnnnnnnnnnnnnnnnnnnnnnnnnnnnnnnnnnnnnnnnnnnnnnnnnnnnnnnnnnnnnnnnnnnnnnnnnnnnnnnnnnnnnnnnnnnnnnnnnnnnnnnnnnnnnnnnnnnnnnnnnnnnnnnnnnnnnnnnnnnnnnnnnnnnnnnnnnnnnnnnnnnnnnnnnnnnnnnnnnnnnnnnnnnnnnnnnnnnnnnaagaattcggcacgaggnnnnnnnnnnnnnnnnngcagtgtgtagttttatttgtttttatttccataacacaagagaggaagcgaagggccagggcccgaggcatcccctgcacggttcgaaggctttcaaccgtcccgggtttgttttgaaggcaattttggggccgcgcccaaggaaaccctgcaggctgtcagtcccagcatgaacagcttaaaataaaaatctcccgtctggttgctgctcggagaggctccaagaaatgcaaaacaaacccgcctggaaaatgctgccctgagaaccagagcgagggcttgaaagatgccttcaacacagactcttctaggaatccagccagctttgggacggccgtttcacaaaaccaaaaaacaccaagtaacatttctaaccggagaattgccggttttagcaagaaaaaggggcttcacctaaaagggagggtcacaaaacacgaagggggttccccctggcgcctgcctcttcctttctgagcagatccgtccgagactgtggagcggaatcgccaccctggcaggagggggcgcagcagccggtctgggtgggcgctcactgtttgcccgcctgtctgccaggcttcttctctggctggcctctgcctgtgcccgggatcccacctcggccccggccaccaaacacacctcggccagcgccgcccatgccgcggcctttctgctgcttctgctgctgcaggcctccgcggccgcggcccttggccaccacctcctccttgaccatgtcgatgatctcgtcggggatgcgcaggtacttgatggtgctgccgcggatgtagcactcgggcatccgccagaacttgtccccgtccctggacgtgcagatgacttctcgcaggttaatgttcatccagttgtcgcagctcaccaggtgtccattgtacgtctccccatttttcagctccaccaacatggggtgattctgagccgtcttcagcagtgacaagggaagcatggtgccggcggggaccgggctcgccggccacttccgccgccgccgctgcacacgctcccggcggtcgtcgccgcgccctcgtgccgaattcgccacccaggcctcgctc

SEQ ID NO: 123585 - DNA, 930 bp, Homo Sapiens
  misc_feature (15)..(15): n is a, c, g, or t
acttgtttcttgttncgcgtctggcgctgagacggtcttttgttttccattaccccaaagagaaggaagggaaggcccaagggccccgaggcatccccctgcacggttcggaaggctttcaaccgtcccgggttgttttgaaggcaattttggggccgcgcccaaggaaaccctgcaggctgtcagtcccagcatgaacagcttaaaataaaaatctcccgtctggttgctgctcggagaggctccaagaaatgcaaaacaaacccgcctggaaaatgctgccctgagaaccagagcgagggcttgaaagatgccttcaacacagactcttctaggaatccagccagctttgggacggccgtttcacaaaaccaaaaaacaccaagtaacatttctaaccggagaattgccggttttagcaagaaaaaggggcttcacctaaaagggagggtcacaaaacacgaagggggttccccctggcgcctgcctcttcctttctgagcagatccgtccgagactgtggagcggaatcgccaccctggcaggagggggcgcagcagccggtctgggtgggcgctcactgtttgcccgcctgtctgccaggcttcttctctggctggcctctgcctgtgcccgggatcccacctcggccccggccaccaaacacacctcggccagcgccgcccatgccgcggcctttctgctgcttctgctgctgcaggcctccgcggccgcggcccttggccaccacctcctccttgaccatgtcgatgatctcgtcggggatgcgcaggtacttgatggtgctgccgcggatgtagcactcgggcatccgccagaacttgtccccgtccctggacgtgcagatgacttctcgcaggttaatgttccctcgtccggatcgccacccaggcctcgctacctaggacc

SEQ ID NO: 123586 - DNA, 662 bp, Homo Sapiens
  misc_feature (618)..(618): n is a, c, g, or t
gaccagaaatgtggcattttaattgaataacttcatacttgcttgataattgtatatttaacataaataatgtccacttgtcacatttatatttcttttaaacaatcaattagtatttaatgaattagtgtctgtacagtgaaaaataaggtagttgttaaaaaaacttaaatttttattggttttgcttacataataaaaaatcagtaactatagccactttaggcaaccaaaaaatcctcccagatatataattttttacattgttatattacacttttataaagttagctacagcatacccatgttttgctataaactgtattcctttggccatatgtaagctatcaatactaaaaggtgtttgaacatacatccacattagcagtggataataagggagaaaataggttaaaatcttttataaatcttttgagctgtaacatccatgttaacaataattttgtctgttgctatattaaagtccttaatactaggaaacatgttttgaagttgaacgatagcacctttttctatcttggttttgagtatgtaaagaaattataattgtttcttacttatcagtatgttaaagttttgaatcaaacatttttttanaaagccactgaatgcaattttattataaataatgcaagtatgct

SEQ ID NO: 123587 - DNA, 692 bp, Homo Sapiens
  misc_feature (517)..(517): n is a, c, g, or t
  misc_feature (628)..(628): n is a, c, g, or t
ttttttccatgaacaggcagaaactctttaatcaggctttttttccaactctaaaacaaaatcccattttttccttaaatttagttcctcaggaacagagaactttgcaatgatgatctcaactctgcatcatctggtgactcctgattctgcaggactaagacatttcccaagagttctgctgcatcagccagtgaggacaagagttcttcagtgcggttcagctcaaggacacctaggcttccccagcagggggcttgcttgcaggtctgacaaaccacagagcgttgagcagatggcctgggactcccagacctggcagagggttttattagggcccgcctggcctgcaccgtttcatccaagtaccctgacccagcactcatcttccctggcattctctgttatccaccagctcctctgcacacctcagcgtctacttccacgaacttctaaacatcaaaaggtacaatggccaggggtgcggcaggagagtcgggggcagggcagccttcanatccacactattgaatccacacgatggaaagaagagaaagatggggaaattctccagagatcatgagatgcatccaggcagtgttctcatgtgagaggatagggaggccanaaactaaaattgctatcagcccccgccgctgtctggtacgcgaggaaactttccgaggacttta

SEQ ID NO: 123588 - DNA, 1232 bp, Homo Sapiens
ggggccctttccccctcaaacctcaagccctgttaattttgggcggggccagtgaattttcttccccattttggggccccatctggaaactggctatggtccttgggggggatagaagggccaggccgccaagagaccaggccaccagtgagtggctgggccagcgggccccttttcctaaaaccaagatggctgccgctgctgcccaagcctcaaaaggcagacagtcctcatgcgcagcaccagcacacacacaggtaacaagaccaggggaggggaccctaagtgtcctctccacagggaggtggctatgtacaggacaggagggagagtctggccaggtgcaccccccactgcatctcattcaaccaggagatcaaactgctcagcagcttcaaactcggcattcatggccgcagcccactcatccagctccgttttcaagatctctggcattttcttcttcttacgtttctgtttctcgggtggtggggagattccagggagagtcatgtctggggcccagggctttgcacaaaccctggggacctcggtgagtttggagcacaccactggcgagactccggacaagtcttctgcccccagcagcccctcgaagccaaagcaggaccggcggcctggggtggaggtagaggcagagcccagggtctccagccggctgtaggaacgcctgactttcttagacatttccaagtctctggcgtccagctctccttccttggagctggactcggcctcagggttcggcacaggagtgctggtgggggtggcagggacgctgtgtgtcttgaaaaggtcctccttagtaagctccctgccagggggctcgttttctttctccaagaaaaaggaaatcctagggctcctgcgaggtgattggacagctgggacctctacagcatgggccacgatcctctttaagacgatgggctttctgactgcagccgcactgggtgtcttcggccagatttcagggaggatgctcgggagttcagagcctgatttccgctgggacctccgcagaggcttagtaggagatggggcccttggcccggagcgctgagcggactcctccggaccgcgttcgcctcccagacataactaggctccgtctcgagctcctccagcgccaccgccccgggcgcgcgccaaccgggaagccactcgctgccctcgtgccgattaaacacccagtcctctacctagccgta

SEQ ID NO: 123589 - DNA, 1568 bp, Homo Sapiens
taaatttcagacaaaatatatatatttcttttaaatctttacaataaatcaagatgtagaagcttacatagggcacatttttgtttatttaggtactcaattccagctcccttggatgcaaataaccctggtgacagtgtgtacaaagtcttctctttgctttttataattttaaagcaaataacacatttaactgtatttaagtctgtgcaaataatccttcagaagaaatatccaagattctgtttgcagaggtcattttgtctctcaaagatgattaaatgagtttgtcttcagataaagtgctcctgtccagcagaactcaaaaggccttcaagctgttcagtaagtgtagttcagataagactccgtcatacgaattccagcttcccgtgcccactgtacatgccccagtgaacaagcgagaggatcttatcgttgctgaggtctgcttgtctcattttatcacaggtcagacagcagttctcgtgcccactgaccggcaccatgcattccaagtctaactttgcaacctgcccctttttggaatggtgtccgtgaaagctgtagtgcaaacgggagagcatctgttgccgctgatcctgcagcctcttattttcacttcgaagcatcctcagggccaacataataagcaacactaaaatcagccctccagcaatgggcacggcaatgaccgctgcccggaaccacaactctttggaagaagtcagctcctgcaccttggtgataaggtttctgctaccatcatgctgatacctgtttccttgtcctgaggcctcacccctgggaggagagagaacatcgtgcagccctctgtaattgcacatgtcttcatgacagcattccaatgtgggtatggtggtgccagagtggtttcgggcctgtttggcttggcagatgtctgtcgtgcttgcaagagagtccaggcagccatgggtgagtggggaatttgagttctgaggatcaagaagtctagagaagcaggcgctgagctcagatttacacatataaccagtggctacacagtgggcagcatcacagtagcatcgaatttcacctttggtgagcagcacggccatggcgcagagctccagctgcagccagatgaagatgtagctggagtggcgatccattggcgccccagcacgggccagcggcgcccccgccggcttccggagccccggctcggcggcagcctacgacccccggagcgcgcagggcatgggccctgcccggagcggcgggcgccagtcagcggcggggctgggtttcagggcccgctgccggagcatggagcagcggcatacagggcagcgccacaggagcaccagaaaagtttcccggtcccaccgtcggcggccacatggctcaccattgccccagctcgactctagggacgcacgctagcccacggggtcgggagtgggctcacacggccattcagtccaccgctagcggccagttctcagcgaagagagtaggcgtctccacagcacgcaagggtatccagccgcagcatcccgcccgcgccagcccaggtctctccg

SEQ ID NO: 123590 - DNA, 501 bp, Homo Sapiens
tgatcggaacgcggcaaaggccattaaaacgcattcactggccgggctgttgcataaaaacacagcaatccacatcaaaatggatgaatgtggccgcagctaaggaggttttcacatgttgtttaactccagtaaagtctgatccagcatctgatgcatactaaggttttcttctttggcatgagccactttctcttctaagtcatcaatgcttttctccaatttagttactgacctctccgcaaactcagcccgagtctcagcctccttcagcttgtcggaaaggaccttgatctcttcctcatatctgtcttccttctgcgagtacttctcagcctgagcctccagtgacttcaagttgttcgtcacagttttcaattcttcttcaagctcggcacatttgccttctgagagctcagcccgctcctctgcacgttccaggtcgctctcaatgatgaccagcttacgggccacctcttcatatttgcggtcggcatcttc

SEQ ID NO: 123591 - DNA, 1327 bp, Homo Sapiens
  misc_feature (214)..(223): n is a, c, g, or t
  misc_feature (438)..(446): n is a, c, g, or t
  misc_feature (480)..(517): n is a, c, g, or t
  misc_feature (1208)..(1237): n is a, c, g, or t
tattttctctcctagcctcgggaaaaaatgttttccaaacagtaacgctctcggcagaccaaaattcttcaactcgcatctaaaatttgcagcctttgtgtgaaacacgacgctagatagccccttttaatgttagtaatttgtctcccttcgaggcgttttaaaaaatcttctttagaagggaagtgttgtgttgcccacaataagtggtcgnnnnnnnnnngcaatggtataaggggttcctcttccctacaagaggtcttcccactgtgtatccccacgttttccccgttcccgagcgctcttttaaaccgccgcggctccctcttgctcttagtcttttttatatagacggcgctctcccctcattggggggccccctcttgttaaccagaaaaacctgggggtatgcggcttaagagttgtgggccctctccnnnnnnnnntatatcttctttggaggcgccgcgcgccccctgnnnnnnnnnnnnnnnnnnnnnnnnnnnnnnnnnnnnnnagaataatgtcctacaatgtgcattttattccatatcattatacaatgtttacatatagttaaaactctcaagaaaacgtcctttaccagttgtatgtggtgtctaaatctttaacatgaaggactgaaaagagtggaaatccacactgattgttatcctacagattgtcatgagctgcacgtgtgccaatcagaaaggaatggaagtctcagaagagcagcgtggcttacagacccttggctttagtgaattcaggcatgcgggatccatagtctcatcttgtagtaaaactcaagacaaaataaattagtgttggacagagttctacattgtacaatgttgaacaaaagaccacagggggaccttttgttcaaagtagcaccaatccacacctgattgtgtttccaacattaaccttcctgttgactctatcattggcactttgaatggaacttctcctgctttagtgaggattcctacgctgactaagcacactgtgttgctaaactctctacaaagtgtggcagcatcaacccgggaaatggcacatttgaaccaggatcgccctgacatgggcttgcctttttgtatgtgttttccccaccccctgacctagctggtatcttgtggatgtttctgtgacagtggtaaaagtaaataaattgcatttaaggggtaagcaggtgtttnnnnnnnnnnnnnnnnnnnnnnnnnnnnnntgaaagaatgtggtcgcagctaaggaggttttcacatgttgtttaactccagtaaaagtctgatccagcatctgatgttggagcggccgc

SEQ ID NO: 123592 - DNA, 1212 bp, Homo Sapiens
  misc_feature (1136)..(1170): n is a, c, g, or t
ttttttttagcttacacagtgtttatttgacactgaaacgaagagcttctgtacaatagaaagcacagtgtgtgcctggctctaaggcaggatgctaagagagagaaccagggtcagctggagaatagacaaatgcagagctcagagaggtgggacatccagctcgacgagggagtcttgggagaagtgaagcaaagaaacttatatggaagtcatatcgttgagagcgtggtccagctcctcgctgatggctttgtacttcagtttctgagcgtacagctcgtcttctaagtcatcaatgcttttctccaatttagttactgacctctccgcaaactcagcccgagtctcagcctccttcagcttgtcggaaaggaccttgatctcttcctcatatctgtcttccttctgcgagtacttctcagcctgagccttcagtgacttcaagttgtcgtcacagttttcaattcttcttcaagctcggcacatttgccttctgagagctcagcccgctcctctgcacgttccaggtcgctctcaatgatgaccagcttacgggccacctcttcatatttgcggtcggcatcttcagcaatgtgctttgcctctttcagttggatctcctgaatttccattttttcttcatctttttgggctcgactctcaatgactttcatgcctctctcactctcatctgctgccttctcagcttcctccagcttctgcaaagctgttgccagacgctcctgggcacgatccaactcttcctcaaccagctggatgcgtctgttcagagaagctacgtcggcttcagcggtctccctcagcttcctctcgtggtccagctcgcgctgcagggtgcccgcgcgctcctcagcggcgtccgcctgctcctgcaggctccggatcttcctgcgcaccgcctccagcgagctactccccgccatcgcgccggacggtaggcgggcgggagggctgcagtgggagaggccggctgctgccctgcggacccggctgccgcggctgtcctggctgcccagcgccggtccgccccgcccaggcctctctgtgcgacggcggcgccccccggccgtaatggccgaattcccgggcatatgtccggtaccgtcgactgnnnnnnnnnnnnnnnnnnnnnnnnnnnnnnnnnnncgccgcttcctcgctcaatgatctcgctgcgctcgtcagctt

SEQ ID NO: 123593 - DNA, 572 bp, Homo Sapiens
aaagctgtgttggatcatgcactttccttatcctcagattctcaataacctgacactttaagggttccttcaaattatatttaacgaaaatgacttatgttgtacttagttgaatttcaggaaacaaattttgatattttatgagaagttcctgtacaacaaacggcatggccttctagttttacttgcagtttagcttaatttcccaaaaggacagtgctcaaggtcactcattctagttcactgctctagttcagcgtttacaaaataagcggattctgaaaagaaaatggtatgtatagacagacttaatctaattggcctttatattagcagaaagtgacaaaacaatgactattctaggttatgactaaaagggtgaacacaagagtgcaaagatggagattagggagcaaggaaggcatggtggtgagtttattacattagcatgagggcatggtgtaagcaggcagagtggatgaacgtttacatggaagtcatatcgttgagagcgtggtccagctcctcgctgatggctttgtacttcagtttctgagcgtacagctcgtccc

SEQ ID NO: 123594 - DNA, 1583 bp, Homo Sapiens
  misc_feature (125)..(125): n is a, c, g, or t
  misc_feature (164)..(164): n is a, c, g, or t
  misc_feature (575)..(604): n is a, c, g, or t
aaggaccgaaaaggagttgaaatccacccctgattgttatcctacagatgtccctgagctgcacgtgtgcatcagaaagggaatggagtctcagaagagcagcgtggcttacagacccttggctntagtgattcagggcatgcgggatccatagtctcatctgntagtaaaactcaagacaaaaataaattagtgttggacagagttctacattgtacaatgttgaacaaaagaccacaggggggacctttgtttcaaagtagcaccaatccaccacctgattgtgtttccaacattaaccttcctgttgactctatcattggcactttgaatggaacttctcctgctttagtgaggattcctacgctgactaagcacactgtgttgctaaactctctacaaagtgtggcagcatcaacccgggaaatggcacatttgaaccaggatcgccctgacatgggcttgcctttttgtatgtgttttccccaccccctgacctagctggtatcttgtggatgtttctgtgacagtggtaaaagtaaataaattgcatttaaggggtaagcaggtgtttnnnnnnnnnnnnnnnnnnnnnnnnnnnnnntgaaagaatgtggtcgcagctaaaggaggttttcacatggttgtttaactccaagtaaagtctggatccagcatctgatgcatactaaggttttcttctttggcatgagccactttctcttctaagtcatcaatgcttttctccaatttagttactgacctctccgcaaactcagcccgagtctcagcctccttcagcttgtcggaaaggaccttgatctcttcctcatatctgtcttccttctgcgagtacttatcctctgcagccattaatgctttcaaggtctgatccattattcttaattgttcttccagctgtcggacttggccttctgagagctcagcccgctcctctgcacgttccaggtcgctctcaatgatgaccagcttacgggccacctcttcgtatttgcggtcggcatcttcagcaatgtgcttggcctctttcagttggatctcctgaatttccaattttttcttcatctttttgggctcgactctcaatgactttcatgcctctctcactctcatctgctgccttctcagcttcctccagcttctgcaaagctgttgccagacgctcctgggcacgatccaactcttcctcaaccagctggatgcgtctgttcagagaagctacgtcggcttcagcatcggtggcctttttctctgccagctccagcttctcctgggcatctttgagagcctcagagtatttgtccagttcatcttcggtgcccttgagtttcttttgcagtgacaccagctcatcttccagctgcttgctcctgtcttccgccgccttcttgtcggcctccgcctgctcagctcgatccaaggcgttctccttgtcgagcttcagcatctgcatcttcttcttgatggcgtccatggtggcggcggcgaggggccctggggctgcagcaggagcggcggggcgagccctcgtgcggaattcgccacccaggcctcgcgtccta

SEQ ID NO: 123595 - DNA, 868 bp, Homo Sapiens
ctaggtcattcaatgcttgtctcccaatttagttacggacctggtcggcaaactcagcccggagtttcaaccttccttcaagcttgtcgggaaagggcccttgatctcttccttcatatctgtcttccttctgcgaggtacttatcttctgcagcccattaatgctttcaaggtctgatccattattcttaattgttcttccagctgtcggacttggccttctgagagctcagcccgctcctctgcacgttccaggtcgctctcaatgatgaccagcttacgggccacctcttcgtatttgcggtcggcatcttcagcaatgtgcttggcctctttcagttggatctcctgaatttccattttttcttcatctttttgggctcgactctcaatgactttcatgcctctctcactctcatctgctgccttctcagcttcctccagcttctgcaaagctgttgccagacgctcctgggcacgatccaactcttcctcaaccagctggatgcgtctgttcagagaagctacgtcggcttcagcatcggtggcctttttctctgccagctccagcttctcctgggcatctttgagagcctcagagtatttgtccagttcatcttcggtgcccttgagtttcttttgcagtgacaccagctcatcttccagctgcttgctcctgtcttccgccgccttcttgtcggcctccgcctgctcagctcgatccaaggcgttctccttgtcgagcttcagcatctgcatcttcttcttgatggcgtccatggtggcggcggcgaggggccctggggctgcagcaggagcggcggggcgagccctcgtgccgaatacgccacccaggcctcgctacctt

SEQ ID NO: 123596 - DNA, 532 bp, Homo Sapiens
  misc_feature (37)..(37): n is a, c, g, or t
  misc_feature (203)..(203): n is a, c, g, or t
gcgcccgacagggttttggtttggtaacggggtgaanagggggggctcggctctcaatgactttcatgcctctctcactgtcatctgctgccttctcagcttcctccagcttctgcaaagctgttgccagacgctcctgggcacgatccaactcttcctcaaccagctggatgcgtctgttcagagaagctacgtcggcttcnagcatcggtggcctttttctctgccagctccagcttctcctgggcatctttgagagcctcagagtatttgtccagttcatcttcggtgcccttgagtttcttttgcagtgacaccagctcatcttccagctgcttgctcctgtcttccgccgccttcttgtcggcctccgcctgctcagctcgatccaaggcgttctccttgtcgagcttcagcatctgcatcttcttcttgatggcgtccatggtggcggcggcgaggggccctggggctgcagcaggagcggcggggcgagcgcgcggtcgggcggaggagcgggagtgcgagcccc

SEQ ID NO: 123597 - DNA, 1330 bp, Homo Sapiens
  misc_feature (60)..(68): n is a, c, g, or t
cattaaaaaaccgtttatagtcatttcatgttggttggaaatcacagaaattaggcaggnnnnnnnnncccaagggaacaaatacaaacagcacagcgttccccacagttctctgctctgctctcctgcgagccggggaaggagaggggcagcctgagctcgggcgggggctgggcctggctgcccgcggctcagctctcctcgtccagggcctccgagtccccccgtgccctctcgcgctcctgccggtcgctcccaggcctgtccaggtcgggaccctcccgtacgctgtcgtgcaggtcttcagaggagccacaccttggcccctcctccgagtcccgaccctcctcgtgctccttgtcctctgcgctctcccccttctgtgatgtggcctcgccattcactggggctgagagatcggtgctgggcttgtccctccgccttctcctggggggcctcctccccggccagctcctccccggccagcttctcctcggccttctccttctccatcccagccttgttcactttctgcaccgcctcgatctttgggccgaggacccgcgacttgagccgggtatagacttctgctgccttctccattacgtccttgttcgctttgtaacggcgaatcttcttcaaggtggccaccacgtctgtgttcttctggaggatctgagaggtcacctgcagggttcccagctcctctagggcattcaggcacctcttcacgtccgggctgtcgacctttagggcaaacttgatctcactgtgcagcttctgcagcttctcctccacggagggctctttcttcttctctaccttcctgtccatcgagaagccctcggaccgcttccgggtccgctccaccttcacgggcttggcttgttgcttctcctcgggccgcactctcttctccttctggccaggtttcctggcgggctctgtgcttgaggactgcggcttcttcgctgatttcttggcctctctctccagctcggcctcgggctcggagtcagaggaggacgggggaccccggccccggcccttgcgtccccgcttcttgacgggctcatcgtcctccctgagctcgtccccgctgctgccgccgctgccccgctcagcctccccgcggtcggcccgctcgcgcctccgctccttctcctccttctcctgctcccgcaggccagtgagggtagcccttcatcttagcgaacaccaagtccccgggcttgaaggcgtgtggcatgctgacggcgagaggcccaggccgcggaaagcggctgcagcggccctcgtctgagatcgccacccagcctcgctccttgac

SEQ ID NO: 123598 - DNA, 609 bp, Homo Sapiens
  misc_feature (202)..(219): n is a, c, g, or t
  misc_feature (507)..(517): n is a, c, g, or t
  misc_feature (573)..(573): n is a, c, g, or t
cacacagaatggaataaaactttattctttttaaattccacacataaacgagatgctgaaaaagcccttgccatctctgacagaaaagcagagcagctctgtttcatgaacgacagcacaattaaagctaaaataatataaaaataattcgaaaaaatcccttttactggtacactctcaaagcaagaaagagaaacaacannnnnnnnnnnnnnnnnnctgctagccagaaaatgtgtttctattcatttgggctttgaagttcagtgtaccccacatctgtgtgtctgtgtgtgtatgcgtggctatgtgcgtgtaatctatgcagtgtggaagcccctaatcttttcatctagtttgcctaatcattaagctacttaaccaattataatactattatgtcacattgaacaactttacataattgcttctttgaaatactagaaacattgacacatgtatttggcttgtaaaggactgaaatattacagagaatattatccagcnnnnnnnnnnnaaagaatatggctcttaataaattgattttgagttccagagctaaagtccttttanaacatttctgaagctgacttgaagcaggatgaatat

SEQ ID NO: 123599 - DNA, 693 bp, Homo Sapiens
  misc_feature (188)..(238): n is a, c, g, or t
  misc_feature (445)..(466): n is a, c, g, or t
  misc_feature (509)..(519): n is a, c, g, or t
ctctacattttgtttattgagacaaactaattaaaaggcacaaacatagggcatgtttacatggacattataacaaacatatacattaaaagtgtaggaatgtgttgccttcctgctaaacagaaagttcctaagcttttatatatacaaaagttgtacaatttaatgtcctaaagtacaaaagatcnnnnnnnnnnnnnnnnnnnnnnnnnnnnnnnnnnnnnnnnnnnnnnnnnnngtagttcaaccccctagaactgttttgtataatgacacacagatacctgtccctgatgtaggaagtctgtctcagatgcaaggtattttgatgcttgaactgacacagtagggtataaatggaaatcatccagtttgatagtcagtcctgcaaacattctgcaagattaacacaactaatttccatttctcttaactgcaatgattnnnnnnnnnnnnnnnnnnnnnncatattgcaacttaaaaaatcacagcatcttggtttagttaannnnnnnnnnnaccgcaatgctttaaaaacaatgcgtggcatgatggtgtacagagtatctgtttccctagcttttggtttctactttatgtacagagataaaatatcttgctaagaaataaaaagcacatgtctcaacgtgcataatcattgctgggtttctacagggaatgcagacagctgtc

SEQ ID NO: 123600 - DNA, 1128 bp, Homo Sapiens
  misc_feature (73)..(107): n is a, c, g, or t
  misc_feature (222)..(231): n is a, c, g, or t
  misc_feature (274)..(295): n is a, c, g, or t
acagactctagggcgctacgcgcttctagccgaacgacgagcgcagcgagtagatgagcgaggaagcggccgnnnnnnnnnnnnnnnnnnnnnnnnnnnnnnnnnnncagtcgacggtaccggacatatgcccgggaattcggccattacggccgggcaaaagctagggaaacagatactctttacaccatcatgccacgcatgtttttaaagcatgcgttnnnnnnnnnnttaactaaaccaagatgctgtgattttttaagttgcaatatgnnnnnnnnnnnnnnnnnnnnnnaatcattgcagttaagagaaatggaaattagttgtgttaatcttgcagaatgtttgcaggactgactatcaaactggatgatttccatttataccctactgtgtcagttcaagcatcaaaataccttgcatctgagacagacttcctacatcagggacaggtatctgtgtgtcattatacaaaacagttctagggggttgaactacatagtaaaaaaataaaataaatagtacttagtgtaaaataattttataaatgatcttttgtactttaggacattaaattgtacaacttttgtatatataaaagcttaggaactttctgtttagcaggaaggcaacacattcctacacttttaatgtatatgtttgttataatgtccatgtaaacatgccctatgtttgtgccttttaattagtttgtctcaataaacaaaatgtagagaaaaatatgtagctatgactttgttacaactgttcttatccacagtacaaaaatggtttgtttttaatatgtagagcattatgtgtggactactggaaggactcgtgtagggaaagcccaagaatgaccttgctgaggcctggattgggaggcacagtggccacatttggaggaagttcacatttcctggcatgcagacccaaaactgggttctggctctgcctgctgggatctgttatctctggtgggctggcagtcataattcacaattcagacagcccaggcttcctccacagtggtccaaggagcagtcctcagtgggggcaggtgtgggccctacccctaagctagaatgtggttgtcagaaccctgaaagtattagttctaaa

SEQ ID NO: 123601 - DNA, 1601 bp, Homo Sapiens
  misc_feature (1088)..(1329): n is a, c, g, or t
  misc_feature (1486)..(1520): n is a, c, g, or t
tttttccaaagtaagtttttattacaaaaacctttactacaattcaatgttttattaagactaaagtcaggaccttgccaacttactgagtcataaggaaacacatgaggaaagtcaacatggtctctaggctgacttgaattattccttgactaagaattctagggttatgtggacttttctgttaacatcctgacttagttcctttctttagcagcaaaaaaaacagcagaaataaaattcttggcaggctgctctacagaataaagtgaacaataggaaatatggatatgaagtgcagaagcagcaagttaccacaagatggggctatacactcaagaaagaacagttggttagcgaagtttctctattatcaaaaaaatttaaaaatactttgagtttatttgatgccttcatctttacagcccagctaagcaatcccataaaaatgagcaactgactaatgttttacaaagcccctcagtctccttccagagagtggaggatttattaaggataggctattttgttatctgcaaagctctcctttcatctaccctaatgtctcatgatcctggataaacccatttccctgtaaggtgagcgtatgctggtatgaggtgtgagccttcaggcagagtgtggtgtcattgttcttgtaggtaacttggtgtagggagaagaccaaagaccttgatgtcagaccaacatgaattcaagctctggctctgccatcagttagccaggtgacatttaagtgattcagttcccttaagtctcagtttactcattcacctataagttgtgagaatgaaatgagatatagataaagtgcttagcctagactctggcactttgttaataattaagggccattattattgtctcttgcttattgtttagttctaccatctgtagccacctaattcttagtctagcgattctggagcaggagtcatcaagataaaaaatataagctgatttgttctttttgttggttttacataaaaacacttagacaacctgagatatgttgttcttttttgatgattaaaaaaaacatttaaggccgggcgcaatggctcatnnnnnnnnnnnnnnnnnnnnnnnnnnnnnnnnnnnnnnnnnnnnnnnnnnnnnnnnnnnnnnnnnnnnnnnnnnnnnnnnnnnnnnnnnnnnnnnnnnnnnnnnnnnnnnnnnnnnnnnnnnnnnnnnnnnnnnnnnnnnnnnnnnnnnnnnnnnnnnnnnnnnnnnnnnnnnnnnnnnnnnnnnnnnnnnnnnnnnnnnnnnnnnnnnnnnnnnnnnnnnnnnnnnnnnnnnnnnnnnnnntgacaagagtgaaactccgtctcaaaaaacaaaaacaaatttaaagtggaaaaggagttaagtgctacacccaggaatatgtatgttacatgaaaccataaaacaccccggccgtaatggccgaattcccgggcatatgtccggtaccgtcgactgnnnnnnnnnnnnnnnnnnnnnnnnnnnnnnnnnnncggccgcttcctcgctctcagctcgctgcgctcggtcgttcgaaactgccgcactgcgccatatgtggtctatacgttttc

SEQ ID NO: 123602 - DNA, 617 bp, Homo Sapiens
tttttttgaattcaagattatagaactatgagatttatttcattttaataagtttctctcaatacaaaatttgcttccactcatgctaagtaaaccaaatatgtggattgtcactctatttggtgaggactgggtaacctaaaaaacataaaatgactcccatagccttcgtgagaggtcactgcccatctttctgatgctgtgtcacttggtcactattaatcgagtgtttttgtccatttcccccagtatggtgcacattcaggaatgttatttgtaaggatctcataaagggtctcgtcacccagctctcctatcaaacgaaagggattcctgtatgttcttagggtaacatttggcaaatgtcaagcaatgaaaactttgatcaattttatctacagaaccaagagctaaggagtctcttgggatcatcaaaggatttgtgctaacgaaagtttggcaaaaggtcagcaagttctacacatttatgactaaccatttttattggtaatagcaaaatatcctccttaaggaataagtatcaggtgctttaattacttctgaacagcagatgtttttcatgctttatttgtcaattttaacttttgctcttattc

SEQ ID NO: 123603 - DNA, 1847 bp, Homo Sapiens
acagtgaaataatggttttttttaatgttcattactttaaaagcttacatttaggaaactcaagctttgcttttctataatggttaacttttccatattatcataagaatcaactttctgattaatatttctcccttttttcttaagaagtcaatagttcttcatatccacagtcatgagtcatttttgaggacatgccagaattaccaatgtaactgtgaggcaggaaaagtacactctagaagaaacaaaatatgttaggtcttcagacttcaatcaggttcaagatagatgtatatatgccatttttccaactgtatacatagaattcttagctaatccaagataagtagagcatatcaccaggttcttcaaataattgcaatttatcaccctagtattcattctacactctataatacaattttggataaatcaaggctttttaattcagttaaataaagcaataagtccataggggtttgattcaacaatacatttttaatatagctttaaaaaggcaaacgaattttaagatcaccaggggcaaatgcagagcataagacattcactggatccagttacgtgtgtaaatgccctttaccaagtcaatactattaaagagactagtggttgtggcagaaattgtttctgcttataagggaggcaagccaggttctagtgtcctcagcaaaggcacaaactcatagcataatgccaggccagtcatttaacttcccagagtctcattcccttcgctgacaaaataggaagattgaatcagttgatttctcatgattaactattttcatatccagtgaattttcagcttatcagctactcaattgccatctgcttttcttctctgtcttccatcacaatgcaaatgccctcccatgtgtatctcgtgattggctggttgttccttctaccactcttggtgacatactcaacacagtgcagggataagatacactaggcaaggttaagtgaagccggccagcacactcaccccagggaagtcagagtaagcctgtttccaccgcaggcacagcagtgagcacagctaggcagaattccagcagagtgccaatccgcaatcagagaagagagttccagccagactggctttggctgtatagcagtccgtggtataaagtgaatcatgataaaagtaagaaacataacttcttgttggtatattatttttgtccaactcacactgcagtgaggcaggatttaaggtggcctgtttgacagacaggataatgaaacccaccagggcagacagagcactcagaatgcttccaaccaggctgctatgcaccaaaagcttggttaaccttttctctgtggcgattgatagagagccagagatgataaacaaaaagggtcctatgaatgggtaagcagagttcaacagtgtagaagtcacttgggtaaaatttggagagaaggaagcagatgccaaaatgatccccaagctcaataccatcatgccacacaagatctggatagtcccaataactttgatttctgcgtgtagatgtttcttcaggctatcctgcccctggttggtgggttcgggtttctctgcttgggagaagttgatgacatttgatgggagcactatgatggtctcattgggaacaggttgtgatgtcatgatggtgttgccaactgtgcccgttggttccagctgagtcctcagaagctccaaagaggttttaactctggtttctcagtcccatcaacggtttctacttaccttcatcttctgaaagtcatcagcccttccccggccgtaatggccgaattcccgggcatatgtccggtaccgtcgactg

SEQ ID NO: 123604 - DNA, 549 bp, Homo Sapiens
ttttaattttttaaaacaaatatgcattactttaaatgcttacatttaggaaactcaagtttgcttttttataatggttaggttttccatattatcataaaaatcaactttccaattaatatttctccgttttttcccaagaagtcaatagttcttcatatccagcatcatgagtcgtctttgaggacatgagtaaccagggaagtcagacagtctgtttccactgcagcacagcagtgagcacagctaggcagaactccaacacagtagaaaccagcatcagagacagagttccagccagactggctttggctctatggcagtccatggtgtaaggtgaatgataatcataagaaagaagaagtctggttggtatatccttttcgtccaacttacactgcaatgaggcaggatttaatgcagccgggttgacagacaggagaatgaaacccaccagggcagacagagcactcagaatgcttccagccaggctgctatgcaccccaataactttgacttttgcctgtagacgcctcgtgccgaattctt

SEQ ID NO: 123605 - DNA, 990 bp, Homo Sapiens
  misc_feature (607)..(615): n is a, c, g, or t
tgacagtgaaataatggttttttttaatgttcattactttaaaagcttacatttaggaaactcaagctttgcttttctataatggttaacttttccatattatcataagaatcaactttctgattaatatttctcccttttttcttaagaagtcaatagttcttcatatccacagtcatgagtcatttttgaggacatgccagaattaccaatgtaactgtgaggcaggaaaagtacactcccagggaagtcagagtaagcctgtttccaccgcagcacagcagtgagcacagctaggcagaattccagcagagtgcaaatcagcatcagagagagagttccagccagactggctttggctgtatagcagtccgtggtataaagtgaatcatgataaaagtaagaaacataacttcttgttggtatattatttttgtccaactcacactgcagtgaggcaggatttaaggtggcctgtttgacagacaggataatgaaacccaccagggcagacagagcactcagaatgcttccaaccaggctgctatgcaccaaaagcttggttaaccttttctctgtggcgattgatagagagccagagatgatnnnnnnnnngggtcctatgaatgggtaagcagagttcaacagtgtagaagtcacttgggtaaaatttggagagaaggaagcagatgccaaaatgatccccaagctcaataccatcatgccacacaagatctggatagtcccaataactttgatttctgcgtgtagatgtttcttcaggctatcctgcccctggttggtgggttcgggtttctctgcttgggagaagttgatgacatttgatgggagcactatgatggtctcattgggaacaggttgtgatgtcatgatggtgttgccaactgtgcccgttggttccagctgagtcctcagaagctccaaagaggttttaactctggtttctcagtcccatcaacggtttctact

SEQ ID NO: 123606 - DNA, 617 bp, Homo Sapiens
  misc_feature (80)..(89): n is a, c, g, or t
cacgtgtaagatttttattcaaatttgatttacattccaaaagaaattataaaatgtattcacttgtttataaaaaaaannnnnnnnnnacaaaactttaattcaaattataaaacatgataaattttcagattaaaattgggcaagttgcttggagtaacaagtttttaaatcaccattttccacctccacaccaaggataaccttctaattaatgatcagccatgttgtaataggatagcactgagacttgaggaaacagaaaaactgaagagctcttccaagccccgaccaggaacatttttatgccttctcatagtggcgaacagcaaccacatcaccaaaagtaagggtcataaccattttgccatccttaatttctcttacaaaatttgtttctttgccatcccatttctgtatgtgaacaagtttgtctccatccaggctaacaacagacttacagtttctatcatctgcagtggtttcatcaaactcttctcccagctggaaactaatctccgtgttcttgaatgtgctgagagtcctgatgaccactttgtctccttcttgactgataattaccgttggtttggtcacatttcccacctgcctagtgg

SEQ ID NO: 123607 - DNA, 771 bp, Homo Sapiens
acattacggctaggtagcgaggctgggtggttgaatcggcacgaggactcgtggttctccactcaggttgacactgtggccaccaaggtgaaggatgctctggagttttggctgcaagcgtggcgtggagtgggttccaggttcgggacatagagaatctgagaggatgcatcctcattcttggctgagtggcaaaatatcagccaagggcttcagtgaagacaggctcttgattgcggggactaactcctccgaccttcagcagagtcctgagcctactcgaatccaacaaagacgttgctgttgactagctcatagcctgtctgattctggttctactggggagcatacaaaatccctagtcacacagtgatttgaatgccactggcaatcgctggtgcagctggagtttgtctcaggcaaggctcctgacttccttcttgccggctcaacttctccgactctaccagctgatgctcttcaccctgccagggacccctgttttcagctacggggatgagattggcctggatgcagctgcccttcctggacagcctatggaggctccagtcatgctgtgggatgagtccagcttccctgacatcccagggctgtaagtgccaacatgactgtgaagggccagagtgaagaccctggctcctcctttccttgttccggcggctgagtgaccagcggagtagggcgctcctactgctggggacttccacgcgtctacgtggggctggactcttctctatttcggcctggaca

SEQ ID NO: 123608 - DNA, 1164 bp, Homo Sapiens
  misc_feature (235)..(243): n is a, c, g, or t
cacttactgagagcgagcatggcttacacagggtgtgggacgctggggtctcatgcagaggatgagggtgataggtagaaggaacaatatatgaggggggcacatggaggtggattattggagggtcattcaagaagggacaggggtgaattgtgtccgcgaaaaagaagaaagcaagatgctgcaggaaatagcgccattggtgaatatttcgccacaagaaggccaaagaaannnnnnnnncctgcgagcgggatttcggatatgtccggaaactggagaaccaatgccagagccagggtgggagcgccaagcctccaagggctccttccacctttggggggccacagtgtcaacctgagggggaagaaccaggaagttttcaccccggtaggttggaagtaaggtccagaatgacacggatgttcttttttttagccgattgcaagagactgtcaaaatcttccttggagccaaaattggggtcgatctgcagcaagtcagtctgagcgacatcatccttctggttcttgtgaattggacccagcacaaggcccttcaccttcagagagctcaggtaatcgagacgccccttcagacccgccaggttgcccgcgccgtggccctggaaggcctgaaggtcgccgatgcggtagagggcgcccgtgtgccaccacttctgcgccggtagctcgcgacaacgcggcgctcgcacgattatgaccacggcaccagcaagcatgccgagccagccgagccagaagagcagcagcagtgcccagcgggtgcgtacccagccggggctgcctgccaccttcagcagctcctccttggacaggcccgtgaacttagccgcggctgccgcctccgcctcgtcttccgccaccttgatcttcaccagaccattcttctcggctcccgccagggacatggccgccccagacgccgcgttcatcggctgcttctcgggctctaactcattcagctccacctccttcatatccacctcggtgtcctggctcatggtgcctgcagaaccggcgacacgacgcagcttgcggtcagatggtggctcaacccctacctggaccctcggacccagaacgctctaccccggcctcttcccctcgtgccgattcaacaccagcctcgcacctagcctaa

SEQ ID NO: 123609 - DNA, 932 bp, Homo Sapiens
tgagatcatcctttaggatctgctaaggtcccgaaccttggaacccagtcaacgccagcttgcagcgcaaaacgcccaggagcatcctttcaccttggtggcccacagtgtcaaacctgagctggagaaccacgagttctcaccccggtacttgggagtaaggtccagaatgacccggatgctctttttgttagccgattgcaagagactgtcaaaatcttccttggagccaaaattggggtcgatctgcagcaagtcagtctgagcgacatcatccttctggttcttgtgaattggacccagcacaaggcccttcaccttcagagagctcaggtaatcgagacgccccttcagacccgccaggttgcccgcgccgtggccctggaaggcctgaaggtcgccgatgcggtagagggcgcccgtgtgccaccacttctgcgccggtagctcgcgacaacgcggcgctcgcacgattatgaccacggcaccagcaagcatgccgagccagccgagccagaagagcagcagcagtgcccagcgggtgcgtacccagccggggctgcctgccaccttcagcagctcctccttggacaggcccgtgaacttagccgcggctgccgcctccgcctcgtcttccgccaccttgatcttcaccagaccattcttctcggctcccgccagggacatggccgccccagacgccgcgttcatcggctgcttctcgggctctaactcattcagctccacctccttcatatccacctcggtgtcctggctcatggtgcctgcagaaccggcgacacgacgcagcttgcggtcagatggtggctcaacccctacctggaccctcggacccagaacgctctccccggcctctgtgcctccgcgcagcctcgtgccgatttaaccccagcctcgtactagcctatttt

SEQ ID NO: 123610 - DNA, 1523 bp, Homo Sapiens
agaagcagagggaagacttcaccatgcaggggtgacttttatttgaaggcagaaaacaccctatttgggggttcactcataatctgcaacagtttgtttgtttgtttttaaaaaagagaaaaatcagaagccaaagggcctgggaaggaaaggagaagggtagtgggtccatgtcaggctgaagtcaggccgcgtaggggaagcggagcagcagcccttcgtgaggctccagtttcaggcgttccagctcaagaggggagccctcctcacggcctggctgggtgctgagcaggaggtcagccttggctggcaggctggcgctggcaggcaggtcggaggcctgcagtccagccgagaggcccacatccccaaagttaagcactaccagaaaacgctcattctggtcccagtggcggatataggagaagagtccaggcccagcggagaacgcgtggaagtccccatgcagtagggagcgctccttactccgctggtcactcagccgccggaacaaggaaaggagggagccagggtcttcactctggcccttcacagtcatgttggcacttacagcccctgggatgtcagggaagctggactcatcccacagcatgactggagcctccataggctgtccaggaagggcagctgcatccaggccaatctcatccccgtagctgaaaacaggggtccctggcagggtgaagagcatcagctggtagagtcggagaagttgagccggcaagaaggaagtcaggagccttgcctgagacaaactccagctgcaccagcgattgccagtggcattcaaatactgtgtgactaaggattttgtatgctccccagtagaaccagaatcagacaggtatgagctagtcaacagcaagtctttgttggattcgagtaggctcaggatctgctgaaggtcggaggagttagtccccgcaatcaagagcctgtcttcactgaagcccttggtgatattttgccactcagccaagaatgaggatgcatccttcagattctctatgtcccgaacctggaacccatccacgccagcttgcagccaaaactccagagcatccttcaccttggtggccacagtgtcaacctgagtggagaaccacgagttctcaccccggtagttgggagtaaggtccagaatgacacggatgctctttttgtttagccgattgcaagagactgtcaaaatcttccttggagccaaaattggggtcgatctgcagcaagtcagtctgagcgacatcatccttctggttcttgtgaattggacccagcacaaggcccttcaccttcagagagctcaggtaatcgagacgccccttcagacctgaaatgggggctgggttaacaagtgaggcccctctgagaggctcctgacctccccaccctcccttctcccagcgcctaagggtgggacggggagggggcaaagggggagagagggaggcaaggctgaatcacgagactcagaggagctgagtaaggaatcccgggaattc

SEQ ID NO: 123611 - DNA, 588 bp, Homo Sapiens
  misc_feature (73)..(83): n is a, c, g, or t
ggggaacaagcaatcctcccacctcagccttctgagtagctgcgactacaggcataagccaccatacccagcnnnnnnnnnnngccggggggagggtgggcgtagagatgggatcctcactatgttgctcaggccggtcttgaactcctgggctcaagccattctcccacattgtcttcccaaagtgctaggatttcaggcatgagccactgtgcccagcctgaagtacttttcttgaactcagcattgctgccctgaaccctcccccagctgccttccctactttgggagcctctatttctagaacaggaaaacgctaggctaaatatatgtcctaatggtctcttccatcggtgtgaaggaaagaaaatgggcccaatgttgttgcaaggattaggaaggtcctgccttgccacccagtgggtttagaaatccatctttacggcctccagagaagctggtgatcaggttcccagacatcagcaatcctgtttcctgaggagcttgtgggggctctctctggggatgatctgggtcctagacaaagagcacaactgatgggggtcactgggattgcagggggccatg

SEQ ID NO: 123612 - DNA, 569 bp, Homo Sapiens
tttttggagtttggcagagttttattctccttttccttcctcctggaatgagctgaacagaacctttcctcctggattccattttgggaacccagatgttttctccccctccaggcactgggcatggaggtgaccatggtacctggcaaaggacccagcttcccagagccattaagagaagagcaggacctagaacgcctacgggatccagaagtggtagcctctgagctaggctatgtgttccaagccatcacccttacccgacaacgactggctggaacgtgtgccgctgattggctttgctggtgccccagtaatgtgggacagggcagggactcggggcgcgggggagatcactctggaaagtctgggggtagacaaaaggaagggtcagtctggcttctgtgacaccatctttctatccttctctagtggaccctgatgacataccatggttgagggttggtggctcaagcaccatggctcaggccaaggcgctggctctatcagagacctcaggctatgtcaccagctgcttcgcatcctcacttgatgctctggtcccatat

SEQ ID NO: 123613 - DNA, 1065 bp, Homo Sapiens
cgacgctcttggttccctacagaaaggggcggagcctggactggggggcaggctcagatcaggttaaatgtggatgagctcgcagttacagacagctgaccatggaagcgaatgggttgggcctccagcgtagcatactgacacctacccccacccccacctgatcgccagacctcagggttttccggagctgaagaatgacacattcctgcgagcagcctggggagaggaaacagactacactcccgtttggtgcatgcgccaggcaggccgttacttaccagagtttagggaaacccgggctgcccaggactttttcagcacgtgtcgctctcctgaggcctgctgtgaactgactctgcagccactgcgtcgcttccctctggatgctgccatcattttctccgacatccttgttgtaccccaggcactgggcatggaggtgaccatggtacctggcaaaggacccagcttcccagagccattaagagaagagcaggacctagaacgcctacgggatccagaagtggtagcctctgagctaggctatgtgttccaagccatcacccttacccgacaacgactggctggacgtgtgccgctgattggctttgctggtgccccatggaccctgatgacatacatggttgagggtggtggctcaagcaccatggctcaggccaagcgctggctctatcagagacctcaggctagtcaccagctgcttcgcatcctcactgatgctctggtcccatatctggtaggacaagtggtggcttggttgcccaaggcatttgcagctgtttgagtcccatgcagggcatcttgggcccacagctcttcaacaaagttttggcactgctttaacatcccgtgatgtgggccagcagtgacggcaggttgcgggaggcatgcctgggcccggtgccatgatcatcttgctagggtgggcctttgcctggggggctggcccagttgtattaggtgggtgggttgtctgggctgggcccaaaagccggtgttgggccgggtttcggccgcctccttttttggggatcccgggac

SEQ ID NO: 123614 - DNA, 849 bp, Homo Sapiens
  misc_feature (82)..(92): n is a, c, g, or t
  misc_feature (179)..(238): n is a, c, g, or t
  misc_feature (458)..(495): n is a, c, g, or t
gggggggtttcccagggtgtggggcaagaaatgacgtatgaggagaatgtacccggattatttgggaataagagttgcaacnnnnnnnnnnncctaaaatgtggatatgaggagaccccccgggggagttccccgggttgtaagaacccacgggaaggcccccggaagaagcgcctgtnnnnnnnnnnnnnnnnnnnnnnnnnnnnnnnnnnnnnnnnnnnnnnnnnnnnnnnnnnnnaagatcccaaaccgcttatttctatgggccaggggatttgtcttaggagagacagggttatggggcccagggttccgtttacgttggggggggccgcgggcgcccaaaaagaaggggtttggaaaactttttcgagggcggaggggcgggcgacaaaggaagtgtgtaggtattacatggggtttataaaagagaggtagacgtgtcgtaaatcggcgannnnnnnnnnnnnnnnnnnnnnnnnnnnnnnnnnnnnncaactccgaaacttttattgtcctggaaacgatcaatcatctgtgttagtggtacttgagggtaaaggtatacactcagttctgtcgaagcagacgtgagtgtttatgcacagcatccacaaaggcgcccacatgttctgggtccatgtcaggataaagcccatggcccaggttggcaatgtagcgatgtggtccaaagtcatccagcatctgcttcaccaactgcccgatctcctcctgggggaccaacagggcactggctacaggaggaccagcaagcctttgtcctccctatatatactagtgacaaacgcatatgtaggcatgcttctactcagtgttattcagtcatcc

SEQ ID NO: 123615 - DNA, 1209 bp, Homo Sapiens
tttttttcaactccgaaacttttattgtcctggaaacgatcaatcatctgtgttagtggtacttgagggtaaaggtatacactcagttctgtcgaagcagacgtgagtgtttatgcacagcatccacaaaggcgcccacatgttctgggtccatgtcaggataaagcccatggcccaggttggcaatgtagcgatgtggtccaaagtcatccagcatctgcttcaccaactgcccgatctcctcctcagatgcatacaaggcacaggggtccaggttgccctgcaatgtcaccgtcttccccacacactcccgggctttctttggggccactgtccagtcaagcccaaccacctcatagccagcttgggccagctcctccagggcaaaatgcccatccttagcaaagatgatcatgggcactggtgccaggcctgcctcccgcaacctggccttcacttgcttggccacatcacggatgtaaggcagtgcaaacttgttgaagagctgtgggccaagatgccctgcatgggactcaaacagctgcaatgcctgggcaccagccaccacttgtcctaccagatatgggaccagagcatcagtgaggatgcgaagcagctggtgactagcctgaggtctctgatagagccagcgcttggcctgagccatggtgcttgagccaccaccctcaaccatgtatgtcatcagggtccatggggcaccagcaaagccaatcagcggcacacgtccagccagtcgttgtcgggtaagggtgatggcttggaacacatagcctagctcagaggctaccacttctggatcccgtaggcgttctaggtcctgctcttctcttaatggctctgggaagctgggtcctttgccaggtaccatggtcacctccatgcccagtgcctggggtacaacaaggatgtcggagaaaatgatggcagcatccagagggaagcgacgcagtggctgcagagtcagttcacagcaggcctcaggagagcgacacgtgctgaaaaagtcctgggcagcccgggtttccctaaactctggtaagtaacggcctgcctggcgcatgcaccaaacgggagtgtagtctgtttcctctccccaggctgctcgcaggaatgtgtcattcttcagctccggaaaaccctgaggtcccaacccattcgcttccatggtcagctgtctgtaactgcccc

SEQ ID NO: 123616 - DNA, 939 bp, Homo Sapiens
  misc_feature (287)..(287): n is a, c, g, or t
  misc_feature (390)..(391): n is a, c, g, or t
gctcttctcccttttggggggctccccgtgtttcccaggtccaggggtctaaaaccccccctccataaaccccggctgtggggcccggtctccctccaggggccaaaaattcccccttcctttgcccaaggatgatcctgggccattggtgcccaggccttccttccccccaacctgccctccccttgcttggccacatccccggatgtaaggcagtgcaaacttgttgaagagctgtgggccaagatgccctgcatgggactcaaacagctgcaatgcctgggcanccagccaccacttgtcccttccagatatgggaccagagcatcagtgaggatgcgaagcagctggtgactagcctgaggtctctgatagagccagcgcttggcnntgagccatggtgcttgagcccacccaccctcaaccatgtatgtcatcagggtccatggggcaccagcaaagccaatcagcggcacacgtccagccagtcgttgtcgggtaagggtgatggcttggaacacatagcctagctcagaggctaccacttctggatcccgtaggcgttctaggtcctgctcttctcttaatggctctgggaagctgggtcctttgccaggtaccatggtcacctccatgcccagtgcctggggtacaacaaggatgtcggagaaaatgatggcagcatccagagggaagcgacgcagtggctgcagagtcagttcacagcaggcctcaggagagcgacacgtgctgaaaaagtcctgggcagcccgggtttccctaaactctggtaagtaacggcctgcctggcgcatgcaccaaacgggagtgtagtctgtttcctctccccaggctgctcgcaggaatgtgtcattcttcagctccggaaaaccctgaggtcccctcgtgccgaattcgccacccaggcctcgctacctt

SEQ ID NO: 123617 - DNA, 795 bp, Homo Sapiens
cagttacagacagctgaccatggcaagcgaatgggttgggacctcagggttttccggagctgaagaatgacacattcctgcgagcagcctggggagaggaaacagactacactcccgtttggtgcatgcgccaggcaggccgttacttaccagagtttagggaaacccgggctgcccaggactttttcagcacgtgtcgctctcctgaggcctgctgtgaactgactctgcaggcactgggcatggaggtgaccatggtacctggcaaaggacccagcttcccagagccattaagagaagagcaggacctagaacgcctacgggatccagaagtggtagcctctgagctaggctatgtgttccaagccatcacccttacccgacaacgactggctggacgtgtgccgctgattggctttgctggtgccccatggaccctgatgacatacatggttgagggtggtggctcaagcaccatggctcaggccaagcgctggctctatcagagacctcaggctagtcaccagctgcttcgcatcctcactgatgctctggtcccatatctggtaggacaggtggtggctggtgcccaggcattgcagctgtttgagtcccatgcagggccatcttggcccacagttcttcaacaagtttgcactgccttacatccgtgatgtggcaagcaagtgaaggccaggttgcgggaggcaggcctggcaccagtgcccatgatcatctttgctaaggatgggcattttgccctggaggagctggccaagctggctaatgaggtgg

SEQ ID NO: 123618 - DNA, 580 bp, Homo Sapiens
gaattcagaagtcctttattagccggcaaccgagagatggctagtgctcaaaattctctcggccctgaagaaagggctagattttcttttatactttggtttagaaaggggaggaggagcctagctgaagcactcttacagaagcaaaacaggcaaaaagttaaaagacaaatggttacaggaaaacaaacagttccaggtgcaggggttttaaatccatcacaaggcgatagatgcgggggctttgggtaccatcaaccggacacaaatgtgggggcttagggtactatcaactgggcaaattcctgggaactgcggatatagcttgccacagtatcttatccattaattgcattctttgatgtgctgggagtcagcttgcacaagttaagtccttgaggaaggggggtgggtaaggggctgcaagtgaaggagccaaaatggagtgtgtctggctctctcagctaagggacagtcaattcaggttaaaacaaggtagggtatcacacttacaagagggaggcagaaagagttgatgtgaaatgacctggagtgggagaggtacaaaaggctgtgctgc

SEQ ID NO: 123619 - DNA, 1099 bp, Homo Sapiens
  misc_feature (969)..(969): n is a, c, g, or t
  misc_feature (1021)..(1021): n is a, c, g, or t
  misc_feature (1052)..(1052): n is a, c, g, or t
gtcgggctgggtgtcgaatcggcacgaggctcattagacattgtcctgctgtcactcttgggcagcgcctagcatctgctgctaaaggctctgcccaaatcaagaactctcccttgcaagactttgacaagcgcctggattagtccaagacagtctccttgtccatgttgctatccttggactggttcattaacatctttccctatactacacagttttctctcaatgttaaatgttactgtgatgtggaaattttaatctaccatatgcatgtattaattatactactatgtatggtttgccatattgactaacttgtagatcagcttgagcctgtgtgttcttggctgtgactgccaagtgaagagataatgctaaggagagttgtctccttgggaactccctgtagcttgtggcttttatgaataaataagcatcagtaaaagcctgaccttaatgttgtacctgatcaagtcagagaaaatgccacactttgagatgaattaaagagtccgtttatttagctggtggccaagagacggctaacgctcgaagttctctcggccctgaagaaggggctagattttcttttatactttggtttagaaaggggagggggggtctagttaaaacaattttacagaagtaaagtaggcaaaaaagttaaaaggataaatggtcacaggaaagtaaacagttccaggtgcaggggctttaagactattacaaggtgatagacgctgggctttgggcattatcaatcggacgaattcctgggaactgcggatattgctcgccacagtatcttatcagttaattgcattcttggatgtgctgggagtcagcttgcacaagttaagtcgttgaggaacggggctgccagtgaaagagccaagatggagtctgtctggctttcttagctaagggagagtcaattcaggtggaaacaaggctaggtgattaaagganagggagagtctaagaacagggttagtaaaaaacaaggttgggcattacattntaacaagatacaaacatgcctgtatctgatnatgtctgaccttgtacatctcatgacatccgcagtcaatgaacatgt

SEQ ID NO: 123620 - DNA, 623 bp, Homo Sapiens
  misc_feature (541)..(553): n is a, c, g, or t
aaatgggttaattttatttcaaaattgtacaaaatggccataagcggctataaaaaatttgtcttcagaacatgtggaaattcagaaacaacaaaacaggtatcattcacagtgtaatggaaaagctttttctgaggcaggaattataactcttccttctttttccctagtctttcatggtctccctcccggagggctcgaatataattggtaaatcccaattctgtgcggtcgctgtcatacttttctgcgaacttcccatagtggtagtagtggaaagtggggtagcccttgaccgcctcctgctggcacaggtcttggttcttgtctttgacacagtcaacagcggcacaggcaatctttcggtcatctttgaaggcatcagcagtagcagtaaagtgcggaatgaccttcttacagtgtgggcaccaaggggcgtagaacatgaccaaggtgtgtttcttcttcttcagggtctcccggaagttgtcccccaccaggtgcaacacgcttgtctgctgctcttcccacgtgggctctnnnnnnnnnnnnncctcagggttttgcatccactcgagaacttcttctttgtcctgagcacaggcactgcgtattctctccat

SEQ ID NO: 123621 - DNA, 680 bp, Homo Sapiens
  misc_feature (548)..(560): n is a, c, g, or t
ttgtatttaaatggtttaattttatttcaaaattgtacaaaatggccataagcggctataaaaaatttgtcttcagaacatgtggaaattcagaaacaacaaaacaggtatcattcacagtgtaatggaaaagctttttctgaggcaggaattataactcttccttctttttccctagtctttcatggtctccctcccggagggctcgaatataattggtaaatcccaattctgtgcggtcgctgtcatacttttctgcgaacttcccatagtggtagtagtggaaagtggggtagcccttgaccgcctcctgctggcacaggtcttggttcttgtctttgacacagtcaacagcggcacaggcaatctttcggtcatctttgaaggcatcagcagtagcagtaaagtgcggaatgaccttcttacagtgtgggcaccaaggggcgtagaacatgaccaaggtgtgtttcttcttcttcagggtctcccggaagttgtccccaccaggtgcaacacgcttgtctgctgctcttcccacgtgggctctnnnnnnnnnnnnncctcagggttttgcatccactcgagaaacttcttctttgtcctgagcacaggcactgcgtatttctctccattcttaaaatacttcaacgtaggaaactctgagatgtggaatctttctg

SEQ ID NO: 123622 - DNA, 920 bp, Homo Sapiens
tacaactgacaaaacatgactttattgaaataagcattctgaaagggcatcatgttccttgcaaaggaaatgggaaaatgcattatctaatatcttcatattgctaccttaatagcttcaccagttattactcagagttttaaaatgagtttattaaagaaggttcttaggaaggcaacaacttttgtccttaaaaagaagttatggtttttcatgctgtataataaaggtgatgtaagaggctacagagttacaagtttctttctactggaattctctggtatagcacagtgtagtcatttctgcaattctagaataaataaaaagtctcttctatgcttctcttcaaaagcaatgaataacagaagatggtgtaaaaaagtcatattttttctattcattctgtagtattggagccagtatttttaccatcacaggctacaattttcactttatccactttaataagttctgtcacctctctgaattcaacatcattcagtacaaaagtccacacattatcgcagaatctgtacgtatttagagagcccctgaaattgactctgttcctgaccctctgagccagtgctgcatttatagccttatcaaactgaagtagaacttgaagggcaagttggggggtgatctgttgagactgtatgagctcatctaggctctcctgaagactgtttcccaaagtagtatttctgtataactgatatgccatggcttaggaggaagaatttgtttttcttattcaagcttgcattgatgtcctgtggggaaggcgcttcccgccgcggagcggacagaagccgccacgagcccggcaggaggttcctacttctccgaccacctctccagccgccgccctcgtgccgaattaactacccaggcctcgctacctagccgtaaggttt

SEQ ID NO: 123623 - DNA, 567 bp, Homo Sapiens
ttaaaggaagtcaaaaactttattcagcttataaaattccatgttccaagaacatgctctaagcatgcagaaagcacaggacactgctcccgggtgggggctcaggtggggccacctctgaagctctgctgacccctgggccaaggccctgacagactagcaggcccagtggtcatgaaagcgtgacggccaccacatcacaagcgtgatggcacctgctggtgtagctgcagtccctggtgggccgggcactcactctggcagccgcgtcccccacgccagccatggttgtcccgccatacgcagtagttgagtgtggtcgtgaaggccagccaggccaggtaggggtagagcatgcgggcggccagcgggctcacctggtaccaggccacggtattggcttcgccgccccactgaccagcaggagatccaccaaggcccacccatttgtcgggcaccaaagaagattgtgggccatgacacgttctagggcagctgccaatgtagaggccaggggaacatagccttcgctgtaaacctccagcttttccagaccaggtaagagcc

SEQ ID NO: 123624 - DNA, 1116 bp, Homo Sapiens
  misc_feature (157)..(157): n is a, c, g, or t
  misc_feature (178)..(187): n is a, c, g, or t
  misc_feature (190)..(205): n is a, c, g, or t
cccaaaggttaggccaggttttccccagtccacggacggttgtaaaaacgagcggcccaagtgccctagcttataataccgacctcacttataggggacccactttgtacaaaggaaagctgggtacgcgtaagcctgggccccctcgagggaatanctctagagcggccgccctttnnnnnnnnnnttnnnnnnnnnnnnnnnntaaaggaagtcaaaaactttattcagcttataaaattccatgttccaagaacatgctctaagcatgcagaaagcacaggacactgctcccgggtgggggctcaggtggggccacctctgaagctctgctgacccctgggccaaggccctgacagactagcaggcccagtggtcatgaaagcgtgacggccaccacatcacaagcgtgatggcacctgctggtgcagctgcagtccctggtgggccgggcactcactctggcagccgccgtcccccacgccagccatggttgtcccgccatacgcagtagttgagtgtggtcgcgaaggccagccaggccaggtaggggtagagcaggcgggcggccagcgggctcacctggtaccaggccacggtagtggctgccgccgccccactgaccagcaggagatccaccaaggcccagcccatttgtcgggcaccaaagaagatggggggccatgcccagttcagggccagctgcccagtgtagaggcccaggggaaccacagccttctctgtgaagcctcccagctctttccagaccaggtaggagccgtaccccatggctgagtagagcgtgccccagacagggcccagcacccagtggggcgggtgccacgagggcttctgcaggccggcgtaccagcggagaccctcgccgtggacaaagcgggagcccacgaagcaccccaggctgggcgccagcgtgaagcccatggcgggcacccagggcggggccatggctgctgcagctgctgttcaggggagctcagcggcgagggcacgctccgggaagggcactgcccgacgcgtgggtcgacgatatcccgggaataccggaccggtaccagcctgcttttttaagcactgtcttatagtcacatagcagcc

SEQ ID NO: 123625 - DNA, 1572 bp, Homo Sapiens
agagcccaattatgttctttattacacaaaaattcagtgcatcaaaaatagaaagaagccccaccactacatttgaaattaaattttatttaaacaggtaaaaatttatacatccttttaaaaacgaaaatgcaaagtcagtaagtgaatcaataatataaacctatttatagcagtaattaaaatagaggtaacatttaccagtgtgaaaatatcacagaattcaaatcacactcggatcttcaatgattcgagtgtgtatccgacacagcgggggctggtagactgaagatgaattcctcccatgcatgcgccatccccagtcaagtccttcctcatcaccgtccaccagctcacacagtggggtagctggctgctgaggcaattccacaatggtttctccggtctttggccatctttacgtagccacccatgccccattcttcaccccagctgttcttcaccagccaatatttattgttatctgattctgtgctttcaaatccgtagccaaccaccagcacaccatgatccatgtcttcactgctacagtctggctcaaaataaatgccttctttatagaacaggaaggactcatgacctgcatcaatagcaacagaaatgggccccacagttgcaactgccttcatcagggccttctcctgcttagggatgtccacaaagccggtgtcattagcaacagaatacttgggattgtacttacaggattcttctgttgcctcatatggataggattcctcagagtccaggcctccattatcctgaacatactggaaagcataatccattaggccaccattgcagccttcattgccttgaggcccagagcagtctaccagattctgctcactcagtgagataagcctcccagttttccggaacatctgtccttcaagagcaccagtagcactaaaagcccaacaagaaccacactgaccctgattcttcacaggagtcacgtagcctttctctctccaatccacagatctgggggcctcataaaacagaggttcctggaacactttccccttcctgggcttacggttttgaaagccattcatcacctgcctgaattcttcactggtcatgtctccaaaggcgttcatggccattgtgaagctgtgtttcccttccctgtattcctgattgtgcagttcaatcatcttcatgttcttctcccacactgctctcctccatccttcttcattcatgccgtataatctgttgtgcatcgccttccacttggtccactgtgcctctaaactgtgatcaaatgttagagtagctgaggcaattcccaggcaaaaggcagcaaggatgagtgtaggattcatgttttaaaacctactcgaccgcgtcctctcttccagtccctgtccggccacagctgggcctggccggcggcgctttcctgctgcggtcgtagctgcgcaggcgcactccacggatgccgctcaaggttgcggcggacgcgtgggtcgacgatatcccgggaattccggaccggtaccagcctgctttttgacacacgggtctatatgtcaccaacgc

SEQ ID NO: 123626 - DNA, 659 bp, Homo Sapiens
  misc_feature (556)..(556): n is a, c, g, or t
  misc_feature (641)..(641): n is a, c, g, or t
attcatcttgatctcattattttattcattccaagatcttattatgttataggtgtgtgcttggtgatagtaagcaaaacctgagaaggcctctttcttcatggagctggtatcttagtgagggggtgagcagatattaatcagatcatcacgaagtgttatatgacaaataataatagttaatatctattgagagtttaggatgtgtgagacactatcttaagagtgtttgtctctattaactcatttttttcctcaaaacaattttaggtgttagggggtattactctctttttatagataagaaaagtgaataaaggcaaagtaattgagctgctggcacacacctacaaagtggtggcatgagaatcccaacactttgagtcttggttttctcagtttctaaaaagcaggatgataaagctcagttacagagattaaactaagagacaatgctggcaaacacctagcaacaggactaggttttacattaggtgcttaacaataacaactgaattacaattgctcttggattcatgaggggaatggggattcncctttgtcttgttggtgggatcctcataatatctgcagaagcttcataaggaattttgaatggacagattttgtacaggtcctgngccaggtttttgtgcttc

SEQ ID NO: 123627 - DNA, 936 bp, Homo Sapiens
tgaaaagaatccttcggagtccaggcctccattattccggaacatactggaaagcataatccattaggccaccatggcagcttcattgccttgaggcccagagcagtctaccagattctgctcactcagtgagataacctcccagttttccggaacatctgtccttcaagagcaccagtagcactaaaagccctacaagaaccacactgaccctgattcttcacaggagtcacgtagcctttctctctccaatccacagatctgggggcctcataaaacagaggttcctggaacactttccccttcctgggcttacggttttgaaagccattcatcacctgcctgaattcttcactggtcatgtctccaaaggcgttcatggccattgtgaagctgtgtttcccttccctgtattcctgattgtgcagttcaatcatcttcatgttcttctcccacactgctctcctccatccttcttcattcatgccgtataatctgttgtgcatcgccttccacttggtccactgtgcctctaaactgtgatcaaatgttagagtagctgaggcaattcccaggcaaaaggcagcaaggatgagtgtaggattcatgttttaaaacctgtgtccacccggctcggaggctggcctgcccgctcaaccagtcacgcgcctccgcggggtcctcaactgccctccccggcttccccacctcaaggccagcagagttcggggtagacgctctcgttgccagggctggtgcacacctactcgaccgcgtcctctcttccagtccctgtccggccacagctgggcctggccggcggcgctttcctgctgcggtcgtagctgcgcaggcgcactccacggatgccgctcaaggttgcggagtcgccgacgcgtgggtcgacgatatcccgggaaatccggaccgtaccag

SEQ ID NO: 123628 - DNA, 1795 bp, Homo Sapiens
  misc_feature (272)..(281): n is a, c, g, or t
  misc_feature (1499)..(1499): n is a, c, g, or t
tttttcaaagttagcaagcatcctccttcattaaaatgaaaacccaggaattctgcatccaggaattaatccagcaaaaaatactgggtacttcctaaatgctcttcaagagataattggttacacaaattatgtgatatctaagagacagcagagcagggacatggaaacttaacacagacaaccttcaagttgcacattttaatttacaatttttaccaataaaaaggattagtttacaaaaagggaagtcctttatacaaaataaggannnnnnnnnnccatttgtaaagagaatccactgtcatgttttgccttgtcaagtcaaaactcaaatagcttgttttggtaaaattattccagaaacataatccagacaaaatcaataacgtcatcagcttcctaaccatgtttaagaggaataacttcatgaacattttgccctgaactgaagagttctaaatacttgtaaacctttaggaaaaaatgactgctcgcaggcagctgactggtaagagggtacaccagagactccgggtcactcactgtcagaatattcttatacatacaatgagtctccacgcctgtacaatgagtgtacgtgcaacataattggagtaatggcctctaaaattttacaagtaaactttattgtggccacagatgaacaacaaaacatgacagttaaggttcagactctccccacctattttatcatataaattaaatatggagaggtacacacaaactctattcaaaatgagaagttgtttgccaactctcatttcctaggataacacacatcacactgtttaagagtgggggaaagaatagtcatactgttagagcacaatgtttcctgaaaagaaactgatcaaaacggtttgaagccttttttagttgcctcaaagtgtgacagccactcaatactgctcctaacagtctgctttcagataacgtcataaaataaaataactgtgtgaaaagccatggccttcaaaaaactttatttggttatgagccaagctctgataggaaaagcccacctacgaaaaaaaggtgtgggtatttaagctggtctgattcacagagcttgtacattcatgactcaaaataacacaccctcaaacccaaatgattctaaagccatttcaaccttaaatcatgttattcccttagatgtgcttacattagctttaaaaaatgatctacgtgcagagaggagctgcgccttcctcacaattaattgaaacatgaccaaaaaacgggggataggcaaaaaagtgacatttaaatagcgtatgagggtctctcctcctttactcaatgaacacatatccagaatgagattgaaatggaatcaatgcccaggagcctctcaaagagagcatctccctgtagccaacatgatctggatcctcctaacacaaagcaacccaactactccagctacacaaagccagtaggcctacatatgaaacgcaaaggggttgcatccncccatggtttaaacctaacccatgttagctgcaactccactacagtcttgatcacttagctcaggaaacaaacacccagcaacaaccctcgtatctcattaataccaatctgtggccctcactgactcagtggtacttttttataaaaatatctgaagaagtggcaaacggttacaacggatgtcaggtcgaagcaattccaaaagctgagaaaacgcttcatccgctgcttgtcttctccccctattgctacagttctgccaccaaagggggaaaattacgtgaatatgattgtt

SEQ ID NO: 123629 - DNA, 649 bp, Homo Sapiens
tttttttagggaaacaagattcatgttttatttccacagagaaactcaaaagtaggaagctcctccttcctggagaactgtcacagtgacttcaggtcaccaaagggaggaggtacagaaagatgctggtgtatgtgacgaggctggtggccactgaagcaccacagtgcagtgggaagaaacaaggagagacaagctgggtccccagcctaggaaacagaggtgtggcagccgggccagggctggcacaggctgggggccaaggggaggagctccctgacgaccagtgcttttcggggcctcggtggtggttgcaagaaattgcctgacttcatgtcgctgcccactgagatctgaggatataccaagatcctggccctgccccgggtgactgtgcctccactgccaggatgtggcctgggtcggctcactctgacactcacctaccaaaacttcacccactgcagcaggccaggttgcacccgggaagccgaggaagaaggtgagactccccctttgcaggggtcttgactgagtacttcccaccataggcagtgggatacgcatgctggttgtaattgtagttctgatcggctctgcctgcacgtttctgcagtgatgacgcgtccgcaccctcaataattgcttt

SEQ ID NO: 123630 - DNA, 674 bp, Homo Sapiens
agggaaacaagattcatgttttatttccacagagaaactcaaaagtaggaagctcctccttcctggagaactgtcacagtgacttcaggtcaccaaagggaggaggtacagaaagatgctggtgtatgtgacgaggctggtggccactgaagcaccacagtgcagtgggaagaaacaaggagagacaagctgggtccccagcctaggaaacagaggtgtggcagccgggccagggctggcacaggctgggggccaaggggaggagctccctgacgaccagtgcttttcggggcctcggtggtggttgcaagaaattgcctagaagaaagaaaatcaaatggtagcacgtggccactcctaagcctgcggaaacggggcatcttttcacccagcgtctgggcacccaccattcttttgctgtcctacctgttcgcctgtggtgcccctcacttttgctccgcctaaaacagagtttgtggttctgccgagccaagctatcacctctcgcccatgcagcctcgctgcgtcccacctctgaacccttccaccaggaggctcttttctccacagttcccctgtaacatctctatcccggtccctgtgctccatctagaacaccatcttctcagagctgtgcctatgtggtccaccctaaggtgctttccgagggtcta

SEQ ID NO: 123631 - DNA, 778 bp, Homo Sapiens
ttttagggaaacaagattcatgttttatttccacagagaaactcaaaagtaggaagctcctccttcctggagaactgtcacagtgacttcaggtcaccaaagggaggaggtacagaaagatgctggtgtatgtgacgaggctggtggccactgaagcaccacagtgcagtgggaagaaacaaggagagacaagctgggtccccagcctaggaaacagaggtgtggcagccgggccagggctggcacaggctgggggccaaggggaggagctccctgacgaccagtgcttttcggggcctcggtggtggttgcaagaaattgcctaccaaaacttcacccactgcagcaggccaggttgcacccgggaagccgaggaagaaggtgagactcccccctttgcaggggtcttgactgagtacttcccaccataggcagtgggatacgcatgctggttgtaattgtagttctgatcggctctgcctgcacgtttctgcagtgatgacgcgtccgcaccctcaataattgctttccagttgaggaaaggagtgttctgtttgaaatcctcccagagtcggctgaagtagaggagggctcgggtgctggggggcgggacctggttcttgtttatggcatcccagttgatgaaacccagcttggatttaaaattcttccagaaagtgtcaaagttaaacatcccaggagacgtctcagagttcacagtattgactccacaacagcgtcacctcctcactgcccagctcgaccttgccctgaatcc

SEQ ID NO: 123632 - DNA, 1781 bp, Homo Sapiens
  misc_feature (67)..(111): n is a, c, g, or t
  misc_feature (1695)..(1723): n is a, c, g, or t
cgggcagtgccaagctaaaattaaccctcactaaacgggaataagcttgcggccgcatacgcggtcnnnnnnnnnnnnnnnnnnnnnnnnnnnnnnnnnnnnnnnnnnnnncccaagtatagactttatgttttatttattccattgaaaatcccaagttccttcatggcaaccctccctctgccctcacaccccagcaggtccccgcaggccagggcccatgccccacctgcccacgggtctggcccccaggccaccaggggcccgctgcgtcctgtctcacacacaaggggtttaactcaacgctatgtacattcacagttccgaatatccgccaactctaagtcgccacgaagagaaaagagaatcaggaggaacaaacatccattcaaagtctgtttatcagagatttttttttctgaaaatgcacagtggcatttcattcaaaaaacccttcatctgcagacctgcggaagggaggtggcctgggtcccttccctcggaatatcttagtttatttacctccttcattggccatttgcaggctcttctccttgaaaaatgaatctttacgcattctccaattataaaatcagtgactgttagctaccaaaggctgcactaggatttcttctgtgtccaacacgccaagagccctgaaattgacttcggtttactccatccctgtctgtcctgctggcagtgtccatgctaaaaaacaagtcgaggtgattgattgaaacggagctgaaggttgtttttaaatgtctgtcagtggagaaacgcgtatcacgaatctctgaggaagttagtaaacattttttcccgtacttactggccttggtggtcactttctatagagatgccccaaatataaaaatcaattcatttcagaaatcaaaaaaattttccaaacaaacccggagcctttgctttaggaagcaaactcaagtctgtgatgattattgtgcttgaaggatgggtttctaattctgtcataaaaaatgatgaaacaaggtgatgtcagagggacttcaggtgacaccaaaataccccatccagggcctggaagcccctctgcctttgactctaagatggggcaggacccccgctctcagtgggatgtgcccgcgaccctggcgctgggaggcagtgctgcagagaggagtggtgtccgcacggctgtcaccagacatcctcatcaccctccgcaccgcacagcccagcgtctccttccacaagcaaaagactgcggctcctctctctgcaggaaggtcagccatactcaggtggctgcgtcacgccagtcaccatggaaaccagggctgacaggaagatgcagccgcttccagcagggacctggcctgagggcaagggaggagcggcacggcggcggctgccttgcgcttccagctcgggccctgctcatttgaaccatatcccacctcggactggagtttaggctacagtgaaatggattacgttatgccgaaaccagtaacatccaactgcccacgtttataacataagaggggactggaaaaggattaagaaaagccgtaaaaagtgttcttggggctaggcccttgagttcacacctccccaggggacccagcggaaggagagggattacctgctggagagaggcctgatggaaatttaagtccaagccccaacagcctcagattctatatnnnnnnnnnnnnnnnnnnnnnnnnnnnnngaccgcgtatgcggccgcaagcttattccctttagtgagggtaattttagcttggcac

SEQ ID NO: 123633 - DNA, 598 bp, Homo Sapiens
caactaacgtgcaaatctgtagtccctaatgtagccttttgctatctgacatctgtttgacatatgctttgtcaaattgattcaactcaaacttgaatacttatgttttgccaaatttgtgtgatcacattgtgttactaatgtgtaacatcagcctgtaacttcagccacctactttttatttgtggatgctgcttagaaacttgcaaataacactatgaatatgtggagttccttgactgtccactctgttgtccctttagagagtacattacatgcacatttcttgtgtattttctagttcaattagaattcctccgttctttccagccaattataaaggttttaaaggaactattcaatgcaatgtatttccataaagtttagtacctatgtactttctcttgggagtggggagttggcgaggggagtcatgaatttttggcaatgttaagtagtatcttattgcccatatttttcgcatgtctaaatgccaaattttgtgatgtattttgcacaaataactcattactctgaatcttaagtagtgctttatttgccctcacaatgttgccctttataaattgataaatttatg

SEQ ID NO: 123634 - DNA, 1111 bp, Homo Sapiens
  misc_feature (905)..(905): n is a, c, g, or t
  misc_feature (1031)..(1031): n is a, c, g, or t
  misc_feature (1033)..(1033): n is a, c, g, or t
tttttgaagctgaccaaaaaaggcaactatatttaaagtaaatgtatgtgattcttgtcacaacaaatatttgcattttctcagcggcagctgcgggacctgggtggctccgacacgccaggcccgggaaggacccggcaccctcccctgaacttcctggctactcatttccagcgaagtttaatctatttttaataatcgttcagttttcaaggaaatggaggagctgttttttcccacggagcggcggccctgggaggggccgggcccagaggttccggccgcgatgccgtcagcgccttcggcagagtgactgaagcgagatttcgttctcagaagtgagatgccacgatttcgagggaccagggaggaggcggcgccgcggggccacagcccagccccgcgccccgaccgcgtcacagccaaagccccgccggggtgcgcgctgcagaggggacacgccgctcatcaactggggcagccgcggtcggtcggccggtggcgggcggcagggaagaggtggggtccgggacagccacggagcccggagtcacccgcgaggccgccccggtggtgcgtggggggcggcgcggggcgcggccgggcgctcaaaactcctcgtgcacgctgcgcgcgtagtccaccagcttgctgcccgtgaagactcgctgtacttgagcacctcctcgggctccaggtggtggttctggttctcgtcggcgacggcgatcatctgcttgggctcgttcagcgcgttgtactcgttcatggggtccatgtagctctccagctcctcggcggtcacgatgccgtcgtggttggagtcaatgagctcctcaactcttttttctgtctttcaccagtttgtcgtcatgtcctggccctgctgggtctccacggtgccnacgggcagggagatgactcgggcacagagagctgctgtcacgtcctggtcaggtccggacgattccttcacatgactgagcatcccgggtgtgtcgggtgaggacgacagactctcctcgtcacanangtcgcagggggctgtcgctgtacaacgtctcagtctccagactctggttctcgcactgagtctcgtgagctgaggtcg

SEQ ID NO: 123635 - DNA, 1940 bp, Homo Sapiens
cgagggagccgtttgcccccggaacttcgctgggtctcctcactgtcccggccgaaggacaaatctaatttcttgaagaagccgttcaagtttgccaagggaaactgggggaagctggtttttcgccaagggatgcggcggccctgggatgggccccgggcccagaggtttcggccaagtatgccgttcagccctctagggcagaagggaccgaagcaagattcggtttccacaagggggatcttcccgatttggaggacccagggaggagttgtccccgcggggccacagcccagccccgcgccccgaccgcgtcacagccaaagccccgccggggtgcgcgctgcagaggggacacgccgctcatcaactggggcagccgcggtcggtcggccggtggcgggcggcagggaagaggtggggtccgggacagccacggagcccggagtcacccgcgaggcccgccccgggtggtgcgtggggggcggcgcggggcgcggccgggcgctcaaaactcctcgtgcacgctgcgcgcgtagtccaccagcttgctgcccgtgaagaactcgctgtacttgagcacctcctcgggctccaggtggtggttctggttctcgtcggcgacggcgatcatctgcttggcctcgttcagcgcgttgtactcgttcatggggtccatgtagctctccagctcctcggcggtcacgatgccgtcgtggttggagtcaatgagctcctcaaactccttttttctgtctttcacccagttgtcgtcaatgtcctggccctgctggttctccacggtgcccacgggcagggagatgaactcgggcacagagagttgcttgtcaccgtcctggtccaggtcccggacgatctccttcaccatgaacctgagcattccccggctgtgctcggggtggaggaacgacaggaactcctcctccgtcagcagcaggtctgcaggggggctgtccgcctggtaccagcggtccttcaggttctccaggacttcctgtgtttcctcgtccactttgagttcctcgttgagcctgatggcgtcggcaacctccttctcgctatggcctttactcgccaaaaacttcaccttatactcgtcccaagacacgtgaccgtccccgtcagggtccacggcgcggaagtgtgtcttgctctcctccatggcctcctggaagtgctcggccgtcttctccatgatccagcgctgcatctccttggcactgatcttccggtcagtgttcacatccaccttggaaaagatgaccatcagcttcctccggctccgccgcggctccgcgtcctcatcaaagccacccaggtccttgcctaggaagacctcctggtggaagccgcgattgaggtgcccgtccatctccagcttcaccccgttcaggtggtctgggggcaggatctcattctcctccctgttggctactctctctcgagtggacgagtggttggcaggccgtgcagacgcgtccatcagaaggactgcccccaggagccagaggcagcacggagccaggccaatgaggggaccccacctggacgccatcgccacccagggccagaccatggggcgggctgcagggtgtgggccaggtgctgggaggggcaggggcaggggcagaggaggaagtgaggtcctggctccaatccaatccccgggcaccacggagggctctgtgtccccaggacggccgcaggatggggacaagcagctcacagtcggtctgcctccccgcgctcgggatccgaggaccggagcgaagcgtcagtgacgccgccaacgggcccggatcaggccactgccatctttcttgcgggcgggggcggtgcgaacgggcgcgacctcacggaggggacgccggcgccaccatctctcctccgggcctcgtgccgaattcgccacccaggcc

SEQ ID NO: 123636 - DNA, 1152 bp, Homo Sapiens
cccagcgcaattctcctcctggaaagacgatccacgagaaaagagcctctccagaaattgccactatggagattttgtttaataaaagcgatgtcggtttgcacgcccgggagagttattttatctggggtgggagatccccaagcctctgtatgcatgtgagccaaggtttttccttaggggaaaacaacgtttggggcccaggttttccattttcctgacgggggccccgcggcggccaagggaaatggttttagaaaagcttttttgaaggggccgagggccggcccgacaaggtgcatgttttcgcaagtagtgcagaatgggtttcgcgtccatggcgacatgttggttgttcctcgtccctccttctcaattttgtgggttcgtttcttcttctttgagcctgtgggcctgcccgggccccttttttcctggcttcacttttgcccttggcacgatatgcagccatatccttttcatatttctcctttagcttagctgctttctgttcatatggttgtttatctttggctgactgctcagaccacatttcacccaatttctttgcagtatccccaatggataggccagggtgttcacttttgatctttgggcgatgttcagagcaaaacaggaagaaggcagatggtggccttttaggagcattggggtcctttttcttccccttcttatcacctttgggaggaacgtaatttttcatctccctgtcatagcgagctttgtcactttttgccatatcttcaaacttcgacttctcctttgcagacatggtcttccatctctccgaacacttcttggagaattccgcgaaattgacggaagagtccgggtgtttcttcttgtgctcttcccggcaggtctgcacgaagaaggcgtacgaggacattttgccccgcggcttgttggggtctcctttacccatgttgacagatccgcgtccacctggtgcgagcttttcctcagagtcccgcagagcggccggacccaacggagacgcttccctcacggggctccggcgtgaactggtttatctctaacgcaatcctcagcctcttgttttgcagagttctccgcgccccccggccgtaatggccgaattcccgggcatatgtccggtaccgtcgactg

SEQ ID NO: 123637 - DNA, 1190 bp, Homo Sapiens
tttttgttcttcaaatggcttttttaaagtgaaaattaacttagcatattaagacaaagacaatagaaataatatacataattttattacaaaattttttttaaaaaaacgaaatgcaacatcctaaaaaacccaaaatttactattgatactaattcctacaagtttgctgtgctaccatacacaagaaattaaaaaaaccattaaatatttaggaacattcaacatcagaagctgtaaaatctaactgtatgagtagcccatcaaaaagctacaacctgcattttttaaaagtattttctctacagagaatcttatcagctatacaaaaatctgtacagtttttatactgaagctagtattgagctgcacttgaattcacattcttagcaaaataattgcctgagcacacacacacattccacacgcatcattaaaggatagccatttattcttcatcttcatcctcttcctcctcatcttcatttttctttttcctcttcctctccctcattttctggttcgttcttcttctttgagcctgttggcctgcccagggcccttctttcctgcttcacttttgcccttggcacgatatgcagcaatatccttttcatatttctcctttagcttagctgctttctgttcatatggttgtttatctttggctgactgctcagaccacatttcacccaatttctttgcagtatccccaatggataggccagggtgttcacttttgatctttgggcgatgttcagagcaaaacaggaagaaggcagatggtggccttttaggagcattggggtcctttttcttccccttcttatcacctttgggaggaacgtaatttttcatctccctgtcatagcgagctttgtcactttttgccatatcttcaaacttcgacttctcctttgcagacatggtcttccatctctccgaacacttcttggagaattccgcgaaattgacggaagagtccgggtgtttcttcttgtgctcttcccggcaggtctgcacgaagaaggcgtacgaggacattttgccccgcggcttgttggggtctcctttacccatgttgacagatccgcgtccacctggtgcgagcttttcctcagagtcccgcagagcggccggacccaacggagacgcttccctcacggggctccggcgtgaactggtttccc

SEQ ID NO: 123638 - DNA, 905 bp, Homo Sapiens
  misc_feature (158)..(158): n is a, c, g, or t
tgtatttggaagctggccaacttggaatttccaccatttctttaggcaaaaaataaatttgccttgagccacaacacaccacatttccacaacgcatcattaaaaggatagccatttatttcttcatcttcatcctcttcctcctcatcttcatcttnttttttcctcctcctcctcctcatcttctggttcgttcttcttctttgagcctgttggcctgccagggcccttctttcctgcttcacttttgcccttggcacgatatgcagcaatatccttttcatatttctcctttagcttagctgctttctgttcatatggttgtttatctttggctgactgctcagaccacatttcacccaatttctttgcagtatccccaatggataggccagggtgttcacttttgatctttgggcgatgttcagagcaaaacaggaagaaggcagatggtggccttttaggagcattggggtcctttttcttccccttcttatcacctttgggaggaacgtaatttttcatctccctgtcatagcgagctttgtcactttttgccatatcttcaaacttcgacttctcctttgcagacatggtcttccatctctccgaacacttcttggagaattccgcgaaattgacggaagagtccgggtgtttcttcttgtgctcttcccggcaggtctgcacgaagaaggcgtacgaggacattttgccccgcggcttgttggggtctcctttacccatgttgacagatccgcgtccacctggtgcgagcttttcctcagagtcccgcagagcggccggacccaacggagacgcttccctcacggggctccggcgtgaactggtttatctctaacgcaatcctcagcctcttgttttgcagagttctccgcgccccc

SEQ ID NO: 123639 - DNA, 962 bp, Homo Sapiens
  misc_feature (165)..(165): n is a, c, g, or t
  misc_feature (168)..(168): n is a, c, g, or t
  misc_feature (186)..(186): n is a, c, g, or t
  misc_feature (192)..(192): n is a, c, g, or t
  misc_feature (195)..(195): n is a, c, g, or t
  misc_feature (198)..(198): n is a, c, g, or t
  misc_feature (214)..(214): n is a, c, g, or t
  misc_feature (222)..(222): n is a, c, g, or t
  misc_feature (318)..(318): n is a, c, g, or t
tttttccggttatatcaaaaaatttcggtaccagtttttaattcctgaaggttaagtattggggctggcacctgaaattcacaattcttagcaaaaattaattgcttgagcacaacacacccattccacagggcatcattaaaggatagccatttattcttcatnttnatcttttcctccctcatnttcatnttnttnttctcctccctcctcntcattttntggtcgttcttcttcttgaagcctgttggcctgccagggcccttctttcctgcttcacttttgccctgggcacgatatgcagcaatatccttttcnatatttctcctttagcttagctgctttctgttcatatggttgtttatctttggctgactgctcagaccacatttcacccaatttctttgcagtatccccaatggataggccagggtgttcacttttgatctttgggcgatgttcagagcaaaacaggaagaaggcagatggtggccttttaggagcattggggtcctttttcttccccttcttatcacctttgggaggaacgtaatttttcatctccctgtcatagcgagctttgtcactttttgccatatcttcaaacttcgacttctcctttgcagacatggtcttccatctctccgaacacttcttggagaattccgcgaaattgacggaagagtccgggtgtttcttcttgtgctcttcccggcaggtctgcacgaagaaggcgtacgaggacattttgccccgcggcttgttggggtctcctttacccatgttgacagatccgcgtccacccgagggtattggagggtattcttgcctggtgcgagcttttcctcagagtcccgcagagcggccggacccaacggagacgcttccctcacggggctccggcgtgaactccccggccgtaatggccgaattcccgggcatatgtccggtaccgtcgactg

SEQ ID NO: 123640 - DNA, 1086 bp, Homo Sapiens
  misc_feature (108)..(116): n is a, c, g, or t
  misc_feature (967)..(1001): n is a, c, g, or t
  misc_feature (1005)..(1044): n is a, c, g, or t
tagtagcggtcctgcgacgtgtatcttatgtacaaagtgtcttcttagaagaagaaatatattatttcaggtcataaataatcagcaaacatacaactgtggcaactnnnnnnnnncccaacactggtattttccatcagtgctgaaaacaaacctgcttaagatatatttacaggatagtacagtactcaaaaacaaaaattgaggtatttggttcttctaggagtagacaatgacatttgtgaaggcagacacctacacaaaaataaataaggtatattctcatatgtatatgtgtcgtcgggaataatactggtaggtatgtcaagcatgaagagattctacaaaatacaggggcgagcaaaaagaaaccggatcacacactgagtcctttctcttcttgccccattttgtcagatggacttgatgtacccactatatattggtcccgaatgtgctgagttcagcaaatgtcttgacgctaagtcatcaccataactgcttagaaacccatgaggaactcgggtgaagttaaataaataaggaccagccctctcgagcccctcccagagttattgcatttctcctctcaaggagcatggagtcccaatgggatgtgaagagcctcacctcccgtggcctttcagcagctgggagaggtcgtaatggggctctgaaggtagctcagcgcactgttcgtggagtggacagggatggagacggggaagttgaacacggtggtggtggaggtgcctcggtcgagcacagccatggcggggctcccagcctctgccgaacagtgcggagccagcacctgggactcaaactgcagcagctggcccatgaagctgaagttgggagagatgatgcttcgcctctgcttcacaaactcaaaggcctcgtccagcttgactcgcccggccgtaatggccgaattcccgggcatatgtccggtaccgtcgactgnnnnnnnnnnnnnnnnnnnnnnnnnnnnnnnnnnncggnnnnnnnnnnnnnnnnnnnnnnnnnnnnnnnnnnnnnnnncaaatacgcgctagcgccctatagtgagtcgtatacatcctt

SEQ ID NO: 123641 - DNA, 1475 bp, Homo Sapiens
  misc_feature (220)..(228): n is a, c, g, or t
  misc_feature (1366)..(1400): n is a, c, g, or t
caattttaccatcaacgggcgcgctgccggcgccacagctgctggcaaggatcggaattttctgggaatcgtcgacccacgcgtccgtttcaatagaaatgccataatttattccattgtataaaaaagtcatccttatgtaacaaaatgtcttcttagaagaagaaatatattatttcaggtcataaataatcagcaaacatacaactgttggcaactnnnnnnnnncccaacactggtattttccatcagtgctgaaaacaaacctgcttaagatatatttacaggatagtacagtactcaaaaacaaaaattgaggtatttggttcttctaggagtagacaatgacatttgtgaaggcagacacctacacaaaaataaataaggtatattctcatatgtatatgtgtcgtcgggaataatactggtaggtatgtcaagcatgaagagattctacaaaaaacaggggcgagcaaaaagaaaccggatcacacactgagtcctttctcttctgccccattttgtcagatggacttgatgtacccactatatattggtcccgaatgtgctgagttcagcaaatgtcttgacgctaagtcatcaccataactgcttagaaacccagaggaactcgggtgaagttaaataaataaggaccagccctctcgagcccctcccagagttattgcatttctcctctcaaggagcatggagtcccaatgggatgtgaagagcctcacctcccgtggcctttcagcagctgggagaggtcgtaatggggctctgaaggtagctcagcgcactgttcgtggagtggacagggatggagacggggaagttgaacacggtggtggtggaggtgcctcggtcgagcacagccatggcggggctcccagcctctgccgaacagtgcggagccagcacctgggactcaaactgcagcagctggcccatgaagctgaagttgggagagatgatgcttcgcctctgcttcacaaactcaaaggcctcgtccagcttgactcgattagtcctcataaggtaagcaaggcagatggtggctgaccgggaaatgcctgcctggcagtggacaaacacccttcctccagcattcttgatggagtctatgaagtcaatggcctcgttgaaccaggagctgatgtctgccttgtggttgtcctccacagggatgctcttgtactggtagtgaccctcaaaatggttgggacaattggctgagacgttgatcaaggcagttatgcccaaggcatccagcatgtccttgcgggaagcgtgatacgcactgcccaggtacccggccgtaatggccgaattcccgggcatatgtccgggtaccgtcgactgnnnnnnnnnnnnnnnnnnnnnnnnnnnnnnnnnnncgccggcttcctcgctcatctacttcgctgcgctcgtcgttcgaaatacgcttagcccccataggatgattcatt

SEQ ID NO: 123642 - DNA, 1124 bp, Homo Sapiens
catttgggctgtgtgtgcgacgcgggtcggaggggcagtcgggggaaccgcgaagaagccgaggagcccggagccccgcgtgacgctcctctctcagtccaaaagcggcttttggttcggcgcagagagacccgggggtctagcttttcctcgaaaagcgccgccctgcccttggccccgagaacagacaaagagcaccgcagggccgatcacgctgggggcgctgaggccggccatggtcatggaagtgggcaccctggacgctggaggcctgcgggcgctgctgggggagcgagcggcgcaatgcctgctgctggactgccgctccttcttcgctttcaacgccggccacatcgccggctctgtcaacgtgcgcttcagcaccatcgtgcggcgccgggccaagggcgccatgggcctggagcacatcgtgcccaacgccgagctccgcggccgcctgctggccggcgcctaccacgccgtggtgttgctggacgagcgcagcgccgccctggacggcgccaagcgcgacggcaccctggccctggcggccggcgcgctctgccgcgaggcgcgcgccgcgcaagtcttcttcctcaaaggaggatacgaagcgttttcggcttcctgcccggagctgtgcagcaaacagtcgacccccatggggctcagccttcccctgagtactagcgtccctgacagcgcggaatctgggtgcagttcctgcagtaccccactctacgatcagggtggcccggtggaaatcctgccctttctgtacctgggcagtgcgtatcacgcttcccgcaaggacatgctggatgccttgggcataactgccttgatcaacgtctcagccaattgtcccaaccattttgagggtcactaccagtacaagagcatccctgtggaggacaaccacaaggcagacatcagctcctggttcaacgaggccattgacttcatagactccatcaagaatgctggaggaagggtgtttgtccactgccaggcaggcattgtcccggtcagccaccatctgccttgcttaccttatgaggactaatcgagtcaagctggacgaggcctttgagtttgtgaagcagaggcgaagcatatgtctc

SEQ ID NO: 123643 - DNA, 1497 bp, Homo Sapiens
  misc_feature (218)..(218): n is a, c, g, or t
  misc_feature (671)..(723): n is a, c, g, or t
aaagggccactggtgaatttttaccccggaaaaaaagtccccggggaaattttcggcagataaaccccaggaaagagaaccccgccagtataccattaatgtccaaccgaatcccccttcatggagagggaaagccggtaggaaaaaaggcaaggaggaatgaccaagggggctctaaaccccttccacacttgcaaaacatttcagaccttttgggntttaaacgcaaaactttaaagggaagcctttccaggagggagaggacccaaatggaatctgaggcaggctcaggtgatcaaggagccacaggaagaactccaggctggcaggcgagccccgagggagctcaggctgcccacccactgctggcaggatcgccaggacggatgggaatcccgaaacctggagatgaacctaccctcggcaactttacaagactcccttgacaagggtggcagagattaaaaaaccccacgctttaaacaaacatctttgggggtggctatggcaccttgaaaaacccacaaccagcttgacatgaatggccaaagcccttgcccaaaaccatttgctcccctctccttggtaagggaaggagaactggagagaagggaaaggaatctaaattgcagcagaagaccggggagagcatctccttggacggagtctgnnnnnnnnnnnnnnnnnnnnnnnnnnnnnnnnnnnnnnnnnnnnnnnnnnnnnatttcacgatatggagccagcgtgttccgattccgtccacaaaaataactcaggctgctttgccgaaccatcctgtccaccaggggcgttgctgaggctgtctgcctggaagggtcaccaatgggcgcggaaagtcctcactctcatggctcgggccatcgccgccgcggggagggatctttgctgccatggcaagggggtactggaagccatactgctgctgggcggagggggtggcggaggctgctgctgctgttgttgccatgggggaagaggaccagagggagggggtgggggctgcccactgggaggcggcggcggcggcggcatcatgcccataggtggtggcggcatcataccttttccttgatgcaggcgatagaccccagagcccacaggcgtacttcccaggtactgatcttgatggaaggaaagagcagggaccattggaggagggccatggtgcccaggagggtgggggccctggttcatcggtggtggtggtggctgcatccaagggggtgggggtccattggggttgtgctgcatgggatgtccaccatgcccacctgtcaggctgggtaatgggtgtgggaagctgtgggggccacctccgggcccaccaggaccacctccatgcatgccgtggtagggccgactctctgaagggccagaattcatccagggtgggcggctctgggtggtagacatgagagaccctcgtgccgaattcgccacccaggcctcgctaccttaggagccgttttgcggccc

SEQ ID NO: 123644 - DNA, 859 bp, Homo Sapiens
  misc_feature (655)..(687): n is a, c, g, or t
ttcccgtaatttgcatcaccttttattctcagtttctttggccgtggcgccccaagtgatttggtatattctgtgatctgactttcactcacagtgtgctgagttttaattgcagtggctgaatccgatgagtgcaacctctcttgatgagttgtgcgctctcttccagcttttgcgggtgcgaactctcgggtgttaagccgcttcccctcgctattgtagatgggctcaggggaaggggacctgtccctcagggttaggggggatgcccaggtctcctgtgcgcagtttacgagtcaggtcttctatctgcagttgccctatataagctctttcttgttctcgagtaagtccagggggaataactgtaggcattcctggaatcactgtcttctgttccattgtgtcttggttccagcggctcctcttccgcttcttacttgggaagtccaacggcgtggcgttcgctccggtcgccatggcgcccccggggacaggcaccggcacctgcttttcctctgcggcggcttctccttcgcaagcctcccggggggaggggacccgaatgcgctgccggagcgcgcggagcccgtcctctcacgcggcgggcggcggcggcgcgagacgcacaaagagggaggagagagggcaccgnnnnnnnnnnnnnnnnnnnnnnnnnnnnnnnnntggattgggccgggccgaggcgaagggtcgaaatcggcggcctccgattggcggagcctcagtccttcttgatgcgcgctgggattggccgaaccgttaggccaagcgaggaaatggcggcggagttcggtgggctgggaggtgtcgcagacagcgcacttcatttgttact

SEQ ID NO: 123645 - DNA, 1643 bp, Homo Sapiens
cgctcccctgagcgcaggcggcggcggcatcatgcaccattaggtggtggcggcactcatacctttgtccttgatgcaggcgatagaccccagagcccacaggcgtacttcccaggtactgatccattggaggaggccatggtgcccaggagggtggggccctggttcatcggtggtggtggtggctgcatccaagagggtgggggtccattggggttgtgctgcatgggatgtccaccatgcccacctgtcaggctgggtaatgggtgtgtgtaatctgtgggggccacctccgggcccaccaggaccacctccatgcatgccgtggtaggtccgactctctgaagggccagaattcatccagggtgggcggctctgggtggtagacatgagagacggtggaggtgggtttgttggcgggagcagcaggacgaggtgcgctggccaggggttgtggtggcaggcccagaggtggagcccacagatgctgggacaggtgcttcacccagttcagccatgagggacaaatattctttatccatccgtgctttatcctgagctgactgaggatcaccaggcctttggaatttacagtctgaagcaatgtggccagcccctccacacttggtacacactgtggtgttggtaatgctgcgggtctctgagctctgccagggtcttaagatcctgttatcgtcttcccgaagggtcccatttaagcgagccaactcccgaagctgcatcttccgtagatcattctggtcctctggagtctcgataccctgcttcaggatgtttcttatctgttccactgcctttttgacgttctccattgtattggcagtaaccagggcatgaagtggctcatcttctcctggcaacatctggccatctttgcgcccaaccttcccttctttcacagaccctttcccccggatcataatcttggcattgcactccttctctatgttcttcagggtgttccctctgggcccgatgagcagccccacaaagttgatttctgggtactcatcttgtggaatcatgactttatcactcacacgtgttgctggaggtttgtaatctgcaggtggcttgaaatccggattgagtgcaaccatctctgtgatgaggttgtgccgctcctcttccagctttttgcgggtgcggaactctcgggtgttaagccgcttcccctcgctattgtagatgggctcaggggaaggggacctgtcctcagggttaggggggatgcccaggtctcctgtgcgcagtttacgagtcaggtcttctatctgcagttgcactatataagctctttcttgttctcgagtaagtccagggggaataactgtaggcattcctggaatcactgtcttctgttccattgtgtcttggttccagcggctcctcttccgcttcttacttgggaagtccaacggcgtggcgttcgctccggtcgccatggcgcccccggggacaggcaccggcacctgcttttcctctgcggcggcttctccttcgcaagcctcccggggggaggggacccgaatgcgctgccggagcgcgcggagcccgtcctctcacgcggccctcgtgccgatttaacaccccaggcctcgctacctagccctatatgtttc

SEQ ID NO: 123646 - DNA, 1545 bp, Homo Sapiens
  misc_feature (62)..(197): n is a, c, g, or t
  misc_feature (222)..(268): n is a, c, g, or t
  misc_feature (279)..(411): n is a, c, g, or t
  misc_feature (1096)..(1143): n is a, c, g, or t
atttccccccctcttcccataattccccgggcggggggaattttaaatttgaacccgctggnnnnnnnnnnnnnnnnnnnnnnnnnnnnnnnnnnnnnnnnnnnnnnnnnnnnnnnnnnnnnnnnnnnnnnnnnnnnnnnnnnnnnnnnnnnnnnnnnnnnnnnnnnnnnnnnnnnnnnnnnnnnnnnnnnnnnnnngccccttttcctttccccttggggnnnnnnnnnnnnnnnnnnnnnnnnnnnnnnnnnnnnnnnnnnnnnnngcccccccaannnnnnnnnnnnnnnnnnnnnnnnnnnnnnnnnnnnnnnnnnnnnnnnnnnnnnnnnnnnnnnnnnnnnnnnnnnnnnnnnnnnnnnnnnnnnnnnnnnnnnnnnnnnnnnnnnnnnnnnnnnnnnnnnnnnnaaaaccacactgctcttttattcaatggaacatccccgctttagcgcagtgttgaatctaacaccgaaaaaagcccagagaaatttctgcagataaaccagtgaagagaacgcgcagtatacattattgtcaacagaatcacttcatggagagggaagcgggaggaaaaaggaaggagaatgaacaaggggctcaaacccctacacactgcaaaacattcagacatttgggattaaaacaaaacataaaaggaagccttccaggaaggagaggaccaaatggaatctgaggcagctcaggtgatcaaggagcacaggaagaactccaggctggcaggcgagcccgagggagctcaggctgcccacccactgctggcaggatcgccaggacggatgggaatcccgaaacctggagatgaacctaccctcggcaactttacaagactcccttgacaagggtggcagagattaaaaaaccccacgctttaaacaaacatatttgggggtggctatggcaccttgaaaaacccacaaccagcttgacatgaatggccaaagcccttgcccaaaaccatttgctcccctctccttggtaagggaaggagaactggagagaagggaaaggaatctaaattgcagcagaagaccggggagagcatctccttggacggagtctgaagaaaggnnnnnnnnnnnnnnnnnnnnnnnnnnnnnnnnnnnnnnnnnnnnnnnntcacgatatggagccagcgtgttccgattccgtccccaaaaataactcaggctgctttgcccgaaccatcctgtccaccaggggcgttgctgaggctgtctgcctggaggggtcaccaatgggcgcggaaagtccctcactctcatggctcgggccatcgccgccgcggggagggatctttgctgccatggcaagggggtactggaagccatactgctgctgggcggagggggtggcggaggctgctgctgctgttgttgccatgggggaagaggaccagagggagggggtgggggctgcccactgggaggcggcggcggcggcggcatcatgcccataggtggtggcggcatcataccttttccttgatgcaggcgatagaccccagagcccacaggcgcc

SEQ ID NO: 123647 - DNA, 972 bp, Homo Sapiens
ccacacactgggccatttcggagaaccatgaccggcgaagttctccggaagccgttccaggacttaatacccaagtggagccaaccacatcaatttcgtaatcctggatccaaccaactcaggaatcttccctccatatgtatcagaaactgggatctcttcctttatctgtacggaactttaagagcacttgaaggagaaagtagtcggaggtcgtgcgcttcagagcagcctttgctttctcactgctccagtccacctccagggcttctttaacagggcagaagaccaccttctttttgaccatcgttgtctcagaagaatcaagttttgctctcttggtgtcgggcccatcttctactccttggctaactttggcaactttagttttctcctctacaaactcatgctctcctagattggcaaatgtgtatccatggtagccaaaaacatctcctgtaaagaacttgatgctatttttgtgacagatctggtcaactttaactatgacatccctggagcagcaagtcagacacacagcatcgaattgagtgaaaaatgactctggtttcttctctatatcctcagtgtccaccttcacatccaccatggggttgagattctgagctcgctccaaagaggcttcagccctatttcggccaacagacccagtacgaatcaagaactgagctccgggatcttctggagttacctgttcgtgatccagcatggtcagtcctttcactcctgccaagatgagattcttggcaatttcagccccaagtcctttcaagccgacaagaagcacccgagaggcccgcagccgtttctgggcctccagtccccacaggcggatctgccggtcatactgtgccgcctcctcctcgctaatgccgccgccagcctcctccttctccaccatggcgccggctcttcctcgtgccgaattcgccacccaggcctcgctaccta

SEQ ID NO: 123648 - DNA, 815 bp, Homo Sapiens
ttcccgtaccagggcagaagaccacctttgttgaccatcgttgtctcagaagaatccagttttgctctctttgttgtcgggcccatcttcctactccgttggctaactttggcaacctttagttttctcctcttaccaactcatgctctcctagattggcaaatgtgtaactccatggtagcctaatacatctcctgtaaagaacttgatgctatttttgtgacagatcctggtcaactttaactatgacatccctggagcagcaagtcagacacacagcactcgaattgagtgaaaaatgacctctggctttcttctctatatcctcagtgtccaccttcacatccaccactggggttgagattctgagctcgctccaaagaggcttcagccctatttcggccaacagacccagtatcgaatcaagaactgagctccgggatcttctggagttacctgttcgtgatccagcatggtcagtcctttcactcctgccaagatgagattcttggcaatttcagccccaagtcctttcaacgccgacaagaagcacccgagaggcccgcagccttcccgctccttccgggcggcaaacgcctcagaatagacgccccctccagaccctcgcggcctcaagccgcgccggccctgaccgtttctgggcctccagtccaccacaggcggatctgccggtcatactgtgccgcctcctcctcgctaatgccgccgccagcctcctccttctgcaccatggcgccggctcttcgtgcccctcgtgccgaatttacacaccccaggcctcgtacctagcctat

SEQ ID NO: 123649 - DNA, 2450 bp, Homo Sapiens
tacataaagaagaaacacaagcaagagtggggtgaactggaacgcactttggctgcatcaaggcaaacctggtcttccaataaaagctctgacccgtagcggctgtggcacttggggcatatgaagcatcacttttgacttccctttattattataattcttgccactgaaaatagccactatttagctgaattatccattagacaactggagccagaagcttctacacattctagaatgtgaacaatttaactcttgctgcatcacccagaaaaaatggtggcaggaatggtgagggagaggaggaatctcttgagttagagcctcaggtctgaaaaggcaactggtaggatcatcccattccctctcagaagcttctgaagtggaagaaaaacaagcaaatcctaaagcaagtaactttattatcattcctttaaaaagaaccaaggaaaattcacaacatatgtgaaacacaaacagctgtggtttaggaggtaaacaaaggaccaacatagccctgaaatgcaacagcctctgagtgacttgagccgcatgtgactggggttctgttaaaagggcaggctcctccctcctagccctgaagccccaggaacctgccttgaaagacaagctctctaatactcaacttgcagggtctcgccctaacatccaagacttggtagcatctcctttctcccaaaacccagctggaactcaactaatcctaaacgaaaactcaagaacagcacaccagatgccacctgttgtttgtcagggtctcaaactccagaggaaatgcatttgcctgtcatggttttcctctctaagggcacctgtctgaacttggagctgtgcttccactggtgcctcatggggcctgggcctactctccacctgaattcacacttttctctataaggtatcaggtggggaataagtccaagaaggtgacaagaggctcccgagcaacagagcttgctcattcctggcaggcatctcccacaatgccccagagggctggcgaggccgggacagcataaggacagagaaagggcagaggggtgcttggaagtgctcatcactcaggggagctggcaggcccgggatgacaggcagcctgaacagtgctggaacaaagacagccaccctgcgccccttgtcgagcagctgctggtgatgggaagcagcacgtcggcaccacctccttcgttgcaggaaatgttttgtatcgggccaatgacttcagttttccttgcctggagatgccttcatgaaggaaggggacagggaatacaggtgggcatgctgcagttggcatctctggggctgccaaatcttgagttcacttggggccaaggcactccacaatcccattccccttcatgccatcgaagaagaagaagttgttgtgaggagggtcccgctgagacagggccttcacaatttcctgtgccaaaatccctccaaccaccgcacacactggggccatctcggagaagcagtacctgacaaagtcctcaggaagcaggtcaggactaatacccagtgagtcaagcacatcatttcgtatctggagcaacaactcagaatcttcctcatatgtatcagaactgggatctcttcctttatctgtacggaactttaagagcacttgaaggagaaagtagtcggaggtcgtgcgcttcagagcagcctttgctttctcactgctccagtccacctccagggcttctttaacagggcagaagaccaccttctttttgaccatcgttgtctcagaagaatcaagttttgctctcttggtgtcgggcccatcttctactccttggctaactttggcaactttagttttctcctctacaaactcatgctctcctagattggcaaatgtgtatccatggtagccaaaaacatctcctgtaaagaacttgatgctatttttgtgacagatctggtcaactttaactatgacatccctggagcagcaagtcagacacacagcatcgaattgagtgaaaaatgactctggtttcttctctatatcctcagtgtccaccttcacatccaccatggggttgagattctgagctcgctccaaagaggcttcagccctatttcggccaacagacccagtacgaatcaagaactgagctccgggatcttctggagttacctgttcgtgatccagcatggtcagtcctttcactcctgccaagatgagattcttggcaatttcagccccaagtcctttcaagccgacaagaagcacccgagaggcccgcagccgtttctgggcctccagtccccacaggcggatctgccggtcatactgtgccgcctcctcctcgctaatgccgccgccagcctcctccttctccaccatggcgccggctcttcctgcctcagctcccctcgtgccgaattcaacacccagcctccgtactagccta

SEQ ID NO: 123650 - DNA, 913 bp, Homo Sapiens
tttcgtggtgcccaaatcccgtccaccatccgtgcacacctggggccattctcggagaagcaggtaccttgaaggagaaagtagtccggagttcgtgcgccttcagagccagcctttgctgttctgcacttgctccagtccacctccagcgcttctcgaacagggcagaagaccaccttctttttgaccatcgttgtctcagaagaatcaagttatgctctcttggtgtcgggcccatctttgtactccttggctaactttggcaactttagttttctcctctacaaactcatgctctcctagattggcaaatgtgtatccatggtagccaaaaacatctcctgtaaagaacttgatgctatttttgtgacagatctggtcaactttaactatgacatccctggagcagcaagtcagacacacagcatcgaattgagtgaaaaatgactctggtttcttctctatatcctcagtgtccaccttcacatccaccatggggttgagattctgagctcgctccaaagaggcttcagccctatttcggccaacagacccagtacgaatcaagaactgagctccgggatcttctggagttacctgttcgtgatccagcatggtcagtcctttcactcctgccaagatgagattcttggcaatttcagccccaagtcctttcaagccgacaagaagcacccgagaggcccgcagccgtttctgggcctccagtccccacaggcggatctgccggtcatactgtgccgcctcctcctcgctaatgccgccgccagcctcctccttctccaccatggcgccggctcttcctgcctcagctccggtcccgctcaagccaaccgcccgccggacccgccctcgtgccgattcaaccacccggcctcgtacctagccgtatgtt

SEQ ID NO: 123651 - DNA, 725 bp, Homo Sapiens
gtgtctccttgcgccaggtccacctccagggctttcttcacagcggcagtagaccaccgtcgttggtgaccatcgtttgtctcagtagtatcgagttgtgctctcttgctgtcgggcccatcttctactgccttgcctcactttggcgacgttagtgtgtctcctctactaactcatgctctcctagattgccaaatgttgtatccatggtagcccacacatctcctgtaaagaacttgatgcctatttttgtgacagatctgttcaactttaactatgacatcccttggatgcattcaatgtcagacatcacagcagtcagaattgatgctgaaataatgatctctggtttcttctctatattcctcagtgtccaccgttcacatccaccatggggttgagattctgagctcgctccaaagaggcttcagccctatttcggcctacagacccagtacgaatcaagaactgagctccgggatcttctggagttacctgttctgtgatccagcatggtcagtcctttcactcctgctcaagatgagattcttggcaatttcagcccacaagtcctttcaagccgacaagaagcacccgagaggcccgcagccgtttctgggcctccagtccccacatggcggatctgccggtcatactgtgccgcgtcctcgtgccgaattcgccacccaggcctcgctaccttaagaccgttagagttactgcct

SEQ ID NO: 123652 - DNA, 1198 bp, Homo Sapiens
aatggtttaaacaaagagggatttattttatttacaagaattctggagaaggatggcggctggtattggcttggtgaaataatgatagggtcaatgactctgtgattctcttggcctttttgtcatggtagcaaagtggctgctgtggctccaggcatcacaccctcaatcaaggtaggaagaagaggcccagggaggtgttagccatgcctgtgtcttttattggaaaagctttcccagaagcccaggtagacttcctcttcaatttcattggccacacctgatcacatagccatcctaagctgcaaaggagactggaacagtgaaaatctggatttacagcctccacagttggagtggctggagatacagagttgggacgacccctgaaaagtgaaccaaggtcgtctgcacggctgccctggagggcgtggtgcttgaggtcccttctacctctggggcttcatggaatgacttgttgcctccatggagcacctctggggaccactgggtgaatccccaggcattcccttggagagccctcgtccatctgagaccctctgtcttgcttctcttcacatgtctgaacaacacatggacccgagggctgcttctttggggaagtggtgatctttattttagggattgtgcatcttcagtgtaaccctcacctggcagacattaaacagcgtaaacacattctcagcacgccagtcacattcaggagcctcttggagcttgacttatacacacgcacacaggcgcaatatctgcattttacagcccctgtgctggcagcacacacaggaaaagcacgacttcagtcaccctcaaaccacccagttatgagtaagaccagaacaatccctttcctccgacagtcccacgtttgcttccaggaatcaaagagcatgccagtggcagctatctgtggcagttttgggaaagtgaaaggagatgctattccagcactgctctgtcaccttagatgatgggtttaggaagccagaggcagggatttcaggggaaaagaaacaggcctggtttattctctaattctttaaaaatgggataggagcaaaaggttaaaatatgtgggtctcacacaggaaaggccttctgaagaagaaaaatgggtgaattcactggagttggcccagctaggggttgggtctcaggtgacagaggccggggattc

SEQ ID NO: 123653 - DNA, 1221 bp, Homo Sapiens
aaggctttccctgtttccctgaggaccccttcaggggtttttgcggacttgggccttctgggttcaacactgggcacgtccagaccccaggtactctgggttctctgccgtaggtgtccctttgaaggtgctgggtggagccccccgcttctggtgggtcctggtcccagtaatagaggttgtcgaaggctgggctgaaggcaggaggagggtggggctgaggggcagcttcttccctggggtgtcaagtactcggggttctccacggcacccccaaaggcaaaaacgtctttgacgaccccattcttccctggggagagagtcttgggcctttccagagtggcaccagcaggtcgggcagcaggcagagggccctctcggggcgaagggggctggggccgaacatctggctggttcacatattcaggctgggggctgcaggtcaggggggcaacgtagccatcagtctcagagggcaggggtactgtggggtcctcactgtaccgctgtagagggctggggtcatgtgtggggaggctttgcagccccttggctgcccccattcccaggtcaccatcaaatacatcggagccagccccttcggagggtgccagtggagacctgggggcctcctcttcagagggctccagccctagtgtcaggtccccaccgccactcctggtagatgagctgcggtgcctgtggtggaccatgcccccagcgcccggggcagggtctggacagaagaagccctgctggggtaccagatactcctcagcatccaccaggtcccccatgtcatcgtcctccagcagtgagcggtagaaggtgctgtccaagggactggctgggcccaagtcctcattctggatgaccacaaagcgctgggggtccctggccatgcgggagaattcagacaccaactcccggaatcttggccgacattcagagtcaatcatccaacatttgaccatgatcatgtagacatcaatggtgcagatggggggctggggcagccgctcccccttttccagcaggtcagggatctcccgggctgggatcccatcgtaaggtttggccccaaaagtcatcagctcccacacagtcacaccataactccacacatcactctggtgggtgaaccgccggcggagaatggactccagcgccatccacttgatgggcaccttggccccatctgcatggtactctgtctcgtca

SEQ ID NO: 123654 - DNA, 114 bp, Homo Sapiens
tttttgttttccaaaatatatttgcaaatggacaaagtgggtgtggagaaggaccccccacacttgcctccccatacaacacccattctccccctgggtctttatttcatcttt

SEQ ID NO: 123655 - DNA, 1066 bp, Homo Sapiens
  misc_feature (849)..(849): n is a, c, g, or t
tggatgctgaggagtatctggtaccccagcagggcttcttctgtccagaccctgccccgggcgctgggggcatggtccaccacaggcaccgcagctcatctaccaggagtggcggtggggacctgacactagggctggagccctctgaagaggaggcccccaggtctccactggcaccctccgaaggggctggctccgatgtatttgatggtgacctgggaatgggggcagccaaggggctgcaaagcctccccacacatgaccccagccctctacagcggtacagtgaggaccccacagtacccctgccctctgagactgatggctacgttgcccccctgacctgcagcccccagcctgaatatgtgaaccagccagatgttcggccccagcccccttcgccccgagagggccctctgcctgctgcccgacctgctggtgccactctggaaaggcccaagactctctccccagggaagaatggggtcgtcaaagacgtttttgcctttgggggtgccgtggagaaccccgagtacttgacaccccagggaggagctgcccctcagccccaccctcctcctgccttcagcccagccttcgacaacctctattactgggaccaggacccaccagagcggggggctccacccagcaccttcaaagggacacctacggcagagaacccagagtacctgggtctggacgtgccagtgtgaaccagaaggccaagtccgcagaagccctgatgtgtcctcagggagcagggaaggcctgacttctgctggcatcaagagggtgggagggccctccgaccacttccagggggaacctgccatgccagggaacctngtcctaaaggaaccttccttcctgcttgaggttcccagatgggctgggaaggggttccagccctcgtttgggaagaggaaacaggcacctgggggaagtcttttgttgggattcttgagggcccctggccccaatggagaactcctaggggtccagttgggatggccacaggccccaacttggggcccctttccctttccagaatcctggggttacc

SEQ ID NO: 123656 - DNA, 1290 bp, Homo Sapiens
  misc_feature (964)..(1002): n is a, c, g, or t
  misc_feature (1028)..(1028): n is a, c, g, or t
  misc_feature (1042)..(1042): n is a, c, g, or t
  misc_feature (1126)..(1128): n is a, c, g, or t
  misc_feature (1137)..(1137): n is a, c, g, or t
  misc_feature (1220)..(1230): n is a, c, g, or t
ggaatgggggcagccaaggggctgcaaagcctccccacacatgaccccagccctctacagcggtacagtgaggaccccacagtacccctgccctctgagactgatggctacgttgcccccctgacctgcagcccccagcctgaatatgtgaaccagccagatgttcggccccagcccccttcgccccgagagggccctctgcctgctgcccgacctgctggtgccactctggaaaggcccaagactctctccccagggaagaatggggtcgtcaaagacgtttttgcctttgggggtgccgtggagaaccccgagtacttgacaccccagggaggagctgcccctcagccccaccctcctcctgccttcagcccagccttcgacaacctctattactgggaccaggacccaccagagcggggggctccacccagcaccttcaaagggacacctacggcagagaacccagagtacctgggtctggacgtgccagtgtgaaccagaaggccaagtccgcagaagccctgatgtgtcctcagggagcagggaaggcctgacttctgctggcatcaagaggtgggagggccctccgaccacttccaggggaacctgccatgccaggaacctgtcctaaggaaccttccttcctgcttgagttcccagatggctggaaggggtccagcctcgttggaagaggaacagcactggggagtctttgtggattctgaggccctgcccaatgagactctagggtccagtggatgccacagcccagcttggccctttccttccagatcctgggtactgaaagccttagggaagctggcctgagaggggaagcggccctaagggagtgtctaagaacaaaagcgacccattcagagactgtccctgaaacctagtactgccccccatgaggaaggaacagcaatggtgtcagtatccaggctttgtacagagtgcnnnnnnnnnnnnnnnnnnnnnnnnnnnnnnnnnnnnnnnaaagatgaaataaagacccagggggnagaatgggtgttgntatggggaggcaaattgttgggggggtcctttctccacaacccacttttggtccattttgcaaataatattttgggaaaacccnnntatttacgnacaccaattcttcctcgttttactacccccaccttaacaatccaagtagcgcatacatcacacgcccgtcccatattttttcnnnnnnnnnnncggccctcaaaaataatccccccgaggggggcgcccaaagtttttacgcggtaacccccc

SEQ ID NO: 123657 - DNA, 1915 bp, Homo Sapiens
  misc_feature (147)..(147): n is a, c, g, or t
attggcccccaattcccagggttcacgcgtgcagatgccattcggagcccagcccctttcgggggggttcccagtggaggacctggggggcctcctctttcaggagggctccagcccttagtgtcagggtcccccaccgccacttcntggtagggtgagctgcggtgcctgtggtggaccatgcccccaggcgcccggggcagggtctggacagaagaagccctgctggggtaccagatactcctcagcatccaccaggtcccccatgtcatcgtcctccagcagtgagcggtagaaggtgctgtccaagggactggctgggcccaagtcctcattctggatgaccacaaagcgctgggggtccctggccatgcgggagaattcagacaccaactcccggaatcttggccgacattcagagtcaatcatccaacatttgaccatgatcatgtagacatcaatggtgcagatggggggctggggcagccgctcccccttttccagcaggtcagggatctcccgggctgggatcccatcgtaaggtttggccccaaaagtcatcagctcccacacagtcacaccataactccacacatcactctggtgggtgaaccgccggcggagaatggactccagcgccatccacttgatgggcaccttgcccccatctgcatggtactctgtctcgtcaatgtccagcagccgagccagcccgaagtctgtaattttgacatggttgggactcttgaccagcacgttccgagcggccaagtccctgtgtacgagccgcacatcctccaggtagctcatccccttggcaatctgcatacaccagttcagcaggtcctgggagcccaggcgtccgcggttttcccggacatggtctaagaggcagccatagggcataagctgtgtcaccagctgcaccgtggatgtcaggcagatgcccagaaggcgggagacatatggggagcccacaccagccatcacgtatgcttcgtctaagatttctttgttggctttgggggatgtgttttccctcaacactttgatggccactggaattttcacattctccccatcagggatccagatgcccttgtagactgtgccaaaagcgccagatccaagcaccttcaccttcctcagctccgtctctttcaggatccgcatctgcgcctggttgggcatcgctccgctaggtgtcagcggctccaccagctccgtttcctgcagcagtctccgcatcgtgtacttccggatcttctgctgccgtcgcttgatgaggatcccaaagaccacccccaagaccacgaccagcagaatgccaaccaccgcagagatgatggacgtcagagggctggctctctgctcggcggggcagcccttgtcatccaggtccacacaggagtgggtgcagttgatggggcaaggctggcatgcgccctcctcatctggaaacttccagatgggcatgtaggagaggtcaggtttcacaccgctggggcagcgggccacgcagaagggagggtccttatagtgggcacaggccacacactggtcagcctcctggggggggcagaaaagatttgtggggggctggcactgacacccccagggcagtaggatcaggcccttagttgggtcccctttgtgcttcccaaggccacccagcagcaattttcgccatgctcctgggacaaacacccttgctcttcacccagtctctgtggcccctccctcggggccctcctccaagcttgatcctgggcagggacttgagccagaaaatgggaggcacccagagaggaaaacgcattacctaaggtgtaacagcgagtaacaacagtcactgctctgtagaaagcctttcccgtgcttcactgtgccaagccctgtttaatttcattcttgc

SEQ ID NO: 123658 - DNA, 1245 bp, Homo Sapiens
tttttaatcttatcgtgatttttataaaaatccttgaccactcgctggccggagggtggagagggctgcagtgttattcctaacggaatgaaggacagctccagggactgggctagctcctggtccccagggaggcagcagcagacactatgttagggctgaaggcaatttgggggcctagctctgagcaagaggctgggagcagccacaccagccctgtccccacatgtggacagagggcccagcccactcaggggggaccccactggcttcctccagcctagtcctggagggagatcttcacaaagagggtggctgatggatgctggtccccgttcttagacatgaggtggacatggcggtatccttgcttgaggctgttcaaggggatggtactctggccaatgaagtcattcttggaggaggcatcataatcttccaccaagaagcggatgagggcaaggtcaggcacaactacctcaaacgcaaactccgtgtcccaccatgggttgacacctagtggtgatgacggcaccaggtcacgcagcacgtacctcaaccataatctccctgtcccatgtggggttccaatccattgttggtgatgacagcagtctggcggctggccacgtcccggctcacgccatggatctccactgtcactttggggtccacaattgaattcttattcttgttgacttttggcagctgctgccccgaaatgaccctgatgttgagccgcttccgtgcccaccagggcccctgagccagggcgcgggggttaaaggtgccgttggggtctcgcaggaaggcgggcttcagcacgtacccacaggccccgttgtcctggaagcggccctggtacacgtccatctctggcccaggtgtctggaaattcagggccacgatctggcagcccccattccacatctccacggggctgtagttggaggagtctgttctccatccagccgggtagattctgctcaggtgccccacgttgtggcggacaaagccgtttcctgattcttggagcagtcgaagggcacggttctcagagaaggacgccatctcgtagaaggcctgtccaggggtgccaggactggagaagcccccaaagtggacactcttgcagtaaatgaccatgtcagagagctcctgtgctagcctgagcttgtcctccttgggcttgtgctgcacacggctcctcactgcctcatcctccatctcagcagcctcgtcttc

SEQ ID NO: 123659 - DNA, 1223 bp, Homo Sapiens
  misc_feature (404)..(416): n is a, c, g, or t
  misc_feature (1132)..(1132): n is a, c, g, or t
  misc_feature (1151)..(1151): n is a, c, g, or t
  misc_feature (1166)..(1166): n is a, c, g, or t
tccgactgtaaagaacgtgtttcctttaggaatactgtgcagcatacccttaatatgtcagtagtgttaaagttaccaccttcagagaattgaacatctggccaatctgataacagtggcaaccagttggtcaacaagcacttctcttaggataatccgccttggctggcaggataaggctttatgctgtagaaccttgtcccccacagccacaatccccttctataagtccctcctaccctcatccccccgcatccccactggcattcacctttcccacccccaaaagtgcagctcatggtagccttctagaaaatggttttaatgggtatcccagcatacacgcttttttaaaagccccctctgaacaccagaggtggtgaaaatgaattgtgttcttggannnnnnnnnnnnnaagcctccactgggtcaaaaatatgtgctcttaatacttgagtttttgctttgtgtgtgggttttctttctttttcatttagatatcgtgggataaagtggagaggacatctccattttcccatacaaactgagggtgagaagagaaagagaagcaagctgttgcccccactttggcctggcttcccagccatcttcccagctctggttctttcataggaactagttattgcttccacaatgccgttatacggaatgttccacaaaggctgtgaacctagtcacagtctacccacaacaagaactctgctctgaaaaaccagcccaagagctcttacccagaagaacaatctttagccctcaaggtcactgaaacttcattagagcagtttagagtagacgtgtaagatttggcatatattaaatgattattggcacaatgttctccagttccatgtataaatgttgatatgcacatcggccagggcccaggatgaatcagccaatctgcaccatttttatgtcagcaataattccatctcttccctttgagcactgtagggagagctgcttcatccggttctccaaggcctggccctcaggggaggtgctgctttggctcttactgctgccaccactgccactgctactgctgagggcccggttgttgttggctttgtcacttgtttttatctctgccccttctgcctgtctccntcgtctacttcacattcanggggaaggaggcccngctgcattcacttcgagggccaacactgggaacatcatccaactctgacaggacaca

SEQ ID NO: 123660 - DNA, 818 bp, Homo Sapiens
acatgatagtgggttaggttttgtttgggttttttgcgctttatttgattaaagaatttgccttctttgtatacactggaatgttatattccctatgtattttacagggttacaaaatgtctctcattttaaatattaccccaaaagtaatctcagaaaaaaaaggttttttgaaattaaacttgacttttaaaaaatcatacggacaaacaactttcaaacaaaactggattagtaggatttcttgcctgcttaactaacatgacagacttcttgtcccaagcccttctcagaaaaacctcatgtggaaaccaagctagagataagaattcttccctgatgcagttaggggaaagggaaaggctagaaacttctttggcaagcaattccacacacagccatttatgtgtgagtgctctgcttcaagcacagtacactctttgcagggacggccagatgttcagagtgggagtggtacttttcaaccagctaaaagtgcagaagtcatctagtcgtctgcctcttcccactgccagtgcctgcagccttgcagcaacttttaaccacccctatggactggaatattgagttaaaagccaaggctgagctggctgacgctgtagtctccattgaaaaggaaatggatgagatggaaccgagaaaccaccagtacatgatgacactcaaaagacttagggggaaagagaaggaaggatttcagagatggggacagactggtggaaaatgttgggctgactggaaggaaatggggtatacgtgagtaatatgtacatatcgaaacaatcagttgcctcctg

SEQ ID NO: 123661 - DNA, 653 bp, Homo Sapiens
  misc_feature (87)..(107): n is a, c, g, or t
ttttttgttattaaaaaaaatcttttattaaaatgctcctggaagggagcaggtggtattgcatagtttgttcagatggcagtggtnnnnnnnnnnnnnnnnnnnnnagtggcctggagcaaaagtgcaaaatccgtagctggcctgtgggtcgggaagcctgtaggactgcaagcatgtggtcttgagtagttcacagcccccctctgacctcagctcctccatttacagaatgagtccgaagactgggtcagagatgctgtttgcaatccaacagtagtcctgagactgctgagaggggaaggagcaggcttccaggcccagaatccccttcccaatccttccacccaccaggaccctctcttttccctgcttgtctgctaagagtctgtgcaagacttccctgggacctggcgtgtggtaaacaaaatcagacaactaccacactgcctgccttggacagccttttcttgctaacagtgggatctcaaaggtgtgtcctgatcccatgtctgagccatggtgtcttggtataagctgcggtgacaccaccaaataacataagcaaaattttgctttattaacccaaaatgctttaggttctaaagtgggctttgaacactcagactcattgctgagggtcctgggtcctg

SEQ ID NO: 123662 - DNA, 2645 bp, Homo Sapiens
  misc_feature (23)..(23): n is a, c, g, or t
  misc_feature (331)..(331): n is a, c, g, or t
  misc_feature (383)..(383): n is a, c, g, or t
  misc_feature (385)..(385): n is a, c, g, or t
  misc_feature (389)..(389): n is a, c, g, or t
  misc_feature (450)..(451): n is a, c, g, or t
  misc_feature (476)..(476): n is a, c, g, or t
  misc_feature (616)..(616): n is a, c, g, or t
  misc_feature (645)..(645): n is a, c, g, or t
  misc_feature (692)..(692): n is a, c, g, or t
  misc_feature (909)..(909): n is a, c, g, or t
  misc_feature (986)..(999): n is a, c, g, or t
cttttactctctcaacagggctntcccaacgcgccggcatcatgcgttcgagatccattctcccgccgcggttaacacgaggcgctatacacgagaggcaggcaaaggcgtgcatcgggttactcctttgagatcggccatatactcgtctccgctttacggggggtgggtgctgcgtggttagaaagaagaaacggagcgaggggtaattagaaattggggttcgaagggttatacggggcaatgtagaagaaaaaaagtgggaaaaccgaaaacgagccggtatggaaatgccggtagtcgcgtttaacctccctttaaagaggcgttnaaatgccgtagtacgccggggagaaatagcggaggggcctaaagggccccgngnatgngggtcggtctctcttcggcgtagataggcgtttgatggtgaggggggggtcaactgggctnngaaatgagtggccatatggtgtggnacggcgggttatcagacgactataatagtagtcccggggaactgcggctgatgaaccctcaatattgaacggtttgcgggataatttaggaaatttggcgcgtcatccgctgaaattgggttttgtttttttagaagaantgtaaagaagaaggggggaaggaggctangttttgggcgagatagcggggcgggcgatacaaaatagggggcgggnggtgtagaggagggatgagtatggagggtggaaagacataaaacaactaaggactggggctcacagagacgaactccgtggctaacacatgtattgttatggttggtatagaggcgaggagagtcatgtctagcatacttgctgcttcacttattatcgactgtggatatgagaaagagcattgttctgtgagtctgtgccccccgtggtagcgagnccgtagataataattttcctcgtcggtggattattgttttagttgcgcaaatatatggttggcttgcacaccggagnnnnnnnnnnnnnngggtgtccgctccgccacaggtatctatcaaatgaagaggctgtttttctccactactaaaccctttatgaaactagattggcccgcttatgtgggtaggttgttcgcgcgcaccctgtgaggggccctcttgcccgaaaaaaataaggctattggatgtgtataaaacacttccgggatgttttgttaagaccgccccctcgcttgttgagaaggactctatagtacctcgttgtgaaggccaattttatgatctgcgtgagggatgttatcctgggtcctggttttttaaagaagaactatttattattagagaaagtccagagtccagaaaaagaaggctgaatccagagtggaaagacagatacaatgccctaggagggtgcagggtcaagaggaagaggggagcccacgtgtcgaggcagcaagtctaggcggcagtggcaaagcctactctgttgttgcccaagtcgtagacggaatagtaggacctgaggaagacatccccgaggatccacaggggctggccgttctgggaggacaggtaggtgggctcgactcccacggtgcagtagccgttgttactgaggatataggaggaaggtggcagagggaactccacaccattgatgatgaaggtcaagctgggcagattctgaatgctgttacagttcacgagaaactgtccatactcatcctcctgggcccctgtggcctgcagaagagcactcatgtactgctggggcacagtgagcagagaggtgcctgtgtccacgatggcctggcaaccctcagaacaccagccggaggcctggccgccgatgaggaactcttcaatgccaatctgccagtagagttcctgggtgacaggcgcccagtagatctgccccgtgtacaggctgctatccacacccccaaagacaaccgctcccccgctggagccctgctggttgctgaggtagacgctgaagacggggctggtgagggcgccctcctgcaccatgccctgcatagctgtggtggcctcatccacggacagagcagggtaggccaggcccatgatgccatcaaactgcgcatagacgaagttggtaccaggctcattctcactcaagccgaactcctggttggggacctggatgctctggacagtcagggtgtcatagccaaagaagccggtgaggctgccactgccatactgcagggagaaggtctgcccattggtggagtaggtggacgactcgctggggttgaagcgggagtgactggtgcaggcctggctctggcagtagacagagggcacccacaagttggaggagccggtgtcaaaaaggaccaggaagttctggggtggagtcccgatgctgatctcaccaaagtaggcagcatccatgtaggccatgggctcgtaggtcacgctgaggtcaccaaagcggtacttccaagcaggatcatacttgtgggtcctcaggaactcccccagcaagcccttctccttcatggtctcacggatagacttaaatttcttcaggggcactttgaccactgctgcctccaagagctggaggcagaccaagaccaccaccatccacttcatgatgctggtccccaactggccacagaggaagagcagctctgagttctgc

SEQ ID NO: 123663 - DNA, 1215 bp, Homo Sapiens
tttttatgtttcaacaacatttatacatctttttaattagattagctttacaagcaacttgagagctctttcataatgaaacactgcttttcaaattacatgactttatagtctatctgtatatgaatcctgaaaatctttgcctactcttgataaaggtctgtgttttacagctggttaatgtgttgaataaaaacagcattatgaagctttatctttaaccaggattaaacacatataggccacaaacagttttaaattttgtttgaaatagagtcctgcttggtgacaagttaatagtcccactaacatgaaatgaatggatattaaataaatggccatcctgatttcttgatcttttcacaatgattcctaagagagtatataaacttttccaaaaaatatacaatttaagacctgtctggcaagcacaacccacagatagtagaatctaatactttttacaactgtagaggtacacatttgaatgacaacaggggctcccaaattaaaaggctgtggctgtacattttgacaatcaaacaaacctcccatcaacataaaacaatttctactaaccctaaaaaagataatgcttttgagttgtggcctaacgccgcgcactgtactatagaccagatggcaaagacaacttgcgctcctgggttgggctggcagaggcacttactgtagagatgtgatgttatcatctggaaggaaggggaggaagtagaacaaaactgaatatgggcgaggaaaaaacaataaactatcactttctcctgcaaattctcctaagtgagatcactatactgaacattcaatcccatcctaagtccactgttggcttcactacacaatttttttccatgttttacatgaatagcaatggcaatcttttaataaaaattactgagcttcccatagaaaaggtctcaaattgaatacaaactatacagatgctaaaaatgtcttaagttgaaatatacagaaaatttctgtatactcacattttggcaaagaagatcaaggacagagatagaaaacctaagtgggcaaggtcttacacccataattcacgcaaaatatggataccaccctttaggttttgctaaaaagcctaggaaagtgaagtctaagacatccgtcccaattcattctttaaataaccggacgcgtgggtcgacgatatcccgggaattccggaccggtacc

SEQ ID NO: 123664 - DNA, 1080 bp, Homo Sapiens
  misc_feature (1)..(1): n is a, c, g, or t
  misc_feature (788)..(788): n is a, c, g, or t
  misc_feature (847)..(847): n is a, c, g, or t
  misc_feature (862)..(862): n is a, c, g, or t
  misc_feature (887)..(887): n is a, c, g, or t
  misc_feature (911)..(911): n is a, c, g, or t
  misc_feature (933)..(933): n is a, c, g, or t
  misc_feature (986)..(986): n is a, c, g, or t
  misc_feature (1007)..(1007): n is a, c, g, or t
  misc_feature (1011)..(1011): n is a, c, g, or t
  misc_feature (1018)..(1018): n is a, c, g, or t
nctttattacggaaataagttacactcgcctccagcttacagtataaaacaattttatttgcaggaatgcaaaatgattgtttgccatgagcattttgaacatatgacatgtctgattttcttgttaaatttgcatttactggggaactggtgtgtataaaaccttaattaagtataagctctgatcttcatcgtggtgcctattgggtatgtgatataactgcagtatccctttggggaaggggggaggggatttctttacaccaagtcctaatgaaactataattttcactttttactttaagctatcaacttaggacttggcaaaaaaatttttgagggtggttcaatagaggatgcttcaccactggacactcactgtcatcaaggtgctttagaaaattaaaaacatagcacaaatgattgtactctactctacaagttatcatgacctgcataagaaatggaaagctgattcacatgtttacagtgatcagcaggaagaaatgcactaatgaaacataccttttacctaaaaagctaaactacagccatatactaatttctatgatttatgaaaaaacttcaaaatatccaaatgtcaggcttcgctgtacaattgtcagttttagtctgactttttataaagggacactgcagtatttagtacaagttcggatgcacttttttgaacatctgatgtcttacaaaagtaacatcttgctaaactattatacatccaaaatactacaatatctgaagaagcaaggctgctttttcagccacanaatacgacaaaagcaaggcctgttatgatggtcatgagggagtcttacaagcctctganactaaaggcaactangaatgttacattttggtatattaanatcttaccctcatatcatatttancaagccttgcttttatctacanagattttctatgtacagtacagacagggtatagttcaatcctctgctactganggtatttaccaacctttttanaagngtctganaagaacactatctgggatgcctgactaacagctctgatgattacacttgaactgatatctga

SEQ ID NO: 123665 - DNA, 1312 bp, Homo Sapiens
tggtcggcgggaaagacagtttctgcgggaagggcagtttacagaacaaaggttacagaacaaaggacaacgaagttggacctttgtagagcaactcattttgtctaataattttccccttttgattttgtagtccttcctcttcatatatttctaacaggatctggcttcactgctcttcttggttgcttagaaataaacgtttatctgaatagggtgggggagagttgtgggaggtcttggtaagggctgtttctatgagcttttgaactagtccgcagacacagggtataatacagcaccctaagagaatgagcacccctattatgatcacaagggaggtgagaatagaggccattagtcctttccatctaccaaaccattttttccattacacctgtaaagggatcattcattcccgatttttcagctagttcatttcctagattggtgaggccttatagacccttagtgatagttacatcaggggctgtattattggggatacaggtacaacattggacttccactaatatcatgtcaagagctattctattttccccaggccatttggctggtgaaacccaattgttcagctattcctttaatggcatccctggtgtaactgacaaatcgttgttggttatagtatatgtaatttatccagtctacatttttatttatagtagaccacaagaaaaggacagacttgaatccagcagctatttgatttcgagctttgaattcgtttggtacccctcaggggaccccgatagcatctatgtagatatcggggtcaaaggacccttgaggggctttcctttttttctgagttagttggtttttgtttggctgatgaaatgccagggtgaaagggatagacaactggattagagcccaagtgccactccagttgcttggcagcatacccactagagggcctccgcaatactatcaaacatctgctcatggatagacaagggcagtctgattggtgagctcttcaaaaggcttgggttcactgcatcctgttagattcccaaagaatgccaagttttctccctggagtgctgggtccatcctttttcagccattcagattgctgtttcattcatcaagagtaccagatgaggtcctcctaagctggttcaagctttccctcttccaactcttgatgagaacgtgatccccaggctggtattgatgtaccgggaactccaggggtggtgtttgtgctaggaagcctttcatcgcgagaggaaactagaatttctgtgttctacccggtcctacgtggctgaaactggagccc

SEQ ID NO: 123666 - DNA, 1245 bp, Homo Sapiens
  misc_feature (1030)..(1146): n is a, c, g, or t
tttataatcctttagtttactgcttagcttttaaagacagaaaattacttaagaaatcaaacgtaaccacttagtgtggcacaggtacatttcaagaataagaatttgcaattaaaacaaaataattttcccagactggtagtgctgcgaattacagaattcatgaaaaacagagtagtggtctgaggtgtttcaaaccagacatggctcagggaaacaaccactcaagcacacaagtggcattttgtgatcaaatttattttttgtttaaatttcatttactttgttttactgtaatttacacaagagactggcaagtaaactaggtattttacattcaccacacattccctcaaatctccacagttgttagaaaaacattaaaatccatgcgccgggctctcatttccatgtgcgcctaagctcccaatgatactacagatgccagcgagagttaagttcattaaaaggagagggctagactctttatttcacaaaattagcaataatcttcctcgcaccaaacactttgcagacaatgattatgctctgacaaaacctatcttacaacagtgcccagagagtaaacatcagtctttatcctgagtacacaaaggatgtatgaaatgtgggttttgttgctgaggataacagggtattgcaatgcagtagtgatcctacacatccttccttgtctgattcactgaaatcactccagtgggggagggatgcaggacatgtgggaaaacgaggagcaggcagggcaggactgtcagcaaatcagattactaatgtgatttgactgcaggggttggcgtgttttaggagggacaggaggttacaaaagacagtttgtgacctgaaggcttcaacaatataattctattcaagcttccaggactgacagaggaaaaactggattcagacagagaaagctgataaaaatcttacctagctattgttccttccttgtaaattaaagattaggatccagttagatacaatgtggcagccgttcgggacgcgtggnnnnnnnnnnnnnnnnnnnnnnnnnnnnnnnnnnnnnnnnnnnnnnnnnnnnnnnnnnnnnnnnnnnnnnnnnnnnnnnnnnnnnnnnnnnnnnnnnnnnnnnnnnnnnnnnnnnnntcccgggcctagggtagatgccgaagctgatcggccgggtcttcatggggcgcacaggtggatgggtctccggaactgaggtactaagagtctgttagc

SEQ ID NO: 123667 - DNA, 1332 bp, Homo Sapiens
  misc_feature (43)..(43): n is a, c, g, or t
  misc_feature (102)..(130): n is a, c, g, or t
  misc_feature (617)..(676): n is a, c, g, or t
  misc_feature (868)..(876): n is a, c, g, or t
ataattcttattcaagctttccaggactggacagaggaaaaanctggattcagacagagaaagcctgataaaaatcttacctagctattgttccttcctttnnnnnnnnnnnnnnnnnnnnnnnnnnnnngtggcagccgtttctgaccagcactctcatgatgcctattcagaatctgtcctgatgacgtcctacttgagagcacatcccacagtcagatgtccaccagtctcttggcggggcctcctcaccgcacgcaggccagactcacactgcatcttaaactgttcttatctcaaagtcactatctcctccttgaagtgtgtgttcccacaagaagagcaaaatgtcatcgctaactatatcctatcatgtgagctctgaggaaatagaccatttgcatagtttccaagctgtagttacagaaaactgtcatcttcaaaacaagactccatgaagtgctatatttccaacttttctacacagcctacaatcctattaagactaatttcttcatcaatgtgtttgtctaacaggagcctgaaaactgtctagtatttattataaatcagaaaccgtcatctccatttttgctaggtttgatgtagaaaaatannnnnnnnnnnnnnnnnnnnnnnnnnnnnnnnnnnnnnnnnnnnnnnnnnnnnnnnnnnnccctcagggcaaacaagtaaaaactggcctgtaactttgctccttactttatattgtcaaatttggctacaagataatgaccatccagaaataaatagttataaatacattcagagtttacatcccagattcattggaacaccaaaaaattttgaagaaattttctgtgggagtctactgcttatgggactnnnnnnnnntttataacagactgacttaaaagaagagaaaaataataaaaggctatatatgttggtccacagcttgacatttatgaaacataccagctagtattacattgcagtcaatttgtccattaatggtattactctgataattattaaaatctgttccaggtatatatattgaaaatattttcttttgcattcttgctgaagataggtacagtactttggagaaattgtactaatcccttcagtatgtctgtatgtacatatatacacaagtgtgtgtatctggatctgtagctctacatgcgctttatatacagctacagacatatgcacacatacatatatacacacgtggttgagaacctgtgcatgtgtgtgtatcatcacaagcacacatctgggaaacgtcaacactgcaagatactggtcagattcttcttcactcatcactgactagagtgg

SEQ ID NO: 123668 - DNA, 1344 bp, Homo Sapiens
  misc_feature (179)..(246): n is a, c, g, or t
  misc_feature (656)..(656): n is a, c, g, or t
  misc_feature (1045)..(1045): n is a, c, g, or t
  misc_feature (1094)..(1094): n is a, c, g, or t
  misc_feature (1102)..(1102): n is a, c, g, or t
  misc_feature (1201)..(1201): n is a, c, g, or t
  misc_feature (1228)..(1228): n is a, c, g, or t
  misc_feature (1312)..(1312): n is a, c, g, or t
ttttccaggattagatacaatttaataatagttcaattccaaaataaaagttattgtaggtaagaccatgaaatttcctaacacttgattttaatacattgcgctaattttctaaaacaactcagaggaacccatatttacagtaggcagaatatttatgaaaaaaatctggcatcagnnnnnnnnnnnnnnnnnnnnnnnnnnnnnnnnnnnnnnnnnnnnnnnnnnnnnnnnnnnnnnnnnnnnatcccgagattatatgaactaagaaacaagttgtgtatcttaacagcagtactagagcgcagagtttcagacttggatttataaatgctttcaacgtgtggtgtttggaaaaggagaagacatcatctgattttcaaaacctgaagtttttctcaggactgaagtcaaaatcgtaactgccacagagggaaaagggaagcttttccccttaattgttcatctgcgtcagaaagtccagtatccctgagataggaaccactgtaattagaagattggaatgaacaggtttctcccaaaggaagattgtttgttgctgaattatgcctactgccctgatcatcaggtataaactttgcatcttccaacctaatgcttggcagcaccaagacgtttcagtaatggttcatcantaacccagcattctccatcttcatgaaataactgtaagacaaagaggaagaatttagttacatatttgctttgtacttctgtaatatacttactatttcatatctgctccccaccccgccattagactgaaatgagtttcaagtagggaccagcgatcatcttgtttataaacagtgtttggcacatcacttcttcaacattcactgaaataaattaggaggaacagcacttaggagggtggggcaggcaagcttacccttgtctcccactgaatttccttctccttcctttctcgggcttctgctctttgtctttcttcaagcctgtgctttgcttcagttgctgcatcaatgtctctgatttttaagttgaaagtgaatccttccanaggctgcgggatcaatactcgtctgatcttcaaactcctcactttctcntgatatangcactcctgggatctacaagatgtatttcctaaaacataaggtggtgggactaaccataaccctactatgtaatgatgtatgcttgaactcaatcctangtcaatgcatactgtctctggtatcanacactcccgttagaatgatggatataaatgcatcttgagaagcactatattggaccgggcaactcgcatctggccagcatctangaccttatcgaagcaagtcccggatgacgcaa

SEQ ID NO: 123669 - DNA, 919 bp, Homo Sapiens
ttttacaggtgtaaacatctggttttatacccaaataacaaacttaacagcagtaaaacaaatggtttattactgcatatgttatattaaatttacacaatgatatataaaaacacatactgtttatattatatagtaatttaacatcaacaggagtatcaacacaagtactactcatgcacaaaacatgcatatattggtatacaaaaagcaattttacacaatactgtttaccaaaaattttttcttaaaaaacagcccttccacataggatcaaaggtccaatctggactggattgcactaatatgttcaggtcaacgcttcggtggcatagcgctcagtgagcaattctgggattggagtcatgcccaagggttacttcattaatagtgaatgtctctgtgcccaaggaccaaaattttatcccaaaactaaatcctccaaggaatgaaaggttggactggctacaaattagggagggaaaagaaggcatctaaatgttggataaacggccctagaaggggttattaggaacagggcctaggcaccaagtgtggcaaaagtttttgtgaatccttttaaggtccctatcgaggctgctatctctggatttaaggtttggcctccaagtcatgagtctagtaacagttctgagaataaaaccgaatggggatacatctgagaaatgtagactacataaaaaaactatagaatacaatgactgcccctcatacctacttcacactattgtatgtggtgcccctcaacaggaaaaccctcatggagacactgccctgaagactcaaggaacaaatataaatccaaaaattccatccacctgaccttgggatcaaaagatcttatcccaataaaacttgaacatcaaaacctgtaccttgccggatgctcagaaagttt

SEQ ID NO: 123670 - DNA, 1289 bp, Homo Sapiens
  misc_feature (137)..(151): n is a, c, g, or t
ccttttttatatatatatgtatttataactggttacacgttggattcataattaggcatcaccagtagtagttggcacagttttgttatttaagctcagggtcaagttctgtttcattttgtcgttccaaagtaccnnnnnnnnnnnnnnntcaaaggcatttcatctccatggtgttttcttaaatacagtaatgtcataggaaacagtatgtacagatgagcagtgcctcctgacccctcctctgtctcttggagataggggctggggtccgatggagacgggtcaatgcggcctgctgctggactccgatgcctgcctcttgcgtgaaggggtgtagccgttgagacagccattggtctgccgtttggagggccctccattcaggatgtcctggatgtgctgcacgatgaggttgatggccaccagattatctgcacctctagggatgatcacatcagcatacttctttgttggcaagcagaattcctcaaaggcaggcttgacgaacgtaatgtactgagataaaatctgctcaagatccctgcctctctcgctgatgtcccttaatactctgcgtgagagccgggtgtccgcatctgtatccacaaaaagcttcatctggaacaggtctcgtacctcctgggagtagaaggccaggatcccttcaaagagcaccacgtctgcgggatagacagtaactgtctcctccttccgggaatgggagacaaagtcatacacggggatctggactgttttcccttcagtgatttctttgagtgttttgagaatgagttcattgtcaaaggcatccgggtggtcaaagttgaactggcccttcagggctttggccttctgctccgaggtaaggacacggtagaagctatcctggctcaggatgaccacctgcttctggcgatagtccacctcattctgccccaggagctgcacgatcttagcacacacggaagacttgccgctagctgttcccccgctgacgcctataaggaagggctcgccgccgttgggctgctggtggttctgcagggtctgctcgctgtccccggccatggttcgcgccgcccctcctcccgctgcctgtgcgaacggacgcacgctccccgcccgcgcccgcgtcggactccctccgctttccgcagccgccgctgggcgctgccggggctgaggccgctgtcgctcgcctgcgagccgctcggagcccggtgacggggctgggtttcccgtaaggagcctcgtgccgatttaaacgccaggcctcgtacctagcc

SEQ ID NO: 123671 - DNA, 1313 bp, Homo Sapiens
  misc_feature (66)..(87): n is a, c, g, or t
  misc_feature (100)..(358): n is a, c, g, or t
acacacaaaatatcttttattctgtggaatcaaagctccacacaagtactttataagatccattannnnnnnnnnnnnnnnnnnnnngagacagagtccnnnnnnnnnnnnnnnnnnnnnnnnnnnnnnnnnnnnnnnnnnnnnnnnnnnnnnnnnnnnnnnnnnnnnnnnnnnnnnnnnnnnnnnnnnnnnnnnnnnnnnnnnnnnnnnnnnnnnnnnnnnnnnnnnnnnnnnnnnnnnnnnnnnnnnnnnnnnnnnnnnnnnnnnnnnnnnnnnnnnnnnnnnnnnnnnnnnnnnnnnnnnnnnnnnnnnnnnnnnnnnnnnnnnnnnnnnnnnnnnnnnnnnnnnnnnnnnnnnncagccctaatgtagtatttttaaatgatatgattatacaacaactttctttaaaatctaagttcacaaaaatttgtcagtacatcatctgttttatctctattgactataattaccagttgtaagaacaattctaaccatattaatacctgacagaacgttgaggcctgattataactggatattgggtagcatccagttaaagtatcagtagagcttggatgtatcaaagaaaatattttattcaagttcccaataaccaacttgaggagttatgctgggtttgaattgaagaataaaagggccaagttaaaatgagggacaaccaaatggtcttctcattttggtgtcaagttgcaaatgcaaaggtatacatgtgctatacattcatcaactcctgtgcactctactctccatcgtggcatttttccaaggtatttaagagtctacccaggccaaaccctttgccactttcactgacttttgcttatgctatattcccctgttctttttctctcgcctttgccttcagcctttttctgttgcctattgcgttcatccattattgggtactgtcccatgcctggtctagaagagtctttttgtttctcttaatatcagtctccattttcatgtcatcgttgtttcatcttttacctcacattgcattttctcttggcaatgtttgggtattgggtaccaccacagttgctatctcttgaacatctttcattaaaacatcaccgtctagtttgagaatacttttaagcctgctggcctcctttggggcattcttttttctcttttcagcacgcatctttcttttccacttactccgtaagcttttagccatgttttacctgagaaacgaacacccacacctcacgctcacgccgaccggaagtccccggccgtaatggccgaattcccgggcatatgtccggtaccgtcgactg

SEQ ID NO: 123672 - DNA, 1530 bp, Homo Sapiens
  misc_feature (306)..(338): n is a, c, g, or t
gatcagctagaagagattttttattgaagggcgagtctccggcatctgatggcagctacaactggatctcacggaacgcccgcttctccaccagcttcaccttgtacttgcgtttgaacttggctctctctcgaggctcgatcatattcctcctctggaagctcttgaaccggtctcgaaggatgttgccctcgggcttcagggtcctgagcgagtctgtcagctccgagctcagctgcacgtcgatgtcaggtgcctggtacttgagccgtcccagccttcggggcttgtcagcctcagcctccnnnnnnnnnnnnnnnnnnnnnnnnnnnnnnnnnagctccaccagcctcagggccacctgggccttgatcccgcgcagccggaacagctcctggtgccggagccgggcggcccgcaacgcggcctgctgtacccgcagcctgtgcacagccttctcccgccgccgctgctgctccgtcttcttctctgtggtggccaggcgggcgggcgtgggacagacctcggcatccccagcctccggcccctcgccctggcctggctccccctcaccatccgactcctccagcagcccctcgcacagctcctggaatgtggactcctgggtggcggcctgctccgtggcgggcagggccagctgccgctccagcttctccgcctccttctgccgctgcaactccacctcgtgggccgctgagagcagggtctggtggtcttcaaaggatggattgtaggaagctccggcaggcgccacctccacggcgggtgcctgggacggcttggtgtgcaggcgtgctggccgcttcactcctttcttcttggtctgctccaggaaaaactcatcctggccaaccaacggcctgtccagggggttgtctgaggcccagaggtcgtagaagggccgctctacggtgtcctggggcccgggcttggcccttgttgcagaagggttgaggagccgggcctgggccctgcgcacctcccggggcagctcgccctgcttggccagcttctcccatagctgctccttccgcctgagcttcttggcgttggggacctggtgggcgaggacgtctttgggggcagggactttggatgtgttctcgaggatgaggtcaacccgaaggggtttcttgagaagcagtgacttcttctggactttggttctcttctttgtcagccctttttccttggagccagtgtccacgaagaagagtttttcatttggggcctctgacaacaagccaccgctcgtgcgctcctgtagccgcacgtcttccaggaactggtcaacctccagccccagcggctcctgagcaagccgccgccagccccgcttcttatttcttgggcctcgccgccgccgcctcagcgctgggtccaccgaagtgggccgcagccccaggaaaccagaatcggcatcgcttttcgagctgcgcttcccaccaacgccactgcctcccctcgtgccgaattcaacacccaggcctcgcacctagccgtaagtta

SEQ ID NO: 123673 - DNA, 446 bp, Homo Sapiens
  misc_feature (302)..(348): n is a, c, g, or t
cagctagaagagattttttattgaagggcgagtctccggcatctgatggcagctacaactggatctcacggaacgcccgcttttccaccagcttcaccttgtacttgcgtttgaacttggctctctctcgaggctcgatcatattcctcctctggaagctcttgaaccggtctcgaaggatgttgccctcgggcttcagggtcctgagcgagtctgtcagctccgagctcagctgcacgtcgatgtcaggtgcctggtacttgagccgtcccagccttcggggcttgtcagcctcagcctcnnnnnnnnnnnnnnnnnnnnnnnnnnnnnnnnnnnnnnnnnnnnnnntcagggccacctgggccttgatcccgcgcagccggaacagctcctggtgccggagccgggcggcccgcaacgcggcctgctgtacccgcagcctgtgc

SEQ ID NO: 123674 - DNA, 491 bp, Homo Sapiens
  misc_feature (309)..(354): n is a, c, g, or t
ttttttcagctagaagagattttttattgaagggcgagtctccggcatctgatggcagctacaactggatctcacggaacgcccgcttctccaccagcttcaccttgtacttgcgtttgaacttggctctctctcgaggctcgatcatattcctcctctggaagctcttgaaccggtctcgaaggatgttgccctcgggcttcagggtcctgagcgagtctgtcagctccgagctcagctgcacgtcgatgtcaggtgcctggtacttgagccgccccagccttcggggcttgtcagcctcagcctccnnnnnnnnnnnnnnnnnnnnnnnnnnnnnnnnnnnnnnnnnnnnnntcagggccacctgggccttgatcccgcgcagccggaacagctcctggtgccggagccgggcggcccgcaacgcggcctgctgtacccgcagcctgtgcacagccttctcccgccgccgctgctgctccgtcttcttc

SEQ ID NO: 123675 - DNA, 420 bp, Homo Sapiens
  misc_feature (296)..(351): n is a, c, g, or t
ttttttcagctagaagagatttttttattgaagggcgagtctccggcatctgatggcagctacaactggatctcacggaacgcccgcttctccaccagcttcaccttgtacttgcgtttgaacttggctctctctcgaggctcgatcatattcctcctctggaagctcttgaaccggtctcgaaggatgttgccctcgggcttcagggtcctgagcgagtctgtcagctccgagctcagctgcacgtcgatgtcaggtgcctggtacttgagccgtcccagccttcggggcttgtnnnnnnnnnnnnnnnnnnnnnnnnnnnnnnnnnnnnnnnnnnnnnnnnnnnnnnnnagcctcagggccacctgggccttgtcccgcgcagccggaacagctcctggtgccggagccgggcggccc

SEQ ID NO: 123676 - DNA, 570 bp, Homo Sapiens
  misc_feature (480)..(491): n is a, c, g, or t
  misc_feature (502)..(502): n is a, c, g, or t
  misc_feature (507)..(507): n is a, c, g, or t
cagctagaaaagatttttttattgaagggcgagtctccggcatctgatggcagctacaactggatcttacggaacgcccgcttctccaccagcttcaccttgtacttgcgtttgaacttggctctctctcgaggctcgatcatattcctcctctggaagctcttgaaccggtctcgaaggatgttgccctcgggcttcagggtcctgagcgagtctgtcagctccgagctcagctgcacgtcgatgtcaggtgcctggtacttgagccgccccagccttcggggcttgtcagccttagcctcccgccgcgcctgccgccgcctctgccgccgcgccagctccgtcagcctcagggccacgctgggccttgatcccgcgcagccggaacagtttctggtgccggagccgggcggcccgtaacgcggcctgctgaacccgcagcctgtgacagccttctcccgccgccgttggtgttcccgnnnnnnnnnnnnggggtgcgcgncgcgngggacaactacggatcccagcatagggcctaggctgggctgttatccctacgatacgtcttaa

SEQ ID NO: 123677 - DNA, 468 bp, Homo Sapiens
  misc_feature (292)..(352): n is a, c, g, or t
tttcagctagaagagatttttttattgaagggcgagtctccggcatctgatggcagctacaactggatctcacggaacgcccgcttctccaccagcttcaccttgtacttgcgtttgaacttggctctttttcgaggctcgatcatattcctcctttggaagcttttgaaccggtctcgaaggatgttgccctcgggcttcagggtcctgagcgagtctgtcagctccgagctcagctgcacgtcgatgtcaggtgcctggtacttgagccgtcccagccttcggggcttgnnnnnnnnnnnnnnnnnnnnnnnnnnnnnnnnnnnnnnnnnnnnnnnnnnnnnnnnnnnnntcagggccacctgggccttgatcccgcgcagccggaacagctcctggtgccggagccgggcggcccgcaacgcggcctgctgtacccgcagcctgtgcacagccttctcccgccgc

SEQ ID NO: 123678 - DNA, 423 bp, Homo Sapiens
tttcagctagaagagattttttattgaagggcgagtctccggcatctgatggcagctacaactggatctcacggaacgcccgcttctccaccagcttcaccttgtacttgcgtttgaacttggctctctctcgaggctcgatcatattcctcctctggaagctcttgaaccggtctcgaaggatgttgccctcgggctacaggacagagagggaggcctcagcagggcctggcagaagcccaagggcctggacctctcctcggggtcctggcagggctcagccccatgcagtctccccccagggcagcctgtgggcaccagggactcagcctggccctcagctgctggggctcagtgttgggatgacagccaccaacctatggccatctctaagctgggcttagaggagtcacgggaagtggg

SEQ ID NO: 123679 - DNA, 1079 bp, Homo Sapiens
ggtctgtggatacagcgaggggagctgctggtgacagtcccagcatggaagaggcaccaaaggctcccccccagtccctccacatttcaaaaaggctgaccctgaagctcaggcaagggaaggactgattctagaccccaagggccttgatcaccaggacaaaactgtgtctggacgggttcagaaagtggaagagaccaaagctgaaggcttcctttcctgaagcctcacaactcaggaaaggaaaagcacgagtgggaaacggccgccccttcaggacgcacgactctgctgggaggtcaccaaagcacccacaaagcactccctttcacactgtactctcgtgcagtgcacaacacacacaaactgcacatggccgtcctgtccccgttcataggtgacagcaggatcactcactgtctgaggcccagaggtcgtagaagggccgctctacggtgtcctggggcccgggcttggcccttgttgcagaagggttgaggagccgggcctgggccctgcgcacctcccggggcagctcgccctgcttggccagcttctcccatagctgctccttccgcctgagcttcttggcgttggggacctggtgggcgaggacgtctttgggggcagggactttggatgtgttctcgaggatgaggtcaacccgaaggggtttcttgagaagcagtgacttcttctggactttggttctcttctttgtcagccctttttccttggagccggtgtccacgaagaagagtttttcatttggggcctctgtcaacaagccaccgctcgtgcgctcctgtagccgcacgtcttccaggaactggtcaacctccagccccagcggctcctgcgcaagcctccgccagtcccgcttcttatttcttgggcctcgccgccgccgccgcctcagcgctgggtccgccgaagtgggccgcagccccaggaaaccagaatcgttatcgcttttcgagctgtgcttcccaccaacgccactgcctcctgccgccatcttgtcaaagccccggccgtaatggccgaattcccgggcatatgtccggtaccgtcgactg

SEQ ID NO: 123680 - DNA, 945 bp, Homo Sapiens
  misc_feature (291)..(348): n is a, c, g, or t
cagctagaagagattttttattgaagggcgagtctccggcatctgatggcagctacaactggatctcacggaacgcccgcttctccaccagcttcaccttgtacttgcgtttgaacttggctctctctcgaggctcgatcatattcctcctctggaagctcttgaaccggtctcgaaggatgttgccctcgggcttcagggtcctgagcgagtctgtcagctccgagctcagctgcacgtcgatgtcaggtgcctggtacttgagccgtcccagccttcggggcttgtcannnnnnnnnnnnnnnnnnnnnnnnnnnnnnnnnnnnnnnnnnnnnnnnnnnnnnnnnntcagggccacctgggccttgatcccgcgcagccggaacagctcctggtgccggagccgggcggcccgcaacgcggcctgctgtacccgcagcctgtgcacagccttctcccgccgccgctgctgctccgtcttcttctctgtggtggccaggcgggcgggcgtgggaccaacctcggcattcccaacctccggcccctcgccctggtctggctccccctcaccattccaactcctccagaagcccctcgcacaagctcctgggaatggggcctcctggggtgggaggcctgctccgcgggtggggagggaccagcctgtccctaccagttttttcccccttccttctgccgctgcaaactccaccttgtgggagccgctgaaaaccaaggcccgggggggcctttcaacggatggaatcgtaagcaacccccggccagggctttccattcaacgggggggcttcctggaacagccttggaagtcccgaccacgggcgaccgacctccaacagtttccttcctgggccagggtcctcgggaaaaatccatcctgttcccagattacccggaattggccaaccgcgcgtaacgctctta

SEQ ID NO: 123681 - DNA, 998 bp, Homo Sapiens
  misc_feature (782)..(794): n is a, c, g, or t
tggaccggccggattttcagaatcgtcgaccacgcgtccgttatgcagtggcgttggtgggaagcgcagctcgaaaagcgatgccgattctggtttcctggggctgcggcccacttcggtggacccagcgctgaggcggcggcggcgaggcccaagaaataagaagcggggctggcggcggcttgctcaggagccgctggggctggaggttgaccagttcctggaagacgtgcggctacaggagcgcacgagcggtggcttgttgtcagaggccccaaatgaaaaactcttcttcgtggacactggctccaaggaaaaagggctgacaaagaagagaaccaaagtccagaagaagtcactgcttctcaagaaaccccttcgggttgacctcatcctcgagaacacatccaaagtccctgcccccaaagacgtcctcgcccaccaggtccccaacggccaagaagctcaggcggaaggagcagctatgggagaagctggccaagcagggcgagctgccccgggaggtgcgcagggcccaggcccggctcctcaacccctttctgcaacaagggccaagcccggggcccccaggacaccggtagagcggggcgcttctacggacctctggggccctcagacaacccccttgggccagggccgttgggttgggcccaggatggagtttttttcctgggaggcagacccgagaagaaaagggagtggaaagcgggccaggcacggcctgggcacaccaaaggcggtcccccaggccgccccggccnnnnnnnnnnnnncgcccctgcccggaaagctttccttagcaatcccatcccttttggaagaaccaccagggaccccggcttcttcaggcggggccacgcaagggggggagattgccagccgggcaaaaaggggagggcggagaaacacttggaagcggcgagcctggggccctcgccccccccaccgggagccagggcccggccccgcccagtgag

SEQ ID NO: 123682 - DNA, 497 bp, Homo Sapiens
  misc_feature (291)..(337): n is a, c, g, or t
tacagctagaagagattttttattgaagggcgagtctccggcatctgatggcagctacaactggatctcacggaacgcccgcttctccaccagcttcaccttgtacttgcgtttgaacttggctctctctcgaggctcgatcatattcctcctctggaagctcttgaaccggtctcgaaggatgttgccctcgggcttcagggtcctgagcgagtctgtcagctccgagctcagctgcacgtcgatgtcaggtgcctggtacttgagccgccccagccttcggggcttgtnnnnnnnnnnnnnnnnnnnnnnnnnnnnnnnnnnnnnnnnnnnnnnnagctccgccagcctcagggccacctgggccttgatcccgcgcagccggaacagctcctggtgccggagccgggcggcccgcaacgcggcctgctgtacccgcagcctgtgcacagccttctcccgccgccgctgctgctccgtcttcttctctgtggtgg

SEQ ID NO: 123683 - DNA, 1015 bp, Homo Sapiens
ggggcccggggcccctgcgccgacgcccggggggcccgatggccgcatgcccgtccgcggagcaaccccgttcccccagcttccgggaaagggggactcccgggtggcgggcccttccccggggcggggaggggccaagcgccggtgccaggttgtcgccgcctccttttgccggggggaaactcccccttcttggccccctgagaaccaggtccgggggttcttcaaaggatggatggtaggaaggtccgggcaggggcccccttccacggcgggcgcctgggacggcttggtgtgcaggcgtgctggccgcttcactcctttcttctgggtctgctccaggaaaaactcatcctggccaaccaacggcctgtccagggggttgtctgaggcccagaggtcgtagaagggccgctctacggtgtcctggggcccgggcttggcccttgttgcagaagggttgaggagccgggcctgggccctgcgcacctcccggggcagctcgccctgcttggccagcttctcccatagctgctccttccgcctgagcttcttggcgttggggacctggtgggcgaggacgtctttgggggcagggactttggatgtgttctcgaggatgaggtcaacccgaaggggtttcttgagaagcagtgacttcttctggactttggttctcttctttgtcagccctttttccttggagccagtgtccacgaagaagagtttttcatttggggcctctgacaacaagccaccgctcgtgcgctcctgtagccgcacgtcttccaggaactggtcaacctccagccccagcggctcctgagcaagccgccgccagccccgcttcttatttcttgggcctcgccgccgccgcctcagcgctgggtccaccgaagtgggccgcagccccaggaaaccagaatcggcatcgcttttcgagctgcgcttcccaccaacgccactgcctcccctcgtgccgaattcagccacccaggcctcgctacctgcctta

SEQ ID NO: 123684 - DNA, 895 bp, Homo Sapiens
ggatggatctgggtgcgcctcctcatgcgccaggacactcccctccagcttctccgcctcctttctgccgctcaactcccactcttggcccgctgagaccaggttctgttgtcttcaaaggatggattgtagaagctccgcaggcgccacctcccacggcgggtgcttggacggcttgttttgcaggcgtgctgccgcttcactcctttcttcttggtctgctccaggaaaaactcatcctggccaaccaacggcctgtccagggggttgtctgaggcccagaggtcgtagaaggccgctctacggtgtcctggggcccgggcttggcccttgttgcagaagggttgaggagccgggcctgggccctgcgcacctcccggggcagctcgccctgcttggccagcttctcccatagctgctccttccgcctgagcttcttggcgttggggacctggtgggcgaggacgtctttgggggcagggactttggatgtgttctcgaggatgaggtcaacccgaaggggtttcttgagaagcagtgacttcttctggactttggttctcttctttgtcagccctttttccttggagccagtgtccacgaagaagagtttttcatttggggcctctgacaacaagccaccgctcgtgcgctcctgtagccgcacgtcttccaggaactggtcaacctccagccccagcggctcctgagcaagccgccgccagccccgcttcttatttcttgggcctcgccgccgccgcctcagcgctgggtccaccgaagtgggccgcagccccaggaaaccagaatcggcatcgcttttcgagctgcgcttcccaccaacgccactgcctcctgcccctcgtgccgaattaaacccagcctcgacctagcc

SEQ ID NO: 123685 - DNA, 1029 bp, Homo Sapiens
  misc_feature (117)..(132): n is a, c, g, or t
ccggttgtgtgttgaggctaggggagagaacacccgccttggtcattggggcgcttttcaatacttcccccttctttttgcgccggggggagaatgatcccgtcgccctgccggtgnnnnnnnnnnnnnnnngccctcgccactcgggaatggacctgggcgcctcccgtgcggccaggccatctccgcccagcttcccgctctttccgtgcaatccactcgtggccctgagaccaggtcttggtgtcttcaaaggatggatgtagaagctccgccaggcccactccacgcgggtgcctgggacggcttgtgtgcagcgtctgccgcttcactcctttcttcttggtctgctccaggaaaaactcatcctggccaaccaacggcctgtccagggggttgtctgaggcccagaggtcgtagaagggccgctctacggtgtcctggggcccgggcttggcccttgttgcagaagggttgaggagccgggcctgggccctgcgcacctcccggggcagctcgccctgcttggccagcttctcccatagctgctccttccgcgtgagcttcttggcgttggggacctggtgggcgaggacgtctttgggggcagggactttggatgtgttctcgaggatgaggtcaacccgaaggggtttcttgagaagcagtgacttcttctggactttggttctcttctttgtcagccctttttccttggagccagtgtccacgaagaagagtttttcatttggggcctctgacaacaagccaccgctcgtgcgctcctgtagccgcacgtcttccaggaactggtcaacctccagccccagcggctcctgagcaagccgccgccagccccgcttcttatttcttgggcctcgccgccgccgcctcagcgctgggtccaccgaagtggccgcagccccaggaaaccagaatcggcatcgcttttcgagctgcgcttcccaccaacgccactgcctcctgcccctcgtgccgaattcaaacccagcctctactagcgtagtt

SEQ ID NO: 123686 - DNA, 975 bp, Homo Sapiens
gttcccccttcccccttcgggttccttccaggaggcccctcgcacagtttcttggaatgtggactcctggggtggcggcctgctccgtggcgggcagggccagctgccgctccagcttctccgcctccttctgccgctgcaactccacctcgtgggccgctgagagcagggtctggtggtcttcaaaggatggattgtaggaagctccggcaggcgccacctccacggcgggcgcctgggacggcttggtgtgcaggcgtgctggccgcttcactcctttcttcttggtctgctccaggaaaaactcatcctggccaaccaacggcctgtccagggggttgtctgaggcccagaggtcgtagaagggccgctctacggtgtcctggggcccgggcttggcccttgttgcagaagggttgaggagccgggcctgggccctgcgcacctcccggggcagctcgccctgcttggccagcttctcccatagctgctccttccgcctgagcttcttggcgttggggacctggtgggcgaggacgtctttgggggcagggactttggatgtgttctcgaggatgaggtcaacccgaaggggtttcttgagaagcagtgacttcttctggactttggttctcttctttgtcagccctttttccttggagccagtgtccacgaagaagagtttttcatttggggcctctgacaacaagccaccgctcgtgcgctcctgtagccgcacgtcttccaggaactggtcaacctccagccccagcggctcctgagcaagccgccgccagccccgcttcttatttcttgggcctcgccgccgccgcctcagcgctgggtccaccgaagtgggccgcagccccaggaaaccagaatcggcatcgcttttcgagctgcgcttcccaccaacgccactgcccgacgcgtgggtcgacgatatcccgggaaatccggagcgtaccagcgctt

SEQ ID NO: 123687 - DNA, 392 bp, Homo Sapiens
  misc_feature (226)..(279): n is a, c, g, or t
ggaacgcccgcttctccaccagcttcaccttgtacttgcgtttgaacttggctctctctcgaggctcgatcatattcctcctctggaagctcttgaaccggtctcgaaggatgttgccctcaggcttcagggtcctgagcgagtctgtcagctccgagctcagctgcacgtcgatgtcaggtgcctggtacttgagccgtcccagccttcggggcttgtcagcctnnnnnnnnnnnnnnnnnnnnnnnnnnnnnnnnnnnnnnnnnnnnnnnnnnnnnntcagggccacctgggccttgatcccgcgcagccggaacagctcctggtgccggagccgggcggcccgcaacgcggcctgctgtacccgcagcctgtgcacagccttctcccgc

SEQ ID NO: 123688 - DNA, 497 bp, Homo Sapiens
  misc_feature (298)..(345): n is a, c, g, or t
cagctagaagagatttttttattgaagggcgagtctccggcatctgatggcagctacaactggatctcacggaacgcccgcttctccaccagcttcaccttgtacttgcgtttgaacttggctctctctcgaggctcgatcatattcctcctctggaagctcttgaaccggtctcgaaggatgttgccctcgggcttcagggtcctgagcgagtctgtcagctccgagctcagctgcacgtcgatgtcaggtgcctggtacttgagccgtcccagccttcggggcttgtcagcctcannnnnnnnnnnnnnnnnnnnnnnnnnnnnnnnnnnnnnnnnnnnnnnnagcctcagggccacctgggccttgatcccgcgcagccggaacagctcctggtgccggagccgggcggcccgcaacgcggcctgctgtacccgcagcctgtgcacagccttctcccgccgccgctgctgctccgtcttcttctctgtgggtgg

SEQ ID NO: 123689 - DNA, 601 bp, Homo Sapiens
  misc_feature (323)..(375): n is a, c, g, or t
gagtgattcaacgcaaagagcgagaactgacgccactgcctgccccaacgacagccccacccggatcaacattccggactgtcgaggctgctgagatccggatgtgaggggagcaggccagggcgagggcccgaggctgggatgccgaggtctgtcccacgcccgcccgcctggccaccacagagaagaagacggagcagcagcggcggcgggagaaggctgtgcacaggctgcgggtacagccagggcccgttgcgggccgcccggctccggcaccaggagctgtctccgctgcgcgggatcaaggcccaggtggccctgannnnnnnnnnnnnnnnnnnnnnnnnnnnnnnnnnnnnnnnnnnnnnnnnnnnngaggctgacaagccccgaaggctgggacggctcaagtaccaggcacctgacatcgacgtgcagctgagctcggagctgacagactcgctcaggaccctgaaggccgagggcaacatccttcgagaccggttcaagagcttccagaggaggaatatgatcgagcctcgagagagagccaagttcaaacgcaagtacaaggtgaagctggtggagaagcgggcgttcc

SEQ ID NO: 123690 - DNA, 1159 bp, Homo Sapiens
  misc_feature (169)..(217): n is a, c, g, or t
gttttctcagggacccagtgtgccgaaacaaaggttgtgggagaggtggttgttgttttttggagaatggtcttaatttccgagaatggtaagggagttaaaagagtatgggtgaagaacaatgataatagagccattttttagcttaaaaatagagtttcaacagttnnnnnnnnnnnnnnnnnnnnnnnnnnnnnnnnnnnnnnnnnnnnnnnnnagtttaattatcttgcagcacaggtctacctttaaatattcacatttcaaagctgctttgaaaagatttaaaaattggctaaaaataatttacaactggcagtgattaaaaatcttatctttggaaaagtatattaatgacacataatgaatttaaagttacaagcatttaatggtttaatcaagcatgtagtttttaccagtatacaaaatgagacttagtacaaaacggtcttcaactgtcacgtcagttgttcctggagtgttttatggggaaaagcaaacttcaccaaacatagagtaccaacattcaagtgctcttttccacaagtttctgattttcaacttaggagagaagaacagcatttaataactgcatcccttgcatatgggatgtacgacaggctataccaggtcattgacaagaactgcaatatgcagaataacacagccagtcccttcttatgccaccaaagagcagcacacagggtaaatatgaaacacaaaagcataacaattgttgcaagcaatcttgttgcttcaaacattttcttcagttgcttcacaggtcccattaaaaagcatgtactggctaacgcagcaagattgccgagggtataaaacactgcaaaaagctttatgccgcccggaagccacagcaatccagttccaagaatagaaaagaaaacgccacatacgaagcagatggcaaaccatttcaatctggtgttgaaactaagggatgaggcatccaggacctgcgcagtcaggccctgctcctcgtcgtcctggccgctcaggactcgccgcagcttctccatggccccgttccagggccgtagcggccgccactctgttgcctgcccctgacgcccaccaggaaaccccgaacccgaaaccccacagaccagccggaagtccggtcccgcccgcttcctgtgcg

SEQ ID NO: 123691 - DNA, 281 bp, Homo Sapiens
gaggaatattatattctgtttttttccctctcttttccaccagggatgcagttattaaatgctgttcttctctcctaagttgaaaatcagaaacttgtggaaaagagcacttgaatgttggtactctatgtttggtgaagtttgcttttccccataaaacactccaggaacaactgacgtgacagttgaagaccgttttgtactaagtctcattttgtatactggtaaaaactacatgcttgattaaaccattaaatgcttgtaactttaaattcaaaaaa

SEQ ID NO: 123692 - DNA, 592 bp, Homo Sapiens
  misc_feature (13)..(13): n is a, c, g, or t
caaacttcaccanacatagagtaccaacattcaagtgctcttttccacaagtttctgattttcaacttaggagagaagaacagcatttaataactgcatcccttgcatatgggatgtatgacaggctataccaggtcattgacaagaactgcaatatgcagaataacacagccagtcccttcttatgccaccaaagagcagcacacagggtaaatatgaaacacaaaagcataacaattgttgcaagcaatcttgttgcttcaaacattttcttcagttgcttcacaggtcccattaaaaagcatgtactgggtaacgcagcaagattgccgagggtataaaacactgcaaaaagctttatgccgcccggaagccacagcaatccagttccaagaatagaaaagaaaacgccacatacgaagcagatggcaaaccatttcaatctggtgttgaaactaagggatgaggcatccaggacctcaagagattaatctgtgaatcctgcgcagtcaggccctgctcctcgtcgtcctggccgctcaggacatgccgcagcttctcctatgccccgttccatgcgcgtagcggccgc

SEQ ID NO: 123693 - DNA, 1224 bp, Homo Sapiens
  misc_feature (112)..(142): n is a, c, g, or t
  misc_feature (1007)..(1024): n is a, c, g, or t
ctttcctaaaaaaatttttttcctccaactctctaagcactaagggctgtgcctgagaatggtagcattttggtcttttgcttcagaactgtggtatctttgtcttttttcnnnnnnnnnnnnnnnnnnnnnnnnnnnnnnnctattgttttttaaaatgtcaggatgaattgtcagacatatggccatgtgtttgtcctctgcttctcccctgtgggaagttgtctccatgctgtgaactgctgtggggtgtgcagctgactcagtccctctgagcagtttccccactgtgtctgtcccatcatgcgctggatctgctcattctcctgctgtgggggtatgcccacctcttacccccttgacaccatagggctgctgtggctgggcctcaccagcactgtcttttgtgtgactcatggcatcctcgttcatccccaccgtgcctagcaggccttccttttcaccacctcggaacgcttgcctttcctccctccacaacaggacgctgtgcctcagtccttcacctacctcgccactctgccactgtccccattggtcctttctcctaaactggtctttgtgctctctttgttttttcttatttccctcttgtctctcattttttcttcccattcccctcccatttcagcccttaacttttctctttcccatctccactcagtattccaatggcaaaccctgatgatgtaacacctgcgatgagacatcggactctccggaactttctcatctgacacgtctttttcccagggttcgtacttctcctccattggtcccaggctaactcccctgttcctctgtggtgtctgtcagtccgtctgtcttctctttcctctgcccttcccacagggcagtatctgctgatggattcagtcctggtgtgtgattgttgtgatttgttcttccgtgcgcaaaaggaagagggctttttgagtcccttccaagtgagattgtaaatgtagaattttccactgttggatctagannnnnnnnnnnnnnnnnngggggggtggggttacagagctgagaccttgtgcatgcatgtagaaaattgtaaaatgtaaattttttttaatatataaaaagcttgtttctacagtttgcagtggatctaaacattacggcaattttaggattttttcttaaacataggaactaaaactgtacaaatttttttatataaaataaagacatttgactttt

SEQ ID NO: 123694 - DNA, 1087 bp, Homo Sapiens
  misc_feature (61)..(79): n is a, c, g, or t
  misc_feature (906)..(906): n is a, c, g, or t
  misc_feature (913)..(913): n is a, c, g, or t
  misc_feature (923)..(923): n is a, c, g, or t
  misc_feature (978)..(980): n is a, c, g, or t
  misc_feature (996)..(997): n is a, c, g, or t
gtgccaaagctaaaattaaccctcaactaaagggaataagcttgcggccgcctgctcaggnnnnnnnnnnnnnnnnnnnggtgtttctctcttttatttaaaaacagtgcttcattaccatgtgcaaaggctgaggcagtgctcctccttcgcttagagtttataaaagccagcaacatgatcaataatttatacacatggagagtaatacaaaaaaataaggaataaaagctaaagatctaactactccgaccttcacaattccagctacttgataataataggagtaacccaatgaatactgtatggtctgaaagctactatacaatatgattcttaacgagaagggaagggaattagagactgtcacaaagccctgggatgcttctctggagttagcagggaaacaggaccctgggcaagcagctcgggtgtcctaggaagtgattctgggggaggacgggaggggagagagaaggctaggtggtcgattacacaagcatcccatgtaatgcccccatgccccaaaggtacctgttttgccatggcaatgggaggggctggaggaacagcatgttgcatgtagggatggtccggtccctgccatggggagtggggagaagaggagaggttctgtggcattttgagccttgcaaagatttggactgaaaagctcagagactcaggtaggtcagcctgtcagggacaagtacactccaccggctctcttctcgctttgcagccctagcttacgcgtgtcagccccaggtttgctccagctattcacaagcagaatataacacaagaaaaacaattcatatcccttagggaaaaaagaggatcaattcatcactcaatatatatacagccaaatgagctgccaaacaagccacacacaatactgtngacaganaatacaaganatgactagctgggagtctgacgggtatggacattgctaagactatcatcccagannnacaacaaacattttannatcagactcatgaacagtacaacaggagacagtcctcgctgtggctctaaggaggtgagttggtgagacatcctcgtacatctgcacaga

SEQ ID NO: 123695 - DNA, 341 bp, Homo Sapiens
  misc_feature (207)..(207): n is a, c, g, or t
  misc_feature (296)..(296): n is a, c, g, or t
  misc_feature (319)..(319): n is a, c, g, or t
tctggggactgataagtgctttaagcaatgtccataccccgtcaagactcccagcttagtcattttcttgtatttttctgttcacagtatttgtgtgtgtgcttgttttggcagctcattttggctgtattatatattgagtgatgaattgatcctcttttttccctaaggggattatggaattgtttttcttgtgttattattctngcttgtggaataggctgggagccaaaccgggggggctggacacggcgttacttaggggggctggccaaacggagggaaggaggaggccncgtgggaagttgttactttgttnccctggacagggctggacccct

SEQ ID NO: 123696 - DNA, 606 bp, Homo Sapiens
ctggggactgataagtgctttaagcaatgtccataccccgtcaagactcccagcttagtcattttcttgtatttttctgttcacagtatttgtgtgtgtgcttgttttggcagctcattttggctgtattatatattgagtgatgaattgatcctcttttttccctaagggatatgaattgtttttcttgtgttatattctgcttgtgaatagctggagcaaacctggggctgacacgcgtaagctagggctgcaaagcgagaagagagccggtggagtgtacttgtccctgacaggctgacctacctgagtctctgagcttttcagtccaaatctttgcaaggctcaaaatgccacagaacctctcctcttctccccactccccatggcagggaccggaccatccctacatgcaacatgctgttcctccagcccctcccattgccatggcaaaacaggtacctttggggcatgggggcattacatgggatgcttgtgtaatcgaccacctagccttctctctcccctcccgtcctcccccagaatcacttgctaggacacccgagctgcttgcccagggtcctgtttccctgctaactccagaga

SEQ ID NO: 123697 - DNA, 1039 bp, Homo Sapiens
  misc_feature (68)..(93): n is a, c, g, or t
  misc_feature (803)..(856): n is a, c, g, or t
tttggggccgtggctagcaaagctcatggtgaccagtcctgggcctgaccaatgggtgattacatttnnnnnnnnnnnnnnnnnnnnnnnnnntgccaagaacagatcacttgccatggacatcagtaatctattggtaatggtggaaatttcatgaaaatttcccctaaaccataacaaaaactgtcctccttaccccaaaagtgctggaggaaagatggttgcatgacttgacctctctttgaacttgaaatgctaccttcctacccggaaatgcgacacactatacttaaaaggccagatggctgcaggctgtttgcacccctggctctgcccagggacacccctctcctggttctaatgctcagacccaggaggcagagtccgcagcccgagggagcttcaaggccgaggggtaggacctgcagggcccacaccacccttctgatggagagctttgcacatgcattcacacacacatgcctggcgggatcgcagaggatgggtctcgtggcaggagtgggcagaatgggatgcattttacagaagagtcacagagaggctcgccctcggcggaggacacacagctgagtgggcgtgtgggagtgcaggtgtgctgactccgaaccaagggagagctctccgtcctgagctcgctgcccctcacgatgcacacggctgatggctgaggtcagcggtctcttccctgagtggcaggtgtggtccctgggacttcataaaccatcctcatgacagttttacacttagagtccccactgcagtcccaggaggtggcctgggcnnnnnnnnnnnnnnnnnnnnnnnnnnnnnnnnnnnnnnnnnnnnnnnnnnnnnncagaaggccacatacccggggagaatcgcaggcagcaggggccaggccccttccacagcactgcctctcacccttctcccgaccaacccccaagggcatgcctctggcttcatgaaccttcgggggaaattagctttctagtttgggggccctcgtgccgaattcgccacccaggcctcgctc

SEQ ID NO: 123698 - DNA, 892 bp, Homo Sapiens
  misc_feature (48)..(180): n is a, c, g, or t
aaatctcacaaacataatattggtgaaaagaaaccagatacgaagaannnnnnnnnnnnnnnnnnnnnnnnnnnnnnnnnnnnnnnnnnnnnnnnnnnnnnnnnnnnnnnnnnnnnnnnnnnnnnnnnnnnnnnnnnnnnnnnnnnnnnnnnnnnnnnnnnnnnnnnnnnnnnnnnnnnntgtatgcacgtgctccacttgtgaaaaatcattgatgtgtttctatagttacactttaataaaaagttaaacaaaatgatttgcctctgtctggatactcgactcaaaactgaaaaaaatgtctcctttgctctcagcctctcactttggctacactctcgtactggcattctcagctcctgccacttgcaaatggtgagggtgggaagagaatccctctccctgccatgcaggctaaactagatttgctacaggttgggctgctaaagaaggaggtctaccaaactgaaattcaagtcttatctctgcttcctgccagtgcactcaagtgctgtcttgctctctctaaccccctctttcaacaaagccccttactcagaaataaacactcctctcagggaacatttaagtaagtatcaacgttttgaaccaaaagaatggagctctaatagttaacatctcaagctgcaggtggtggatgggtgaggagtcatctgggctgacacccgtggaggtatataacaagcacttggagtgctggcccagcttgaggagggggtgtgaaaatcctggctctcctttgggcaagtctgtatcctctatgactcagtttcctcatcattaaaatgggaataatggtgctgagatgttataacaatcaaaatgagttaccacaggtgaagaatttagcaaagtgactgacttaggtacc

SEQ ID NO: 123699 - DNA, 1794 bp, Homo Sapiens
  misc_feature (64)..(76): n is a, c, g, or t
ttttttttatacataggattttattttgcactgctgtaacaatttcattatagaccaagggagnnnnnnnnnnnnnggataaaaccaccacactgagtaaattactaaagcttttctactttgtaacaggattttccatctgatagatttattgtcatatccccttcaaaacagacaagatgctcaccatattttaaagattatagaggttgccactgaaagaaaaattttacacagtcactgtacatcaaggttgaaaaactgtcctgcatgaaaaatatacttagaaatcatgtgaataaaagaaaaaagaaaacattattgtgtttaaggaaagattaaagtcctcataatgtgccatctaaatgtggatactcattcttcttggagtcgctaagatgtagaaatttcttgcttctgcccttttcactcattatactgtgttttttcccaacagtattcattaaggcaaacaaatccctttctgaagaggtcttaaggaaattgtggacaaagcaaacttttggcattaaaacaggttaacatatacaaagcctttgtaatatacattaagcatatttttcttggactagtgacaagaaaagatgaacatgcttgttaacaatgtcaaaaagtttaaaattcagtgtccaagcaattcctaacaatgcttctgtagctttaagctctaaacagtatagaatttatgcaaatgcattaaagaattcaagcttggcaaattacacccaagcaggttattaaactatatatacagaaagtaaatgataaatacagaattaaaagagtccttctgtttccttatagccgtgaaaattgacaaagtttctgaggacagttctataatattaaacattaggtaaccacagatgttgggaaacctaactacacaaaccgatttaaaatactcaagatgactttgtagtgtttaatacaattcagttcgtagttaagggcacaagacaacatttaacaaaaataatcacatcaattgacctagaaatcaaatgcaaatagatatgaatacaatctccaaaatctgtcttttaagtgaacattaaccatttattcaaagttatacaagaatttgacggattaaagtcttctgtgacataaagccatttcaaatagtttcatgtctcagctgagcaggaggagagggggtgaaagaataagtgagtaggccccgttgggcagctagacagtaaaaacagactcaacagcagccgcccccagcctgctgtcctccctgattgcctgcatgtgttgcattggtagcagcatgctgagggccaattttaatgccatttgcctcattattaatgtcaaagactccttcttgaattttttcataaatttcttttgctgtattaataaatgcctcttctacattggaagcagtcttagcagacgtttccatgaagatgagtccatgttctcgtgcaaaagcttcaccttcttctttttttacttctcttctagattctaaatcacttttatttccaataagcataatgaccatgttggaattggaatgctggcgggcatcttctaaccaggttgtcaagtggttgaatgtatctctccgtgtaatatcgtaaactagtaaagctcctgctgcacctctgtaatacgaccttgtgatggaacgaaaggattcttgccctgccgtatcgcatatctgaagttttatctgttttccatcaatagttatcattcgagcaccgaactctgcaccaatattaaggtcatgcactggctgaaacctcttgtctg

SEQ ID NO: 123700 - DNA, 1367 bp, Homo Sapiens
  misc_feature (153)..(153): n is a, c, g, or t
  misc_feature (215)..(215): n is a, c, g, or t
  misc_feature (306)..(306): n is a, c, g, or t
aaattggccaaaagttttttggggggccagtttcttttataatttttaaccccttgggggtaccccccccagattgttgggaaacccttaatttccccaaaaaccgggttttaaaaattttcccaaggagggcctttggtaggggttttaatnccattccaaggttggtagttaaggggcccccaaggccacccttttaaccaaaaattaatccnccttccaatggaccttaggaaattcaaaatgccaaatagaatatgaatttccattctccaaaaaatctgttcttttaaggtgaaacattanaccatttattcaaacgttattccagaattttgacgggatttaaattctttctgtgacataaagcccatttcaaataggtttcatgtctcagctgagcaggaggagagggggtgaaagaataagtgagtaggccccgttgggcagctagacagtaaaaacagactcaacagcagccgcccccagccctgctgtcctccctgattgcctgcatgtgttgcattggtagcagcatgctgagggccaattttaatgccatttgcctcattattaatgtcaaagactccttcttgaattttttcataaatttcttttgctgtattaataaatgcctcttctacattggaagcagtcttagcagacgtttccatgaagatgagtccatgttctcgtgcaaaagcttcaccttcttctttttttacttctcttctagattctaaatcacttttatttccaataagcataatgaccatgttggaattggaatgctggcgggcatcttctaaccaggttgtcaagtggttgaatgtatctctccgtgtaatatcgtaaactagtaaagctcctgctgcacctctgtaatacgaccttgtgatggaacgaaaggattcttgccctgccgtatcccatatctgaagttttatctgtttcccatcaatagttatcattcgagcaccgaactctacaccaatagtaaggtcatgcactggctgaaacctcttgtctgtaaactgtagcaataagcatgatttaccaacacctgtgtcgccgattatgatgtacttgaagagataggcgtacgccatggccgcggccgctcagtgccagggcacacggctcctcctcccgctgctgctcctcctccgcgccccaaccccggtgccgctcagcctcgaaacgccaggcgccgcccgccgccgccgctgctgctgtcagccgccgggagtgaggggctgtgaggaagccggacgaactgacacccgcagagccgagggagacagcgcccgaccgagcccagccgaacaataacagccgccgcggcgcctccgccccgcctccgcccc

SEQ ID NO: 123701 - DNA, 614 bp, Homo Sapiens
  misc_feature (447)..(510): n is a, c, g, or t
tttgtgttcataagcgtgtttattaacttagaatgccaacaaaaacaaaaagaagggctactcttcaaaaattctctttccaatgttcaaggactgtgagtgcttttcgttttcagacccctggtcctgggcttaaagcctcccttggctctgggtcctgggacagggagaggcccctgccatctccctggccccatctcccccagctggccggctccagccacagaagccttctcggtgcttctcgaacactcccagggatcccagccccagagcgtctgccctcaccactgccccacatggaactccgtctgcccccggatcgtctctgtctgcatgtaactcatgccacctcctaggaggggccccgcagtgttcttcacagcgcatctgacatgctcttgtctgccatgtttacctggttgtcgtatgtctccttgtgagccnnnnnnnnnnnnnnnnnnnnnnnnnnnnnnnnnnnnnnnnnnnnnnnnnnnnnnnnnnnnnnnnaggacctcggtattaagtgactgaactcaggttatagatgccacaggacaagaggaggtcaccagacaccaggacaaaaggaaagagacattttctaataagcg

SEQ ID NO: 123702 - DNA, 1023 bp, Homo Sapiens
caggttttaatgacgccaaccaaaggggcctccaaattctgccaatgtcaagacgggatcttcgtttcaacccggtcctggttaacctcctgcttggtctggacaggaagggccctgccattcccggcccatctccccacttgccggctccagccacagaaccttctcggtgcttctcgaacactccccagggatcccagccccagagcgtctgccctcaccactgccccacatggaactccgtctgcccctggatcgtctctgtctgcatgtaactcatgccacctcctaggagggccccgcagtgttcttcacagcgcatctgacatgctcttgtctgccatgtttacctggttgtcgtatgtctccttgtgagcctgtctgtctcggtcactgctatgtccccagtgcccagcccagggccaggcacacagcagagtgcaggacctcggtattaagtgactgaactcaggttatagatgccacaggacaagaggaggtcaccagacaccaggacaaaaggaaagagacagttttctaataagcgagaagcagcggttcccagcgcagctgagagacggtccttgcagctgggagtggcagtgggggcgggcggtcccaggagctacctgtggccctgggcactggcattcatatggtcccggatgctgatggcctgtttgagcagaccctccacgctgcggaagtagacgctgctgtccaccaggttcttcacggcgctgcaggcgtactccacagtgtagatggctccctggctctgctcctcccaacgctgcatgtctgccttgtgctgggccagctcggggagggagcgacgcacatgctcctgcagccggtacagggccacggatggctcgttggccaggacgtagacgctctcagtgaacttgtccgtgactttcttccccttgagctgcatctccggctcctccatagcgaccgcggccgagcgaaccgcctcgtgccgaattcaccacccagcctcgtacctagcctatgtgg

SEQ ID NO: 123703 - DNA, 1158 bp, Homo Sapiens
ctgtcttttcggctgctcttgtggcgcctctctctgacgtcgcgctttgtttgcggtgtcgcggtgggcgcgcgtgcccgtgtggtggcgtctgtttgtgtggctggtcttctccttgttgtctcctcccctcgttttttcgtctcctctgtgtttctcttgtcctttttgtttgggcttcccccccctgcggcgcggtggtgggtcggcccctggggcgggcgcgcctatattttcggctgccctggcccctggccgtcgggtttcttcttcacggtcaccttccgacgtcctggtaggcttctcatgtttggtcgcttccctttggtcatcggttcctgcgcgatcgccattcacctcggatccgtggttcatggaggcttctgactggtcagtgccgagtccctactattcaccatctgtactacggggtgcttcctccatgttggccctgatcagtgggttgggccgttgctgtccattgaggcaagtgaatgcagctttggtgaaggcgtagattccttgctgaattgtccaaatctcagctcttgtagagaatgctgcatctccagccttccttatgccatgatgaagaatgggagatctcaaggccttgggtgctggtggtctcacacgctatgatcccagcacttttgggatgctgagtcgggagtatcacgagcctcaggagtgtgagaccagcctagccaaacatggtcgaaacccctgtctctgggttggcggagtctgggggtgccccgagtctcttccaggatcaggctgagtgaggtgcggggttggttcctccgggctgtggtccctgggcactggcattcatgatggtcccggatgtctgatggcactgtttgagcagaccctccacgctgtcggaagtagacgctgctgtccaccaggttcttcacggcgctgcaggcgtactccacagtgtagatggctccctggctctgctcctcccaacgctgcatgtctgccattgtgctgggccagctcggggagggagcgacgcacatgctcctgcagccggtacagggccacggatggctcgttggccaggacgtagacgctctcagtgaacttgtccgtgactttcttccccttgagctgcatctccaggctcctccatagcgaccgcggccg

SEQ ID NO: 123704 - DNA, 613 bp, Homo Sapiens
ttagtaggcagtagatgggtggggaggtcccgttgataggtgggtaattgcccatgccgggctctgcctgagagactgtgcacgggtataagcaggctgctggcacgtggtaggatagaggaaatgtgggctcccttctctgtcttggggggtggaaatctctgggactagcatggggcctatggcctggaaaagagagaggaaggtggtggagagagagtgggagagatgggctgacatggtccctgagcagcagggtggaacattctggacctgcagacacccctccacctgccacctccgaaatcatcccacaagcccagtgagaaaccccaagtggttagacaagcaggtgcctgcctggctgccaagcgggcgggttggttagttcagagcagagagagaggctcgtggctaccctcggcactgacctgggttggcggaggctggggggccccgagtctcttccaggatcaggctgaggagggcgggggtggttcctcctgggctgtggccttgggcactggcattcatatggtcccggatgctgatggcctgtttgagcagaccctccatgctgcggaagtagacgctgatgtacaccaggtccttc

SEQ ID NO: 123705 - DNA, 859 bp, Homo Sapiens
tttttttaaaatatacagatatatttatattatcaaaaagtccccaaattggggaaggggcatcaggtagtctggaccccccactcagcccagactggaaggaaggctgaagtccccaaagcgcagctctcagccctgtagaagctcagccaagagctccctccccgtgagctgagtgctcctctacagcacccgctttctgctgttctggagtttgttgggaggagcagggggctcccttccggcagggccccagggcctcacgcctctgaaagggtggtggtcctcccaagttcctgacttatgcccatctctccagccccacaaggacagtgaacccggtggggtgagcaggttgggccaagaggtctgaacacctggacagagttgggagaggttcctgcccaggctgacccctgctgcctcccacccctgccggggaaccccatgctgcagtcaggatggaggatgtgggttgtggggtgcagtttcccatgcaccccccgctggctcacatcaggccttggagcataaggggtgtctgaacagaaggcttccagcggcggaatcctagagccaaggatgggctcctgtgctcagacgttgcgcaaaagagacagagggtccgcggtgaaggcagccacactccggcgcatttcattttcactacctcgaagggggatcagtgacacactacccagccggacctcaggcactgcccgggacacgcgtgagggctctgagggccacaccaggccgtcatgctgcacaaacagaaaggtagcgaaccactcccggcctcgtgccgaattcgccacccaggcctcgctaccttaaaccgttagagtactgcctaccg

SEQ ID NO: 123706 - DNA, 1656 bp, Homo Sapiens
  misc_feature (176)..(195): n is a, c, g, or t
  misc_feature (234)..(234): n is a, c, g, or t
  misc_feature (256)..(256): n is a, c, g, or t
ttttttcccttccctggggtttgagggggaaggaaaagataggggaaagggccagtgggggagaaaaccctaaaatttttcaatcagaaaacgggaaaatgtaaaaagtgggaggtggggagttctgtgcaaatcaatctcccaagggttctgcgtcctctagtgagcctcaaagnnnnnnnnnnnnnnnnnnnnggtggggactcgcaaaaaggatgagggaaaggctccagnacctacagagcaccctcccttnaataaataccagttagtaagaaagagatgcacctgcacaggaatgcacagcaacagtggggagggcctgaggtggagtccgccgagcaccctgtcgccccactgaggctcccttggggacaggcggtctagtgctcattccttgccctacgtgcagcaggtactgtgcaggctctggagatgcccagtcctctgtctggaccagagtccacacagagctgagctggggcaggagactggctttcactaggctttcatctgattttaataaggacctggaagataaaaggctaaatgtgtggtagaggacaaaaaacaaaaacaaacctgggggataatataaatacaatctgggggcaatatttattaattaaaactacgtcttatagtttacaaagatgctaatgaacaacaaaagtataattgacctttaaaatcctcagtgagacagaggcttcacatcttcagaattctaaagtgtgctccaggcagggaggcggggctgtggcacgcaggttcccaggggcagcacctgcagactgcaggactcggagaccaaaaggatccacaaagcaagactccagtctcctgtagaattccattccccaacccccactgtccttgtattcctgcctccccagattccatttccaaggcaagtcctcagtttatcgtcgggagaatctgttcttgaaagctttaattgtcttggccatcattggggcaattttcttcacagtgggtttcctaggatcataggaaacagtgctgctgaccactggtgccaagtgggcactgctggtgcttgggccatcataggccggctcctcagggctggggttaaagctgatgctactggcggaagcatggctgcttcccatggggtacggggctggcttgatcttgattttctcagggacagctgctcctcccgttccaaacttttcctgcctcctccggacgtcacgaggtggcttggccacagagttgacaaaggccatctttgcttgtcggcctttgggcttattggcatgtgcgaactggatattctttgttagtactcgtagccgctgctctcgggcgtcctgaagccgcaggtacatctctcgccacgactcatactcttcgggtctttcttccttaaagtctcggtgacaatgaactttccataattgatctgtttcttcaattaatacatgattgtattcctctatgcgatacagctgatcaggtgtacacctctccaaaacgggttcaagaacagagtatgggactcctcccacttcaaagattgaatcgatgttgtttttaagtactcggatgcattgctggtgcaaggtcatcattttagggagataggcacacttggaaccagaatacacctgcatcttggaattcatt

SEQ ID NO: 123707 - DNA, 1261 bp, Homo Sapiens
  misc_feature (219)..(270): n is a, c, g, or t
  misc_feature (509)..(547): n is a, c, g, or t
  misc_feature (678)..(678): n is a, c, g, or t
ttttttcccgggtggaacaaatcttttattttctgaagacaagtgatttgaagtccagactgaatggcatttaagaattaggaatcctgcgtgccatcctggagtgaattaaactaaattagagtccagaatatgcagcttctttaagaaaaaattctcctctgaaatattttctttcccactgcattaagtagtgttcctcatgagacatctgaaaannnnnnnnnnnnnnnnnnnnnnnnnnnnnnnnnnnnnnnnnnnnnnnnnnnngccccacttcagactcctggactctggatctctggagggtggaggcatctaggtgattctgaagaaccactggcttaaaagtctccttggtcagtgctttccactaatcagtaaatatatagagctagcagagctggagctctgtttatcacttctctttttagaatgaagtctctgtttgacagtgggaaagcctgctagaatgatcctgagttgcttgtgaagtcatacaagcaatnnnnnnnnnnnnnnnnnnnnnnnnnnnnnnnnnnnnnnngacttccctggctgcagtccagattggatatctgtctgcttctgagaacttgcagactcgcttacttgaaacacttcattctccgttcaggcgtctgtaagctgctttggttgttctcctggttctttctnaaaagcaccttctaagatagttttcataacctagaggtcacaggcaggatactccccacccttaacatccccgacccccaacttccaaactatactggcttgaggccaagggagttccccattctttctatgaagctactcaccccctattcatattgagacacaccaactacctgggctgaagctggagcagggtaggctgggagttttacccttctgggaagaccggagaagagagacctatggtgggtgtgggtgtgctgatgatctggaatgggagaagggctcactgagaaggagagatgtttagactgtgggtgtgtgttggaggcatgtgtggtgtggtcacgttgtcatgttcctgggctagtggcagccaccacccagtcattcccaccttgatcctcactccattcaatggacaaccatggggacctgagtgtgcccaggcccctccttggctgaggctcctgatgggactgggcagcctcaccatcagacaccagtgttatcctatctgcaggtgccaggctctgactttgctctctggatttctaggaaaaagaaagctctggacaaattt

SEQ ID NO: 123708 - DNA, 881 bp, Homo Sapiens
  misc_feature (1)..(1): n is a, c, g, or t
  misc_feature (32)..(69): n is a, c, g, or t
ngagaaccaactcatctttattaaatgcatcnnnnnnnnnnnnnnnnnnnnnnnnnnnnnnnnnnnnnnatagcacatacttcaggcctgcggcaccaccccatagagctggtgaggaagtaacttctgcttctcattgcaactgtagatccatcggggacgaacgaatgccagggaggggttgtccatcagggcctcctcaaagctgggatcccattcctgtgctgtgatcacaaactgaacccggtcactcatatagtcctcgagctccccattgaaggctgtgacgtatcggatgagtttccgccgctcgtccccagggaactccccgtaaagaaagaagtgcttgccctggaagaaatctgggagctcagggactggcagatcaggaggctcctggtgttcctcactgtccgtgttctcatccgtggagcctgcatacgggtcttccccattctcctcctggccagggggcagtctgtgttccttctgctctgccaccctcctcagctcatcctctgtgtccccagaatcttccgccccattgtcctgtccttctgactgtaccccctcaatgtctatatcttcctggagcactggtgaggctgctttggtctcttcaggggttgggggcttctggggtgagctgggtccagctgcctgagtgggcttggttttggtctggggttgcttctgaggaagcttgggggcttcatctccgctgccaccgctgtgagaggcctcatcctcctcactgctggaacctggccctgccatgaggtacctccgggagggcagggactggctgcaaactattttgcctcggccgattcacaccggcctcgtacctagcctatggtttatgattttcgttgtattgt

SEQ ID NO: 123709 - DNA, 491 bp, Homo Sapiens
aacctttgtttttcactttattatacaaaaaagggaaaacaaaacttccacagttggctttaagcataggcagacacctctaagccactccctcccacctcccatgatacaaattcaagttgtggtggttgttgaatcctacaaaacactccttaaatattagaaaagaagttgggggtggggatggggggtcttcccaccccagccatcccatcccagtgccaaaatgcactcaagagtgacctcttacagcaccaacacccccaccctgacagtcctgtttgtactgtaagaatttttcaatttttaaaacaggaaagaaaaagtgccccattcaaagttgtttttaaatgaaaatacattccactgaaacacaacagtgtaggggcatccaaataggaaactggggttctttgcagggctcttgggaagaaatagaacctataaacccctgtacttaattccaggattaggacaaaggaaggggaatg

SEQ ID NO: 123710 - DNA, 215 bp, Homo Sapiens
  misc_feature (113)..(113): n is a, c, g, or t
  misc_feature (173)..(173): n is a, c, g, or t
tttttgcttttgcaaagctttgtcgatggcttgtctggcccggtgtgtttgttttgtttgtttctctcggctcagctttgttggtttcggggggctttccgccgggagggganggggaaggggacaggagagcgagtgggatcagaacgtggagaaagagggaggggaggganagctgaagtcgattgtctggcttcaagacagaagtaggaggc

SEQ ID NO: 123711 - DNA, 468 bp, Homo Sapiens
  misc_feature (145)..(154): n is a, c, g, or t
ttgtctgtaagaattatgttttaaacagctgctgtagagtacctttttttaagtaaatcttacagtggagtatattttttaaagcacaaaattggtgccaagactgggtgagaaatgtacattacccccttattattttgacggnnnnnnnnnncggggcaggggaccttacctgtaagacttttaaagattttcctccctcctgtttcaggtgggtcacattctgatgaatgtttcccttgtacagatcccagcttatggccttgacccagccgtcctcacagatgccgggtgaccctctagctctctctgcatctcccaccccccgacaccctgggaccctcgaccccacccttctttcctaccagcccagagccttgtggcttgtacagttttgaaactcccgttctattttatgatggttgataatagtcagtaacctaataaaggaacgtttgttaaaatatc

SEQ ID NO: 123712 - DNA, 715 bp, Homo Sapiens
  misc_feature (539)..(559): n is a, c, g, or t
catgttttatttttattttgtggggtttgtttgcattttaaaaaattatctttatttaggtttctgattcagcacatgtatcaaagactaatcaacataaaggagtaaataagacattaattgaaagtcttacatctctctaaactctgaccaagaatgtcaagattgccactattaccagaactccaacctagtcaagttgtagacaagctatcatgaacaacatacagtgtgcacagatatgcagaggcaaaaggcatgctagcgcttggctctcctcttttccttgttgacatctttctgttggacagtccactttcgctttccaggctaagttccaaatcaagtccaaagaaggctcagggtcaacctgaccagatactcttctggaggaatgcattcttaaactgttgtgcctgcaactttgtttttgccaggatgaagttcagaccgagatgtacaatacaatctagatgacggtgcagactaagtcaagaactaaagttgtgcagtaacccgagttaaggcatgaatgcagnnnnnnnnnnnnnnnnnnnnngcacccatgctatcaagacacaggattttttcagttgcctcatgagaggcaacctgggcttggcagttaatcagaactgctgagcattccagaaaatgccccccacgactttatgctaacagctgtgtgtatgttttaatcaaaaaattaaagaag

SEQ ID NO: 123713 - DNA, 1525 bp, Homo Sapiens
ttttttttagggataaagctcttttattgtatgcattgaaaccttacaggggcagccttcgtgtcctgtggaatctgctgtccctcgggttttcttctagggtattggaatattaaactgggatattaggggcccctggggtccagaatcttgccaatgaagagaagggcccctgtgtctgtgtccctcagtacgaagatgaaaggctggttaaggtgatagtccagcgggaaggtgaggtgggcaggctgcagccctgggctgggggtggttcccgccccatcctcgttccactcaaagccagcccggtgttccacctgagtcagcttgatgggtttgcctgtgatcttgctaaagtctggtgaatcaaacaaggattgcagcttcatctcctgcagggacttggtgacttcgccttcgtaactcagcttcagcttggggacagtgaggaccgcctgcacggtcttcagttctcggtctatgtcatgaatgaactcggaggtgaggctctcctctatcaaggtcaaattctgggtcactttcaggggcaggaagaagatgatactcatgcttccggtcaagggcagctgggcaatcttgcagctgagatctgaatccaagccatagcgtaaaacagccttagggtccgacatcatggggaccctcacggtcctctcttcatccaagtagaaatcctcgagggaagtctttctggagtcaaactttgttacccactgccccttgaagtgcgccacaccgagaaggagaatgctgatctcatcgggaatttcctttgtggacctggcgagcttccctttcatctgcgcctgcacccagttgttgatctcttgcaggtccaagcgagggttgcccgtcaggactctgggcctggtcccatatgacttttccagaggtgccacaaagctggattttatgcgcagcttcttctcaaagacgatccgggaggcactcttgaggttcttctggggggcagtgaccgtgtcaaggagctccttataggtaccatggatgtctgggctgctgatcaagtcatagtagagagcccggtgaatgatggattctgttcgctgctccgctcccagcgagagggccgagagggccgtggccacactgagaggagacaggagcacgttggtcgtggggctcatgctggatcgcacccggtacaggtcatagccgaagttggagacagccgctgccagcttgttcacggggactttgaagaaaggatcctcctcctccaccagcgcccctgtgctgtcggggtctggggagccctcctccggggggctggcagggttctggcagctgctgtgcccgaggagggctccaatgcagaggagtagcaccagggcctgcatcctggggcctgtggatacgctgcagctccacacccagcctagtccctctaagcctgcacactgagggggctccagccagcacagatttttgttaatccttctaatccagcgtccaatcggaggaattccggaccggtaccagc

SEQ ID NO: 123714 - DNA, 672 bp, Homo Sapiens
tatagtttaaagagctttattaatgcaataaattaactttgtacacatttttatataaaaaaacagcaagtgatttcagaatgttgtaggcctcattagagcttggtctccaaaaatctgtttgaaaaaagcaacatgttcttcacagtgttcccctggtgtgaaattggggctccctcgcaaacgctggtttcgctgttcaaaaaagcggaatattgtatagaaaagcatgttgtcttcagtctgctttgcagcatctaaaaattttcgtgcagaaatgttgtcatggccaccaatgccccggataaaccttaaggcagctaacacttggtgtttggaaaggagaacttctactatttcatcatttgctgttgaaagtcgcttcagcatgtccagagatagctgatgagcaggaggatagaaactctctagggataacagcagacaagccaaaggtttggagtcgctgaggacgtggtactgcaggaactgatgcagcatataaaagaggttgtgctggacaagggttttgataacaagttcatgtaggtaatgctgtactgcaatctgaaactggttaagagaacgaatgtattccatcagcacggctatcacaaatttatgaggcatctcctagggaggaaaaaatgtggtcttacaaataccaacgag

SEQ ID NO: 123715 - DNA, 1623 bp, Homo Sapiens
  misc_feature (47)..(57): n is a, c, g, or t
  misc_feature (63)..(163): n is a, c, g, or t
  misc_feature (1512)..(1546): n is a, c, g, or t
tgtggcccagaaaggggggcccccccggaggaaatattttggaacgnnnnnnnnnnnaaggcnnnnnnnnnnnnnnnnnnnnnnnnnnnnnnnnnnnnnnnnnnnnnnnnnnnnnnnnnnnnnnnnnnnnnnnnnnnnnnnnnnnnnnnnnnnnnnnnnnnnncgtgtccgggaggaaaaacaatgtattttattaaagaaaaataagttaaaacccagtagacacacctacgagatgctttctttgtccctcatttcatgccacatctaactggcaattaaatctcttcctttctaggggaacactgtgaagaacatgttgcttttttcaaacagatttttggagaccaagctctaatgaggcctacaacattctgaaatcacttgctgtttttttatataaaaatgtgtacaaagttaatttattgcattaataaagctctttaaactataaaatgttataaagtgtatctacaacctcaactgtcactaaaaatatggtatagaacttgtgggatggcttactcctaaaaggagagacagacagtgcattgattggcctttacagagtgtcagtgagcggatcacattcacagccatctagtgtcacctcctgcttgccaaagaatgaggtttctttcctgaagaggctgggagaagtttagtgtcctgtggttgcctccagatctagtaatactgcttcccaagtcaactgtgcattcctgagttcacaggcgctacgttcaaagctgctgccaaacaaccgatggttggcaccatccggtgttcaacttggccttgccgatgcagcacccgtccagtggtaaaccgaccgacccttagacacagttcagtcaggatgccctgcgagagggctagaaatttagaagccgttcgcgctctgttcctttgtatcgctcttcattggcacaacttttggctttatttactgatggccctatgtaactgagtaagacagggagaaatattaatccgtgagtggctcccagtaagaccatggccacaatacatcctgaagtagaatatctggaaaatttgagatttggcaaaagccaacaccacgatccctcccaattttgtaagtgtgattccactgaacacggagctgcccatgtgggcaagtgcctcttccgcgcgctccacgcggctgcctttcatgctcaccgtgaacgctctggttatgtggctgcagaactccacggagatgccacagctcatcaccaggttgaccaaggatacagcgttcagactgatgccccagagccacataactccaaacatgttgaccaagaccatggcgatggtggcacacatgatgactgcagaccagagctcacagcccaggaggaccatggtcaccagaaatatcgcgcccagggacacaccgaggttgaagatagtgtcgtcaatgatggtcaggtactgttcgtagaagacatccccggccgtaatggccgaattcccgggcatatgtccggtaccgtcgactgnnnnnnnnnnnnnnnnnnnnnnnnnnnnnnnnnnncggccgcttcctcgctcactgactcctgcgctcgtcgttcgtctcgcgagctgcgccctatatgatctatacatttc

SEQ ID NO: 123716 - DNA, 549 bp, Homo Sapiens
ctcgcgaacgtgttatccaactgaaaccttaataagccccagaccctttaaaacccttagccaccatttgccgtcttattcctggctttaagagatattccaagatctgctataagagatgggctgtgcctgatctgggtcctaaatgtgtcttgactcaaaacacacctcctcggtgagttccagagcataatccagattctgtcagtatactgaattcactctactacaaataatgggccaagggctaggtgggctgttatcagattgtgttgtttacaaaaatgctaacccagggtcctcgctcaccagctgccagtgccctctgctactctttgaggctatggttaccccaagtcttttcattgcattctcacctggtgtgaaattggggctccctcgcaaacgctggtttcgctgttcaaaaaagcggaatattgtatagaaaagcatgttgtcttcagtctgttttgcagcatctaaaaattttcgtgcagaaatgttgtcatgccaccgatgccccgatacacgttcgcgagggtaccgacc

SEQ ID NO: 123717 - DNA, 734 bp, Homo Sapiens
  misc_feature (624)..(624): n is a, c, g, or t
caccctgccctgcctctccagtccctgactgtccccactggccagccccgaaagcccagcaacgagggagccaggctggggcaggaaacacacagcagcctcctctcgcgcccactttattagggggcaggtgtgggaggacctaggcctgctgtgcctgcagtagcgcccgcacctggcggatctgccagtcgacgctggagcgcgcagtgccgcccagggcaccatactgctccacactgtgcccgtagtcccacacgcagatcacgtcgcccgagaacagggggctgatggtctgcagctcctgcagtgacagctggttgagggcgacccccttggtctcggccatgaacacagctttcccggaggcctcgtgggcctggcggaatggcatccctttgcggaccaggtaataggcaaggtcagtggccagcatgtcggggctgagagcctgtcccatgttctcttggtgaatctgcagcgtagagatgacgccagtggccacctggagcacggcactcatagtgtctgacacttcaaacacagcttccttgtcctcctgtaagtctttgttgtaggtgctgggaagtcccttgagggtcatcaggagcccggcacacggcncaaacacacgcccagccttgctcggatcagctccaaactggtcgggttttctttctgggcatcaggctgcttcccgtgctgtaagcatctgagagctggccgaaactgaa

SEQ ID NO: 123718 - DNA, 1077 bp, Homo Sapiens
caggagcctggcctgggaggacgatttattattacactgggggtttccttggcagctggggtcatcagggtactttcaagaagggctcgtgcaggacatcaaacagcctccgggctttctgagggcccaggcctgggcataaggccagatcttctcttgatgcggcgatgagctgttccagagatccaaatgtggtcaggagggtctgactgtccgttttgttgactgacttcacggtggtcagacattcagtcacccgggagacgaagtcctgctctagcttctccatcaggaggtccgctggtttctgctcataggccttgtaggtctccaggtaccgcccagcttcctcggggctccaggcgaggatcaatgtgcagtcggccaggatacacatcttagccagctccttgagggcctgctggggatctttcacatccacctggacaagcaggacccgcaaggcgaagttcttccccaggctctgcagccgcccatggatgtagtctgggtgcaggttgtggtagcggaggctgaggaacagggcacaggtgctctggcccagcacatagtcgggaattacgtcgccaaattcccagggcacattgcgcacgaacttcagtacgggattgcccctctgccgagggctcacaatgatgctgttggattttgccccgggtttcagggcctggttgggcgtctctcctgccaggggctctgaccctgtggggcacgtggccccagccccttccagaggctgtgagatggcatattcggcgtaggtctgaggggccgcctgggccgaggtgtccacagtgggaaggctctgtgtagatcggaataagggcttggccactccaggagggacctcatcctcgtcgaggggtatcacaaatttcttccttgctggcggccctgagggctggggcaccccctctttgtccttcccagggtccatctggagcctgtggtccgggcctcacggtttcagcgccgcgaggcctcacctgctggtcttggagcctcaagggaaagactgcagagggatcgaggcggcccactgccagcacggccagc

SEQ ID NO: 123719 - DNA, 960 bp, Homo Sapiens
tgtcccgcctggcctcccaagtgttgggattacaggcggaagccactgtgtctggtctttggttcttttttcaccttaaaactttggggtctcaggttgtgtttatttggggctctctccttcccccaactccttgggttctttcccagagctcttactttctgagggcccaggcctgggcataaggccagatcttctcttgatgcggcgatgagctgttccagagatccaaatgtggtcaggagggtctgactgtccgttttgttgactgacttcacggtggtcagacattcagtcacccgggagacgaagtcctgctctagcttctccatcaggaggtccgctggtttctgctcataggccttgtaggtctccaggtaccgcccagcttcctcggggctccaggcgaggatcaatgtgcagtcggccaggatacacatcttagccagctccttgagggcctgctggggatctttcacatccacctggacaagcaggacccgcaaggcgaagttcttccccaggctctgcagccgcccatggatgtagtctgggtgcaggttgtggtagcggaggctgaggaacagggcacaggtgctctggcccagcacatagtcgggaattacgtcgccaaattcccagggcacattgcgcacgaacttcagtacgggattgcccctcactccaggagggacctcatcctcgtcgaggggtatcacaaatttcttccttgctggcggccctgagggctggggcaccccctctttgtccttcccagggtccatctggagcctgaaagggaaggtgccaggagcgagtgagccactggcgtctacgttctcatcccgcagcaggaaccccccactcacagccgtcccccacaaaactccgagagctccataagcgtcaggtccccctcgtgccgaatttcaccccaggcctcgtacctagcatagtccc

SEQ ID NO: 123720 - DNA, 945 bp, Homo Sapiens
  misc_feature (306)..(323): n is a, c, g, or t
  misc_feature (325)..(463): n is a, c, g, or t
  misc_feature (465)..(478): n is a, c, g, or t
ttgtgtgggagccccttttagggcccgaggttttcttcgggaggtttaagggccggggggatcgtttgggaacccccaggggggggaaagtatcgacattaaggccaaggatgccaacccggtgcggttccaacggtggggagcccccaggggggcctggtggcaaaaaaataagggtgactttagcccgggcgcaggggggtccccccctataatcccaagcacggggaggttgggccaggcccatcagagggtcaggagatcggagcccatcctggctaagggggtgaagccccgtctttggtnnnnnnnnnnnnnnnnnntnnnnnnnnnnnnnnnnnnnnnnnnnnnnnnnnnnnnnnnnnnnnnnnnnnnnnnnnnnnnnnnnnnnnnnnnnnnnnnnnnnnnnnnnnnnnnnnnnnnnnnnnnnnnnnnnnnnnnnnnnnnnnnnnnnnnnnnnnnncnnnnnnnnnnnnnntaataataataataatagcttaaaaagattgtaactggattgttggtaactcaatggataaatgcttgagggtataggggaaaataaagaaccaaaaccccactctagatttacccaggaaacagctcctttaatgactggttcctcatttttttctccctcccatccaggcccggaggctgtttgatgtcctgcacgagcccttcttgaaagtaccctgatgaccccagctgccaaggaaacccccagtgtaataataaatcgtcctcccaggccaggctcctgctggctgcgctggtgcagtctctggggagggattctgggggtgtcaccttctggtggcccaggtgggcaccttcagctttctttagttcctcagtttcccgggggcagactacacaggctgctgctgctgctgcttccgcttcttgtcccggcctgtgggagcctcctccccagactctgaa

SEQ ID NO: 123721 - DNA, 599 bp, Homo Sapiens
aaacgtatatcttaactttattgaataagtaagtagccattacatatagattgcaagtcattcttggtcctgcttagagataggtgtttattccaaggtgaaatgacagcacaaatccacagttctactgcaagtgaaatacttcttcagggtggcttggtatggacacaatctccctcaatacccattcaaagcagtctttgctttcacctctccctttaggtgagggattcacggtatgtaaaataagcttgtaaagaacccttctgtatcagaggtagttttgtgcctgcactgtgaaccatagaaggcatttggtcaaaggtgtcataaaaggggcagaagaggtacatcagagcacagagttgggatcgattatttttttcaagttaattgcccatagtagcaaaagtatcaaccaaaatttagaatagcctgtccatccatttaacaacagagcatgcagcagcctgtgcagacaatagcttttagagacaaacttcgatctggtttgagcaccaagaatgcatcttaaaaagtgaaaaattcattttgtgtgcaatgaatagtgtagtgagctgcatggtgccccctcccca

SEQ ID NO: 123722 - DNA, 359 bp, Homo Sapiens
tttcgaagatcagtactttattttctctagctccagtgttttgcaactgtagcagcatatcagaaacatccccacacaaaaacacacaattctccccttcttcaaagagctggcaacaattgagaggcagaaacaatagttactacaggcatttgagaaatttaagaaataacacttgctcacccttgaaacatacattgtgcgtcttgcaggtaggaagcagcagtacatttgtcattcaaagacacaatcatccttaaataaagttaaataaaaccttattggcataacaatgtgttggagatgcagctttatggggactttggaggaaggtgcttggaataagacatgagcatttt

SEQ ID NO: 123723 - DNA, 1630 bp, Homo Sapiens
  misc_feature (1514)..(1549): n is a, c, g, or t
ttaggaaggcgaaaacacatgtaattttatttttgtttaaccttaagcttgccaacttctttccctgaacagcatttgtcttgttttgatacccacctacacttatattagaaacgtactgcaaactatttagtgactccacttttaatttatggtcgtatgactaagatgttttgaatataagcctatccgtatgccagatataaatttcaggaactcttaatgtctcttcttttacagaaactctacctctatcctgatgtaattaggttgattaagaaaattaaaggccacgggccagaaaactaacttccacaaatgcaacaaaaggaaaatttctccaataacctgtatgcaatgggaaatctttcttttaagtaccaagtcaatttctttaactgtacaatgtattctaatttgaaggttttcaaatataatacagtaacaacaaaatataataaaattaagactataagaaaacagagtaaatggtataattcaataatgactaaaataaaatgacactatggattttgtaatcaacctataattatctatttaaatttcactttacatacataagatcacagctgaggttaaccataatttcaaattttatcaccagccacttgtgctattttatcacatttgaaaatattcactcgtattatttacttcaaacagtaatctataaatttgtttagactataataattaaggacctttccttcttcagggataactaaaaaaattaaatgatgtattgaacatactactaaagaaagtttactttttgattatggtctctgcattgaaaatctgtaggaatttttctttaataatttttcaaatcttcccatggcctctctgttcacagaaatatcatctttgaaacaacttgtgtgagtactttataaatcaaaaattgattcacatgaccatattaccataatcaccaattttaacagtctcctacatattttctatatcacttttcttgattacaaaatgtcagtaataagaacacgctcttaatataacagaatatttaattacatcagtttcccatgaacacaccaaagtcacttaataattatattggccatttccactgatcggcaggaggctcttccactaatggctcccatagtttccattccctcatttttcttgccagatttagttcatgttcagcctgaagaatcacctcttctaattgaccgccttgaagttggtcttctaattttttaacatctggttccgctttaaccatagccagcttctcatttgtaatctgttctgtatactttctatatgctgcatttttagggatttcctcaagaacatcaagaatctttgtgtacaatattcttagcctctcgtgaggagtattgcacacagccaatcccacaaggccagtggtcttcttcagcacacccgccatgacagcgccaacgactccccccggccgtaatggccgaattcccgggcatatgtccggtaccgtcgactgnnnnnnnnnnnnnnnnnnnnnnnnnnnnnnnnnnnncggccgcttcctcagctcactgactcgctgcgctctgtcgttcgaaaaacgcgactagcgccctatgatgatgtataatat

SEQ ID NO: 123724 - DNA, 1328 bp, Homo Sapiens
  misc_feature (78)..(86): n is a, c, g, or t
  misc_feature (538)..(561): n is a, c, g, or t
  misc_feature (670)..(694): n is a, c, g, or t
  misc_feature (726)..(726): n is a, c, g, or t
  misc_feature (748)..(748): n is a, c, g, or t
  misc_feature (755)..(1155): n is a, c, g, or t
  misc_feature (1168)..(1168): n is a, c, g, or t
  misc_feature (1171)..(1171): n is a, c, g, or t
  misc_feature (1195)..(1195): n is a, c, g, or t
ggccgctgaccttccctggccggggttctggggctggggtcgggacaaccttgacccccttaccaccccctaagatgnnnnnnnnnacgatcctgagcacggtccctcggcagatgttcagcgatgcaggtagcggggacgatgccttggatggagacgatgacctggtgatcgacatcccggagtgaccgtgacatcacgccatgcccaccaacggccccgcccggcgccctccccgtgccagcacacacgagtccagcttcctcggaggtgtttattgatgcccagctgccatgctccggccactgacacaaccagaaaaggcgtaaacatgcacgggtgtcccccaggagggtggcaggggccctgccttcaaaccccggccccctccaggggacagttatttaaacgagtggccgggagcatctgccacctgctggggaggcagagaccctgcaatggccacctctttaaaagggcagctgtacagggctaggttttttcaatgaagtttctgtattaaaggagtggctctggnnnnnnnnnnnnnnnnnnnnnnnngagacattctcctcctctgaacctcccctaatccgacctcctccctgttgggggagagggacggggcagcgtggagaggcaggagtgaggagcgcggggaatgtctcannnnnnnnnnnnnnnnnnnnnnnnngcctacaagccagcggccgctccaaccctcgntgccgaattcttgggcctcgangggccannnnnnnnnnnnnnnnnnnnnnnnnnnnnnnnnnnnnnnnnnnnnnnnnnnnnnnnnnnnnnnnnnnnnnnnnnnnnnnnnnnnnnnnnnnnnnnnnnnnnnnnnnnnnnnnnnnnnnnnnnnnnnnnnnnnnnnnnnnnnnnnnnnnnnnnnnnnnnnnnnnnnnnnnnnnnnnnnnnnnnnnnnnnnnnnnnnnnnnnnnnnnnnnnnnnnnnnnnnnnnnnnnnnnnnnnnnnnnnnnnnnnnnnnnnnnnnnnnnnnnnnnnnnnnnnnnnnnnnnnnnnnnnnnnnnnnnnnnnnnnnnnnnnnnnnnnnnnnnnnnnnnnnnnnnnnnnnnnnnnnnnnnnnnnnnnnnnnnnnnnnnnnnnnnnnnnnnnnnnnnnnnnnnnnnnnnnnnnnnnggcacgaacgtanaanggcgcgtgctggcgttttccatangtcggccccctgacgagcacacaaatcgagctcagtcagaggtgggaaacggacagacaaaaattcagcgttcccctggagtcctctgcgtctctgttcgactgcgctacggaactgtcgctctcttcggaag

SEQ ID NO: 123725 - DNA, 820 bp, Homo Sapiens
tggtcctcccaaggctttattcaggaaggtttgcatctgtttgacaggcactgtgcaggggtttgtaacagttcagttttctccaaggtcccatggggagaggggtgcagaacaggaagagagcctctcggcaggcggggggggtcctctcctccagaacaaaaggcactgacgaggtgaccaccccagagccaggggctgggttatatacacatggggtggacagatgcagagaaactcaaagctaaatacaactgaaggatgaaagagtccatcttacagggccagggctgcttctgggctctttctaccaagtgggaaaggaagttcaaaacaaaggcaaagctttcaaggagaaacaagagtccagcctttcggtcttagtgttctgtgcaattttaaaacccaacaaaataaatataacttaaaaatgtcttacatgacactaaaggcaagcctgggaaaagcaagcagttgaagaaaccttccgagaatgctaagcagtgctgaatgccaggaactcgtggggccccccgcaggacagggcaagaggaccctgcgcccattcacctgggcacaggtacacagagtttgtcctgcctgctggcacatgcactgccaggacccaaggagtccctgtggtgacgagggctgggcaggcacggtcttccaggctgccagggcaggggttctgggagattccatttcacaatccatctatcccactgagacaaagggaagggccagatggcagggaagcgagtggcaaaatggcttgagagacagagtaggtgtagaagagaactagcacggtaaatac

SEQ ID NO: 123726 - DNA, 730 bp, Homo Sapiens
  misc_feature (233)..(254): n is a, c, g, or t
ttttttggagcagtattcacattttttatttcgaggtgtaaaatatacgtggccaacattgttactttcatccacagatggaatagctgggaagtataaaaacctgtacatgacctttagtgaagattatttgtcatcaaattacccatatccaagtttccatgggcctggaatttcctttccacttgatagaagtatatattaggaagtccagttaatagtatttttatttnnnnnnnnnnnnnnnnnnnnnngaatcagcagagtcaagttgtcttagtcttaaggctttctggatttcttccttggaggaggtcaggatcttcccaaggcctgggtcctcgaatattcttccagtcatcaaacttggagtctttgattttctcatattccgactctaaagatattttattctctttcagttttttttcaagctcaggatccattttactcttcacagcatcatatcggatttgagaaaactcacgaagaccaaaagaacctccaacaatcagcaacaacatggggactccatagccgagagtcttgttcttgcgaaaagcacgcatcaccgcgggtgcaaacatgagtgaactcttccatcggctcagaactccaagcgggcctagcgcagactcccaaatctcagcagctcacgctctcaccaagacgagtacgtccttaactcgcttccttttccttggttatttggtgctcggtccttagtccc

SEQ ID NO: 123727 - DNA, 988 bp, Homo Sapiens
  misc_feature (68)..(111): n is a, c, g, or t
tttatagataagtccaaactttatttaaaactacattttaaattcgttaccaaacatcacaatggggnnnnnnnnnnnnnnnnnnnnnnnnnnnnnnnnnnnnnnnnnnnncacagtgtgtcaaggcttaaatctgtccagaattcagtttctgatgttttaaactaccatggggagaaatgaccacacctatcaaaaaagcagtgtcaaactaatttacatttttatacagatcagatgtttatttagtattgttttcatatatgcattgagtatgtaaggacagagttagatgagcctctgaagacatctcatatactctgggctcccaccgtttcaggttcttttagtgtctcagaatttccagctaattcttcggtctgcatttcacatatttcaccagataaatggtttttctgttcttcttctaccattttctttcttagatctgcctctgaatatattgtcagtttcagtggtaaatcttcaacttttacaaaatcttcttcatcagacttttgacttatattaccagattctgcttcatagtcattcactaacactggagattcagtatcaggacttccagccagagagctttcaggagtttcctgagcagatttaacttctttgactctaggcactaagggttccatttcaggtaaacgtaacggcaaagggttaggctgttgagttgaatcaacagtaggaggtgactccttatgggcagcactatttaaaggttgctcatcttccaagatattgaggtaacagggtttcacaggacagttattttggtcatttttactagtggcttctcgttccaatgggacatttttgctttctgctgtctttttaaagtcacgttgtaggacctgttcatcatgttcattttcttcagtagcttcagtggtagccctggagggaagtctggacatccacagggcccttcttcaaattcttccatttcttcattctcattttcatc

SEQ ID NO: 123728 - DNA, 3351 bp, Homo Sapiens
  misc_feature (610)..(618): n is a, c, g, or t
  misc_feature (620)..(649): n is a, c, g, or t
  misc_feature (3191)..(3191): n is a, c, g, or t
  misc_feature (3208)..(3209): n is a, c, g, or t
  misc_feature (3217)..(3218): n is a, c, g, or t
  misc_feature (3224)..(3225): n is a, c, g, or t
  misc_feature (3233)..(3233): n is a, c, g, or t
  misc_feature (3235)..(3235): n is a, c, g, or t
  misc_feature (3243)..(3245): n is a, c, g, or t
  misc_feature (3267)..(3268): n is a, c, g, or t
  misc_feature (3283)..(3283): n is a, c, g, or t
cggtttgtctcttgtgtttgtctcgtctgctgagttggtagtgatctctcttgtaagatgctgtttgttcggctgaggtcttgcgtgttttgattggtttcctgttgggttcgtggtttctgttctttgctgtctcgtctctgtctgctggcgtgcaaagaatgtgtttctctccatgtccctggtccttttgactggcttgtgcctctggtatacctcttggctctatagttctcgttgttcctctccgtggctctattggtttctgttccctgttgttttgtggcggcagcccgtggtgaagatgctcagaacaaacctgggaccgacttccacgccagcaattcgcgtgggtagaccgtaacacgtgagagtgtaaattgaccctgaggaccgcttaaactctgtagggtgaggggggccaatatgggcccccgccgaaggttaggggttccctcccccaagggccccagcgagccgggtgctcccccgcacgcacgcgtggtaaaacacggcccctgccctgcctattatacgacccccataggggcccccttggggcaaaaaaaccggggaaccctaaactgggccccccgggggaaatttttannnnnnnnncnnnnnnnnnnnnnnnnnnnnnnnnnnnnnncagtgtaaataacaaacatttattggtgtcacttatggtagaaaaaacttcctacaccagatgcacatgacccagttgttaaatagaacattttgaaggtgaacacacaccctaacccaggttttttacccgctttttaagatggccaattcttcttctcccccccacccaaagacatgtgagcaactgctaatgaaaagcagtaaacagccgcttaggctatagcagtttcaactccactctgaggtgaagattccaattacattcgagacttaagttctttcaattttttcctaacaaaagttcctgagtccagtatttacaatattacagcactagcagatcagtgtctacaactcatctttttctgctgtatcctcttcaccagttgggggagggcctgcacttccatagagtttgctgataattggttgaacaatttcttccagttccttcttcttagctttgaagtcttcaatgtcagcatcttggtggctttccagccattcaatcttttcttctacagctttttccatggtctccttatcttcagaggaaagtttacctcccagcttttctttatctccaatctgattctttagagaataggcatagctttccaactcatttctagtatcaatgcgctccttgagctttttgtcttcctcagcaaacttctcagcatcattaaccatcctttcgatttcttcaggtgtcaggcgattctggtcattggtgattgtgatcttatttttgttccctgtacccttgtcttcagctgtcactcgaagaataccattcacatctatctcaaaggtgacttcaatctgtgggaccccacgaggagcaggaggaattccagtcagatcaaatgtacccagaagatgattgtcttttgtcaggggtctttcaccttcatagaccttgattgtaacagttggttgattatcagaagctgtagaaaagatctgagacttcttggtaggcaccactgtgttccttggaatcagtttggtcatgacacctcccacagtttcaataccaagtgtaaggggacatacatcaagcagtaccaggtcacctgtatcttgatcaccagagagcacaccagcctggacagcagcaccatacgctacagcttcatctgggtttatgccacgggatggttccttgccattgaagaactctttaaccagttgctgaatctttggaattcgagtcgagccaccaacaagaacaatttcatcaatatcagacttcttcaaatcagaatcttccaacactttctggacgggcttcatagtagaccggaacagatccatgttgagctcttcaaatttggcccgagtcagggtctcagaaaagtcttctccttcatagaaggactcaatttcaattcttgcttgatgctgagaagacagggcccgtttggccttttctacctcgcgccggagtttctgcacagctctattgtctttcctgacatctttgcccgtcttctttttgtacagtttgatgaagtgttccatgacacgctggtcaaagtcttctccacccagatgagtatctccattagtggccacaacttcgaagacaccattgtcaatggtgagaagagacacatcgaaggttccgccacccaggtcaaacaccaggatgttcttctccccctccctcttatccaggccataagcaatagcagctgccgtaggctcgttgatgatcctcataacatttaggccagcaatagttccagcgtctttggttgcttggcgttgggcatcattaaaataggctggtacagtaacaactgcatgggtaaccttctttcccaaataagcctcagcggtttctttcattttagtgagaaccatggcagaaatttcttcaggagcaaatgtctttgtttgcccacctccaatatcaacttgaatgtatggtttagttttcttttcaaccaccttgaacggcaagaacttgatgtcctgctgcacagacgggtcattccacgtgcggccgatgagccgcttggcgtcaaagaccgtgttctcggggttggaggtgagctggttcttggcggcatcgccaatcagacgttccccttcaggagtgaaggcgacataggacggcgtgatgcggttgccctgatcgttggcgatgatctccacgcggccgttcttgaacacgccgacgcaggagtaggtggtccccaggtcgatgccgaccaccgtgcccacgtcctccttcttgtcctcctcctcggcccgcgccgcgctgagcagcagcagcatcgcggccaccagggagagcttcatcttgccagccagttgggcagcagcaggcagtccagccacaggccgtagcacaggagcacagcgcaatttccgacttgcaggcggcaggggcccggggtcacaaggcgccacgaaccaggcgaagggcaggtctagaaatacaggccgcggcgcttccctctcacactcgcgaaacaccccaataggtcaatctgtctgtgctgtctgccgcgttttccccaggcacnggtaactggggcacgannacttcccnngggcanntatgtgcncnggtaccgnnntcgactggaagtaacttcgtanntaatgtactgctaantacgaacgcttatgcggccgcatgtcactcgcatcaacatagacctctggctggctgctccagtccgt

SEQ ID NO: 123729 - DNA, 724 bp, Homo Sapiens
ttttttttaaagtcagatgagtgtttattgtttgccaggctttttgcatacattagtccatttaattctcagaaacgaccttcatatgaaacaggtactgattttattcctattttataatgagagaaccgagttactgagaggttaaacatctcacatttcttatccactatgttatgctgactcttataaaatgattgtggaaggtgtgttaatacatttcaactggaaaaaaaaggtcagatcccccgaaaatgttgttaggagttgggttaactgctttggaaaaacaatggaaatatttaaattccagttgtactgaaataccttttaacatccagcaggtggcagcactaagtaacaattccatactaggtcatctaacagaaacattaatccattctgcacaaatcaagacttctgtacactccatgccttgatgatttcttcagcagcatccagtgtgctgtcttttttaatgaagcaaaaacgcacaaacttctcaaactgtgatttagtctctgagttacagaatgctgaaacggggatggctgatagtttcttatgtttagtcatccatttcacaaacttatagtcataaggctcattattcttcatatcagagaggtctggatctagcaaagacacatcagcgatgatgaagtatcctccatcaggaactatgggttttaggccaacacttccaagtaaacgtaccatccga

SEQ ID NO: 123730 - DNA, 1095 bp, Homo Sapiens
acgcaaggtgcggtgaacgtgcatgcccgaggttcgagatgagcgaaattgtcaaggttaatgacctctctttactgttgttactaccggttttgtggcgtgtaatcgtttatacgttgaccgtcagcgggaagactgggaagccccttgtatgatatagtttctgaggggtctcgataagttgtgagggggcgggaccatagtctttaatcttgatcgggccggtttattaaggccaccataggccgcgtgcgcagagatggggtcgggcgttgggcgaaggggatgggggttgacgtgtgggtatttaaagaggccacgcctggggtatcgctggaaatagggaacataaggttcacgctttcttgatatggtccatttggagaaattttattggttaaatgatgcccagatggggtcacatcctcagaacttctcagcctggtagcacaagtggatgcttgaagaaactcagtcttggaactcagacagcaatggagacgggatgtgagtgggaccagcaaggggctaaggtccattatgagggtgaggaagggcttctagaagtaacaaacatcccaggtccctgactggggagaatgaagacactgaccaagagatgtgaagccactcagggctgtgcagggtctgaggatctcactggggacggcctcccagcggccagctatcagcacgagttggagggaaagagccatggtgggggtcagtcacgtggctcccaggaatggtctccccgacttaggaagcaccttggtgcaccttttctccttgcatcctcacaaccacccagtcaggccactcaagtcttacagcaggtgacactcccaaggtcccagctaggaggactttgagaattcaagcattctcaggtctggattagagacaggaatctgtctccacttccttacatggctagacacagagcccgggagggcaaaggaaaattggaggccccttcttcccatgagccattttctctgcatcccctgcccataagccttcactggcctctgatcaccctcatggttgactgcagatcccgggaatccggaccggaccagtataggggtaggc

SEQ ID NO: 123731 - DNA, 758 bp, Homo Sapiens
tgtgagaacaaatttatagcctggggaagcatcttccaaggggaatatcgcatggctggaaaggtcacacgccagctttgatgtcgggtggcaggaatgtgggcagaggcagcgctgccagctgctttttgtcaaacacacaggctacctgctggccaggcctttcccagcacctgcctgtaggaccccgggtggcatgcacactattgtcccagggaggagaggcagggactccccaggtgctgccccttcccacaccagtgtccccactggacactccaaggcccgcagtgcactgcagtcctgccccttctgcacaggctggagactcccagagatcttgtttgaatcaactccaaatccttcaggtccttccctgcctcttatcagaggccgctggaaacacaaggcctgcttctgtggaccaggggctcctctgggggtggcctcagccacggctgagatccctagaagtccaggagcagctgcggaagcaccttctccagctggtccacgtccacacggagcgcgtcttctgcctgggcctgccgcacgccgcggactgctgcttccacaacgaagaccttcagcaactccaccatgagctgcagcgcgtccccgctcactttggtcttgtcatccttgaagtgcaggtgcagcagcctgctcaccagctccttccggaagccggatccagctcctgctccctccatgaccctcgtgccgaattcaacacccagcctcgctacctagccgaa

SEQ ID NO: 123732 - DNA, 733 bp, Homo Sapiens
gtgatcgctgtctattttttctgggagagacagttttgatttattgatgttgctttgtgagaacaaatttatagcctggggaagcatcttccaaggggaatatcgcatggctggaaaggtcacacgccagctttgatgtcgggtggcaggaatgtgggcaggaggcagcgctgccagctgctgtttgtcaaacacacaggctacctgctggccaggcctttcccagcacctgcctgtaggaccccgggtggcatgcacactattgtcccagggaggagaggcagggactccccaggtgctgccccttcccacaccagtgtccccactggacactccaaggcccgcagtgcactgcagtcctgccccttctgcacaggctggagactcccagagatcttgtttgaatcaactccaaatccttcaggtccttccctgcctcttatcagaggccgctggaaacacaaggcctgcttctgtggaccaggggctcctctgggggtggcctcagccacggctgagatccctagaagtccaggagcagctgcggaagcaccttctccagctggtccacgtccacacggagcgcgtcttctgcctgggcctgccgcacgccgcggactgctgcttctttggtcttgtcatccttgaagtgcaggtgcagcagcctgctcaccagctccttccggaagccggatccagctcctgctccctccatgaccgcagcctcaacccc

SEQ ID NO: 123733 - DNA, 1078 bp, Homo Sapiens
  misc_feature (94)..(94): n is a, c, g, or t
tgggccccgggaaaagcctaggattaccatccattcataaggtttttccccggaagggtttcccactttggagcctcttttttcctttcccaanccaaaacccaaaaccttctgggtttttaatacccgtcgttttagcaactgggcccccttccctcattctgctggcctttgggctcctgccttctgccgcctgtgccagaggtttctgatctccctcaaaggaaatccagtttatcagagaagcctttctgatatttcttaatagcattcatcatatgggctttctcctgctgcctcttctgaagaacctccgtttgcaccttcttcccgtatttcctaagtgctcgcagttgcttagctttttcagacctctccatggcagcctgtttagtctgcagcttctgtcgaatcttctgcatctgcagatcagatttggccatttccgcaaaataatcagtgggtcgcttcgtagggactttgagctgatggaggcggggtaagactgcaagcactgcggcctgggcttggcgatagaaactcatctctcgctggaagtcgtcttctggatcaacagctttctggtccttgttctgaggtgctggcgcctcagatccaccgatctccggtaccggacccagtgtcacatcgagcctttcaacccattccagatcccgcttgaattctgccaaacattgcttcaggccattcacgtcgttcacggccttcttcggcccctctagcacgacattgaggcctggcttcagaagccctcgggaaaacgcatcctgcaactctctgtctgtgacaagggattcatcggattccgactccgaatccgagagcgggggagtgtccatctcgccgcacgcacgtcccacacctacaggaagaaacggggtatcccgagacccaagcggctagcagagggcggccctggccgctgctgcctgccttcagccccctactcccacgccgtggctccacgtgccaccgaatcgctccagcgccagcaactcacagctactgctcaacttgtgcctcggccgaattcaacacccagcctcgtacctagcca

SEQ ID NO: 123734 - DNA, 1340 bp, Homo Sapiens
cagttaaatcattatttatcataaaatgaaggcaatttgaactcaatgtctaaattatcaatagatagcaatggaaagtaacttctcaatcttttagtctagactatttaaccaaaggtatgtgttcctttaataatttttctttagtttattgaaagaaatgtttacaacatgacaccaacagaagggatcaaagtgtgtcgtgaaattgcgagtcttcattcctttttcttggttctttgtattcaaagatgctatttagtgtgttctgttcttcatcttctctcttgttcgttttccaggtctcttatttgaccctttcttgccaggcctcttgaggcctctgccatgagctgtcttggcccggaagctagatacatcatcatagctctcccgagtgttccactttgagcctttcttctttccaccaaaaccaaacttctggtttttataccgtcgtttagcactgggccccttcctcatctgctggcctttggctcctgccttcttgcgctgtgccagaggtttctgatctccctcaaggaaatccagtttatcagagaagcctttctgatatttcttaatagcattcatcatatgggctttctcctgctgcctcttctgaagaacctccgtttgcaccttcttcccgtatttcctaagtgctcgcagttgcttagctttttcagacctctccatggcagcctgtttagtctgcagcttctgtcgaatcttctgcatctgcagatcagatttggccatttccgcaaaataatcagtgggtcgcttcgtagggactttgagctgatggaggcggggtaagactgcaagcactgcggcctgggcttggcgatagaaactcatctctcgctggaagtcgtcttctggatcaacagctttctggtccttgttctgaggtgctggcgcctcagatccaccgatctccggtaccggacccagtgtcacatcgagcctttcaacccattccagatcccgcttgaattctgccaaacattgcttcaggccattcacgtcgttcacggccttcttcggcccctctagcacgacattgaggcctggcttcagaagccctcgggaaaacgcatcctgcaactctctgtctgtgacaagggattcatcggattccgactccgaatccgagagcgggggagtgtccatctcgccgcacgcacgtcccacacctacaggaagaaacggggtatcccgagacccaagcggctagcagagggcggcctggccgctgctgcctgccttcagccccctactcccacgcacgtggctccacgtgccaccgaatcgctccagcgccagcaactcac

SEQ ID NO: 123735 - DNA, 947 bp, Homo Sapiens
  misc_feature (238)..(238): n is a, c, g, or t
tgggcccgcctttcccttcattagtgggcgtgggcctttttggggcttccttgccctttcttggcggctggtgcccaagaaggtttttgagattctccccttcaagggaaaatcccaggtttatccagagaaagccctttccggatatttctgtaatagccattcatcatatgggctttctcctggctgcctctttgtgaaagaaacctccgtttgcaccttcttcccggtatttccntaagtgctcgcagttgcttagctttttcagacctctccatggcagcctgtttagtctgcagcttctgtcgaatcttctgcatctgcagatcagatttggccatttccgcaaaataatcagtgggtcgcttcgtagggactttgagctgatggaggcggggtaagactgcaagcactgcggcctgggcttggcgatagaaactcatctctcgctggaagtcgtcttctggatcaacagctttctggtccttgttctgaggtgctggcgcctcagatccaccgatctccggtaccggacccagtgtcacatcgagcctttcaacccattccagatcccgcttgaattctgccaaacattgcttcaggccattcacgtcgttcacggccttcttcggcccctctagcacgacattgaggcctggcttcagaagccctcgggaaaacgcatcctgcaactctctgtctgtgacaagggattcatcggattccgactccgaatccgagagcgggggagtgtccatctcgccgcacgcacgtcccacacctacaggaagaaacggggtatcccgagacccaagcggctagcagagggcggccctggccgctgctgcctgccttcagccccctactcccacgccgtggctccacgtgccaccgaatcgcctcgtgccgaattcgccacccaggcctcgctacttaggaccgtatgt

SEQ ID NO: 123736 - DNA, 452 bp, Homo Sapiens
cgactctctaggatatgtcgtgctagaggggccgaagaaggccgtgaacgtcgtgttgagcgtgggcacagggtcgggggtactcggacatggtatgcgcttcaggcgctgttgggcttgggagaccgattcttgtcccaggaaagatgcaccctgcgcctcgccaagagggtcaattacctgtctgggtattggggattagcactttgtcccttcgcctaacagcctgtgcttgggaaagacaaactcagagttcccttcttgtgagctcagtgtctggatttcctagaatggcctgaagcaatgtttggcagaattcaagcgggatctggaatgggttgaaaggctcgatgtgacactgggtcacggaccggagatcggtggatctgaggcgccagcacctcagaacaaggaccagaatagctgtgatccagaagacgacttccagcgag

SEQ ID NO: 123737 - DNA, 1626 bp, Homo Sapiens
  misc_feature (105)..(196): n is a, c, g, or t
aagcaattctccccacctcagcctccaaagtagctgggattacaggcatgcgcaaccatgcccagctaatttttgtaattttagtagagatgggttttcgcttannnnnnnnnnnnnnnnnnnnnnnnnnnnnnnnnnnnnnnnnnnnnnnnnnnnnnnnnnnnnnnnnnnnnnnnnnnnnnnnnnnnnnnnnnnntaagccaccaagcccggccgaccttcttctatttttccattctcctttccaaagccatggccatgcgctcctgtgtacaggtgcataaacacatcagtgtgccatccctcacatgcatgtcgttccccacccctccttcccagggcttctcttggctccagcgttcctctgggaccctctgcagatacagcctgtgctggacccccagccagggtgagggctcattctgctctgtcttccccactgcctcagtttcccccaaaagctgctttcacgtccttctagtagggggcctcccatgggggcaaggatcccctttaggattcaatctttcctctttgggcagttttggctttgagtcccccagggatcagggtgagaatgaagaagagctcagtgagcggaatgacagcagctgggtgggtggtgtggggagaggctgaggggaaggcagcccccccaggggggcctaaccgtggaatcactgcaatttcctctgagatcccgacttggacaaccaggacagggattgaccattcccttcccattccactcggactgtgtccaagcgggggctgtccactgcgggggctgcctccccatcgggtcctaacagctctaagactgggagtggagttcctggaggtgtggggaggggggcgtgttttcaatttagaaaaatctcagccagctcgagccgagagagaatgcgaaagaggaagttcggaaggagcgaggaatggggtgggtggcagcgggggcggctcagtcgctgtcgctcttgtccaccagcacggcgtccgactcctcggtgatctccagcagcgcgtgcacgtcggggctgctcccgcgccgcaggtcgccggcctccccgcgctccgcgccgccctcgtcgtcgtcggcgcccacctccaccatctcggtggccttgagcacttccacctggccctcgcggatcttcttgacgtggaaggtgaagggtggcaccttgtagaccgcggtcttggagcgcgcgtacaccacgtggtcgggcgtgaaggatttgcgcaacttgtcccgcgacgtcttcagtttctcgcgccgctcggcgggcaccaggcgcgtgcccagcttgttcatgcgcttctccagggtgtgccgcgtcttctccaggttttccttggtcttgaggcgcgtcttctccaggttctcgcgggtacgcaccttggtcttctccatcttctccttggagaaggccttcttgaagtcgtccacgcgccgcaggccgctgcgcttgatacgctctgcgcgggactcctcaataacctcctcaacctccaccgcctcgtctggggaaagctccagcgccgctgcctcgtgctttgaatcgccacccaggcctcgctacttaggacctataggggcattatgtggggggggtgggtgttgtt

SEQ ID NO: 123738 - DNA, 969 bp, Homo Sapiens
  misc_feature (139)..(139): n is a, c, g, or t
gaaggttttttcccctttgttccttggaagggcggggtttttcttcccagggttttttcgccggggtagcgcccctttggtttttcttccatctttctccctgggagaagggccttctttgaagtcggtcccacgcgcnccgccgggccgttgcggcttgatacgctctgcgcgggactcctcaataacttcctcaacctccaccgcttcgtccgaggaaagctccagcgccgctgcgtcctcttcgggccgctcgccctcgcccagctcctcgccctctttctctggcagcgcctccgactctttcagcgatttgctgatgctcagtttggccggcagcttcacttcatcctggtagatcatgactttaaagttgcggcgccgcagcagctcggcctcgttgacctccagcttcttgatctgccccgcctggcgctccaggctgccgcgcacggtcttcacgttgacgctgaccttgcgcaccttctccagcagcttgctcaccgtattgctcgtggtggcgtgcgccttgcccagcttgctcagctcgccctggatgctctgcactgcgccctccatctccgcctgccgctcctccagctgtgcttgagtcagctggatctggtctacggccccgatgattttgtccaggaggctcagcaccagcacgccgttcacctggtccgacttgatcagctcttctgagccggcccccgacggctcctccgctgcctgagccccagcggaggaaggctccggggcctcggcgtcggggtacccgggaagcggccgctcgacaatatagagcgtggggtcctccatggctacccggagccgtgcgggaccggccgggtggggctggagctggagcgggagacccggagagaagcaggagcggaagggaggagagctagcgggcgagagcggagagccctcgtgccgaattcgccacccaggcctcgcttcctt

SEQ ID NO: 123739 - DNA, 910 bp, Homo Sapiens
  misc_feature (229)..(229): n is a, c, g, or t
ccagggttttggggggtaacgcccccgggtttttctcctttttctccctgggagaagcccttctggaagtggtccacgcccccgcaggccgctgcggcttgatacgctctgcgcggggctcctcaaataacctccttaaccttccacccgcctcgtcggacgaaagctccagcgccgctgcgtcctcctcgggccgctcgccctcgcccagctcctcgccctccttctntggcagcgcctcggactctttccagcgatttgctgatgctcagtttggccggcagcttcacttcatcctggtagatcatgactttaaagttgcggcgccgcagcagctcggcctcgttgacctccagcttcttgatctgccccgcctggcgctccaggctgccgcgcacggtcttcacgttgacgctgaccttgcgcaccttctccagcagcttgctcaccgtattgctcgtggtggcgtgcgccttgcccagcttgctcagctcgccctggatgctctgcactgcgccctccatctccgcctgccgctcctccagctgtgcttgagtcagctggatctggtctacggccccgatgattttgtccaggaggctcagcaccagcacgccgttcacctggtccgacttgatcagctcttctgagccggcccccgacggctcctccgctgcctgagccccagcggaggaaggctccggggcctcggcgtcggggtacccgggaagcggccgctcgacaatatagagcgtggggtcctcaatggctacccggagccgtgcgggaccggccgggtggggctggagctggagcgggagacccggagagaagcaggagcggaagggaggagagctagcgggcgagagcggcctcgtgccgaattcgccacccaggcctcgcttccttg

SEQ ID NO: 123740 - DNA, 1659 bp, Homo Sapiens
cctaccccgggaaatccccggcaaattccttctggagcacccgggcttgggcccaccccgggccgggggattggaccattccccttccccatttcccgtgcggaccgggtccaaagcggggggctttcccctgcgggggggtgcctccccctttcggttcctaacagctttaaagacggggagtggagttcctggaggtttggggaggggggccgttttttcaatttagaaaaatctcaagccagctcgagccgagagagaatgcgaaagaggaagttcggaaggagcgaggaatggggtgggtggcagcgggggcggctcagtcgctgtcgctcttgtccaccagcacggcgtccgactcctcggtgatctccagcagcgcgtgcacgtcggggctgctcccgcgccgcaggtcgccggcctccccgcgctccgcgccgccctcgtcgtcgtcggcgcccacctccaccatctcggtggccttgagcacttccacctggccctcgcggatcttcttgacgtggaaggtgaagggtggcaccttgtagaccgcggtcttggagcgcgcgtacaccacgtggtcgggcgtgaaggatttgcgcaacttgtcccgcgacgtcttcagtttctcgcgccgctcggcgggcaccaggcgcgtgcccagcttgttcatgcgcttctccagggtgtgccgcgtcttctccaggttttccttggtcttgaggcgcgtcttctccaggttctcgcgggtacgcaccttggtcttctccatcttctccttggagaaggccttcttgaagtcgtccacgcgccgcaggccgctgcgcttgatacgctctgcgcgggactcctcaataacctcctcaacctccaccgcctcgtccgacgaaagctccagcgccgctgcgtcctcctcgggccgctcgccctcgcccagctcctcgccctccttctctggcagcgcctccgactctttcagcgatttgctgatgctcagtttggccggcagcttcacttcatcctggtagatcatgactttaaagttgcggcgccgcagcagctcggcctcgttgacctccagcttcttgatctgccccgcctggcgctccaggctgccgcgcacggtcttcacgttgacgctgaccttgcgcaccttctccagcagcttgctcaccgtattgctcgtggtggcgtgcgccttgcccagcttgctcagctcgccctggatgctctgcactgcgccctccatctccgcctgccgctcctccagctgtgcttgagtcagctggatctggtctacggccccgatgattttgtccaggaggctcagcaccagcacgccgttcacctggtccgacttgatcagctcttctgagccggcccccgacggctcctccgctgcctgagccccagcggaggaaggctccggggcctcggcgtcggggtacccgggaagcggccgctcgacaatatagagcgtggggtcctccatggctacccggagccgtgcgggaccggccgggtggggctggagctggagcgggagacccggagagaagcaggagcggaagggaggagagctagcgggcgagagcggagagcagaggaaactcgagccacgtccgtgcgcaccggcgccacccaggcctcgctaccttg

SEQ ID NO: 123741 - DNA, 2162 bp, Homo Sapiens
  misc_feature (357)..(390): n is a, c, g, or t
  misc_feature (967)..(988): n is a, c, g, or t
  misc_feature (2013)..(2033): n is a, c, g, or t
tttagtaaaagaaggattttaggtttctttggtgaaacaaaagcagatataaaaagttacaaagattttagattttcattcacaaaaaaagtcattcacattttacactatacacgttatgatataaatacaggaaagtattatgtgcattgtaaagagaaaggaaaaatagaaacctactagatcaacacagtgttgttctgtgctctaaaatacctaaaggtggattacatttaatgcaacaaccaagggaacctgcttaaacatactgtgtattattgtagctagagtcattccttctaagccaaaggaggttttataaaaaagaatcaatattgggccaatccctttgggccnnnnnnnnnnnnnnnnnnnnnnnnnnnnnnnnnngtctactcttcttcaagttgctctaaactgaaattagggaaggagtctcactttccattacaggtttttctttaaacattaaattaagtggataaggattcaaagtcatcttcagcagtcactttattcaaataatggggagaaaacagagtgggaagagatggggagaaatgtcaacacatacactccacctaacaggaagaaatgcccacactatttctatatattcgtctcatttttttagaatgggccaacaccttttgctaaaagctatatacttttcccactcttttcataataaacacttgatgcattctatccgtcacattatttaatcagggacaaagtaccttatattatatgattccaaattgtgtgaggaaagttaaaggcttaccactggaaaataactagcatactatgttcattttcaggtcttaggggaaataacatcccataaaattaaatccagtatggcttacttcatttatttatgtatgcttcacagctgcagcattcatacatgaacattcaaaactttataaaagattaaaatggttatatatacaaaatttcnnnnnnnnnnnnnnnnnnnnnnttgcatgtgttttaacaatcccccaccctccagagccctaggtctatatccgtatgaaatgcattgatcggtaaccttatgagttagtgttatgaaagccattaaaaagtagacctggttgagttaattattagcactttgacccctaaaaaatgttcctggttacagaaaagtcctccattcaggcctttcttgtaagtgaagaaaaaggaatgcagcaaagaagagttcgacattggagtccttagttccatcaggatcccattcgcagcctttagcatcatgtagaagcaaactgcacctatggctgagataggtgcaatgacctacaagattttgtgttttctagctgtccaggaaaagccatcttcagtcttgctgacagtcaaagagcaagtgaaaccatttccagcctaaactacataaaagcagccgaaccaatgattaaagacctctaaggctccataatcatcattaaatatgcccaaactcattgtgactttttattttatatacaggattaaaatcaacattaaatcatcttatttacatggccatcggtgctgaaattgagcattttaaatagtacagtaggctggtatacattaggaaatggactgcactggaggcaaatagaaaactaaagaaattagataggctggaaatgcttactttctgctctcattttctttcattttgtctgctgtctttttgaatgccaatactttcatttaaaatgttttgggagcacggcaacccaaaatgactgaacggtggtccaaaaatccaaaccaactgataattacttctcgaggtgataggaaaggcacaggaagttaggactttggctgaaatgatgaaaacacatgttcgccattttagggatcagcgcctcgactcctgccacctccggctccaacgatgatcatgtttggatgtatttattgaattgtcctttgctgatgaggaatttttaaagtatttcatagaataagtcctttggtatgcagatgctacatggaagnnnnnnnnnnnnnnnnnnnnncacacaatattacttgctccataccctaaactgccgataccacagccgtaaaatgaaggtgtctagtagttgttatagccccggccgtaatggccgaattcccgggcatatgtccggtaccgtcgactg

SEQ ID NO: 123742 - DNA, 943 bp, Homo Sapiens
ctaggtccaatggtagtttttattccccaggaacaaagataatgtggagaagaaactccaaaaggaaacagagcacggatgacagaaatgacaccacggcagcctggctcaggagtcaggtagatagatggctgctccacagtggacctggtcatggccctggtttcttggatccacatttgccccgtctcttaagtgtccatctcagaggtggaggatggagacagtgaggtggaaaacgtgcttgctctacacaaagacaaatggatcttctattcccagaggaccagggacaccaaaacctccctcttcagaatggaggtagacagataaaaatgagaggggcttgagtgtcacagacaatctgaaagtaataataggggctcactgtggctggcagaactggtactgaaatggggactacaggggaagcagcttccagttttatggtggagagtcagtcctgaatcaggccctggggcaattataaccagagtgctgtttctagccacttacttcaaaggactatggctatgttgaatcagaagccattatctttttcccagaggatgcacttccatccctatttctggcatgatcctgctccctacgagcgtgatcctttaaaaaacagattggcaagcgacgagaaaaacggtgcctcacatgcttgagatgtgacagcttctcctgcaggcaagaacctctcagaacaaggtcctttggtatgagctagatcatccaggcctgtccctgcagaacgcaccaagactcatccctgtactacagggtggcctctggctatggcctggcacagtgaggacagaggcggggtcctgagtcaacatcacagggaggtctcctggaggatgcaggtggagctgctcccctgataggctgtgccatccagggccatggcctccttgtctctgctgtccccccc

SEQ ID NO: 123743 - DNA, 1382 bp, Homo Sapiens
ttttttctgtacaggctcatataatagaggggacttttattattttttcagagaattcggatagccatagattatacagagccatttctcagcactcttttccttccacttaagaagctggaatacaacatgatgaggatgatgccaaaacaagactgctggttcatatcatctagggtacaaatacacacttaatcacttgacactttactgaatgcaaagcaagatttagcatctttgccctcgttgtacagagctgaagcaggagaccagggaggggaggactgcatggttttccttggcaggggagttgtgcaccctgcagtcctgtggtgttgtgggaagatcagcccatgttctgtcggttcccatagcccctaggatgggtgtccttccagtcatcccactcccgggctctgtggagtgtttgttcatcatcctcttcctccttttcttcttgttcttcctgttgctgagctgcttttctgaattcctctggtgctgccttggctattccctgatccggtaatgctccatatttccgatgttgctcataccagtcactcaccgtcatagttggcagacttggataaccagctccaaatactttggcttgagccatgttccgagtgagaatgaagggtttcactggaggcctctcctggcgagatgagttagaagttgatgcctctcttgaagagtctctttctctcaggatctttatttcctggtcaatgctctcaatctcttctaagctgatatcaatccacctctgaaggtgaagaagataatattcacgaacacgctcatcatctgcttgaccactttccacagcagatttcattgcagacaacctatgctccaactccttcttctgcttgtatctctgtattttagcctgtctttgagatgccatagcaacgagactaggataagccatggaggaattggcagtgtgattttcagcagagttgttcatggttttgggcagctcaaactctgccacatgatagcaatggcactgagttaagtagtttataaagtgttctcgagcccgctgcaaatgatctagacgcttgctggggttgacttgtttcatggtgagggctccttgaaacgctggcaccaaaaggtacttcaggtcggtggaagcaatctcttccaaatcttcatttcggctgaacaagtcgagctgcgataacatttcggcagccttctcaaggaggtccaagcccttgaacaccttctcctggactatccgggaaccggcgggttcagtcgccacttctacttcgtccagtaactgtctaccagtttcgaacagctcggggagccgcggcagctgtaactcgtcctcagcagccatcttggggagagagccc

SEQ ID NO: 123744 - DNA, 604 bp, Homo Sapiens
tgaagattgatcacacaattttattagagtcttttgaacaaatgtaatcctctgtgaaaaactcttgcaaaagagacattggagtgtactattttcaacccgtgagcattaacactgcataccaagggggggtgggtcaagaagctggttagatcgaagcacaagcacaagccactgatattctctatgtgatcaggtttttacaaaaaaatacatagttttcaataaataatgcttaattttacaactttgatacagcaatgtcatacaccgtttcaacacactacactctgcatgctagatagtctacgagaagacgaaactttgccatgcattttctttcccccctagtgctatcaaacacttcatcctccagcgcactgcctcaggtagctttaccttctctctgtttcacagcaataggccgtgcgctggcatgcaaactctaaaaaaggcccccccacaaaccactcagacttctacacaaaagggtttttcagcttttctgctcgcaaacctggagtggctaagaaagtaagtttcatgtggccttggaaaatacacacttgttaacagtgtcatgctgaaaactgctctaaaacat

SEQ ID NO: 123745 - DNA, 776 bp, Homo Sapiens
gcctgaaggggaaacaggcagaaggaagacaaaatgggaagaagtctacagtcaatgggaatctttttctatctcaatgatttagttataaatagagattattagtcttctcttatacatgtaacaaatgccgaacttactaccacgaaatttctaaaactgactttttcacctttgttaaaaaaggtaaaaatcacatacttttcttcccttccttcaggtcaagttctgaactaaaatattacatgtaacaacagctggtcctaacttttatacaaagtgaaactatatagagctcctttgccaacataaggagctacataatttctattacacttgcctaggcatgagaaacgcaaaagcaactcaaaaggagcaagtccaggaaaagaaaagctatgaaggagagaaagactagcagatgaaacacatactctgaaaaactccaatctgccattcaagtattggaaataccccaaaggggacaatgaatgggatctattacaacaaagtcagcaaagtaaaatgcaaatctcacacatgataaatggccctgataggctgtttgctgaaagacctaaggctagtgattcagtccacaattccttctggaccctaaagaaggggttcatataaaagtcatacttgtctttttgcaattttctcttggttgtcttcagagaatagtcatttgcttctttcattcaggttatgcagaccatttctttaaaccccaaaaagagtaataattttcatatactaaaagcttcttgtag

SEQ ID NO: 123746 - DNA, 1021 bp, Homo Sapiens
  misc_feature (526)..(534): n is a, c, g, or t
  misc_feature (542)..(542): n is a, c, g, or t
  misc_feature (552)..(566): n is a, c, g, or t
  misc_feature (568)..(584): n is a, c, g, or t
  misc_feature (586)..(588): n is a, c, g, or t
  misc_feature (590)..(598): n is a, c, g, or t
  misc_feature (600)..(601): n is a, c, g, or t
  misc_feature (605)..(606): n is a, c, g, or t
  misc_feature (610)..(612): n is a, c, g, or t
  misc_feature (614)..(616): n is a, c, g, or t
  misc_feature (619)..(619): n is a, c, g, or t
  misc_feature (627)..(630): n is a, c, g, or t
  misc_feature (637)..(637): n is a, c, g, or t
  misc_feature (646)..(647): n is a, c, g, or t
  misc_feature (655)..(655): n is a, c, g, or t
  misc_feature (659)..(659): n is a, c, g, or t
  misc_feature (665)..(665): n is a, c, g, or t
  misc_feature (672)..(672): n is a, c, g, or t
  misc_feature (675)..(675): n is a, c, g, or t
  misc_feature (704)..(705): n is a, c, g, or t
  misc_feature (718)..(719): n is a, c, g, or t
  misc_feature (752)..(754): n is a, c, g, or t
  misc_feature (776)..(777): n is a, c, g, or t
  misc_feature (793)..(794): n is a, c, g, or t
  misc_feature (807)..(807): n is a, c, g, or t
  misc_feature (822)..(822): n is a, c, g, or t
  misc_feature (842)..(842): n is a, c, g, or t
  misc_feature (857)..(857): n is a, c, g, or t
  misc_feature (860)..(861): n is a, c, g, or t
  misc_feature (873)..(873): n is a, c, g, or t
  misc_feature (880)..(880): n is a, c, g, or t
  misc_feature (887)..(887): n is a, c, g, or t
  misc_feature (903)..(906): n is a, c, g, or t
  misc_feature (920)..(920): n is a, c, g, or t
  misc_feature (923)..(923): n is a, c, g, or t
  misc_feature (944)..(944): n is a, c, g, or t
  misc_feature (950)..(950): n is a, c, g, or t
  misc_feature (978)..(978): n is a, c, g, or t
  misc_feature (991)..(991): n is a, c, g, or t
tttttcacagaacagggtggtttattatttcaatagcaaagagctgaaaaatgtcgggtcccataaaggagcagaacctgacccagagcctgcagtacatttccaccccacaggggtgcaggctgggccaggcagggccaaaggcagcagaaatgggagtaagagactgtgcccactgagaagctctgctgggtgtgggcaggtgggcatgagatgatgatgatgtagtgtaaggaccaggtaggcaaaacctgttcaggtcttgttgagtgtccagagtggatccagaaggctgagggggtcgtcagagggccgggtggcccgcagcccttgcccgttatgggcctgcagaaagttatgcttgctcatccgctgtttgccccgcagggagctgtccagggagaaggcctctggggtcaaggaggccagcaattccaggggaggaggaggggggccccgagctgggggcttcaggcactggcggctcctccttaggctggggagcctcaggtagtggggaggaaannnnnnnnnagggaaanattggaattnnnnnnnnnnnnnnngnnnnnnnnnnnnnnnnnannncnnnnnnnnncnncacnncccnnncnnnccnccaccccnnnnaccccanccccccacnngggcccanggcngacgcncgacaanggnggcccggacgggagcggacgcggaaaccnnaacgggcgcccanngcccggcgaccccgaggcggggccggcgccggnnnaagcgccgccggggcaccgccnnccgcgggagcacccanngcgcggggcggcnccccgcgggccacgngcccgcacccgcacgcaggngacgcgcccccccanggnncccgccccaccngcccggnacgcagnccccgagcgacgcggnnnnagcaagcgaaccgncancacgagccgcgggacgcgccngccgcngccagggccgccggcgcggggccggcgngacgcagccgccnccgcgccccccgccggccgcgcggaccgcg

SEQ ID NO: 123747 - DNA, 805 bp, Homo Sapiens
actggtatttcagaactattttgcaagcccgaactggaatcttccttcacatatctggaccaaggtgaaagactgaacctgtcctgctccatcccaggagcacctccagccaacttcaccatccagaaggaagatacgattgtgtcacagactcaagatttcaccaagatagcctcaaagtcggacagtgggacgtatatctgcactgcaggtattgacaaagtggtcaagaaaagcaacacagtccagatagtcgtatgtgaaatgctctcccagcccaggatttcttatgatgcccagtttgaggtcataaaaggacagaccatcgaagtccgttgcgaatcgatcagtggaactttgcctatttcttaccaacttttaaaaacaagtaaagttttggagaatagtaccaagaactcaaatgatcctgcggtattcaaagacaaccccactgaagacgtcgaataccagtgtgttgcagataattgccattcccacgccaaaatgttaagtgaggttctgagggtgaaggtgatagccccggtggatgaggtccagatttctatcctgtcaagtaaggtggtggagtctggagaggacattgtgctgcaatgtgctgtgaatgaaggatctggtcccatcacctataagttttacagagaaaaagagggcaaacccttctatcaaatgacctcaaatgccacccaggcattttggaccaagcagaaggctaacaaggaacaggagggagtattactgcacagccttcaacagagccaaccgtgactagtggtaccgagctgga

SEQ ID NO: 123748 - DNA, 1280 bp, Homo Sapiens
  misc_feature (61)..(89): n is a, c, g, or t
  misc_feature (300)..(319): n is a, c, g, or t
  misc_feature (342)..(393): n is a, c, g, or t
  misc_feature (501)..(584): n is a, c, g, or t
  misc_feature (1161)..(1195): n is a, c, g, or t
gtgccaagctaaaattaaccctcactacaagggaataagcttgcggccgcatacgcggtcnnnnnnnnnnnnnnnnnnnnnnnnnnnnngcaaagagcaaaggtcaaatttatttaatacaacatccacgagggtccctgcagctgtgtcactgaggcaaacaggaaaagtgattttggctaggcgtggttctcatctgtgaaattccacagcgcaatgacagcagcctctctcccacccactcaagacactgtcaggaatgtcttaagacctcaggagaccacttctttagcaagcaannnnnnnnnnnnnnnnnnnngagatggattctcactctgtcannnnnnnnnnnnnnnnnnnnnnnnnnnnnnnnnnnnnnnnnnnnnnnnnnnntgggttcaagcgataatctcacctcagcctcttgagtagctgatactacaggcatgcgccaccacgcccggccaattcttgtatttttagtagagacagggtttcatnnnnnnnnnnnnnnnnnnnnnnnnnnnnnnnnnnnnnnnnnnnnnnnnnnnnnnnnnnnnnnnnnnnnnnnnnnnnnnnnnnnngcctgccctggcaaggaatacatttttaaaaattagtaagaaacatacacatttcaagttttcaattaagaataatatttgctgatggcaccatcttcctgtctttcagccttcagcatggtagaggaaaagagaaagagtgtagacaaaaacagttgaagaacatctgtgcttgttccaccttcattttctgttttgtgcgttgcctgaatgaaccgtgtcttcaggttggtatttcacaggcggtgctcccaagtagtctggttttcccatttgtggagggcgaggtcatagaggggacagggggaggctgtctggtcagcactgtgtatttccaaagaacaaggactacccaaaactacaagcctttgaaggaccaaaggaaaagagaaaaaaccagcctctaaccaggccatgcgctagaaatgattgagtataaaaaagaaaattggtttctgtgtatgagggtgcatggaaaaggtctttatctctgcacaaaacaaaatattcaagtttcagaatatcccccggccgtaatggccgaattcccgggcatatgtccggtaccgtcgactgnnnnnnnnnnnnnnnnnnnnnnnnnnnnnnnnnnncggccgcttcctcgctcactgactcgctgcgtctcggtcgttcgaaataacgcgctagcgccctatagtgagtcgatacgatttt

SEQ ID NO: 123749 - DNA, 2182 bp, Homo Sapiens
  misc_feature (211)..(230): n is a, c, g, or t
  misc_feature (253)..(304): n is a, c, g, or t
  misc_feature (412)..(495): n is a, c, g, or t
  misc_feature (2078)..(2112): n is a, c, g, or t
gcaaagagtaaaggtcaaatttatttaatacaacatccacgagggtccctgcagctgtgtcactgaggcaaacaggaaaagtgattttggctaggcgtggttctcatctgtgaaattccacagcgcaatgacagcaacctctctcccacccactcaagacactgtcaggaatgtcttaagacctcaggagaccacttctttagcaagcaannnnnnnnnnnnnnnnnnnngagatggattctcactctgtcannnnnnnnnnnnnnnnnnnnnnnnnnnnnnnnnnnnnnnnnnnnnnnnnnnntgggttcaagcgataatctcacctcagcctcttgagtagctgatactacaggcatgcgccaccacgcccggctaattcttgtatttttagtagagacagggtttcatnnnnnnnnnnnnnnnnnnnnnnnnnnnnnnnnnnnnnnnnnnnnnnnnnnnnnnnnnnnnnnnnnnnnnnnnnnnnnnnnnnnngcctgccctggcaaggaatacatttttaaaaattagtaagaaacatacacatttcaagttttcaattaagaataatatttgctgatggcaccatcttcctgtctttcagccttcagcatggtagaggaaaagagaaagagtgtagacaaaaacagttgaagaacatctgtgcttgttccaccttcattttctgttttgtgcgttgcctgaatgaacggtgtcttcaggttggtatttcacaggcggtgctcccaagtagtctggttttcccatttgtggagggcgaggtcatagaggggacagggggaggctgtctggtcagcactgtgtatttccaaagaacaaggactagccaaaactacaagcctttgaaggaccaaaggaaaagagaaaaaaccagcctctaaccaggccatgcgctagaaatgattgagtataaaaaagaaaattggtttctgtgtatgagggtgcatggaaaaggtctttatctctgcacaaaacaaaatattcaagtttcagaatatcccaatggccttgccctggatctcctcttgtgctcttccaatttccaaggatgttccaacttggtggaaggagggtatgtgggaaattcaacagcccctctgtatctctttctacccaacattaacttagcaggatggatttaagaaccggcagcttagcctgaggaattgctgtgttctgtgggagcagggcaggttcataaataagtgcacagaggtcttgaaatacagggattatctgttcttctcggaacatggatgtccttccagggatgtgcatctggccttgctgtctaagttccatcaagggagccttccgttctagagtatctgctttccacggcatcagggacagctttccggacttcactgtacactgtctctgtgtccttctttcctagatctttgtgagactcagctgaggacacttgaacttccgtgtactgcacgtctgagttcagaggctctttattatcatttattggtttcattgcatggtttccgacatcgtcattgtgaccgtaatgactgttagcttccatattgggatctgacattttctcgttgttggagttcagaagtggtactgctggcctggacatttccactggcatctgcttggccttggctttcctcagaaaataacatttggccgcaatgatcaagagagcaatgatcactccgatgataaccactgcaataagtcctttcttccatggggcaagaatgactctgactgtcagtattttgcttctggggacactggaggcgtggttggctctgttgaaggctgtgcagtaatactctccctcctgttccttgttagccttctgcttggtccaaatgcctgggtggcatttgaggtcatttgatagaagggtttgccctctttttctctgtaaaacttataggtgatgggaccagatccttcattcacagcacattgcagcacatgtcctctccagactccaccaccttacttgacaggatagaaatctggacctcatccccggccgtaatggccgaattcccgggcatatgtccggtaccgtcgactgnnnnnnnnnnnnnnnnnnnnnnnnnnnnnnnnnnncgccgcttcctcgctcactgatctcgctgcgctcgtcttcgctccacgcaggccctatagtgatcgatca

SEQ ID NO: 123750 - DNA, 1644 bp, Homo Sapiens
ggcctgggtggcgaattcggcacgagggaaagaaattgtttttattgcattgaggacttttccagaagcctggtggacccacgtctccctccagccccaaaggcagtgcaagcctctactgatcccccacttcaaggtgggtctcccctcctgcagggcccatggaggaggggtagggtgggctgtagggggcccagaagggaggccctggggacagagggagttcactcctgtttaagctggagaccagggagggcccagcctcacctctggacaacacagcaagtcagaggctggggtgtggcaggggctcagctgtcacctctggggtgtggcttcttcccggaaccgcaccagaggcccctggagcccagggagggaccacggagggcaggtgtaacccctggcctggagcacagctctcagagccctgaggctcccggggacagaaacaagtaacaaagtgagaccacgagagaaaaagaatccacagtttctacaaaaagccccaccctccccaagcaccctggtcagctggggaccgccttggccttcacccttttggggggtctgtggggggcagggctggtgggccgctcccgtttggggctggcgggctctgagccgttgtgctgggcgcagggctcctgcttggggccggcggggatagagccgttgatccgggtgggagattcctccttgggctccagcttgggggtgggcgggcggggcaggggtggcagcgccctctccagcacacgggggccgtcccaggcggggatctccagccccaggtgcttcatgagccgggtcatgacctcgtcaacgtagccatggatgcggaggtcagcatggcggtcgtgcttggtgggctgcaagttgacgatgaccaggcggcctccccggcgcttggtagccagcggcaggttcccgctgggccggatctgcagcgatgtacccagcgtgatggacaggtcggcgttcctgctggcctcatcggcgagtgccaggtcccggtcgggcagggagtcctcccagtctaggatggtgtccctcagctctcccctgcaggctcgcagcccccttgccttagccacggtgcagagccggcccgtggccttcaggcccatggtgcccacgactgtgtctcggacgtactgcgtcttacacttggcacattcttccacaaacatgttcccgtggagctctgccagtttgtccctggggaagcctgagcgcacatggagcccgtccacgttctggctgaccaggaagcggaggaggcccacgcgctccagctgcaccagcgccatgtgggtctgcgtgggccgcgcgctctcaaaggtggtgtcgaacttgggggccagacctcgctcctccatggtccagactccgtggggacccctgaagtcggggatgccagaggcagtgctgatgccggcacccgtgtggaacaccacattggaagactgccagaccagcctcgccagttcccacaccttccgctccagctcctccggggggtcgaagatctccgggaggccgcacttgcccttgtccgcgtacggcgacagccccgccgcgtaattcaccgacatcctcctcgtgccgaatttgcaacgcgagcctcgtacctagccttaa

SEQ ID NO: 123751 - DNA, 463 bp, Homo Sapiens
atgctgcaggaactggtgaacgcaggatgcgaccaggagatggctggccgagctctcaagcagactggcagcaggagcatcgaggccgccctggagtacatcagcaagatgggctacctggacccgaggaatgagcagattgtgcgggtcattaagcagacctccccaggaaaggggctcatgccaaccccagtgacgcggaggcccagcttcgaaggaaccggcgattcgtttgcgtcctaccaccagctgagcggtaccccctacgagggcccaagcttcggcgctgacggccccacggcgctggaggagatgccgcggccgtacgtggactaccttttccccggagtcggcccccacgggcccggccaccagcaccagcacccacccaagggctacggtgccagcgtagaggcagcaggggcacacttcccgctgcagggcgcgcactacgggcggccgc

SEQ ID NO: 123752 - DNA, 973 bp, Homo Sapiens
ttttttcaaagtcaaatgaatttattcagaaaaggccttgcttggcatcagactaagaaaagcagccctgcccgccgccccccactccagaagggtcaatttacaaagacaggggcgcaggggagagctgggtggggaagacacagccaggccaggaggcttctgcaggccttgggcttccctgagggcctcgcggcttctggtggctgctatagtggccccacaggaggccagcactgtgggtcatgggtcacgggtcacgaagcagagcctgaggggagcccgcagcagctccggaggccccagcccctgcagcagggacaggaggaccaagacgccgacgggcactcctttccttaaggcttcccagacttggcagaagactccacctctgcgtcctgcaactctgctgcctcccccgccttggctggctcatcccttgtaggtcctgccgggctggggcctggggtctccgatgggctctcggctggctcgtcccctgcaggtcctgccgggcgggggcctggggtctccgatgggctctcggctggctcgtcccctgcaggtcctgctgggcgggggcctggggtctccgatgggctctcggctggctcatcccttgtaggtcctgccgggctggggcctggggtctccgatggggtctcggctggctcgtcccctgcaggtcctgctgggcgggggcctggggtctccgatgggctctcggctggctcgtcccctgcaggtcctgctgggcgggggcctggggtctccgatgggctctcggctggctcgtcccctgcaggtcctgctgggctggggcctggggtctccgatgggctcccaggggtaccttctttgggccccgttcgaccttctgtgtcctcctcaaccccgttctcactgtgtccagccttggggtgccccgatggggcaggggacccggcaagggccaaggtctgggcctcgtgcc

SEQ ID NO: 123753 - DNA, 1109 bp, Homo Sapiens
  misc_feature (84)..(92): n is a, c, g, or t
  misc_feature (293)..(301): n is a, c, g, or t
cttccgagaaaaaagggcccctttgcctctgggtttcccacggcctcaaaggaaaaaagccagcgcccttggccccggtctgannnnnnnnnatttcccagaaagagggttcccaattgtttccaaaaaacaccaaggggctcgccaggggggaggaacctctgggctgggggagaaaaccacacaactccagggccccagggaggggcttttttgccagggccctttgggggctttcccctgaagggggccctggcgcgggcttttttggggtgagctggctaatagggggnnnnnnnnnagggaggccccagccacctgtgggttccatgggtcaccgggtcaacgaagccagagcccgagggggaggcccgcagcagctccggagggccccagcccctgcagcagggacaggaggaccaagacgccgacgggcactcctttccttaaggcttcccagacttggcagaagactccacctctgcgtcctgcaactctgctgcctcccccgccttggctggctcatcccttgtaggtcctgccgggctggggcctggggtctccgatgggctctcggctggctcgtcccctgcaggtcctgccgggcgggggcctggggtctccgatgggctctcggctggctcgtcccctgcaggtcctgctgggcgggggccttggggtctccgatgggctctcggctggctcgtcccctgcaggtcctgctgggcgggggcctggggtctccgatgggctctcggctggctcgtcccctgcaggtcctgctgggctggggcctggggtctccgatgggctcccaggggtaccttctttgggccccgttcgaccttctgtgtcctcctcaaccccgttctcactgtgtccagcccttggggtgccccgatggggcaggggacccggcaagggccaaggtctgggcaccaccactggccaccgcagcactgtccccagcaccctcatccaccttcctccgcttcctcaccttgtcggccaacctggctcccaggggttgcggcagggctgcactgcctccccagggtcccctcgtgccgaattcgccacccagcctcgctacctaaagacccttatag

SEQ ID NO: 123754 - DNA, 1572 bp, Homo Sapiens
tttctagttctggtcagtgggggcactgggtcagatttattgcacttgcaacagagtttaaataagtcctgggtgtctggtgccaaggtgagggaagggttgggcagagagatgaggggcagcatcagtgcagctggcaggcagaacccaaattctgcaggcccaggacagtgggctcccctttctctggggaacagggagggcctgtgtctggccaggctgaggttccagatctgttgccatcatggccccttcagggtcctgggaaattcctggcttctcctaaatcagggtgaactgggcctccaggatcaggtctggagcaggcccaaatatagtcctggatctgcctggattaggtgccaatgtctgagtctgggttccagatcaactccagaccccaggctggatctggccccatttgagttctgattccccttggagctgggctctgggccctgggccagcatctatccttgtgtggcatctgtcctgagctggtcctggggcaccatgcatagttagtgttctttgttggcccaccagggtggggctgtccagagctgccaggtcttaactccccaagttccaggttcttagctgggggcttcttttggatctctggcaaggctgaggacagatctttgcaggttggagctggacaggaagtccttgtggcatgtctggcccaaagaactgtgaatggatttcctagttatctttccaagttgtttcaggaaactctccaaaatgcaaaggcttcagggaggctggggcctctgtccctggatctgagttcccccatccatgaagagggtatgtgtaaacaagggtccttcacagtgcatgggggggagggatccccagctcctcacccccctggctctggcccttcaagtatgtctctgggctggggagaggagcttctccctggccgtcagcaccttcaagaagtacccagacccctccttttcagtagaatgagggtggggggactggttcttcaggaatgggagtctgaaattgggaggactcaggcatcagaggtggctggaggcttgagctgagctttttccatggcggtgccatatgggagggagcgtttgaagaatccaagcttgtagaggatgtagatgagtagacctaggagcaggaggccaaacaggatggctaggatgatgatccacagtgggacgccatagctgccttctgccttggtccattgcacagctgtggccacctgacgctctttttggggcagctgccgaggcaggattcggtagggcatcttcagggctttgtacacagcctcacactgcaggctaaatggctggtgctcccgctgcaagaaagtcttggcccagactcggaaatgcaactgcagactttggctctcttgttggtgcaggggcccgagctcacagcgcagcctgaaacactcaacctccgggcatttcaggatctgaggtcccgaggaagcagagctgcggcttggagcttcccgtttttgctggtggtgcagggaaccctcgggatccaactccaggccctttgggttaatcccacgcgtcc

SEQ ID NO: 123755 - DNA, 1297 bp, Homo Sapiens
gttctctcccatggtaatttgcaatgaactgtaagtgcttgatctacatctgaagcctctcccacattgttcacatttgaatggtttctctcccagtgtggactctctgatgagtttgcagatgtgagctttgactgaattccttgccacacacgtcacacttaaagagtttctctcccaggtggactctctgatgaatatgaagtgctgagatgtaacagatgctttttccacactcatcacatgtatgagacttctcttctgagtgtatttgctgaggaagatcaaagatgggcatatcactgaaggattgtttacacttcccacccttggaaggtttctgtcctgtgtgcattgtgggtattccttcttcaacctgggagtgggcatcacccttttcaaagaactgagagttctttatggtagagtcttgaggcctggttaagtcttttgcaatttgttcccagatttgctggcaggaccacccttcatgtggtcctgcttctggaaaagtcttcatctcaggttggatcttgcctccactcaataaagtcttctgcgttcatcacctttcacacagttcatgtgacctggttcttcctggatgctggacaagaacccaggtgccaagagggcaggggctgctaccctgatgctccactgagctgattggcacttggccatccccagatggcagagctgaaacagcatgggttgtaacatgcttggacactgctgtggggcgtgcacaacagagcctgctctcgccagagaggagcgaccagccaattccagcattcatttgctccggttcctgcacttgctcgcttgcacactccctcctgaattcccttctctttgggttgctatatccatcatccaaaacttttcctcccttagaaagtggaaagtatctcggtggaatggttgatgccccactgacagcaggttcctgaagttctccagcatcacatctcggtacagcttcctctgggcagggtccagcagccccagctcctcctcagtgaagaccacagccacatccttgaaggtcactgcctccttgaacttggtcatttttcctcctgtttttgggaatttgcagagtcctgagttatgccatttgagagaaggcagaatcgtgcctggaacagtggagctttgctttcagtagccaagaagtcagtccgcgcagtcctttttcaggctctgctctcccacgaggcttcttttcccataaccggaccaccaggtcccagcgagccccaatcttaagtccctgacattaggaggggcc

SEQ ID NO: 123756 - DNA, 992 bp, Homo Sapiens
tggaccagcatcccttgagccgtgcctagccggcgctcttaccactgtcgacatggacggcttccccccatatgaattcgcgatgtgtctgagctgggaatgggcagtaaagcgttcccaccattgctcacagtaataaggtttctctctcaaggtgtaagttgcaatgacgcttaagtgctgatctacatctgaagcctgtcccacactgctcacatttgaatggtttctcgtgcagtgttggactcttttgatgaggtttgcagacgtgagcctctgactaaattcccttaccacacacatcacacgttataggcatttcactcccatgtggaccctctgatgaatatgaagggctgagatgtaacagaagcttgtttgccacactcatcacaggtatgagacttctgctcctggaatataactgctgaggaagatcaaagaaggaaacatcactgaagaactgtttacaattttcaccctggaaaggtttttctcttgtgtgaactgtagatagtcttgctttaatctgggaggggttgtcatcttgttcaaataactgagagttacttatggtggtatcttgagacctggttaagtcacttgcaatttgttcccaaatttgcttgcaggaaaattcttcatgtgttcctgcttctggaacagtctccatctcagtttggatcttgcctcccgaattcccttctctttggcttgttgtccccatcacccaaaacttttcttcccttaggaagtggaaagtatctccatggaatggttgatgccccactgagagcaggttcctgaagttctcaagcatcacatctcggtacagcttcctctgggcagggtccagcagccccagctcctcctcagtgaagatcacagccacatccttgaaggtcactgcctcctctgctctccgcccaggcttcttttctcctgaatcgatcattgggtggttgcgagccccaaggaaaggagactcgttc

SEQ ID NO: 123757 - DNA, 1062 bp, Homo Sapiens
aaaccaacaagactgtcatttattaatacaaatttatatagtggcatatactattggagaaatcagaaattcataacacacaaattcatattggaaatacaaaaatcatttgagagtcaagaaatcaggttgacagcaccacaaatgtttactcagtctgagcaggtgtgtagtatccaagaataacaaatacctatagcagactgagactgaatatcataagactgtgcaaacacattccaacactatttcccacccaacaatagaatctgcaggagtcctctaggaggcctggggtacaataaaagggcagcaaagcagaaaaaatggtacagaccattctttcttttaaccttcacagccagcatataaaagcaagtagtaaccactgagagttgtttgttccttctcacttgaaggcaagatataaaaggttagtaaaacacacataaggcattagtgagcaaatcagagaaattgaaagcagagctttgactgaaatataatccacattagtcatcaaattacttgattcctataatgaagtatgaaacaaaccaaatgaataattctacatcaaaggggtatatctcatctccacatctcttaacactatttaacaagtgtgcatccactagagaagtactggcattcaataacgtacatttagtggggtgaaaggcagaaagaaagggaggcagaaatactgcaagggctttcctttcacacacagtttcctatctcactcttgcccttgtcatttcagaccttgtacgtggcggttgctgggagcactctggggctcagtctttagtccttcccactctagcttcattctgccacctctgtactcttcccatgcaatgtcctattcagcagtaatggaaggggtgtgcaagaagaatatgtgggcaaatggaaaggtgctgctttaacgtgtaagcattctggcacttggagcagttacacagttacaaataatgggccaaatggaagttcgctctacaaattagcattcactctctaggttgttctggagattctgtgcctggctgatcagct

SEQ ID NO: 123758 - DNA, 1281 bp, Homo Sapiens
  misc_feature (205)..(205): n is a, c, g, or t
  misc_feature (319)..(376): n is a, c, g, or t
cgcatggcgtatgcacactgttgattggtgggggcggggtgcagcgcaagcggtgtgtaaccaatatacataaacagctgctgggggcacaagcggaaccacggcgctaataggtattcgtgaatatttacagcgggaacaaatttaacggtgcgccgatctctgtgggtgtggcgctgtttcaatgcgggggctcgcggcaaanaaaaagctgggccgtctgcacggcaaaatgaggggggggagttacatccgggtctgcggcggctcggcgcgacaaaaacggggggtctagtgcgcggacctttggatgtacgcnnnnnnnnnnnnnnnnnnnnnnnnnnnnnnnnnnnnnnnnnnnnnnnnnnnnnnnnnnatctgttaaactctattttgggcggccgtcgtcttccgcgtgttctcggtgacaaactttattaaattttgcatcagtacagggcatctcttattgcatactagaatcccaggattcaggcgggtggtaaagtggcaacggcgaatttgggtatctggtctcccaaaagtacttgccgctctacccctgactctgcaatggctgccaggcggatcactcctccactggagccatcccgctccatggccaaagcgagagcattggcagtgaattgcagacactcttccttggtcatgccttcccggtaggtagcatcaacatagccatagatgtaggagctcccggagcctccaatggcaaaggactgccttaccatcataccccccataggcactgagtacacctgccctccttcttgagggtcccagcctgcgatgatgattcccgccatcaggtcttcccggtatcggtaacacatctccttaaagaggctggctgctgtgtggaccagtggaggctcattcagttcaatgctgtggaaaccgagctggtaggtgacagcatcagctactgcctgggtatcagcagctgagcctgagcgacagcagaaaatgcggtcgtgaataggtgtcagcttgtcagtcactcgattggcgatgtaggacccagtggttgttctggagtccgcccccagaaccacgcccccgtcaaactgcacggccatgatagtggtcccagtggaaacttctcggctttcccagtctggagtgaatgcctccggcccccaagccggtgctggcccggctccccgagcagctagtaaggtagccgccatctttctcctccggtactgcctcaaagcaaccggacgcgtgggtcgacgatatcccgggaattccggaccg

SEQ ID NO: 123759 - DNA, 869 bp, Homo Sapiens
attttttactgggaccaaacctttattaaaattttggcatccgttacaggggcatctctttattgcataattaggatccccaggatttcagggcggggtgttaaagtgggcaaacggcggaatttgggtatctggtctcccaaaagtacttggccgctctaccccctgactctgcaatggctgccaggcggatcactcctcccactggagccatcccgctccatggccaaagcgagagcattggcagtgaattgcagacactcttccttggtcatgccttcccggtaggtagcatcaacatagccatagatgtaggagctcccggagcctccaatggcaaaggactgccttaccatcataccccccataggcactgagtacacctgccctccttcttgagggtcccagcctgcgatgatgattcccgccatcaggtcttcccggtatcggtaacacatctccttaaagaggctggctgctgtgtggaccagtggaggctcattcagttcaatgctgtggaaaccgagctggtaggtgacagcatcagctactgcctgggtatcagcagctgagcctgagcgacagcagaaaatgcggtcgtgaataggtgtcagcttgtcagtcactcgattggcgatgtaggacccagtggttgttctggagtccgcccccagaaccacgcccccgtcaaactgcacggccatgatagtggtcccagtggaaacttctcggctttcccagtctggagtgaatgcctccggcccccaagccggtgctggcccggctccccgagcagctagtaaggtagccgccatctttctcctccggtactgccgatttgaacccaagcctcgacctagccgaattgt

SEQ ID NO: 123760 - DNA, 847 bp, Homo Sapiens
cgcgggacaacttaataaatgttgcaccagtaccaggaatctctagtgcaactagatcccagattcagcgggtggtaaatggcacggcgaatttggtatttggtctcccaaaagtacttgccgctctacccctgactctgcatgctgccagcggatcactcctccactgagccatcccgctccatgccaagcgagagcattgcagtgaatgcagacactcttccttggtcatgccttcccggtaggtagcatcaacatagccatagatgtaggagctcccggagcctccaatggcaaaggactgccttaccatcataccccccataggcactgagtacaccctgccctccttcttgagggtcccagcctgcgatgatgattcccgccatcaggtcttccccggtatcggtaacacatctccttaaagaggctggctgctgtgtggaccagtggaggctcattcagttcaatgctgtggaaaccgagctggtaggtgacagcatcagctactgcctggggtatcagcagctgagcctgagcgacagcagaaaatgcggtcgtgaataggtgtcagcttgtcagtcactcgattggcgatgtaggacccggtggttgttctggagtccgcccccagaaccacgcccccgtcaaactgcacggccatgatagtggtcccagtggaaacttctcggctttcccagtctggagtgaatgcctccggcccccaagccggtgctggcccggctccccgagcagctagtaaggtagccgccatctttctcctccggtactgcctcaaagcggacgcgtgggtcgacgatatcccgggaaatccggagcggtacca

SEQ ID NO: 123761 - DNA, 1031 bp, Homo Sapiens
ctactggggaaagcagacgggagggacacaatttccggcattgggtgccacacacagggtgcccacccgcgcgttcctccgctttaccgcccgctcttttcccacgaggcccctgcagaacggacgtagtggccctggaggaactttgcgcgccctttgtgttggtgtacgagatctcggggacacgttagtaattgcatcatacaaggcctctcttattgcatactagatcccaggttcagccgggtgtaaattgcacgccggattttggtatctgtctcccaaaagtacttgccgctctacccctgactctgcatggctgccagcggatcactcctccactggagccatcccgctccatgtcccaagcgagagcattggcagtgaattgcagacactcttccttggtcatgccttcccggtaggtagcatcaacatagccatagatgtaggagctcccggagcctccaatggcaaaggactgccttaccatcataccccccataggcactgagtacacctgccctccttcttgagggtcccagcctgcgatgatgattcccgccatcaggtcttcccggtatcggtaacacatctccttaaagaggctggctgctgtgtggaccagtggaggctcattcagttcaatgctgtggaaaccgagctggtaggtgacagcatcagctactgcctgggtatcagcagctgagcctgagcgacagcagaaaatgcggtcgtgaataggtgtcagcttgtcagtcactcgattggcgatgtaggacccggtggttgttctggagtccgcccccagaaccacgcccccgtcaaactgcacggccatgatagtggtcccagtggaaacttctcggctttcccagtctggagtgaatgcctccggcccccaagccggtgctggcccggctccccgagcagctagtaaggtagccgccatccggacgcgtgggtcgacgatatcccgggataaaccgaccgtaccagcctgctttttataaacactgttatagttctca

SEQ ID NO: 123762 - DNA, 278 bp, Homo Sapiens
ggcacgagggttgatgcctgtgggctctctgcagccttaatgaggctggcctggcttgggcaggaagggggctacgtgcctggagactgcaggctgcctgcagttccatgctggagatgggctggggagatcatggaacttagagcaggaaagcaagtagctagagccacgaaagggagagccgctcctctgagtggaggcggcgtagttggtgcttccccaatcctttcacctcatggcatgtacagaacacagtattgggaagcacttgcggccgc

SEQ ID NO: 123763 - DNA, 507 bp, Homo Sapiens
  misc_feature (31)..(31): n is a, c, g, or t
acatgttgtttaggggggtatgaggtgctgnttagtcacacaattttaattgtgaattatagtgaatggtaaacagtaaaagagtaattacatgaaaagctccatattttgcatgtttcaactgttcttcattgtctttacttgtaaggtgttgaaggtgggatccactcctgaatcttctttctagtggtagaataaggtacatattgttctggggtgccagtcacgttgaatttatggttcgtccaaatgaatttacgagcagtaagtggttttgttgttggaggatcatcagtcatactgtgaagccaacgatgccaaaaaattgcttgttgtcttcatagtatttgtttccatatttgtcttcccccactaatgtaccaaccttcgcatcatttgtcctgaaaaaaacccgtagatagcctcggagaccgccgtggccggtgatctgctgcagcccgcgtttcaggacctgcactaactccatcttgcctcgctggccccccc

SEQ ID NO: 123764 - DNA, 803 bp, Homo Sapiens
  misc_feature (173)..(174): n is a, c, g, or t
  misc_feature (180)..(181): n is a, c, g, or t
  misc_feature (183)..(183): n is a, c, g, or t
  misc_feature (188)..(189): n is a, c, g, or t
gggcggttttttaattgggggagaatccacaggccctagttcaatggccagggttttcctttgggaaacaggttatggcccgtgttcccttacccttctggggcccgggcgcccaaaggaatggttttagaaagctttttcgagggccgaaggcggccgacagtgtttgtttnngggggnngnggggnnggttagtcacacaattttaattgtgaattatagtgaatggtaaacagtaaaagagtaattacatgaaaagctccatattttgcatgtttcaactgttcttcattgtctttacttgtaaggtgttgaaggtgggatccactcctgaatcttctttctagtggtagaataaggtacatattgttctggggtgccagtcacgttgaatttatggttcgtccaaatgaatttacgagcagtaagtggttttgttgttggaggatcatcagtcatactgtgaagccaacgatgccattcaggaggcaccatgcttccatccacatcccagaatgtgtttttgccattcatttcagtagtatatacaacccatcggtgacggccaaaaaattgcttgttgtcttcatagtatttgtttccatatttgtcttcccccactaatgtaccaaccttcgcatcatttgtcctgaaaaaaacccgtagatagcctcggagaccgccgtggccggtgatctgctgcagcccgcgtttcaggacctgcactaactccatcttgcctcgctggccccccccggccgtaatggccgaattcccgggcatatgtccggtaccgtcgactg

SEQ ID NO: 123765 - DNA, 1508 bp, Homo Sapiens
  misc_feature (585)..(585): n is a, c, g, or t
tttcaagtttaactgaaatttatctttatttcaagatatcagaagacatttacatatttgcattttctgtcttgctactatctgcgtatatgtaacagcttttctcaaggcttcaagataggaattgttttatgcctttgtatcacagacctaagagaccaaaattatttgaagatggagtggggacaaaactagggtctctgcagtccctactccatgtaccatccattagctcacctctgtaggtattactaaagtcatgagagttaaatccaacgtgcaactttaatattgcaattccaaaaaataaagctgtatacaactcttggaataactcaccaaaataaatagctttttaatataaaattggttagtgctgcttaacagtctgtgttcatgaagaataaggtgttaataattgtgctcacatttgtttaggagccttccaaagacagtatcacaccttgacgtgttcgacacttgatgtgtttgacaggcgatatgattgcttactcactcacataacccagtgtttggtacctactttcacacagtaattaatgtgctcagtccattttagttcanaatttacaaccaaggaacttcatatatttttggcataagctgatttattatttatgagaactttagtataagaagcatcctgcaatcacaaaagtggaactagttgatattttgaaatcatacttgatttaaccaccttcagaaattctataaaacactagcaacttccttttatcagacttatgaggtagttacattatttttccttttattgacatgattcatcaaaaaattattttatccaagctcataaactaagtcaataaaactgcaaggaaaaatgacaaaaattctatcttatgcctgatcttagtcaaatcaaatgttgccctctgggattccaattcttcatgtcacagttaagtagtacttattatgtattttacagtgatacgacccaaaatagcagcagtgtgctctgaggtgtgccaaaagtgtgccctgtgaaatataagtattatcaaatacaatcttaaaaatcctaagagattcgtaatgctagagggtgctgtatgttcacattccgacaagaacaccatgacgcgtgttcctgacccacagtgtggtggcacaggggccactgcgtgctcgagtctagcccagcctgtcctgttccattctgttctccagcttccctctaatggcttcccatgaccacacacaggagtggggaaaccttacttgtacttcatcggttttcttccaaatcagcgacgggagtaacatttttattcctatcaccagaccacctgaaaaatggactcctaaacttcctcatatgacatcacattagggcaatcatgtaccctcaatatcatcagggtaagtgtatttattctgttattattacatttgtagtgcaagagctggacactctagaaatcttcatgcacactactttgggaggcttaacaatggtctat

SEQ ID NO: 123766 - DNA, 684 bp, Homo Sapiens
  misc_feature (673)..(673): n is a, c, g, or t
tttcagctaccattgtttttattgttactgaggctgtcagtgccgcctggaagcactaacactttttcccatttcctgcctcagcccatttcacaggtgaggaaatctgaggctcagtgagggacttcattcccttcatctggtaaattccatttacaggggtggggctgggtgctctatcggtgcctggcttcctctcccaggggtgcagtaggggagagtccattcccctgtacctcatttagccccaggattgccctgcccaaaagatgacactcctgcccccagtgtcctggatgggaggcctcccagccttcccaagcaatggctgtaatcctgtgggtacagagtctggctggggatcctgctgctctgctgggaggaggagtctgccttcatgggagactcggtccctgccccatcggtaccgggtgcctggagtccacctgcccctcacggagagatttctggcctcttgtccttgaactctattctgtcctgctcctggctctccagcggctccaggtggctgtgcttgtcctggaccatctttcccggagtctttagaaatctgaacaggagtttctgccccggttccttcttaatgatattaagcttataatagtggcgcagggcacgagacatcttctcgtaggtcatgttcacccggttncttgtgatttc

SEQ ID NO: 123767 - DNA, 944 bp, Homo Sapiens
  misc_feature (784)..(793): n is a, c, g, or t
  misc_feature (841)..(875): n is a, c, g, or t
attccttgggggatacccttgttggagccattataccgggttggtttaaactgtccttcccaggccccaagggaacccaagggggtattgggacccaaaccgaatggcatacttgcaaaaggaattaagggaatctatcttctcttcccaaagatgtccgacggctttacgataatggcttcgggaaatgcatctctcactactttctctccaacagccttatttctcaaatatctagaagagcttttaatattcgcattcagatgtgaaacatgaatgaatttttcaactccagcttccttggacagttgagcaattgcttggggaatcttcacaaaaacatcctcaaaatcaaagtttttggtttcccagtctcgtccaataagattgatgaccacattgctgtgttgtactactcgtcggatagaatctttatctctcgcgtcccattccagaaacagaagctggcccaggtcacccatgggacgaaggtgcatgatgtcatatttatcacaccgatagggtatgattacctgtgaccccatgcgtccaaggtggttgacaacatatcgccccaggaatcctgttgctccaaacacagtggccacaatcccactgactgaggaacgtccacctttcccatgaggcatgagggcatgatgaagctggcgacagggtgggccgtgacacacagatgtggctattgcagtaatggcagaacgtgacattgacaggacccggacaacccgggattgtgcggcagccgccatcttttcccacaatnnnnnnnnnnggccgtaatggccgaattcccgggcatatgtccggtaccgtcgactgnnnnnnnnnnnnnnnnnnnnnnnnnnnnnnnnnnncggccgcttcctcgctcactacttcgctgcgctcgtcgttcgctctaggctacccctatatgattatca

SEQ ID NO: 123768 - DNA, 2008 bp, Homo Sapiens
  misc_feature (82)..(82): n is a, c, g, or t
  misc_feature (155)..(167): n is a, c, g, or t
  misc_feature (298)..(308): n is a, c, g, or t
  misc_feature (468)..(557): n is a, c, g, or t
  misc_feature (1886)..(1920): n is a, c, g, or t
  misc_feature (1924)..(1962): n is a, c, g, or t
ccgcaaagggggacaaaggggtggtgaaattcccgggtggcgaatttcaggggttttactatacacccgttttgggaagagngttttcccatgttggggccgaaaaattgttaatgggaattttccacccgtttttttggaatgaaagtggccannnnnnnnnnnnntaaaatttggaaagtcgagggctcccgttgggggctcccccggttgaatagatccccgggaaaagaccctctcggaaatccccttttggggtttttttcaagaaacggtttcgggtgcccccccggggcgnnnnnnnnnnnggggggggaattccaaagcccttatttcctggtcccggggttttcctttggaaacaaggtataggccacaggtttcactttacctaatgggggcccgcggcgcccaaagagaaggtgttaagaaaaggtctttggggggccgagggcggccgaacaaggnnnnnnnnnnnnnnnnnnnnnnnnnnnnnnnnnnnnnnnnnnnnnnnnnnnnnnnnnnnnnnnnnnnnnnnnnnnnnnnnnnnnnnnnnncaacctgaaatgttttaatagtggaactgtgtacaggatcctctaaagagaccgcctggctgggtgctcaaaccacatgggccgacccaaaagacgccaaaaccaagagctgctcaggaggcactaaatgttgacggtcttggccggcttcacatcctcaatttcagcagacagccagcggtaagtgcgatgacgccgcagcacctcaatggccttgagttccagtggtgttgcctgaataccaaggtcttctaagccaggcaggtgaggcaatttcatgtctgtgatgtgcatccgctccactttatcccttgttatccagggctcaaatgggcttatttcaaagactcttgctacccatcgataggcaaaaagcggcaaggggaatgggaggaacaatctgtgagccacagcaaagatgtacttcaccaggtggaaaaggaggtaccgactgggaccaacgaaagcaaaggatttcccattggcatcaggatccttaactgcattaacaattcctttggatacatctacgacatatactggttgtttaactgtcttccagcccaaggaaccaaggggtataggaccaaaccgatgcatacttgcaaaagaattaaggaatctatcctctcttccaaagatgtccgacggctttacgataatggcttccggaaatgcatctctcactactttctctccaacagccttatttctcaaatatctagaagagcttttaatattcgcattcagatgtgaaacatgaatgaatttttcaactccagcttccttggacagttgagcaattgcttggggaatcttcacaaaaacatcctcaaaatcaaagtttttggtttcccagtctcgtccaataagattgatgaccacattgctgtgttgtactactcgtcggatagaatctttatctctcgcgtcccattccagaaacagaagctggcccaggtcacccatgggacgaaggtgcatgatgtcatatttatcacaccgatagggtatgattacctgtgaccccatgcgtccaaggtggttgacaacatatcgccccaggaatcctgttgctccaaacacagtggccacaatcccactgactgaggaacgtccacctttcccatgaggcatgagggcatgatgaagctggcgacagggtgggccgtgacacacagatgtggctattgcagtaatggcagaacgtgacattgacaggacccggacaacccgggattgtgcggcagccgccatcttttcccacaatcccccacccccggccgtaatggccgaattcccgggcatatgtccggtaccgtcgactgnnnnnnnnnnnnnnnnnnnnnnnnnnnnnnnnnnncggnnnnnnnnnnnnnnnnnnnnnnnnnnnnnnnnnnnnnnnaggaaataggcgagctagcgccctatagagtatcaaatgttttttt

SEQ ID NO: 123769 - DNA, 892 bp, Homo Sapiens
aagcaggctggtaccggtccggaattcccgggatatcgtcgaccacgcgtcgcgtacatccaaagccggttctaccgatccccagaaggtgatcctgggccacccctacgacgtggccattgacatgtggagcctgggctgcatcacggcggagttgtacacgggctaccccctgttccccggggagaatgaggtggagcagctggcctgcatcatggagattccaaaggttttcctaaaaatataaccaacaacagggggaaaaaaagatacccagattccaaggacctcacgatggtgctgaaaacctatgacaccagcttcctggactttctcagaaggtgtttggtatgggaaccttctcttcgcatgaccccggaccaggccctcaagcatgcttggattcatcagtctcggaacctcaagccacagcccaggccccagaccctgaggaaatccaattcctttttcccctctgagacaaggaaggacaaggttcaaggctgtcatcactcgagcagaaaagcagatgagatcaccaaagagactacagagaaaacaaaagatagccccacgaagcatgttcagcattcaggtgatcagcaggactgtctccagcacggagctgacactgttcagctgcctcaactggtagacgctcccaagaagtcagaggcagctgtcggggcggaggtgtccatgacctccccaggacagagcaaaaacttctccctcaagaacacaaacgttttaccccctattgtatgacctttgctgagggtatgtcctgctcctttccaccagtgatttgtattaagacagcacttatattgtacaatacttcagaagtgtttttttaaataactaaaactttattgttaaaagttcgtag

SEQ ID NO: 123770 - DNA, 844 bp, Homo Sapiens
tgccccaaggaaaggccaaaaggatttccccattgggcatcagggatccttaacctgcccataaccaattcccttttggatacatctacgaccatatacctggtggtttaactgtctttccagccccaagggaaccaagggggtataggacccaacccgatggcatacttgcaaaagaattaaggaatctatcctctcttccaaagatgtccgacggctttacgataatggcttccggaaatgcatctctcactactttctctccaacagccttatttctcaaatatctagaagagcttttaatattcgcattcagatgtgaaacatgaatgaatttttcaactccagcttccttggacagttgagcaattgcttggggaatcttcacaaaaacatcctcaaaatcaaagtttttggtttcccagtctcgtccaataagattgatgaccacattgctgtgttgtactactcgtcggatagaatctttatctctcgcgtcccattccagaaacagaagctggcccaggtcacccatgggacgaaggtgcatgatgtcatatttatcacaccgatagggtatgattacctgtgaccccatgcgtccaaggtggttgacaacatatcgccccaggaatcctgttgctccaaacacagtggccacaatcccactgactgaggaacgtccacctttcccatgaggcatgagggcatgatgaagctggcgacagggtgggccgtgacacacagatgtggctattgcagtaatggcagaacgtgacattgacaggacccggacaacccgggattgtgcggcagccgccatcttttcccacaatcccccccc

SEQ ID NO: 123771 - DNA, 711 bp, Homo Sapiens
  misc_feature (573)..(573): n is a, c, g, or t
ttttctagttttttaacataaagttttatgtatttaaaaaaaacagtctgaagtattgtacaatataagtgctgtcttaatacaaatcactggtggaaaggagcaggacataccctcagcaaaggtcatacaatagggggtaaaacgtttgtgttcttgagggagaagtttttgctctgtcctggggaggtcatggacacctccgccccgacagctgcctctgacttcttgggagcgtctaccagttgaggcagctgaacagtgtcagctccgtgctggagacagtcctgctgatcacctgaatgctgaacatgcttcgtggggctatcttttgttttctctgtagtctctttggtgatctcatcttttctgctcgagtgatgacagccttgaaccttgtccttccttgtctcagaggggaaaaaggaattggatttcctcagggtctggggcctgggctgtggcttgaggttccgagactgatgaatccaagcatgcttgagggcctggtccggggtcatgcgaagagaaggttcccatcttctgagacagttcaggaagctggtgtcatangttttcagcaccatcgtgaagtccttggaatctgggtatcttttttccccctgttgttgttatatttttatgaaacctttggatcaaagatggtctgctccttaatgctgtctgaatgaagcccgctggcggagtacc

SEQ ID NO: 123772 - DNA, 1176 bp, Homo Sapiens
ccgggaagccatctgggagaacaatggctttattcagatgttggtgcctctgcccctctggtgcccccgatccccacaaggggccgcgaggcgggcaggtcacagcaggttgaagtcccctttgtgctgttccagccactggtccagcgtcagggccttggggttgagtctcagggtcagctcgatgtcacggtcgggtctcagggcatagaaacggaacatgttggccaggtcccgggcaccgggaaagccaagcttttcgtagtcctcaggagtcatcttggcatcgtgcacgaccttgcgggtgtgcttggtgagcagggcagcgtactcctcggccgtgtgcctgcaagtgctcagcccgatgttctggccgacgtatttttctggcatcttcaaaaggctgagcaccacaggacccaggtcagacacggacatgccatccatgggaacgtcacctgtgggcaagctcagcaagtagctctttccgtctggggctttctggggcaagaagtgggagaggaggttctcaaaatagcagggcagccgcacactggtcatgggaacgccaatgtcccggaaatattcctccacctcccctttgccgtcaaagtgcgcggcggccaatctccctgccgtcagcttcttgatgttctccaggccgctgtagaccacatagtggaggcccaggcgcctggccagatcagcgagcagcttcccctgcttgacctcctgctcctggctgcagctctcccagtaattggtcacgatgaaggtggcgtaagccccattcagggccagctccatgatgacctggtcatcttggtctccctgcactacttctgcaccttgcagcctcagctcctttgctgccttcttcctagggtttcgggtcaccactcgaaccttgaatgtcccatcttccaggagtgtgcgggccacggagccaccctgggcacctgtgcctccgaaaaccaccaccagtttcttgtccaccatgaggacgagaatgggacgaatccggtccagagatctggcagagcgccgctcacggaagcccagcgtcggaggacccctggctgcagccgccaatcccgacgtgtcggccgaaacccctcctccggcccccggccgtaatggccgaattcccgggcatatgtccggtaccgtcgactg

SEQ ID NO: 123773 - DNA, 930 bp, Homo Sapiens
tatgctcagccgatttttgccgactatttttctgcatttcaaaggctgagcaccccaggaccaggtcagacacggacatgccatccatgggaacgtcacctgtgggcaagctcagcaagtagctctttccgtctggggctttctggggtcaagaagtgggagaggaggttctccaatatagcagggcaccgcacactggtcatgggaacgccaatgtcccggaaatattcctccacctccccttgccgtcaaagtgcgcggcggccaatctccctgccgtcagcttcttgatgttctccaggccgctgtagaccacatagtggaggtcccaggcgcctggccagatcagcgagcagcttcccctgcttgacctcctgctcctggctgcagctctcccagtaattggtcacgatgaaggtggcgtaagccccattcagggccagctccatgatgacctggtcatcttggtctccctgcactacttctgcaccttgcagcctcagctcctttgctgccttcttcctagggtttcgggtcaccactcgaaccttgaatgtcccatcttccaggagtgtgcgggccacggagccaccctgggcacctgtgcctccgaaaaccaccaccagtttcttgtccaccatgaggacgagaatgggacgaatccggtccagagatcggctggagtgacctcctcgccgcggcctgggcgggacaagttccaggagcccgggaccccgattctgcggccgagtccactgcagaggcggggatggagctgcgcgctaggcgccaactcccatccccgcagctccggccccacctggcagagcgccgctcacggaagcccagcgtcggaggacacctggcagcagccgccaatcccgacgtgtccctcgtgccgattcaacacccagcctcgtacctagccga

SEQ ID NO: 123774 - DNA, 1075 bp, Homo Sapiens
tttgtttctcaggccgtttattgatcctagcggccccgcacctgcgagagccaacagtccctccgagggaagtttccaggcctcactgtgctgtcggttatcactgacttgaggtcctgaaagcgtttcctccacgcctcagcccccttcccccatttgtctgttaaggtctggaacctgactcagccactgaggaaatggcccaagccagccctagtgtctgaatgtaaaagctcagaatgcttttccggagcacctccccttcagctttggagtttaaggtgtgtgaaaaaggataccattaattaaagtccaacaagatcagcccacgtgcttatgggctaactttttacctgctctttctgcactttgcaagagcaggagcaacaatggtggggtcgaagacctacctccctgcacactccacctaacctcatgtggatagctaagtttagctatccacccatagctaaaccaactattaactccaacctaacagtggcaagtaagaggccaggggagaaaatgggacgcccacaattccaggggctttggagttctttaagcttaaaacgtggacaacatccctgggttgccacccaattccccaaagcagtaggttctcccccacaggtgtagtggttaacgatggactgggccttcctcccaagcgctcacaccagggtcccgttcttgctgtcatagcgaggtgtggcctgggggaagcgaagggtcgcatactctgtagcgttttctaaatgcacgtgtttcacttcccgggcatggggacggctgcacacttgaatgtcagcataatgtaagttgctgtcttccgacatgaggcctggactcctctcttgagacccttgctgctgtaacacccgttcatacgtatgtcctgttgtttcatggccctttgggagattctgctgcagctgttgtggctgcggcttcagtgtccgtcttgtttggcttcctcttttctttttcttctggaaagttgatgggcagctccagcttcctccgcagcagacccggtttcccatggcgctctgtctccaagggagcccagctg

SEQ ID NO: 123775 - DNA, 597 bp, Homo Sapiens
  misc_feature (27)..(27): n is a, c, g, or t
gcggccgcaagtgcttacttttttttntggagccatttaacttgagttataataacatgcttttctgattataaaattaatgcatggctaccataaacaatttggaaaagacagaaaacaagttaacacgttaaaatctcaatcctgtctggtgaggactgcagtgaagcccagctggccaccccttccggggcctctgttctccccagggccttgcagcctctctgggcttggcattgctatggctaaagtgtgaaagggtcatgcaaggctgtcagccctgcgtcccccacgtgtgactgcatggggtcccacccaaatcggagtaatatacccactcagcctcacccctgctctgctggccccagggaggaaatgctcatcattgcatccgcccaccccacccctgcagtgccacattcaccagcctcgctgggcatcttccccctccccgccctctgcccctggcgcattcaccagcctcactgggcatattctgccctccccgcccctgcggtggcatattcaccagccccgctgggcatgtcccccaccctgcccctgcagtgccacattcaccctcgtgccgaattcttg

SEQ ID NO: 123776 - DNA, 1012 bp, Homo Sapiens
taggaggggtgcgtttattagacaaacgctgggagacaggcctggtggggacctggctgggggatgatgcagcccgcgatggctgctgcttcgtacttggcttgccccggaccacagcctcgtaacggtaacccctgctttccaggggcctggcacccccccctgccagggtccacacgcagggttgtggcgggaccacccctgcaggtccagctctgtctcccaccttttgcacagagcttcaagggaagcctccagaagtcaggggtgagaacccgtcttgctctgcctcaggcaaccccgggacaggctgaagcccctcacgcacttgggtgcccgaccagcagcagcaagggcagcacctgtgggcctcggcccagggccaacggaacaggctctgggacctcagggaaccttctgctgccttgggccaccccaccccacctgggcagagccagtgggaacccagaggcacccaactggaggtgacgaggcggctgtgggtcctggctagtcctagctcctactcgggtcccagcacaccctgcagctcactcagaattttgggggaagccctggggtcttggggcatgtggttctgctgtcacacatggacacggcctcctgggagtcctggtcctgcagcccctaccaccggatgcccaggccagtgctggccttctccacggcgtggtactgcgtatgcagcaagcgacctgcacactccgagtccgtgccctgcagccagtgtgtgtacagctcctgaaccccaggcgcgtcctcgggcgcctcagcccggaccatgccgtacagtctctccacgtgctggaggagctctctgctgggcctgtctggggcctggagctggcccccgccgttcaggcagcctgaggggcaggccatgacctccacgtagtggtaggggcagcgccctcgtttgagcctctgcaccaggttctggatgttgcggaagccgtacgccattgcgaagtgcagcagcacttgcggccgc

SEQ ID NO: 123777 - DNA, 1175 bp, Homo Sapiens
  misc_feature (1064)..(1098): n is a, c, g, or t
agccaggaaaggaatctttaggcagactgccatccaggacctggtattctgttcactgagattcagctgtggacatctgttcgttcttcctcttctgtctactgcatgcagcccggaagctgagcgttagtcaaaggtacaggaagggaaaagagaagagggcaaggcccatcccccaagaaaggaagggctctgatgcagagggagcaggagctgaggtggagacggccactgcctctctcacccctctgttccatccctctgctcaagaaaaccaggcttagcagagtgggacagacgctttttattggtctggctggcgtgcctagtggaaagctcaggcagagcttcctatcttgccctggctcccatcttccctctcctgggagttcatcacacatcccgagagggaagagtgtcctgggcagaggtggcaggcaaagccgggtaaaaactccagggctgggaagcaaatggggctcagggtgatgcagaaaatgtgatgttgccaggccatccaaataaagcatccatcggggcagaggagaagctgtttccctgcagacactcctctgcccccaccaggaatgggaggggcaggaggaagagcttcccagagaggctccctactgggcccttcgtgccatcagcatctcccggatgttgtcctcagcttccttaacgcttcgctccaggtaggactttttctgttctagttctttaattttttcttctgctattttctgcttctctaacagctgactgtgaattgcttccttggactgaagaataaacattcttcctacaccttcatacatgttagtctcatctaccaaagtcatgatctctgtatctgtaagatgtgcatgctttttcgttctgtttagctgttcaatctgtatgtctgcgagcttcaccttctgttgagtgtcaataactttggcttgaagctctgtgaaggccttcttcagctctagatccacgggggcggccatcttggtgcactgtaagcccccggccgtaatggccgaattcccgggcatatgtccggtaccgtcgactgnnnnnnnnnnnnnnnnnnnnnnnnnnnnnnnnnnncgccgcttcctcgctcaagactcgctgcgctcgtcgttcgctaatcaccggtacgccctatagtgatcggatagact

SEQ ID NO: 123778 - DNA, 273 bp, Homo Sapiens
ccccccacccaggggaaatggaggggcaggaggaagagcttcccagagaggctccctactgggcccttcgtgccatcagcatctcccggatgttgtcctcagcttccttaacgcttcgctccaggtaggactttttctgttctagttctttaatgttttcttctgctattttctgcttctctaacagctgactgtgaattgcttccttggactgaagaataaaccttcttcagctctagatccacgggggcggccatcttggtgcactgtccc

SEQ ID NO: 123779 - DNA, 1009 bp, Homo Sapiens
gctctgttgttgtgttctttagggatgcattttgaatatttattgtccttgtttttaacataatttgcaaatttacataattataatggctgtgtttgacaactggcttgcaacaaaattcttgaaaattgaataattggcccacctgggctgggatgagccagctggatcacaccgttgccccctcagcctctaggaggcctcaggattatggcgtccatcttatgatattggccaaaaggagacagtcttggaggtgctgcttactgttgaacttccttttggaatgtatgggagaaggcagggaaaggaatctttaggcagactgccatccagggactgctattctgttcactgagattcagctgtgaacatctgttctttcttcctcttctgtctactgcatgcaggcccggaagctgagcgttagtcaaaggtacaggaagggaaaagagaagagggcaaggcccatcccccaagaaaggaagggctctgatgcagagggagcaggagctgaggtggagacggccactgcctctctcaccctctgttccatccctctgctcaagaaaaccaggcttagcagagtgggacagacgctttttattggtctggctggcgtgcctagtggaaagctcaggcagagcttcctatcttgccctggctcccatcttccctctcctgggagttcatcacacatcccgagagggaagcgtgtcctgggcagaggtggcaggcaaagccgggtaaaaactccagggctgggaagcaaatggggctcagggtgatgcagaaaatgtgatgttgccaggccatccaaataaagcatccatcggggcagaggagaagctgtttccctgcagacactcctctgcccccaccaggaatgggaggggcaggaggaagagcttcccagagaggctccctactgggcccttcgtgccatcagcatctcccggatgttgtcctcagcctcgtgccgagttcgccacccaggcctcgctacctt

SEQ ID NO: 123780 - DNA, 1138 bp, Homo Sapiens
  misc_feature (176)..(185): n is a, c, g, or t
  misc_feature (293)..(302): n is a, c, g, or t
  misc_feature (440)..(465): n is a, c, g, or t
  misc_feature (1123)..(1123): n is a, c, g, or t
ccccgcccctttttctcacccagggggaaaaagtattatccccacggggggcccagggggttttactcccggggggaaatttagggtttcatctcccccgttttggaggaggttttccaatgtgggcaaaaaatctctaaaaggattcacacgctatttttgaaaaggggtcccannnnnnnnnntaaaaattatatatagggtctcgcgggagacccctggagagaaacccagataaagccctcaggtctcccatggagattttttgagaactctggggttccccgcggggnnnnnnnnnngggtgagaaccagggctctactcattcccggtatctctggggacacatctaagcccatgttcatttacctagggggcccgcgccccaaaagaagtgtatagaaagtttctagaggcccgacgccgcccacatgtttgnnnnnnnnnnnnnnnnnnnnnnnnnncatcaccattatttattatatatgaaccaggttttcagcacaagtcacactcaacacccttacccaacaggaggggcgacggaggctcagagagggagtgtagggggaggatgtcaatgggaggccccagcctgagccctgagcagctggccagccaggaactggcatgtgagtgagaggcatcctattctcctgctgctccaaagacaatgcccgctgaacaggatggcaggccacatcagcagtccatacagaagtgaggctgtcgtttcttcccctggagcaccagtgaggacaggccccagctgggagccaggcaaggtgggtgagctctgtgctaaccacactgggagctcgggtaagcgtgagggcaaggctggagaggtccgggacccctgcgtgttgcttcccactcctgccaggctggcacgcccccattcttcaccatccctagcacagagcccagggccagggggcagagggcggggctggctcaggagcagggctggcccgtcccatagcgccactcacattgccccttcgcctctctcatcgcagctctggtcacttagatgctgccatgagaggctctgaaatccacccccactgcagccaaaagccaagtcagagcaaacctgcactgtgctcggactgacangctggggtcggggga

SEQ ID NO: 123781 - DNA, 1403 bp, Homo Sapiens
  misc_feature (41)..(60): n is a, c, g, or t
ccctcactaaagggaataagcttgcggccgcctgctcaggnnnnnnnnnnnnnnnnnnnngattttctgaccataatttattgactccaatgcccaggccacaccacccttttgttataggaggcttctgcctagactttggccgggccatccctcatgcctgtgtggggcccctgcaggagaggggccggggcaggtggtcttccaggcccccttcctggcattctgttaccagacctcaacctggcttggagggcccaggtttccttgttaggccctgccccgcaccaggcaacgctaacacaggatgggaggcttaggctaaggcacatttacagtagaggggccaggaaatccgaggctcacgttccaacgctgcagtgcccaccatgtgagatttccaggaccgtcggtgcagccactgagccgtcccttctacaagccagaggtgttccctgcccgctgaggacggaaggagactcatggggccagaccgcaggccctgactgcacactcccgttttggcaggaaactaaaattggggagggacccccaagtctcatatgcacacaccctgctgcccctcctttgtcccgttcttccttccatggcaggggctacgtgggcaccgggcgcttgtcctggaagaagcgcttgagcgtgcagacctgcagcacagccaccagcagcagcaccgccacgttgacagctgaccagaagttgacccgctccaagttgccctcttgcaggttgcggtcacgtgcctcgaaggcccgcagtagcgtgagcatctggatgctgcgctccagccgggtccgcatggtctcaatggactccttgatgtcctccattttaacatccagcatctcctcgggctccacagcctctgcccatccttcgacctcctcgtcatcctggaggctgtcaaagatcagttcaaagaacaccagcttctcggagatggtgctgaaggagttgtcaaagcacagcttgtagtccccggcctccgttggctccaccgtgtgtaccccatcagccttgcgggactcgctgaccaacagcacgccctgagggctctccagcgtgaagtccacgtccagtccagcacctccgatcacctggtattcggtctcgaggcttgcgttggccggcgcggactggtagaaacactgcttcctccccgccggcaacaggaacgtgaactcaccgtcctggattggcgggggccccgcccctcccacctccactggtggcattagtagccacaaggccagggctagggccgcgccggccgccatcatccgggtcaccctctggtctgcaaaggggtcgcggctcctttaagcgctagccctgccccggtgctactcggcggagctcattggcagtggcttctgtatgtt

SEQ ID NO: 123782 - DNA, 221 bp, Homo Sapiens
gcggccgcaagtggttacttttttttagcacactcccatcacggaaatatcagttaaaagggaaggaaaaacatgtgctccactccaccctggccagcgggacatgacgtactgaaggaactggaaagcaaacctcacaaggttcctgagatacagaaactatgtgcaggctccaccacccacatccatctccctcccctgttcaaataggtcctcgtgcc

SEQ ID NO: 123783 - DNA, 2298 bp, Homo Sapiens
  misc_feature (45)..(54): n is a, c, g, or t
  misc_feature (197)..(215): n is a, c, g, or t
  misc_feature (271)..(306): n is a, c, g, or t
  misc_feature (2298)..(2298): n is a, c, g, or t
ttggggttttgtttaaaaaacgctggggggttccgcccggggggnnnnnnnnnnggggggagatccaaacccctattccttgccccgggttttctcggggaaacaattattggcccttttcctttcccttttgggccccccggccaaaacaaagtttttaaaaatttttgggggggcgggcgggcggccaagtttgnnnnnnnnnnnnnnnnnnngtgtggtgtgtgttcgcgtggtggttcttttgttgttttttgttcttcccccctcnnnnnnnnnnnnnnnnnnnnnnnnnnnnnnnnnnnnatcctactacatttttattaaagtaacaaaaaggtgtacatttgtccataagctgtacattcttccatataaaaacactatcatacaattagtaacctttgtcttttctgtcagaatagcttacaaacatactactactatttatttttacttaataggagagacaggcctgctcaacagtccagctcaggggttttgttgtttttaaagtgaacatcataaagaagagaagagagacaagattaagcatgagaccatgaggctgcttctaaaaaggcagggacctgtttgcagacaagatgcaagaacacagcctgcagtgattcacagctttgtttcaacccacaaaccagaaaattagctcttgggtctgtgggcccaaagtgaactttaaagcaataaagactggaagcaggtctgggaaggcaatacaaaatgtggagagttgaaaaggaggcagagctggcaggaatgggtagggagagtgtttggtaaatagcacctttgagtcaaaattgagcagtttagaaatccaggaaaggggactggctgtggggaggagaacctgggggtagaggaagtggggtgaagattcctcactaaggggcaacagcaggagggtggccatcctggccaaatgccctagccctgtccttcttaaggtgattcggtttgggaaactcgaggtcttttgaggacccctcatcaatgtcactgagaaattgaaggaagggagtttcttcccagtgtagctttccacttttctccaacccacaacagtatatattgcacaagtctacgacaaatttggattgtactgagacagacagcaacctttcccacaggtgctctgagcaccagggagaaaaaacagtgcccaaggtttggcttttatttagtgtcggccctacaagaataccaagtagtcttgcagaacatggggcactctcccattcagccaaggaatacatgcaaggctgactagccagccatcatcccaaggagagcaggagagatggttccctaagcccaccagggcatcaggaggttctgatagccagttttcctccagaccctcctgggacccagggggcatattgcacagtgactgagaactcttgtcctagaaaatacggtagctctatgacccgaccagaagggaagggggaggggagggttagaggagagttgtgcttttgaaaagaaggcagtaataaaggacctggagttccctgtagcttttgagccacctctcaaagggatcatggcagcagcatcaagactttcatgtggttccaaaaggaagagttttggccaaaaaacatccccagtggatactctttgggtcccaaaatttcattgcaaatcacccccaaattatttgccacacatacacacaaagcagcactagcaaagcaaaggttttgtgcagagttcccttccatcctaaccccaataacctccagttccctcctccccccctcagaaaacccaaagctttagattcctggctggaaagcaacatctacaggcccctgagggtagaattagaaacaagtcatgatttcaagaaaagcagcttaggacagtaggaatcaggagaggccttttcactctctgcccaggacctcattagaaaaataaaagaaaagataacatagtattgtttaagtccaggcatgaatgcccctgagtaatagaggagccagggatgcaggtgtctggctgggggagacagagagctctgaacttggcctctcttcctcccccagggcaaatcccgacctctctgttcacagttgctaaccttgcttgctccctctcacatcttcctggggtgctagccaaacgtctcccacttctccttggctaggtctaccccctaacagctccccctcctataggcagacactggctcacagactcaagcacgcaacagttctctccaaaggcacctggggaggccacttccaagcagctcccttgaaggan

SEQ ID NO: 123784 - DNA, 1323 bp, Homo Sapiens
gaaactaacattctttattttccttttattttttaaaggtcacctttacaaagtagcatttaaaaataaatccatctcacagctcaaagaaatttctgacagtactgccctcatgctggtcagccattatttactgtgtgtctgccacatgccggcacatatatatagctcttcctctcctttcctgggagcaaacccttagcgtttcttccacgtaaactttctgcgggctccctcttggcctggcttcttccgttccctcacacgtggatcagtagtaagtagtccagcttgtctcatccactcgacctcgtcctcggtgacaaagctgcacaaggcttttgccattgccagtcgtattgctccagcctgcgctgacctcccgccccctgagactgtgcaggtcacgtcgtgctttcccagccggtcaacaaagtggaaagggaacatcagctgttctctgtcctgtgtgatcgggaagtaaagctggtaatcaattccatttacttttattcttccacttccatgtttataaacaattgcttctgcttttgcagtctttcttttaccttcgcttttgctaaaggccattccttgctcatcatactgtacaggttcaatcagctgtttttttgattcaagagttacacttcttcgaaacctctgcacaaaattcttcctcagcagcaccacactgcgatgtcaataacttttctagcagccgaatgaactgcatataatctagatctgacagtttttccactaacatttctttctaggttcctccttaatcagccatctgctgccaatcaacgtctcctggttaccgttttttctgggagcagacttttggcttgcgagtgactttgatgtttttctaaattgagtaacattccatatacatcctctttgtcttggaaaaatctgttcaggatgcttcattactggcctggctcgtttctcaacaaaccacttgggaaaaggtaagcatagctctgtcaatatcttcttgagtgaaagtttctggatcttctcccatcatgttggctaaatgtctctttcctatgttgaactcttcaatctgctttttaataaaatcctctgtgtaagtttcacgttttgaggtaggaacgtttttctttggtattacaaatgcagtatgtcttagccttaatatctgggatctgacatttgtttgcaactcagggccgcggttttccagaggccttgcttccgggcgaggctacccctaccccagagaagaagccggtacgaaactgctccgccgtaggacacacagggcgccgccatgttagctgtggg

SEQ ID NO: 123785 - DNA, 821 bp, Homo Sapiens
ctcattcatactgtaacaggttccatccagctgtttttttgattcaaagagttacacttcttcgaaacctctgcacaaattcttccctcagcagcaccacactgcgatgtcaataacttttctagcagccgaatgaactgcatataatctagatctgacagttttttccacctaacatttcttctagttcctcccttaatcagccatctgctgccaatcacgtctctggttacagttttttctggaagcagacttttggcttgcaagtgactttgatgtttttctaaattgagtaacattccatatacatcatgcattaatgaatagtatgactgtttgccagtatagaagagatagtgaaatggacggccatcttctccccactggattgctctttgtcttggaaaaatctgttcaggatgcttcattactggcctggctcgtttctcaaacaaaccacttgggaaaaggtaagcaatagctctgtcaatatcttcttgagtgaaagtttctggatcttctcccatcatgttggctaaatgtctctttcctatgttgaactcttcaatctgctttttaataaaatcctctgtgtaagtttcacgttttgaggtaggaacgtttttctttggtattacaaatgcagtatgtcttagccttaatatctgggatctgacatttgtttgcaactcaggggccgcggttttccagaggccttgcttccgggcgaggctacccctaccccagagaagaagccggtacgaaactgctccgccgtaggacacacagggcgccgccatgttagctgtgggagctccccc

SEQ ID NO: 123786 - DNA, 366 bp, Homo Sapiens
ttccttttattttttaaaggtcacctttacaaagtagcatttaaaaataaatccatctcacagctcaaagaaatttctgacagtactgccctcatgctggtcagccattatttactgtgtgtttgccacatgtcggcacatatatataggttttcctctcctttcctgggagcaaacccttagcgtttcttccacgtaaactttctgcgggctccctcttggcctggcttcttccgttccctcacacgtggatcagtagtaagtagtccagctgcagcataaaaagagaagcctttaggaaccattaatatgcatgctgcccagaagaaaagcaggttcataaatttataggtactgttgtctgag

SEQ ID NO: 123787 - DNA, 1189 bp, Homo Sapiens
  misc_feature (135)..(144): n is a, c, g, or t
  misc_feature (194)..(207): n is a, c, g, or t
acgttttaaaacaccaactttattcaaatactaaccccatctgtacattaagaaacaagcaaaatagaagtaaatgttttattcttccaactaaattccagtactacaagggcagtaaaacaatgatacactggnnnnnnnnnntgcagcaataaacatttgttaaaaagactgatagaataaataaaactacnnnnnnnnnnnnnntcatacaaacccattctgaaaccccaagaagtcctggaatacagaaatgccctcctccttcactatttcacaggaagcactgcaggctatttgcttaatattgtccctgggattacattcctaaaattagtaactggttacagctcggttgtagtgcacaattaaaatcacactaacttcatctgaagtgtcattctacagttttatttacacaaccagtgaagggcatgttctagaataccagctttaatccttttcaaacattaatataagaagccaaattgtaatgatacagcaaaatgaggccactggtattaatacaggtagcaaaggtccacatccaggtggtactgacatcagggaaatttccaaaaccagttgctgctgcctaagagtggttgccactgacgaaagcttgaaataacctgtattcacagaaggggtattggcattgctgcatgtcataattgggacctcttgcaacaactcaacaaggaacaaggcagcccacaaatgcaggatacgtgattcatgaaacatagctagcaggctgttctccatatcgtcgcattatttgatcatgcgtaaacttcacaaacgcatcatattgttctgcaagttttgtgttcaatatttcttcatattcttctcgaactttctcttcacgttctttcaacaaacgttcacagatcatcccaacctgccgtagagtaaataagggctgttctttttttaatggtgaggatgctgcagatgaagtccctggtgaagctggtccactgaggagaaatgcatgtggctgtgcatcagaagtacaacacggatctgtctgttggaaactcgtttctaaatgtcttctcttctgcattcgtttatactcttgttttatgttgtacagaatttgttctgtggtgaggcgggaggagacgtcgccgaagggggatggctccattcggagatacttctgcggcgaggcggccgc

SEQ ID NO: 123788 - DNA, 1297 bp, Homo Sapiens
  misc_feature (67)..(109): n is a, c, g, or t
gacggtcagaaattaaaacatttattacatgaagaagaacggaatggggatggccaggttgccggcnnnnnnnnnnnnnnnnnnnnnnnnnnnnnnnnnnnnnnnnnnntccattcgacctccccgagggcaacgtccacagctgtagccgagaaaagggcaaatgcacgaggggccaggcccatgcccagctcggggtgaaggcggggcactcaggctggtggggcagggggcgccctctctctgccccttcccaacttaaataggcataaataaaaagcgtccagaccctcaggccaacagaggctgccctgcccagccccgttccgcaggctaacactagtgccggtcatcagtcggtgggccagccggccaggaagaggccaccccaggaagggggccggtcccaggccacggaggtagttggagtcagtgtccggggcggcctggccctcacagcacgatccacgtatatcgctcgctgtccgccagaaccttcagggagcaccctttgtgcagcgcctcattggtcatcctgttgacgtagcggccgctgctctccggcaccagccacttcatgaccatgtccacgcagctcttgcggtaggagctccagacactgccgctggtctgccctttgacctcagtcaggtcgcctacactgactgtctcgaagatccctgtgttgaggtcccatgccaccttgaggctggtgtgataggtctttggtcggagctggccctcctcagtgggggacgggaaggccaggagcagcaggccaatgttgatgaggacctggttggtttctgggcagacctccagaatgacgatgtcatagtcgctgaaagaacagaactgatggccccaggtagcgtcgtggcggatgacctcattgataacatattcgaagtctagtgtgagctgctccactgtcaggtactggccctggacagcagtccgctcccgcatgggccgcaggttgcggccacgaagatcagtcaccacgaagggcagggagatcttgtcgtcctccaactcatcctccggctccgtcccctctccggactccagcacatagtacagcttggtgtagttgacatagccaggctcggaggcaggtgcctccgaggcaggggggctgtcccggggtgccgtctctccacacagggctaggggctcagagtgcgcacggcagcggctgccagagggtcctgggcacagggcaggccgggcttcctcagggaccccgcccttggcctctttggcccggcggaagatgtcagccacaaactccttg

SEQ ID NO: 123789 - DNA, 455 bp, Homo Sapiens
  misc_feature (61)..(103): n is a, c, g, or t
cagaaattaaaacatttattacatgaagaagaacggaatggggatggccaggttgccggcnnnnnnnnnnnnnnnnnnnnnnnnnnnnnnnnnnnnnnnnnnntccattcgacctccccgagggcaacgtccacagctgtagccgagaaaagggcaaatgcacgaggggccaggcccatgcccagctcggggtgaaggcggggcactcaggctggtggggcagggggcgccctctctctgccccttcccaacttaaataggcataaataaaaagcgtccagaccctcaggccaacagaggctgccctgcccagccccgttccgcaggctaacactagtgccggtcatcagtcggtgggccagccggccaggaagaggccacggaggtagttggagtcagtgtccggggcggcctggccctcacagcacgatccacgtatatcgctcgctgtccgc

SEQ ID NO: 123790 - DNA, 344 bp, Homo Sapiens
aaagacaaaaggccctcagggtagcctggggcctggttcaggagcccggctgtcccagcgtttgtcctatgtccctctccactgtagaccaaagacctatcacaccagcctcaaggtggcatgggacctcaacacagggatcttcgagacagtcagtgtaggcgacctgactgaggtcaaagggcagaccaggtgaggcagggctggggggcagggtcagggcgcggccaaggcgacgagagccactcaccccctggccccgcagcggcagtgtctggagctcctaccgcaagagctgcgtggacatggtcatgaagtggctggtgccggagagcagcggccgc

SEQ ID NO: 123791 - DNA, 1259 bp, Homo Sapiens
  misc_feature (83)..(117): n is a, c, g, or t
cgatcgatagatcactattagggcgctagctcctctgttacgaacgaccgagcgcagcgagtagatagcgaggaagcggccgnnnnnnnnnnnnnnnnnnnnnnnnnnnnnnnnnnncagtcgacggtaccggacatatgcccgggaattcggccattacggccggggggagccgcctcctcctggccagttccccagtagtcctgaagggagacctgctgtgtggagcctcttctgggacccagccatgagtgtggagctgagcaactgaacctgaaactcttccactgtgagtcaaggaggcttttccgcacatgaaggacgctgagcgggaaggactcctctctgcctgcagttgtagcgagtggaccagcaccaggggctctctagactgcccctcctccatcgccttccctgcctctccaggacagagcagccacgtctgcacacctcgccctctttacactcagttttcagagcacgtttctcctatttcctgcgggttgcagcgcctacttgaacttactcagaccacctacttctctagcagcactgggcgtccctttcagcaagacgatggctgtgctcaggcagctggcgctcctcctctggaagaactacaccctgcagaagcggaaggtcctggtgacggtcctggaactcttcctgccattgctgttttctgggatcctcatctggctccgcttgaagattcagtcggaaaatgtgcccaacgccaccatctacccgggccagtccatccaggagctgcctctgttcttcaccttccctccgccaggagacacctgggagcttgcctacatcccttctcacagtgacgctgccaagaccgtcactgagacagtgcgcagggcacttgtgatcaacatgcgagtgcgcggctttccctccgagaaggactttgaggactacattaggtacgacaactgctcgtccagcgtgctggccgccgtggtcttcgagcaccccttcaaccacagcaaggagcccctgccgctggcggtgaaatatcacctacggttcagttacacacggagaaattacatgtggacccaaacaggctcctttttcctgaaagagacagaaggctggtacactacttcccttttcccgcttttcccaaacccaggaccaagggaacctacatcccctgatggcggagaacctggtgagaagctcggttagggttcgtgttaccagcccgggctgttgactagtgacagtcatatgggggcagc

SEQ ID NO: 123792 - DNA, 611 bp, Homo Sapiens
gacggtgtcaaactctgctttattggaatagagaatacaggcagcaggaatcacgcttggtgctggcagctccaggtcccctgcccccacgggctctcccacttgtctggatcaggggagacctccactttgaagaacaatatggggtgggagcttccaatgtgcattctgctaccagcctcaggattagcagcaagatgccaacagcaacagcaacagcaacagcaacagttgtgggtgccacggttgggcatggggttgaagtcggccttgatgacgttgaggtgctggggcgtgagcaacagccagtaggggatggcggcggacttgacggcctcagagggcgcgcagcaggagcgccgcacggctgaacagagtgtgcagctggcccactcgatgttgcctgagtagtccccggcggccgtctgcaccatgcgcttgtcactgtagaccaggtagacggggaagcagccctggctgcgctcctggcagccgccagccaccttgtagaaggtgagcagctggcgcaggaactcctgcacgagttccacgcggacctgcgctcatgctttgcaccccagcacatggccattctgtgttggagcggccgc

SEQ ID NO: 123793 - DNA, 1234 bp, Homo Sapiens
ttttgacggtgtcaaactctgctttattggaatagagaatacaggcagcaggaatcacgcttggtgctggcagctccaggtcccctgcccccacgggctctcccacttgtctggatcaggggagacctccactttgaagaacaatatggggtgggagcttccaatgtgcattctgctaccagcctcaggattagcagcaagatgccaacagcaacagcaacagcaacagcaacagcaaaaaaggactggactcgacacttcaggaaaggacgtgtagaagagaaagtcagacccacagtgtcacgtgttaacaacggtcccacaacagcagacacgacactggtgtgcacggctgtaccacctgtgggaggctgacagcacaccgacagccctgaggggcccggcattctcactcccaacatgagaaagaattaacacaacacacacacatgttcacattctctgcgaggacagtcaaattaaggtaccaaagggaggataaaacatttttagagaacacaaaagcctgctgccctgccccagtaggcgtcaggctggacacgacaggctggctgtggcctgggctagccggtgagctcgacaggcagctcacggccacacagggcctcccactggcgagccaacagcgagatgagcttctctctgctctcagcactggggacaaacacctgccactggacttcacggccctggctggctctagccgggccacctggcacctccccaaagtggtccagggtgacactgcccatgaggtcatgaccttgcacgtcatcgaagacgagggtgagggcctgcgggtaggtctggtagcccatgagcactcggtccaggtcccggacgcggcggccatcgtccagccggtacctgtctctctgcggcggctctttggcaaactcgggcagtgggtagtggacacagtcctcatccaggaggaagatctcggagctggtgagcaggagtgtcttggggcgcagggggcccctgcagcacccagggggtggcatgcccacctggaaggcctgcacgtacagcaggatgctgagggctggggccttctctggctcagccatcttttgggccacagtgaacgtcaggtccccaatctcctcctcactggggtaggtaaacttgacgcgactagagtggatcagctcgtagttctccatcttcccctcgtgccgattcaacacccagcctcgtacctagcctt

SEQ ID NO: 123794 - DNA, 527 bp, Homo Sapiens
  misc_feature (400)..(446): n is a, c, g, or t
  misc_feature (511)..(511): n is a, c, g, or t
cgccagtgggagaacctgtgtgtccgtgagctgcctgtcgagctcaccggctagcccaggccacagccagcctgtcgtgtccagcctgacgcctactggggcagggcagcaggcttttgtgttctctaaaaatgttttatcctccctttggtaccttaatttgactgtcctcgcagagaatgtgaacatgtgtgtgtgttgtgttaattctttctcatgttgggagtgagaatgccgggcccctcagggctgtcggtgtgctgtcagcctcccacaggtggtacagccgtgcacaccagtgtcgtgtctgctgttgtgggaccgttgttaacacgtgacactgtgggtctgactttctcttctacacgtcctttcctgaagtgtcgagtccagtcctctnnnnnnnnnnnnnnnnnnnnnnnnnnnnnnnnnnnnnnnnnnnnnnnaatcctgaggctggtagcagaatgcacattggaagctcccaccccatattgttcttcaatggagncctcacgtgatccaca

SEQ ID NO: 123795 - DNA, 821 bp, Homo Sapiens
  misc_feature (665)..(737): n is a, c, g, or t
gcggcggacttgacggcctcagagggcgcgcagcaggagcgccgcacggctgaacagagtgtgcagctggcccactcgatgttgcctgagtagtccccggcggccgtctgcaccatgcgcttgtcactgtagaccaggtagacggggaagcagccctggctgcgctcctggcagccgccagcccccttgtagaaggtgagcagctggcgcaggaactcctgcaggctggtgtggctcccgtaaaggatggggctacccagcatggccatgtgctggggtgcaaagcatgagcgcaggtccgcgtggaactcgtgcaggttggcggcgtccgagataatgaagagcgtgttctcactgtgccgtaccttgagcaccagacacagctccggcatgaggaagccatacttcggtgaggtcgccatgcgggaagcaaaagacaaagccgcagaggaggagaggatgtgctggactgctgccgccgagactcctggtgcgggatcatcgagagactgcgaggccgaagtcggtgagcacaagtcagaacggcgaactggcggatactgccctgcacatggatcaggaagcaccacagcaccttgaggatgcggatgtgctccagcaggaagtcctcgtccgcgcccagggcccattccagagccaggcgnnnnnnnnnnnnnnnnnnnnnnnnnnnnnnnnnnnnnnnnnnnnnnnnnnnnnnnnnnnnnnnnnnnnnnnnnacgtctgggggccccatttcaaagtagcggttctcagccacgtcctcctcttcttcctcctcctcatcaaccgcatcacccgtt

SEQ ID NO: 123796 - DNA, 1005 bp, Homo Sapiens
  misc_feature (71)..(76): n is a, c, g, or t
  misc_feature (78)..(79): n is a, c, g, or t
  misc_feature (83)..(85): n is a, c, g, or t
  misc_feature (87)..(88): n is a, c, g, or t
  misc_feature (92)..(95): n is a, c, g, or t
gggccccgcggcgccaaaaagaattggtctaggaaagctttcttgaggggccgagggcggccggacagggnnnnnntnnttcnnncnntttnnnnccaaggtagaatattatttattattataaactcaggatgcaagatatattccaggatataggaagaatggcaaatatcggcttttctcagatatctttgaaattattttaatgcgtacaaaacatgtagaagatgcctcttgagatggctttaaaatgcccagtattaaagggggacaggtgcatggcagctaaatgcctcaacaagatcatgcagagaggggcatccattccctcccaagatcctaagaaaaggtaccttgctccagcctggctgaaagtggagcaaagatatgcattttctattggatttagggtcctagggtctgtcctggggcacagacacctaagaccatggcaccttctccccagaggacagcctgagggtaaagtataaattgctctgggaaggagagagggagagaacagctgtgtctgcagttcattgttgtgtgagtttaagcagctctcttcctctctctgtgcttcattagaggtataaatactggtacattgggtcctttccagagtttggtttcaatgagtagggacacaagagaaaaggaatagatgagtgcccaatttttgttcagggacatggttaggctccctcagtgatgggactttcccacctagctgttcctgggagctgtacctagaaaaacgtgtgtatgctaggtgcctgtgatgtgtgagagtacatgtctgtacatatatgtgtgtgtctgtatgtgagtctgtatgtgcccatgtgcccacaagctaagagggcaggaggcttttatatggtacgctgctatgtgaacataataactttgtaggcaatcaaggtacaaagtaggtgggaaagctctctgcaggttggccacggaggaaggcccactgctcacatcctaacagtgactcatccc

SEQ ID NO: 123797 - DNA, 777 bp, Homo Sapiens
  misc_feature (434)..(483): n is a, c, g, or t
gaaactgaagatttattcttcatcagttatttagtgtccgattccttggttcaatggaggtgaaatcagatgaccatccagatgttgtttatgaaactatgcgccaaatcttagctgcccgggccatccataacatctttcgtatgacagaatcgcatttattagtcacttgtgactgtttaaagttaattgatccacagacacaagttacaaggctcacgtttccattaccttgtgtagttttgtatgctacacaccaggaaaataagcgcctttttggatttgttcttcggacatcaagcgggagaagtgaaagtaatctgtcatcagtctgctatatatttgagtcaaacaatgagggggaaaagatatgtgattctgttggactggcaaaacagatagctttgcatgctgaactggatcgtagggcatcnnnnnnnnnnnnnnnnnnnnnnnnnnnnnnnnnnnnnnnnnnnnnnnnnntcaataaacaaaaacagattgaaaaggacttggaagaacaaagtcggttgatagctgcttccagtagaccaaaccaagccagtagtgaggggcagtttgttgtccttagcagtagccagtcagaagagagtgatttgggaggaggaggaaagaagagagaatcagaagcataagcttatacttttggtagatattcccccttggaatttgacagtttctatggtgaaatggcggaaggtaacaactatgttgaaatatcaaggaggagattaagctttatatttgcttatttgt

SEQ ID NO: 123798 - DNA, 621 bp, Homo Sapiens
  misc_feature (168)..(202): n is a, c, g, or t
tttggcgttagttctctctttatatagactctggttctagaaactcgcctgcagccgctggctggaccagcacacgctgacggggccggactatttacaggcccattgcgggctgtaccttggccacctcccggcacggtgctcagctgtgacgccaaaataagttannnnnnnnnnnnnnnnnnnnnnnnnnnnnnnnnnntgtacacacaagtgctgggggctcggggcctcaatactgtcgagggccggggctgtaaacatggccggggcggccctgcccacccctagtggtcggtaacgaccggaagcagagcagccgggcagggctgggaggctcaggcgtccgacaggcagctctggatccggtccacccactgctgggccgagggcacgtcctgggcacagaagttgtaaacgcgacgcgttgtcttcacgtcaaagaaggccttctcgtccacggtcttaggggcacccatagtgggcgtgccaggtgccacagcctccaccttcgccgagtcgatgacacccttggactctgtgtccacacggtggtcgtagtagcgcagctggtgcttggtcttgtccagcacgaaccagcgggccttccaaggcttcatg

SEQ ID NO: 123799 - DNA, 748 bp, Homo Sapiens
  misc_feature (163)..(225): n is a, c, g, or t
  misc_feature (648)..(648): n is a, c, g, or t
ggcgttagttctctttatatagactctggttctagaaactcgcctgcagccgctggctggaccagcacacgctgacggggccggactatttacaggcccattgcgggctgtaccttggccacctcccggcacggtgctcagctgtgacgccaaaataagttannnnnnnnnnnnnnnnnnnnnnnnnnnnnnnnnnnnnnnnnnnnnnnnnnnnnnnnnnnnnnncctcaatactgtcgagggccggggctgtaaacatggccggggcggccctgcccacccctagtggtcggtaacgaccggaagcagagcagccgggcagggctgggaggctcaggcgtccgacaggcagctctggatccggtccacccactgctgggccgagggcacgtcctgggcacagaagttgtaaacgcgacgcgttgtcttcacgtcaaagaaggccttctcgtccacggtcttaggggcacccatagtgggcgtgccaggtgccacagcctccacctccgccaagtcgatgacacccttgcactctgtgtccacacggtggtcgtagtaccgcagctggtgcttggtcttgtccagcacgaaccagcgggccttccaaggcttcatgaaggccccttcttgtacagagtgccctcgtangacctgttctcactctctgctgtctggaactggctgtacagggtgctggtgctgcggcgggcacctgacgggagcggatgtggttgagcactactctggt

SEQ ID NO: 123800 - DNA, 978 bp, Homo Sapiens
aacatgcacaacctgccacttttaatcagaagtccatgtatgaaatccaggctggttttggatgttaacatggagcgaatgggatacatcaaagaatggttggctgcttgttttaaagaggtcccactggtgacaggatggtagtggcgatggcagtgaggacagactggtaaagggaaaacccagaggcttgtggggagaaagggcttttgtagttaggaagagacagaggtaggcccctcagccagctccagcaggatagagacaacaacatacagcgcacagagaattcgtgcctcagggtcatagtccatgtcaggaggactgctggccagctcatcccagttctgctccatgacagatttcacctggtccttcaacagaggaagggtccccttctccagggcctcagccacaaactgctgctcttcagacagctctagcagggcatccaggaagtccagaatggcttttgcacgcgcttctaccaagaccccagcagcattaaaaaggctgcttaggagaggcttgtctgggtcctccatgtgtagctccctggaaatcaggacctcagatactctttgctctagatcctgccgaatatcctccttgccgaggcacttagcgagggagtttagcacatcttttctcttctcctctgtcaggtccttgaggacactctccatgtcctccaacttctccttcatgtttctggaatcctccgaacccaaagactttcctaaacaggatgaagcaccatccttctcttgtgtttatagctgagatggccctgagagatctggctccaaaatttatattgccggtcgcttttcagggtttcctcctttaccgtctccagagtttctgtcaccagatacaggttttctctcgtattaattgatcggaatgaaaagggtagttccctcttcagcttccgataaacttgaagcgactcatgactgcgcatggaggacctcc

SEQ ID NO: 123801 - DNA, 461 bp, Homo Sapiens
  misc_feature (184)..(184): n is a, c, g, or t
cccagcccacgtgctaaccaagcggctcgcttcccgagcccgggatggagcaccgcgcctagggaggccgcgccgcccgagacgtgcgcacggttcgtggcggagagatgctgatcgcgctgaactgaccggtgcggccgggggttgagtggccgagtctccctcttgagtcctccccagcagncgcggccggcgccggctctttgggcgaaccctccagttcctagactttgagaggcgtctctcccccgcccgaccgcccagatgcagtttcgccttttctcctttgccctcatcattctgaactgcatggattacagccactgccaaggcaaccgatggagacgcagtaagcgagctagttatgtatcaaatcccatttgcaagggttgtttgtcttgttcaaaggacaatgggtgtagccgatgtcaacagaagttgttcttcttccttcgaagaga

SEQ ID NO: 123802 - DNA, 847 bp, Homo Sapiens
  misc_feature (727)..(761): n is a, c, g, or t
  misc_feature (765)..(806): n is a, c, g, or t
gtgtaattctttttggttagagagaaccagaatatgactgtaaattaacatcaacgatgacactgtgtaacagcacagggaaagaggtagtgggagggagatggtcaggcttcctgttcccttaaccagcagagcccccagcaacctagaagcgcctcacctagcctcttaaatggagtgggaacggagcagggaacttggaaatcagaggctccaaaagtaaagaaggcttgatggcaagcctggggagagtgcctggatacgagggaagggctgagggctatgaggagtcccctagcgcaggtcttcggcagtgaacatgcccctggccctgcgcaggatggagtccttggcggcgtcatatgggtgctccttggaggggatctccaggacagcggggatggactgctggtgggcgtccagggcatgccgcaccatctctgcgatgtactggttgatgaggatgatgccaatgtcatcccggtttagaaattgccggaaagtgtcttcgatctcattgatggttgtatccttctccaccaccaggaaattgggatggcggttcttgttaagctcccctatgccgcccagcaggaaaccagtcaccgtgtcctcgtctccgatcactgcgatgagcttacccctccccgccatccctgcagccgggcagagctcccccggccgtaatggccgaattcccgggcatatgtccggtaccgtcgactgnnnnnnnnnnnnnnnnnnnnnnnnnnnnnnnnnnncggnnnnnnnnnnnnnnnnnnnnnnnnnnnnnnnnnnnnnnnnnnataacgcgctagcgccctatagtgagtctatacattcctcc

SEQ ID NO: 123803 - DNA, 919 bp, Homo Sapiens
  misc_feature (165)..(167): n is a, c, g, or t
  misc_feature (170)..(170): n is a, c, g, or t
  misc_feature (173)..(174): n is a, c, g, or t
  misc_feature (177)..(177): n is a, c, g, or t
  misc_feature (179)..(183): n is a, c, g, or t
  misc_feature (185)..(191): n is a, c, g, or t
aatttggggagaatcccagaggccgttagtccatggcccagggatcctccttagggaaaaccagcttatggccccatgtttcacttaccctaactggggcccgccgcgccaaagcgaaatggtctaggaaaagctctccgagggcccgaggcggcccgacaaggnnnggnttnnggngnnnnngnnnnnnnggttgggagagaagcaagaatatgactttaatttaacatcaacaatgacactgtgtaacagcacagggaagaggtagtggagggagatggtcaggcttcctgttccttaaccagcagagccccagcaacctagaagcgcctcacctagcctcttaatggagtgggaaggagcagggaattggaaatcagaggctcaaaaagtaaagaaggctgatggcaagcctggggagaggcctggaaacgagggaagggctgagggctatgaggagtcccctagcgcaggtcttcggcagtgaacatgcccctggccctgcgcaggatggagtccttggcggcgtcatatgggtgctccttggaggggatctccaggacagcggggatggactgctggtgggcgtccagggcatgccgcaccatctctgcgatgtactggttgatgaggatgatgccaatgtcatcccggtttagaaattgccggaaagtgtcttcgatctcattgatggttgtatccttctccaccaccaggaaattgggatggcggttcttgttaagctcccctatgccgcccagcaggaaaccagtcaccgtgtcctcgtctccgatcactgcgatgagcttacccctccccgccatccctgcagccgggcagagctcaccctagagcaccagaagccactccccggccgtaatggccgaattcccgggcatatgtccggtaccgtcgactg

SEQ ID NO: 123804 - DNA, 1328 bp, Homo Sapiens
ttttttcttttccaaacttttatttgtgcacattcaattgaaaaagataacttttacaggttctttggtgcccatattcagcatacaaaaatgtaaaagactattcacaaataaaacacattagctcaaaatggaaaaaaataacaatgacgacaataaaacaatctaaggtagtgcacactgtgacagctctgcttatggggacatgagaattactgcgaaaataaatagaatgtccttttgtaaaagcagcaatatcatgtcttgtaaacttccttttatattacagcaaggtttggaataaaatccaaagggactggagcttacactgtagccgtgaatgaataaaagagtctatttcctcaattattgttggtccagttttccttttgagtccaatgtgcagcaggtttaaaaggtgctcagttagagattctaaccaattaagtggtgaattataaaatttctttcctgctttcaaacacaaatgggtaaatctgttccacagcagtagcaacagcctttacattgggccctgttactgtgatacttcctgttgaaaaaatctgtaatgtagctcttagagattttatccgatagcacacagcaggatgaagttcaggttcgtaactggcatgaggtctattgttctttgtgaattctggcaaacggatttcaaatggcatgttacacactgccagaacgttaacaaccttaaaatctgtaaatattacctgaaaacctagtttctgcagactacgggctaagcgtctggcaccaaatttagcttcttcttcacttgttgctccagtgcaaataatttttcctgaggaccaaattgtagctgtaattctaggttttctaagcttcattaatacttttccaacatcacgtttataaattacatttgctccttccaaagcaatcttccttaagtttaaatgacatcttgttctaaaaacacagactacatttgtaattagaatgtccaatgcaacatcactgtctgcatccattggggtggttttaaaatttagctttccaccacgaagatcacatccgtgggaagagggagcggtggctgaggacgcggcggcagcgctgctgccggttgcgtcggatgcgaaggagaagctggaggacaaggatgaggatgagacgggcgcgctccccagtctccatggaactcccgccccggcccgttgctaggagcccccgaggctcggactccgtcttccttgctttgttgttccgggtgcgaggcggccgcagcttccccgcgacaataaatcctcgtgccgattcaccacccagcctcgctacctagc

SEQ ID NO: 123805 - DNA, 689 bp, Homo Sapiens
  misc_feature (671)..(671): n is a, c, g, or t
ttttttaaagcttattagctcatttatcttggaaacagtagttaaactgaataaaaaccaaggggcaatataactgctactggttgagtcatacagtgatgtgtagtttggaaaagaagacgaatgatagatattgagcccctttaggaaatgttgccagtatttgaatttggctttcatagttatctcttgcacacgaagtagagtaccatggctgataacaagaggtcaaatgtacaagttgctctaatatggcctcaatgaggcaccagcttcaaaacccgcttgctgataattcaggtattcatggagggtcaagacttcaaagtcatgtacttcaagtaccagtagagcatctggtgttgcttaagggagtctgtcagtgtagggtgcatagaattgttctctggctatatcccattctaggaatcactggatatccatctggagtggagggctgttaatctaggttcacttgacaccatcttcagcaaatgatcattcctggggtcaaagacatgcctgtcttcttgcacttttctaagttcacacacagtatttctaagaatgttcagcatctactgaacatgaactgtgctgagtggaggtacagaaaagattggaatgccattcaggtcaaacatattgctgtctggggcagtggttttcanactgtgttcggaagagtt

SEQ ID NO: 123806 - DNA, 427 bp, Homo Sapiens
tttaaaaaccactctatatttattcattatagaacacacttttcttcccagaaagaaaacaaacagtctgaggtatcccacattaataaatcccattctgtggctttacatcctgaatttctgttattaatcaaggttcagtatcattatacacagtgattaaaatttttccctgagatcatcaaggctgtgcctttgacatagaaataccttaccctaccaaaattcaggagaaagcatagaaaactaaaagtctttttggtggtagaaaaggcagacaacttaggcataattcctgagaaaaaggtgcagagtcattaagccaccagttaaattttacctggatgtgaactgttatcccttcaacatttctaaatattctgggaggaaaattcatcgtattgcatagaaatatactttttcacaa

SEQ ID NO: 123807 - DNA, 1925 bp, Homo Sapiens
ttttttttgtttatcgaaggctttactggcaagcaggaaatgtggggaagtgtggatgttagctctgagattggggtgtggtcagacatctggccaggtccatctctgaccggctcctggtcaacccccagggagctggaagagtgccagcgaaaccacgagggtgatgaggacgacagccacgtccgggcccagcaggcctgcattgaggccaagcacgtgagggtgccccccacccacatgtgggtctgtgtgtgtgcacgtggcgtgggagcatccccgccttgtgttgggtctgtgccccatggaggagggaggtggggtgtctcccccaagcacagcactcaactcttcacaggacaagtacatggcggacatggacgagcttttttctcaggtggatgagaagaggaaggtgagtgtgtgtcgcttgctgccgatggctggcaggtgctcgtgcagtgccccttttcagcctctgaccgtgtgcccctgtgccacagaagcgagacatccccgactacctgtgtggcaagatcagctttgagctgatgcgggagccgtgcatcacgcccagtggcatcacctacgaccgcaaggacatcgaggagcacctgcaggtgaggcctgcggctgggggagcagggccagtggcatggtcctgggccccatgactgccctctgcccttcttgtcactgcagcgtgtgggtcattttgaccccgtgacccggagccccctgacccaggaacagctcatccccaacttggctatgaaggaggttattgacgcattcatctctgagaatggctgggtggaggactactgaggttccctgccctacctggcgtcctggtccaggggagccctgggcagaagcccccggcccctatacatagtttatgttcctggccaccccgaccgcttcccccaagttctgctgttggactctggactgtttcccctctcagcatcgcttttgctgggccgtgatcgtccccctttgtgggctggaaaagcaggtgagggtgggctgggctgaggccattgccgccactatctgtgtaataaaatccgtgagcacgaggtgggacgtgctggtgtgtgaccggcagtcctgccagctgttttggctagccgaggaaggtggagatgaagacgctggtgtcaaggttgagcgtagcatgccaccagcggtcggggaagtacagcacctcaccagcccggatggtacactccaggggccgtgcagacggtggcagggctgggtatgtgtcccggagccaggccagcgtggtcttgttggggtggaactctggcgtcttctcaggtgggtaaaggaaccagcgcttacgaccgtagatcacttctgagtacccgggtccatgccagtggaagggcacccccgagccagctcctgcgattccaaagctgtaagctggagcggttcccagcaggccaaatgggggtggggagtagtgccgaaagagagaggcccactcggtgaagttgttgtccccgaagaagtacagggtgtcattgcccagggaggtggggtcctgggggtgcagcagctgctccacatactcctggaagggcaagtccactttgtggtaggagtaggtgttggcggtgctcagccggaccactctgtccccaaacgaagccagcaacctgtcgcgggagcacagggcccggaacctcgagttgtccgtgagtccctgcaggatgacgggcctgacgaaggcgtactgctgcacgaactccgcgtaggtgaggtcggcccgacgctccaccgtgcagcgctcctcctccgccacggcccccggcccgcccgggcgccacccgccgtcgccctccgccccggagccgggtagagccacagccgccagcgcccagagcgcgagcaaccgcgacgccggcgcc

SEQ ID NO: 123808 - DNA, 1187 bp, Homo Sapiens
acacaccagcacgtcccacctcgtgctcacggattttattacacagatagtggcggcaatggcctcagcccagcccaccctcacctgcttttccagcccacaaagggggacgatcacggcccagcaaaagcgatgctgagaggggaaacagtccagagtccaacagcagaacttgggggaagcggtcggggtggccaggaacataaactatgtataggggccgggggcttctgcccagggctcccctggaccaggacgccaggtagggcagggaacctcagtagtcctccacccagccattctcagagatgaatgcgtcaataacctccttcatagccaagttggggatgagctgttcctgggtcagggggctccgggtcacggggtcaaaatgacccacacgctgcaggtgctcctcgatgtccttgcggtcgtaggtgatgccactgggcgtgatgcacggctcccgcatcagctcaaagctgatcttgccacacaggtagtcggggatgtctcgcttcttcctcttctcatccacctgagaaaaaagctcgtccatgtccgccatgtacttgtcgtgcttggcctcaatgcaggcctgctgggcccggacgtggctgtcgtcctcatcaccctcgtggtttcgctggcactcttccagctccctctcacgctccgcggcaatgagcctggagaggtaggagtgcagctcgctctcctggtggatgcgccgctcctcaatgctgttccagcgcttcttcttcgcgattcgaagagcgctggggatgtcgtccccgaagttcagccgctgctccttggccaggctgtaagctcgctgcagattggcgatggcctcatcatagctctccatctccagctggcactgccccaggaagaagtgcgccttcacagactgcccgtccagctccagggcgcgccggcagtcggccagggcctgctcgtgctgctgcatcttcaggtagcacaaggcccggttggtgtaatacacggccaccagcgggttccgggtgatcgcgcggccgtagcaggccgccgcctccgggtactttcggcccacgaacagacgattgccctgctccttgagctcctgcgcgctcgggctcttctcggggcttccgccgccagcgcccagccgtgcgccgccctccttctcctccttgcccttc

SEQ ID NO: 123809 - DNA, 1334 bp, Homo Sapiens
ctcgagggcgggaattgaggcttgtgggtagtgtagcgctgcggattaaaggatcatagtcgcagggtccggactgagaacatggttgatattgccactcgggtggaagggtggtcccttcgtgtggccgtttgggttgaggttggggagatgacctaagagtagcggaaagaaggtgggtggaggcattgaaggctggagggatagaagcttggcgtggcgtagagggtcaggggaacggtccaggttacgcccgttgttctcggcccccgagcggagaagaaaggtgcgtacaggggccctccattaggttgtcaggggtgggcgtgcaaagccggccttctggggcccgggcgtgggcggtgttcctcatcagccttcgtgttttcgttgccactgtgccagatccttgtcacgctccgcggcaatgagcctggagaggtaggagtgcagctcgctctcctggtggatgcgccgctcctcaatgctgttccagcgcttcttcttcgcgattcgaagagcgctggggatgtcgtccccgaagttcagccgctgctccttggccaggctgtaagctcgctgcagattggcgatggcctcatcatagctctccatctccagctggcactgccccaggaagaagtgcgccttcacagactgcccgtccagctccagggcgcgccggcagtcggccagggcctgctcgtgctgctgcatgatcgcgcggccgtagcaggccgccgcctccgggtactttcggcccacgaacagacgattgccctgctccttgagctcctgcgcgctcgggctcttctcggggcttccgccgccagcgcccagccgtgcgccgccctccttctccgtccttgcccttcatggcgccgcgcggcacggcctgggctccgctccccaagttccgcgcctcgcggcccagcgcccgcagccggagccccgcagcccgagcccgcgatccgctcgggcccggcccagctccgccgccggaacttccggccgggggccgggaccagcggggacgcacgcgtgggggcgagtggggccgcgcgtgcgcccaaccagcctggacggggacactgggcccgcgacgtcgggggctgggaggaacgccctcccagttcccctgtccccgcgctcttaagggtgggcgttcgcgtaggccctggcctgccctgctgaggtctcttcggaacccgcctcggcggcggccgccacacacattcgactttcccagtgagatgcctcacttgcttcgctgagggcgcgctcccgcaacagcctgtcccgaccacctggggttccgcccccgccttgggcga

SEQ ID NO: 123810 - DNA, 1004 bp, Homo Sapiens
gttgggggatgaactttttccctggtccaggggggttcccgggtcccggggggttcaaaatggaccccccccgccgccaggggcttcctacaatgtcccttgggttcgtagggtattgcccctgggcgtggaggcacgggctccccgcatcaggttcaaaggctgatcttgcccacaccaggtagtcgggggatgtctcgcttcttcctcttttcatccacctgagaaaaaaagctcgtccatgtccgccatgtacttgtcgtgcttggcctcaatgcaggcctgctgggccccggacgtggctgtcgtcctcatcaccctcgtggtttcgctggcactcttccagctccctctcacgctccgcggcaatgagcctggagaggtaggagtgcagctcgctctcctggtggatgcgccgctcctcaatgctgttccagcgcttcttcttcgcgattcgaagagcgctggggatgtcgtccccgaagttcagccgctgctccttggccaggctgtaagctcgctgcagattggcgatggcctcatcatagctctccatctccagctggcactgccccaggaagaagtgcgccttcacagactgcccgtccagctccagggcgcgccggcagtcggccagggcctgctcgtgctgctgcatcttcaggtagcacaaggcccggttggtgtaatacacggccaccagcgggttccgggtgatcgcgcggccgtagcaggccgccgcctccgggtactttcggcccacgaacagacgattgccctgctccttgagctcctgcgcgctcgggctcttctcggggcttccgccgccagcgcccagccgtgcgccgccctccttctcctccttgcccttcatggcgccgcgcggcacggcctgggctccgctcccaagctccgcgcctcgcggcccagcgcccgcagccggagccccgcagcccgagcccgcgatcctcgtgccggattcgccacccaggcctcgcttcttt

SEQ ID NO: 123811 - DNA, 819 bp, Homo Sapiens
gcggccgcgactgctgccgctgctcctggtgcttctgggctgcctgggccttggcgtagcggccgaagacgcggaggtccatgccgagaactggctgcggctttatggctacctgcctcagcccagccgccatatgtccaccatgcgttccgcccagatcttggcctcggcccttgcagagatgcagcgcttctacgggatcccagtcaccggtgtgctcgacgaagagaccaaggagtggatgaagcggccccgctgtggggtgccagaccagttcggggtacgagtgaaagccaacctgcggcggcgtcggaagcgctacgccctcaccgggaggaagtggaacaaccaccatctgacctttagcatccagaactacacggagaagttgggctggtaccactcgatggaggcggtgcgcagggccttccgcgtgtgggagcaggccacgcccctggtcttccaggaggtgccctatgaggacatccggctgcggcgacagaaggaggccgacatcatggtactctttgcctctggcttccacggcgacagctcgccgtttgatggcaccggtggctttctggcccacgcctatttccctggccccggcctaggcggggacacccattttgacgcagatgagccctggaccttctccagcactgacctgcatggaaacaacctctttctggttgcagtgcatgagctgggccacgcgcttgggcttgagcactccagcaaccccaatggcatcaatggcgcggttctaccagtggaagggcgttgacaacttcaagctgctcgaggacgatctccgtg

SEQ ID NO: 123812 - DNA, 713 bp, Homo Sapiens
  misc_feature (680)..(680): n is a, c, g, or t
agtagctgggatgattggcatgcgccactgtgcctgaccccaatccacgtttttgaagcgcattctggctgctgaagggtgaggatgggagtaggagaaaagagagaaagagacaatggtcactcagcttggtcatgcttggatagaatctaatccaacaccccacttcacaaatacaaaaatgaagggacagagccagtgtccaagccccctggggaaggtaagcagcagaacagggacaagacccccaccctcctggccccctctcttcagtccctctccactttgctccgtctcctgctggaccacatttgattctgaccacaacaagggggctgagaagtggctgagaggcacgtgctcctgcaacatcaaaaacacctctgtgagaaggtaccttccttgctctgaagtccctggtggctcagctctcttcaccatcaatggcactgaaacttcctgccacccagcacaggctgggtcatgctgtgatgagggggcagcagccctctgcctccgcccagcctcctcctgctgctccccagcacacagcacccacccagtaagccaggccttcccacccagggtgcctccccttctgtgacccctgccagagatcagcagccagcttctgcttcccaggtcccagccttgactactggaccctcaactttgccccnaaaatgacatactgtcttttttttgtttgagat

SEQ ID NO: 123813 - DNA, 712 bp, Homo Sapiens
ccttctttgtcagtgctttggggagggttccaaaatggggttcggttgctctgtccaccgggttgttgatgtccgaggtgacagattctgtcctccgaagccgagttagtggcaggaaggatattctacaggcaggggcttctttggtacatttgttgtgacacttcaacctgcaatgcttgcacttcactccaaatatcatgctcttctggcacacgtggcagacctgcgacagtcaggacttggtggagaacctgtgcgtcaccgacagcccgatatccctccgtaccatctgtggggatccatgcgagagatctgcagggaaaagaggccggatgggcaggctgaggaactccgcaggcgacagctcgttgcccatgacttcctaattcagagaccacaggctagaggggggcgcaatggtttattatataagcatctccctgatctatgtccatcaacacaggagcaggccaggctagcccagtggcatggtgtggttcccctcgcctcgcttggtcctctagcttgctcctggcctctgaggatggctcagtcagctgcccctgtgatgtttccagatgaggaagaaggcaggcaaacctcatcgaggagacgtcatcaatgcggttccccagctgagactcatgggacttgctccgggtgagtgtggggaagctgggcagcagctggaagacctgcggctgggtgg

SEQ ID NO: 123814 - DNA, 278 bp, Homo Sapiens
  misc_feature (196)..(220): n is a, c, g, or t
ttttttaatttaatttaattttaaaataaatgctgcattggtaaagctggcagttgaaaccagttggacggcccagcttgcgtctcttctgcctgagtgggcctctcaggtcactcgtgccctgctggaggacagaggggcacctcagccgcccccaagcccagagcacagcaataaggtcggcctgcaggagccnnnnnnnnnnnnnnnnnnnnnnnnncaggaccctgagatgccaccaggacctgatgggccaggaagggcgtggacatggaggc

SEQ ID NO: 123815 - DNA, 926 bp, Homo Sapiens
  misc_feature (481)..(783): n is a, c, g, or t
tggtaaacatgcagtcgatcacccaatcctgtgtccaccagatgggccagctcagtacagacactgatcttcacatttaattttgggctttgcttttctaatactttgaaattctacttttagtttaagtcttcactggttttggggagcctcctaaaacttgtttggagctcactgggattaaaaaagaaacacacttttaagtaaaagttaatggtgttaaggtaactagctcagcatttttcaagttagatacatatgaagcgcctggcttagtgtgaggtacatatcagctgttcagttattgctgggtcagcaactctactaagacttataaatagaggagcagtggtgttggcagcatcagggcatggcccaggcaggagcagcggccacagcgttcatccatctatggaggaagaggctgccttggcgggtcaactgtgttgctccaagtgacataatgtcatgattttgatannnnnnnnnnnnnnnnnnnnnnnnnnnnnnnnnnnnnnnnnnnnnnnnnnnnnnnnnnnnnnnnnnnnnnnnnnnnnnnnnnnnnnnnnnnnnnnnnnnnnnnnnnnnnnnnnnnnnnnnnnnnnnnnnnnnnnnnnnnnnnnnnnnnnnnnnnnnnnnnnnnnnnnnnnnnnnnnnnnnnnnnnnnnnnnnnnnnnnnnnnnnnnnnnnnnnnnnnnnnnnnnnnnnnnnnnnnnnnnnnnnnnnnnnnnnnnnnnnnnnnnnnnnnnnnnnnnnnnnnnnnnnnnnnnnnnnnnnnnnnnntgcattgtctattgttgctgcaagttctggatcaaaggtatcatctgtgaacctcaagagcaggcgatgatgaggctcttcagggtgcaacacgtcctcgtccatcctaaccccgctgcactccgagcccagctgccgcccgg

SEQ ID NO: 123816 - DNA, 526 bp, Homo Sapiens
gcgggcgctgggggtcgggctggggaaaagcgcgcgccgggccgggtgccgtgccctccggcggggccggctcgtcgcccacgccggcggcgcccgcctcgccgccgaggcgcacgtagtgcgcggggatcaccagggtgggcatgacgttgcggtagacgttgtccttgaggtggtcgatggagccgcagaagatgagctgccccgcctggcccagcgacggcggccgcgccagctggtccaccgactgcgacagcaggaagtcgggggtcttgccctcggccgcccccttgtggcccaggtagtggtcgaagggcggcggcggcgagggcggctcgtgcaggaaggccgcagcccccgagggcccccgccggtgctcctctatgccgggctccagcccgccggggccctcggtcgagcgagcgcccttgagcccggcgctctcgcccccgcgggcacccgaatgctcggcggccgggcggctggcatagcgcggcttggtgcggaagaagtcatcccgggagga

SEQ ID NO: 123817 - DNA, 668 bp, Homo Sapiens
  misc_feature (187)..(195): n is a, c, g, or t
ttttttcacggacagacagggtcgtttgtcacagcagagaagcacctcacggctcctacccgcactcatcgcggacagtgcctgcagcgggagcggcgcgagcaccctccccagatgaaaacaccagcaccaggaggtgggccgtagcccaggctgagggaggaggctgggggctggggctcagggnnnnnnnnngggccacagcgccaccctgagtggccctgaaaatagtgcacagtgctgggtactgccccggccggaggcacctagttgttgagcattccggccacaggccacccgctggcccttccttggtgtggcacgagaccacgggcacttgcaggagctccctgcatgctgttttgtgctttggtctcagggagcaccctcctacctcggggtcccagagtgggcagccgggcaggtgtgaacagtgtgacaagggtaccgtggggcacctggtagtgccacccagaggggcagccggtgctcctggtggtgtggcagcaacagttacaaactcaccccaagtccaaaccccagaaatcctgtttctctggccctccgggtccagaatgccctgcactgcctcctggcctcaggggctgctgcggtggtgggaaggctgcccagcagtgaggaaggcgagtgcaggggctgcggccgca

SEQ ID NO: 123818 - DNA, 853 bp, Homo Sapiens
  misc_feature (443)..(569): n is a, c, g, or t
  misc_feature (592)..(701): n is a, c, g, or t
  misc_feature (703)..(733): n is a, c, g, or t
cgtcaaggggcaacaaggtgaagagcgagtggattacgcagcaagttgcaatgttctagcgtaggtactattttaacacgtacctttaccgatgtggtacgccgtagtccggatttagaaagggcttagataattggcgttcaagttacgtgtgttgcctgtcgttgttggtgttaatatctcaaaaaggaagccacttgcttgatatcaaaagtgctgtggaaagaaaggaggggaaaaaaacccacaaataaatgtagaatctagtttattttaccaaactgtatatttttccacttaacatttctacattagcaatgatgtaactctccaacatttccttataaaaaaggcaaacaagaagtgacaactcatgctccaaatattaaaaaatatatttaaacatatgatcaagaagatttgggccgtgagtggtagctcannnnnnnnnnnnnnnnnnnnnnnnnnnnnnnnnnnnnnnnnnnnnnnnnnnnnnnnnnnnnnnnnnnnnnnnnnnnnnnnnnnnnnnnnnnnnnnnnnnnnnnnnnnnnnnnnnnnnnnnnnnnnnntcgtgtgcgcctgtaggacccannnnnnnnnnnnnnnnnnnnnnnnnnnnnnnnnnnnnnnnnnnnnnnnnnnnnnnnnnnnnnnnnnnnnnnnnnnnnnnnnnnnnnnnnnnnnnnnnnnnnnnnnnnnnncnnnnnnnnnnnnnnnnnnnnnnnnnnnnnnngatttgttttgatttttggtaacacaggtgacaccagaaatcacaaatcaatatatttctacacttcccccccggccgtaatggccgaattcccgggcatatgtccggtaccgtcgactg

SEQ ID NO: 123819 - DNA, 507 bp, Homo Sapiens
  misc_feature (437)..(460): n is a, c, g, or t
tcagcagcttttaaaatttcatgtttattcatatttttcaaaatatatgtacattaaaaaaggaagatttacaacaggaaagattgccttacatgcaacacaaattccaatgaattcatgatgggatcacacatgattatgatctaattcaagccaatcttctcaagtccatttcccagccatactttaggctacagaagggatcccaggagacaaaagtggaatgaataagaaacaaacatcttttgcctctggcagtactcaaggggccagaagatgtacttcaaaaactttaagacaattaaaatgtcaagtgccacagggaagagaaatgataaccagaaatttgtatttctagctagtactatttaacacaacttcacaatactaaaacaaatacaaataagaaagggttaggtagttgggcttcatttacnnnnnnnnnnnnnnnnnnnnnnnnaatatctcaaaaagcccagccacttgcttgatatcaaaagtgcaatg

SEQ ID NO: 123820 - DNA, 738 bp, Homo Sapiens
  misc_feature (501)..(541): n is a, c, g, or t
  misc_feature (721)..(721): n is a, c, g, or t
gcggccgcaagtgcttactttttttacttttccactgttttattacaaaaatcaaatttcatttgttacaattcagcttatttattgtaataatcaaaaaaggggtttatacaaggtatttttatacagtttataattaaagcacttattttacaaaaggagggaagtgaataagtggacaagggctgaccaaatgttggccattataacataaatacatccttgcaaagcaccatcgtaccaaagtcaatgaacaagaaacaccagttgactttaagacaatgacgaagattaaagcttaagggaaaaaaataaaagataaacatctgaaagcagcaccagatccttcacttgcaaataaggctagtccagtttaatcttcttggtatcctctctactttttaacatttttccttactaatccatatatttaatttcatgtcatattggatttaatcagactttaaaaattttccctttaatacccatatttaggcattnnnnnnnnnnnnnnnnnnnnnnnnnnnnnnnnnnnnnnnnncgcccatcctgcttatatttgactgaaaaacaaaccaccaaaatggacagttcagcaaaagcgcgttgtctgtaattctctggtgttgcttctgggcaaccctaagtgatggtggagaatctaacagttcgttaggtctgtactctgcttctaaatacaagacatcatttagtttgtaantctatctgtaaagtcat

SEQ ID NO: 123821 - DNA, 573 bp, Homo Sapiens
  misc_feature (305)..(305): n is a, c, g, or t
  misc_feature (393)..(393): n is a, c, g, or t
  misc_feature (395)..(395): n is a, c, g, or t
  misc_feature (397)..(398): n is a, c, g, or t
  misc_feature (457)..(457): n is a, c, g, or t
  misc_feature (524)..(524): n is a, c, g, or t
  misc_feature (560)..(560): n is a, c, g, or t
cgggtcatttccacatgctttattccagcaatcaaaataattaaaaacatctcaaattattatacacatacaaaataggtacagagtcttttgcttcctcccacccctaggggagaaaactgctttgtgctttgggaagttgtctctgaaacccggggacagaggacgcaggacagactaggagggagccgggagatggggctgcagctgtggaggagggtttccaacacgtctcggtcatgggtacctgaaggccgttctgtacgcaggtgattggtgggactgggacaggcggaagaggggangttgtcagtagtgactgcaacccccagcttaaccacctttcccccgggtctaagaggcacacttggatttttcacttcccgcccctcncnanngttcttctttcctcaaatccttaaaagctcgcctgctcctcatcagcgcgggtgaacgngcgaggcgcctggccagggaggctgtaactctttccagttctcaggaatttaaacaaagctttagtncgcggtggcttccaactccaacctcacccattggcntgaagccaagtga

SEQ ID NO: 123822 - DNA, 949 bp, Homo Sapiens
  misc_feature (71)..(96): n is a, c, g, or t
  misc_feature (491)..(510): n is a, c, g, or t
agaaattgagatgcccccccaggccagcaaatgttcctttttgttcaaagtctatttttattccttgatannnnnnnnnnnnnnnnnnnnnnnnnngtggatggggacttgtgaatttttctaaaggtgctatttaacatgggaggagagcgtgtgcggctccagcccagcccgctgctcactttccaccctctctccacctgcctctggcttctcaggcctctgctctccgacctctctcctctgaaaccctcctccacagctgcagcccatcctcccggctccctcctagtctgtcctgcgtcctctgtccccgggtttcagagacaacttcccaaagcacaaagcagtttttccccctaggggtgggaggaagcaaaagactctgtacctattttgtatgtgtataataatttgagatgtttttaattattttgattgctggaataaagcatgtggaaatgacccaaacataaaaacgagtacaatcnnnnnnnnnnnnnnnnnnnncctttggccccaagggcaaaattcccaaaagggagtcgcattaaattcgtaaccatgtcaaagcggtttcctggttaaaattgttaccggctcaaaattccacaaaaaatagaaggcgggagcaaaagtgtaaagcttgggggggccaaggagggagcaaacccaattaattgggtggggccaccggcccgcttccaatccggaaacctgtcgtgcaagctgaattaatgaatcggcacaccccgggaaaaggcgtttgtttattggggcgcttccgttctccgcccaaaacctcgtgggtcggtctttgggggggaaagggaacaaccacccagggggtatgcgtttccaaaaccctggatacgaggaaaaaatggtccaacggacaaaggcacacctgaaaggcccgtggggtttttaaagggccgccctgagacaa

SEQ ID NO: 123823 - DNA, 930 bp, Homo Sapiens
gaataaataaataactttttaaaaaaggaagcttggtccacttgcttgaagacccatgcgggggtaagtccctttctgcccgttgggcttatgaaaccccaatgctgccctttctgctcctttctccacaccccccttggggcctcccctccactccttcccaaatctgtctccccagaagacacaggaaacaatgtattgtctgcccagcaatcaaaggcaatgctcaaacacccaagtggcccccaccctcagcccgctcctgcccgcccagcacccccaggccctgggggacctggggttctcagactgccaaagaagccttgccatctggcgctcccatggctcttgcaacatctccccttcgtttttgagggggtcatgccgggggagccaccagcccctcactgggttcggaggagagtcaggaagggccacgacaaagcagaaacatcggatttggggaacgcgtgtcaatcccttgtgccgcagggctgggtgggagagactgttctgttccttgtgtaactgtgttgctgaaagactacctcgttcttgtcttgatgtgtcaccggggcaactgcctgggggcggggatgggggcagggtggaagcggctccccattttataccaaaggtgctacatctatgtgatgggtggggtggggagggaatcactggtgctatagaaaattggagaatgccgccgccccatagcacaagacaaaatgttccctttattgattcaaaggtctaattttaaattcccttgaataattcttttccttaaatgaagaacaccaaatctggtggaattggggaacctgttgacaatttttaccaaacggcgacaattcaacaccatggagaagaaaaacgttatgcaagtcccagcacaaaccccagtacaacaataacaccccacctcca

SEQ ID NO: 123824 - DNA, 546 bp, Homo Sapiens
cacaaggtgagttcacaataaatatctgcttactcactgctatgttctttgtagctgttctgcagctggtaagacttagtaggatttttgttttttcatctctttggctttccctgtgtgcttgatttgtcagttatttcaactctattcagaattctggcagtcagggtaattgatcatctttatttgctctacctgcctgcctgtctgtctgtctgtcagcatcttttatcactccctctttccagggagcctggggatctcctgacagtcttttatagctctttcctgctttaatgaccatgagcaactttttcttgactgtcactgagtgattagagcaaatgaagataaagccatgtgtttgatgaatgccagcgctaaccttggcttcctgcacaagccagaaaactgtgcagcttcttttcaaggtagcattgttgggacccccttcatctggtaacaagtttgggtaataggaatatctttcttcatctgggaaggctactgatcagacttgaaggagtttttcttttgatagttgct

SEQ ID NO: 123825 - DNA, 1540 bp, Homo Sapiens
  misc_feature (13)..(13): n is a, c, g, or t
  misc_feature (23)..(23): n is a, c, g, or t
  misc_feature (40)..(40): n is a, c, g, or t
  misc_feature (45)..(45): n is a, c, g, or t
ttccaagggcccntttttaaaancccctgggcctcttggncattntctttcagctgtttgttagtttttgctttatttaaagcatatttaagttattttaatgtggtttaggggcaaaatgtgcagatacttcatttttgtaagattgtaatagatgctgtttatactaaacatgtcataactatctatacagtatatattaaaagaaagcttgtactgtatcttatttgatgatatttattttctctgccaagctgtatagtaaaaggaaaataagtcacatctggtcattggcatttgtatcgtcattctgtaaagacaaaagagtacctatataagaagctccacgtagtgcaaatcgacatctggtaggctgctcgcccccaggcagcagctagagtctgtaattctctgcgtcatcctcttctttttcttcatttttgctttttcttcgcttgagttcttctctgaaattatatgcaaagagttgtgggtcttcatcacacatttttctgtatacatcacagaggctcttaaagtgtgagatggagagctggcggggccgaagagtagggtctatgtctgccaactctaacagcctgcccgtgctttccaagcgctgcgcttcagggaataacattctgagccctcgatggcagtatttccttcggaactgaaatacattctgaaccactttttccaccagcttgaatggctgctctatcttgggctgtatcaagggagtgaagtgcaccacgcccacgtccacctctggtttggggacaaaagcttgtcctggaatcgtaaagatgtgtcgaacattgcagaggtactgagccataacagagaggcgactacgctgtttgcttcctgtattggctgcaagtctctctgccacttccttttgaaaagtcaaagtcatctgagttctgccataaacaaaaggtccatctctacaggaaatattttcaagccacttgataatcagtggagttgaaacactaaaaggcagatttccaataatatgtacatttggaggatcatcttcccagggtcttttaagactttctgaaaaagccttttctaccttaaatgtcaagacatctccatgaacaattctcagtttcccaggtgctgcatcagaaagcatctgtaatccaggaataaatcgagtgtccttttcaaccaccagaagttcagcgacgtcggcattaagaatagatcttgtgattccccctggcccagggcccacttcgtaaacataagcatttgtcagattgccagctttccttacaatcttatctgtcagcctcaagtccaggaggaaattctgtgatagctgcttcgctgcttgcagtcttaacaacttaatgatttctcgaatcgtgggcaacggagggagacggcaagtgctgagttttccggaggcagccatgatacgcggcaagcaccatccacccctacctcacccaggaccttcaccgccgctccccggccgtaatggccgaattcccgggcatatgtccggtaccgtcgactg

SEQ ID NO: 123826 - DNA, 1596 bp, Homo Sapiens
  misc_feature (64)..(78): n is a, c, g, or t
  misc_feature (131)..(131): n is a, c, g, or t
  misc_feature (1409)..(1409): n is a, c, g, or t
  misc_feature (1435)..(1435): n is a, c, g, or t
  misc_feature (1440)..(1440): n is a, c, g, or t
  misc_feature (1466)..(1466): n is a, c, g, or t
  misc_feature (1495)..(1495): n is a, c, g, or t
  misc_feature (1506)..(1506): n is a, c, g, or t
  misc_feature (1518)..(1520): n is a, c, g, or t
  misc_feature (1544)..(1544): n is a, c, g, or t
  misc_feature (1555)..(1555): n is a, c, g, or t
tgtgaccggccgcgggccgcgaacttacggcagggtgtaacataccaatagacgccgctttatnnnnnnnnnnnnnnnttttccccagatttccggggcacgggaaaactgccctcttatatggcaatttnttctccgctcctggtttttctggcccaattgtaaatgcgcgcacgggggccgggggggcggatctaaattttggaataatctcggaagggcttcgcgctcttgggggaaccccgcgcgggtgggagtggggagttccccaggtaagagggcgccctcccaggaaaactcccccttgtcgggggaatttttgtttcacagggaacccgctttccggggttgtgcccgcccccggggggtgtttttgtttatttttgggggagagaaaatgccccaaggccccttagggtccatgggcccccgggggttctcccttgggggaaaacacgcttatgggcccaggtgtgcaccttaacctatctggggcccccgggccgccaaaacggaatggttttagaaaagcttcttcgaggggccgaggcggcccgacagggatgtagtaggggggtggtgtttgggttttctgtttatgacactttattgatgctgggggggtggggaggagacctggagaaatatgtgggggcaagagtccccaggtggggacagggaaagtgttgaagcctggccactactgggcagggaagacagagttgccactgtatgcacaggggatgagcagctgccggtactccaggggcaggtgccgctccactagcacgtgcagtgagacttggtcagtgaccaggccctgccgccgcatcagcagctccaggtcctctggcttcacagtcttgcggccagcatgagcagcaaatacctccagatcatcacaaagatgctggaaatatttatctaggcacttctccaccatctcaagagccttcctctccatgggcatcttggcatagaagctaaagagtttcacatagtggctcagtccagccttgtggggatcttgccggggcctggggccggtggtccggggcctagggggatgcctgaccaacagaggctctgcaggctctgaagataagactgcagcaccaggcgctggggctggctcaagaaactgatgatgtcgcctggcctggagagactcaggggtgctggaggccgactctggacttgctgccctgccagaggcatcctcatcccctgaagatgctcctggcccgtcagcctcagcagtcccctgggatccctctgcttctgtcacctctgtggtgtccctcagcctcttctaccctgctgggtccttgtgctcctgttgcttccatttcactcacactcacaccttcctcttccatctttttctctgcctcttcaactccatcgtngtagggctctacttcatcttctccanagacnacactgctggtgctcaagaagcccanagcaaggcattgactccctctgctctccntgcagaactgngctggttcccannngctgagtgaaggggaaagatacangccgagaccancaggcaaggtgcatactcaaaaaggtatctgctcttgatga

SEQ ID NO: 123827 - DNA, 1137 bp, Homo Sapiens
tttgacagggcagggaggccacctggagcctggcacagtggcctcatttattgtgctgctctgctgctcacaggggaagccggtcccccagagtccccttcctggtcctggtgagtatcttgtccctggattgcttgtcagccttgtcctcctggagcactcagtagccggcaggctccccgcctttcctggagtccgaggcagctgcccagccaccagccgtgcggacgatggcttgcaccacagcgatgaaggtggacgcgatctgggtgtgatggtgccgggtctccagggctgcagtcactgcctggtcaatgtttctctccactgtcgtgacgttgggcagaagctggttgtgcagccggggctcctccacggcccgcttcacgtcatagccgaaccagaggttgtagatgatggccagtgcagtggccgtggtgatctgtgtgcccccagcagctcccaccaccatccggacctggccgtcctggcccaccatgatcgtcgggcacatggacgagagcggctgcttccctggctggatgaaattggcaggtgaggggggtaccccaaactcgttggtgatgctgggagagctgaagtcgtccatttcattattgaacaggatcccgctgaccggggagcggaccttggagccaaagtagaggttgatggtgctggtggcggacacagcactgccgtcctctgcgacgacagacaggtgagcagtgcccccgtcatccggcgtgtagaactcgggcttgtagtaggagatcgggtgagtggtgtcgtcagagatctgggcccggagctgggcagcgaagaactcggaggtcatgttgtggaccacctcagtcacatccacaaacttggggtccccaagcagggtcctcttggcgtaggcaaaccggaaagcctctacgatgcggtggtacgtcaggcccttctgctcggggctctccacgctctcccgggagaagttgtaccctttgaggatgttgaggatgagggccagcacgggcccgctgagcggcgcactgggcatgtacagcaccgcgtctcccaggctgatgttcagcgggtgctcgatcagctcagcacggtagtgttcaggtcctcagctgtcacaatgccccc

SEQ ID NO: 123828 - DNA, 233 bp, Homo Sapiens
gggtggggagacaggccagggaggccacctggagcctggcacagtggcctcatttattatgctgctctgctgctcacaggggaagcccgtcccccaaagtcctcttcctcgtcctggtgagtatcttgtccctggattgcttgtcagccttgtctgcctggagcactcagtagccggcaggctccccgcccttctgtcgtcttctcgcagccgtatagtagtagtagtaggcg

SEQ ID NO: 123829 - DNA, 545 bp, Homo Sapiens
ctggtacccggtccggatttccccgggatatcgtcgaccacgcgtccgcccacgcgtccgccagctttggttggacaactgtggacacacaaggtggaagaggactccgaagtcctttgtcaggtctgacaacctcgtaagcccttgcttagaaatacagtattagtctaattgagtaattagtgcaatttcctgcttacttttcattctcatgactgaactgtgattaggaagttgtgattatagattctggtttggccggaattttgaatcagcattaattgaattgctaaatgactgacattcattccatttaattgggggaacaaaaggcctcaggtaaggatgaggaactctgaaatcagatggaaaagagcggtgttaatttttatggtctgtgatcgtagctgtgataagggactgaggaataaattgtgctctttgtcatggcaaccagcttctgaaaagcccactgaaaattgcctgtcctgctggtaactgctacggggtaagatttgccttaacagtactattttctcgccacc

SEQ ID NO: 123830 - DNA, 905 bp, Homo Sapiens
  misc_feature (376)..(413): n is a, c, g, or t
gttttatgtcatgtgcccagattctgcgggcgttgggccattctcggccatgcccgaggccagcagtcatgggcgatcacgggtcttgtcgtagaggaattgctcgtcgatgagcttgcttcttgctccgcctccgtcatgctcttgagcgctgtagtatcggcccgccaggtcgccgtccaggtctggacagggcttccagccgctgagcttctcgatggctccggcgctccccgcggccttcacgttcggtgtggagtgcatgatagccacggatgctgtcggcccgtgcgcaccctgcgagctcagcacgtagttggggtccaggtcgtctgccgcctctgggatggcgagacgggagtgagcgcccgaagannnnnnnnnnnnnnnnnnnnnnnnnnnnnnnnnnnnnnaccttcaggttgtcggggttgaggtcggtcttgtgctcatcgctgggcttgtagccagccgtgcacggtactcgatgatggggtcgaagagatccttgaacacttcgtaggactcctcgtcgccacgccacagcagcccacggtcatgactgtacggttggcccgggttgtccacgtcctgtctggattgacgtcgtccacgcgtgaagtccgctcggcgtgctcttggcgtcgcatgctccgcgtacacgctcggtgggtcagcatccttggccatgtggttgttgtgggctgctcaggtcggggaactcgtcctcggccgggaagcgcagcttcagtgcgttgtggcatgttggtagaagggcatggcggcggcggtcgggcagccagggcgggggcgggggcagctccgtccgtcaggcagctccacaggagcgacgcagcctcgtgccgaattaaaaacccaggcctcagtacctagcctaattttct

SEQ ID NO: 123831 - DNA, 1894 bp, Homo Sapiens
  misc_feature (67)..(126): n is a, c, g, or t
  misc_feature (376)..(417): n is a, c, g, or t
aaatactcccggttaaaggcaaaacttttcccaagcccggccaagcatattgcagtttagtttttannnnnnnnnnnnnnnnnnnnnnnnnnnnnnnnnnnnnnnnnnnnnnnnnnnnnnnnnnnncctctggtagggtagtttgtccccaatttatgtccacccccaccagaaagttaaaggtttcttccccaaaggattccccaaggctaggcagttttccccaggtcaacgagcgttggtaaaaacgacgggccaggtggcttagctttataatacggactccactattaggggaccactttgtaccaaggaaagctggggtacgcgttaagcttggggccccctcgagggatactctagagcgggccgcccnnnnnnnnnnnnnnnnnnnnnnnnnnnnnnnnnnnnnnnnnntttggcaggccaaaaccctagtttatttcagcatcagcagtatcttagccatcaaaaaaataaactctaccaagggtgacggaagtctctacagcaaggctaagggctcgccagacggcgaacatcaggggtgcatggtgggcactgcccaggcaataagttaggaagcagcagggctggtgtcgggtgtgggccgggcttcatttctgggcaggcatgaggtcgtcgatggcctggccctgctccagccgctgttccatctcgatgagcagcttcactccgtccaccaccatctgcaccagctccacctctgagaagcccaggcggtcagcgttggagacgtcgaagaccccgcccaccgcagccgtgtccacaccgcctgtgcctcgcttctgaagtcgcagccgcttaagcacctccgagaacttctcatgcttgcccaggttgggcagcttgatatgcacacctgcccgcagcccggtgcccaggttggatgggcaggtgaggatgtagcccaggtgagggttccacatgaactcatagtccttagacttgaagagagtttcaatctgggtgaggccggtgcagaagcgggtgaacacctccttcatgttgccccccttctgcatggagatgacccgcaggtggtcctcctcgttgacccacaccaggaaggtcttattgtcattgtgccagataccgcgggcgtcgggccagtcgcgggccatgcccgaggccagcagcaggggcgacacgggcttgtcgaagaggaagtggtcgtcgatgagctgctgctgctccgcctccgtcatgctcttgagcgcgtagtatcggcccgccaggtcgccgtccaggctggacagggcttccaccgcgagcttctcgatggctcggcgctccccgcggctgcagtgcggggggaggcagaagccacggatgctgcggcccgtgcgcacccgcgagctcagcacgtagttggggtccaggtcgtcgccgccctgcaggttgtcggggttgaggtcggtcttgtgctcatcgctgggcttgtagccgccgtgccggtcctcgatgatggggtcgaagagatccttgaacacttcgtaggactcctcgtcgcccgccacgcagcccacggtcatgatgtacgggtggcccgggttgtccacgcctgtctggatgacgtcgtccagcgtgaagccgctcggcgtgctcttggcgcgcagctccgcgtacagctcgggggtcagcaccttggccatgtggttgttgtgggcgctcaggtcggggaactcgtcctcggccgggaagcgcagcttcagtgcgttgtggctgttggagaagggcattggcgccggcgggcggctgccccggccgggggtcgggggcgctccgtccgtcggcagctcccggagcacgcaggccctcgtgccgaattcgccacccaggcctcgctaccttaggaccgtatagtactgcc

SEQ ID NO: 123832 - DNA, 1155 bp, Homo Sapiens
  misc_feature (997)..(1031): n is a, c, g, or t
tccacttctaggagcccaggaaaggttccctggggacctcactctgcacagatgttggttcatagcatccgagaacctgtcatggtgacgaagtcctcgaagtgagccgaatgttgcccttgtacagctgggtccttcctcccggaaggcctctgtcagcacctgcagctggggtgcacaccctggatgaaagcgtcaaagctgcatggccaggattggcagagcgtgggcagtagcgggagacccagaagctgggtgaactgggggctcaggttgtagcccatttgggacagagcttgctgcagctctgtgtagctaatggagcccgagcggtcccggtcatactgctggaagaggttcttccactgctggatgaatttccacagggctgagaagccgtagacatcgatgcggcctgacttggtcttgtcaaacatgtttatcatcatgaggcaggtctcatcattgaatgaagaccaattgcagttgaccagggcctgctttagctccttcatggagatatagccactgtgatctgagtccaccgactggaaccaggagtaggcctcaggatccacattgggaggggcgccaccctgtccataaagcccaggctgctgggcaccgtaggaacttggaggtggctgaccataggggcccccgggagctgcaccgccatatggtcctcctggagttccagaggggaacatcccaggattggggtgtccatagggccctccaccagctggtggtccataaggccctccaggggcaggacccccataaccaccaccagggggtagcccactaccatactgccctccactattggggggtccagggtagtagctacccggaggggctcctggtgcttgtcctgcagctcctgggcagccctgccggtaaggatagctggccatggtgattctgacgtcacactcaggcccccggccgtaatggccgaattcccgggcatatgtccggtaccgtcgactgnnnnnnnnnnnnnnnnnnnnnnnnnnnnnnnnnnncgccgcttcctcgctcaatgactcgctgcgctcgttcgcgttttttcccagagaactaaaaaaaagagacgggggcgggactttggtcgtccacaacttaatttcgatggcgttcagtattacg

SEQ ID NO: 123833 - DNA, 1644 bp, Homo Sapiens
  misc_feature (63)..(85): n is a, c, g, or t
ttttccagagtttcatccttttattgaagcttacaatttcactggacttttggccccaaatgnnnnnnnnnnnnnnnnnnnnnnngtattggcagggagaggtgaccactgtctcctggagactgaagccgagcagagcatggcaggcaagtgaggggtcccagctgcagagggcagaagcctggccaaagatgcccagggagcagatttgtctgagcagggccagccccaggcagctagaagttaacacacaaggatttatgggtgtggcagaatccaagccactggtcccatagacagatctctctcatgcttggtcagattccactttggagaaaatgggctcgtttgacaggatggcctggtgagggaacacaggtactaacggtaacaggccgatgaacactcaccactggcatcagggtggagctcagctgactggacactaactccattacaaggacctgctcctggtgccaggctgtgccactcaactgctcatggccatcaggacattcaacttctatcctctcctccatcaggcccctatctgtgtggcctcagccccggtcctcactatttggtggctatgatgcaggactctccaccctcttttggaacagtgttgcatcaagcaagggagaatgttcttctagagggacaggaaaagaagagatgtccacatacttctctcactctaagaagccaggaaaggtccctggtgcactccactctccacagatggttgggtcatagcatccgagaagctgtcatggtgacgaagtcctcgaagctgagccggatgttgccttgtacagctgtgtccttctcccggaaggcctctgtcagcacctgcagctgggtgcacacctggatgaagcggtcaagctgcatggcaggattggcagagcgtgggcagtagcgggagaccagaagctgggtgaactgggggctcaggttgtagcccatttgggacagagcttgctgcagctctgtgtagctaatggagcccgagcggtcccggtcatactgctggaagaggttcttccactgctggatgaatttccacagggctgagaagccgtagacatcgatgcggcctgacttggtcttgtcaaacatgtttatcatcatgaggcaggtctcatcattgaatgaagaccaattgcagttgaccagggcctgctttagctccttcatggagatatagccactgtgatctgagtccaccgactggaaccaggagtaggcctcaggatccacattgggaggggcgccaccctgtccataaagcccaggctgctgggcaccgtaggaacttggaggtggctgaccataggggcccccgggagctgcaccgccatatggtcctcctggagttccagaggggaacatcccaggattggggtgtccatagggccctccaccagctggtggtccataaggccctccaggggcaggacccccataaccaccaccagggggtagcccactaccatactgccctccactattggggggtccagggtagtagctacccggaggggctcctggtgcttgtcctgcagctcctgggcagccctgccggtaaggatagctggccctcgtgccgaattcgccacccaggcctcgctacttaggacc

SEQ ID NO: 123834 - DNA, 1222 bp, Homo Sapiens
gcacgagccagtggtggggtggagtttcagttccaaaaccactgtgggtgtaacagcatgaagccctcgctgtgaagaggagccctcccatttctcaatggtgtgtcagggaactgacacccacttctagctccctgcccccatcagggccgaggtagtcggggctgaccctgtccccccatgcccgccccatggtgagtctgcacccttcctgtgacagatcccccagcaggccacacaatagagaatctggatctattgaaacatgtttaaaacggggttggtcacaacaggatgggcacaaatgggagcgggggaggggagtggggccgcaccagcccctgccagtgcctgaggctgcagcctggcgagtgcttttgcttctgcttctccacgctggtggttcgagatggtcccaagccccactggggcaggccctgccttgccctgcagaggcagggtggctccacttccccatctcctcccccatgggctgcaggggcatttatgatgcccaacaggtggcactgtcgcgctccttcctccctgtctccgtggctcagaaacaggttaagggtagaggtagatggggagacgtgggggccacacagtctccggtggcagtgagggagcttgggaccctgaggggggcatgctgactccttgctggagaaaaggcacctagataggggagctgggcttgggggcctcccagggggtcctggggtgaggtggggagggaggctgaacgaagcaggaagcagggtggtgggcagaccccaatcctggtttccaaaccctcaccggctgcgggagaaggaagaaggaaggagtcctggagcagagccctgccctggtcccctacgcctgagcaagcctcatccccttcccacctggcccccacgcaagcccagctcgacctccttcccaccttccccctgccggctccaggccttccgcagagggggtggaaggttacagaggcctcaggccgtcttggtgccggggtccacctccttgtgggcccagagctccttgtgctgcttgcggccaaacccctcgtcgtagttgcctttgctcttaaacagctgctggaagtggggtttgcagtagaactccccgtgcagcgcggcgtagctgcccaggctgcagaagccaaacaacggcgtcaggtcaggtcacctcgtgccgattcgcacacccaggcctcgtacctagcccc

SEQ ID NO: 123835 - DNA, 953 bp, Homo Sapiens
  misc_feature (764)..(764): n is a, c, g, or t
  misc_feature (768)..(768): n is a, c, g, or t
  misc_feature (793)..(793): n is a, c, g, or t
  misc_feature (804)..(804): n is a, c, g, or t
  misc_feature (919)..(919): n is a, c, g, or t
gcggcagcagctcgcgcccgcgccctcctcgtacccgtgcgcccccggagaccgatcccgccccgcggcccaggccgggcctgaacccagcgggtgccgcttctccacccgaggcttccacctccaacgagccatgttccaggctgcaggagccgcccaggccaccccctctcatgacgccaaaggcggcggcagcagcacggtgcagcgctccaagtccttcagcctgcgggcccaggtgaaggagacctgcgccgcctgccagaagaccgtgtaccccatggagcggctggtggccgacaagctcattttccacaactcttgcttctgctgcaagcactgtcacaccaagctcagcctgggcagctacgccgcgctgcacggggagttctactgcaaaccccacttccagcagctgtttaagagcaaaggcaactacgacgaggggtttggccgcaagcagcacaaggagctctgggcccacaaggaggtggaccccggcaccaagacggcctgaggcctctgtaaccttccaccccctctgcggaaggcctggagccggcagggggaaggtgggaaggaggtcgagctgggcttgcgtgggggccaggtgggaaggggatgaggcttgctcaggcgtaggggaccagggcagggctctgctccaggactccttccttcttccttctcccgcagccggtgagggtttggaaaccaggattggggtctgcccaccaccctgcttcctgcttcgttcagcctcnctcnccacctcaccccaggaccccctggngaggcccccangcccagctcccctatctaggtgccttttctccagcaaggagtcagcatgcccccctcagggtcccaagctccctcactgccaccggagactgtgtggccccacgtctcccatctnactctacccttaactgtttctgagcacggagaca

SEQ ID NO: 123836 - DNA, 934 bp, Homo Sapiens
ggcgggaggtgcggacggggccagcaaggaaggcagccatggagcaggcgagtttccggagaaacccggaggaatgggtggcagacgcgggcggggaccccgggcgaagacaggggcccaggaagcctcttcccgaaggcctccccctctccagcccctccactcctgggagggcatctgctgcggccagggagcgccctgccccagaaccccggcaaaggcatatccaacccagccgtgtcttgttccctgtgagcctccgggtccggcggggtcctcaggggaacaggtgaggcccccccagctcctgagtccagccctaggtctgggcggctccttagggggcggcatggggctctttccctggggcctaggtccccccgtggccgtcccactggaatgtggcagtgaggtgggcaaggaaggcgctcgtcccctggccgcattgtccctcctgctgcccgtgggcggcccgctacacagccgtctcctggtcctcccgctggatcatctggtagtgctgccggttctccaggtaggcggccagctcggtgtcctgagccttctcagcccgctgccggggagtgtcgccctgctggtctgtcttcatgagcgaggccccggcctccacgatgtagtggcagatggtgcgctggcccagggccgctgcttggtggcaaacaggtctccccgttttcctccaccgcatcaaggatctctgggggggcgtggtccagcaggtagcggaccacatccttgctgccagtgctgactgcgtggtgcaggagcgtgcgactctgctcgtctcggtgcatgaggtcgcccccagctcggtgcagctcctggagcttacagaagtcgttcctcttggcagcctcaatcagctcttcaccttgagggggtgcagcatccccttgcagtgaccggggcgtgg

SEQ ID NO: 123837 - DNA, 665 bp, Homo Sapiens
  misc_feature (60)..(117): n is a, c, g, or t
cgggggcacaaaagggtccgccccacaaagtttgggggggaggtttccggagaccttaannnnnnnnnnnnnnnnnnnnnnnnnnnnnnnnnnnnnnnnnnnnnnnnnnnnnnnnnnttcccggagttcccccacggtgggccccaaccgggggtaccccagccccgcctggaacgaggtgcggtcacccattttactcgggagtggcctcgggggtttttctggagcacaccggaggaggggcctctcaccccacagcctgtgggctctcttggccagccactggtgaccaagccctggagcagtgcttcctctgacctgctccctttctaagcaccagggacaggtggactgagctaggaagcccctactaggagccatctattgtggcctagacagagatacagtgaagtggaatgggacgatcactggagatcccacagagggccagacgatgacagatgacagcacctgagcaggtcagctcttggcccaacccagaggcctcgctccccagggcccgagggagctgctgggggaaggaactggagcctggagctagtaccttacagaagtcgttcctcttggcagcctcaatcagctcttcaccttgagggggtgcagcatccccttgcagtgaccggggcgtgggtgagcagggtgag

SEQ ID NO: 123838 - DNA, 937 bp, Homo Sapiens
  misc_feature (39)..(39): n is a, c, g, or t
tcactagctgagtgtgacaaccacatataccacggtgtntgtgtcaggaatagacacaccactctgccccgagaagcttaaacatccccttgaaggaggtaagtcacactcggaaaagatcaacccaaccagctctctcccacacaagcagttctcagtgtgaggggtttaggggacaggaccaattcgggtaggctgtggtggtagcagacggcttctcagggcaggtggggttcgtcttgatctcaaaggccaggtttgccacaacatacccctcatggtattacagcaacacagagaacataagcaaggcatcttagcaccttctcatctgcaaaacacaccttctacttacactggtagtattttaattggtgttactgacaaaccttgcttccagtgcaggggcaattgaagctagctgaccctaacagtcattgggtcacagacaccaacaaggttccagagcaacgccaggaaaggagcgaagcagaggaatttaggaaaggcaatttattctcttttaaagtaggtatgactattctctccaacaatttcttctgagagtcagcaagaattctgtaatccagtgaagatgcagctgaccttttgaagccatgttttgataaagcaggtaacagtaaagttcctcaaggctgtctaagcttaccttctcacttagttgtccatatcttgccatctgtataaggtaattctctactgctttagttttttcaggctttacaagtgctaagttacttaacctggcccgggccgactgatccagaacttgggctaagatactgtttctcatttctgcttccctgtgctttgcttcctgttgggccgcatcaccaggatccccgtgtttggcctgcagctcggccagcctctgtctcctcagcgcctcaagctcctcgtccgccatggctcggcg

SEQ ID NO: 123839 - DNA, 800 bp, Homo Sapiens
  misc_feature (154)..(154): n is a, c, g, or t
  misc_feature (162)..(215): n is a, c, g, or t
  misc_feature (219)..(219): n is a, c, g, or t
  misc_feature (222)..(222): n is a, c, g, or t
ggggggggatcccaagcccctttttcctggcccccggttttcttttgggaacccggttatggcccccgttcccctttcccttctggggcccccgcccccaaaagaaaaggtttaaaaaactttttcgagggccccagggcggcccacccggggnttggttgnnnnnnnnnnnnnnnnnnnnnnnnnnnnnnnnnnnnnnnnnnnnnnnnnnnnnnggtnggngtattttgcataacaagtttatttttttaaaaggcatatagacaataaacaaagtaaataatcagatcttaacttctgtcctagacttgttccgttaagttctagtctgtgagcacttgtagttcaataatcgtcatcttcatcagagtccattacttttcttctgttgaatttcactgttgttgtcttttctgtttgttggcttacttttttaaggatttctattaaaccttgttctgataccttctcacttagttgtccatatcttgccatctgtataaggtaattctctactgctttagttttttcaggctttacaagtgctaagttacttaacctggcccgggccgactgatccagaacttgggctaagatactgtttctcatttctgcttccctgtgctttgcttcctgttgggccgcatcaccaggatccccgtgtttggcctgcagctcggccagcctctgtctcctcagcgcctcaagctcctcgtccgccatggctcggcgtcagcgctggagcagccgcggtcactctcgcagcccctcggcgcgagcgcggccttgaccactgcccc

SEQ ID NO: 123840 - DNA, 1730 bp, Homo Sapiens
  misc_feature (815)..(815): n is a, c, g, or t
accgagaatataaaaatacattcactttattttagaaaaatgaagactcatagagtaagcttatcacaaactggcctattaggagtcacagaattcacaggaaacaatttctgaagaccaggtgcctgctgccacctctccaagcaggccagagtccagtagagaatgcgattcaggaagatggctcctcagagggcagggaggttagctacggaggccgctcacgtggaaatgtccagtgaaccaatgccaaggaagaagataaaattctctggggctgaccacaacagtgggggtggataaagacaaaccacttgcctgtacttctcatcttctatttgttcatttcactgctggaaggtgacctcttttcccctaatcttctttcaacccagagagtttaagtcttctccagctcaatcctaatccaccccatttcccatggtctctactcctgggagaccagccctggtggcatctcttcctcctgtccctgggccagaatctgctggagtcagggtctgctgggtagaggcgagtccaggtactgactgtagtggtttgctactgaagtcttgcttgctgtcctgatctctttacctggtaggtcctgggactgccactttcctggggggctgcagattgctgcgagtggcacccatgacaggaagatttagtcgctgggaaacaggaaccttgtgtccactttcccgcactctgtgtcctgcagtgcttggtcttgggagcccttttcgagttgacagagaatccggaggtagggcacctctgcccaggtggcacactccggctggtgnagtggcattcggctggcaggcctggggatggccgagggaatgggcagttgactggaagatttagcagctgctccccgcaacttggctgctctggtctcctcactggctgctgctctcccactgggcccggctctcccccggactgggggagtcgatcgggtaagaggagaagatgctgggcttttggatgcagggaacagattgcaagtgggtgactccctcttcatgttggagggcctctttccagatgtagcccggagagccctgactgaccccttcctatcattactccggagtcgaggcgtcaggctgcttggggagggggtgctccgcgtcaaagagttcacagtgggcagcaggtctcggacaggactatccttcagcacaaaggtctcccgccgaggactgggcttcactcggcgaggccccaggccctcgcctgcgctctcccgatcctgcagggcacactgctccagctgagcggccagccggttggcctcatcgaggatctcctccagcttctctggactgagggggcctaggctgagcctcacaccctggggggcaggtgccactgcatttgggtcacttcggtgggagaggccccgtcgaagtggtttctctggagtcaccaacactgttatgtcttcctcctcacggctgtcagatggtgacagccccccaaagtccaaggtctcatccacaataaaccttacatcttcctccaaatcctccatgtccagccagcaggagcgagagtccagttagatctgagctccagcccaccctgtgtccacttcccgcgccgccttatcttccacgcaacaggctttctcccgcaacctagtcccgggaatcagctccgagcctcgtgccgaatttaacaccgagcctcgtacctagccgtaagttttt

SEQ ID NO: 123841 - DNA, 1031 bp, Homo Sapiens
  misc_feature (63)..(92): n is a, c, g, or t
  misc_feature (759)..(759): n is a, c, g, or t
  misc_feature (765)..(765): n is a, c, g, or t
  misc_feature (820)..(820): n is a, c, g, or t
  misc_feature (910)..(910): n is a, c, g, or t
ctgaacagtgactcattgtgttatatcaatagcttcagtgatgtatccagcggccccccctcnnnnnnnnnnnnnnnnnnnnnnnnnnnnnncctcttggtggagatcaccttcagaatgatccacatgggaactcaatggcacaacactgaatataaatgtatgcttggactcaaatctctccctcccattcatcttgagccctgagttgcgtggtggcaaaggctcccaagtggagcatgtgtctcttcttgttcagccaggacagggtctgtactggtcgcagagtctactccttcaacagtcccagcttcttcagggcctcccttctgtgttcattggggacaccctttggggagatcttgacactgacacagggggggcgaggaagcttgtcacggctctgtccttggtaggacaggcgcttggagctctgctcctgctccaggtcagccagcttgcctacctggatacctgcaaaatctttccccgtgcccagggaggccgggcggggccgagaattacgtaagacactgggcgagatcttgtccaagaaggagccctttcccagagaagtgctggttttggggctggcatctttctcagttgaaaggtagctgctcagtcccacgcctgagcgctccagagtgttggacttgaagttcatctgtctcaggccaggggtgttgctctcctggagagtcagccctgactctggcttcggtggagtcagggcactgtttgcccttgggggcttanggatangacttggcatagatttgctagctgcacattgcctggagctggagactcattggcnaggtcctgagctggactggactggagcggagctgagcagagcttccagcagcagatactgctgagctggctgagctgagctgacaactgnactgggaaatgcggccgtgtcctggtcgatgactgtggctactagtggatcagtctctgtctgggtacccactccaactcttatgcttccgtctgctgacagatagcaactcagggactat

SEQ ID NO: 123842 - DNA, 600 bp, Homo Sapiens
ggcacgaggatcaccttcagaatgatccacatgggaactcaatggcacaacactgaatataaatgtatgcttggactcaaatctctccctcccattcatcttgagccctgagttgcgtggtggcaaaggctcccaagtggagcatgtgtctcttcttgttcagccaggacagggtctgtactggtcgcagagtctactccttcaacagtcccagcttcttcagggcctcccttctgtgttcattggggacaccctttggggagatcttgacactgacacagggggggcgaggaagcttgtcacggctctgtccttggtaggacaggcgcttggagctctgctcctgctccaggtcagccagcttgcctacctggatacctgcaaaatctttccccgtgcccagggaggccgggcggggccgagaattacgtaagacactgggcgagatcttgtccaagaaggagccctttcccagagaagtgctggttttggggctggcatctttctcagttgaaaggtagctgctcagtcccacgccaacactctggagcgctcaggcgtgggactgagcagttaccattctgatgttggagcggccgc

SEQ ID NO: 123843 - DNA, 2866 bp, Homo Sapiens
  misc_feature (68)..(86): n is a, c, g, or t
acgacggccagtgccatgctcaaattaaccctcactaaagggaaaaagcttgcggccgctgctcaggnnnnnnnnnnnnnnnnnnnacacactttaaaaactttatttatataaaaaactcatttgtttttaaaagcattaacaagacagaaagaaaagagaaaaggtatggagcagaacacaagccccttagtagtgttcggtgggaaggtgggatttttggttctctggaattgaatgtttagtgttttttataaacaaaagagagaaaaaaaagttaaaggtccccaaaagcccacggctgttctattacccacaccccaccgagaaaaaagagcaccaggaaaagagcagaagaggacaagagagatcaagagtggagccaggtctggatggggcaattttccctgtgcagtgtgctcttagggtcacagagagcaaaaggctcctttttgccagaaaaggtagatgaaagtgggaagaaatgggaagggggaaaagggtaaataagaaattttaatgcacgagtaaagggggtggtgggttgtgcacttttctcctaccccatagcctcaatatataagggaaggggaagagagggataaggaactccagttgcatggaacagagcttttagattagattaaggggagtagaaggcaaataaggaaaaggattagaaataataataataatcaacccgcatagcagctgatttctctagcccaacctgctaattaatatatgctaaagtgagagggggcaatactggagggaggggagaattggggagaccacttccctgtaactccttcagagatgatggtaaattctgggcacctaaggagtaagagtcacaccactcacttctcttaccagccttactttgagattcatcagaataggatttttgcaaaatcccacccatatgctgttgagcaaaagcttgctatgactgaagtcatggctataccaatcctcaatgaagaatctgaggttctctcggtcacttctcttctttctgctatttagggccaatagtaggtaagaaagcaacaaaatataatttgcaaaattatgagaaatgagactgcagaggcaaagaaaggcacatggaagggcgggaggagatgcaccccaggccaaaggcacaaagaagaggcaaagccaggggcaatccccaccttgtaagggaaaagggacaggagttatgtacatcaagtcctttagtttgccaaccaatccagggcagaggcaagggacaggcctataaggataggaaaaggagaaacgggggagtggggaagccagtttcagactaattgcttcatgtacattcctactagctcctcctagaggtcttcttcttcccaaaaacacatctttctgctccttctctaccaaaagtcttccttgacattctcccctttctacagcctcttggaaatggccaggccaactcagcagacatatcacagggcaggagaggtgggttaaggacagcctgtgtttaaggggcagcagcaatagcccagggttggcatgaggcttgcagaagagatggagtctgtaggttcttgatggtccctgccttggagatgaggagagcaaggtttcttaatcccagttttaggagaccttcacttactcaagggtcctttgccaggtggcatgtgccaatgttgctggccttctttgcttcaaaaatagccattaggaataagggaagagctcacactttcccctctctaaaagaaaataaaagtcccttccccatcaggaaaaaaatcttgattaagaatcgtcagtttatcagactgctggacattgcatatacagcatgtaacttccaattcttcccacggcttctagtgaagattcctattctctccatccctcccctccacaaaaggccaggagttccagggaaaactggcaaaaagaactaatctgcagcagtttctcaaaatatgcaaataattgagtcaggtttcttgggagaaaaatggagggaatgggggagggggaggcgttgagacaattaaacttcacaggaagaagttgggagttgatggaaagaaggcagccacttagggctgtaagggcaggaggcagcctggcagttggcacaatagtccagcgaagaaaaaggaaaatcatcagtcaatttcaccaccaaaaaataaaagtacatataagcccagatggaacggagatagtggtgctaaatcttctgcatcaagggtgttgttcccttcaatggctccatgtcgcctagatcccccgatcgatccagtgttctattgtggtctcctctctcatttggtgtggaatagttgttatctagtgattttgtgtttgatcccatattgctcatctgaatttcttcccgatcaggtttcttatctgatttttggttccggtcaatgagagggagagtactatcatcatatgaatgactgctctggcttcgggaagcattgtttagattcacctgaaagtctgatttcttccatccttctttttccagtggcttccgcagttccttatatccccagattgtctgtaatacaagtgctgctgctcgaacttctttttctgagcggttccctgatttgttgatcaacaccagcttctcaataccctgtgtctctcgaagctttttggcagcctccaagttctcagcgataacctcgttgatagtgttcaaaatagagatgacagtgtcctcagagaaattccaagaggagttctgctgtcctcctggcagattccttaccaagttaggaatagcatgtctaccaattaattctttgttgcgagcagccacagccaggtttctcagtgctccagatgcagctgtcac

SEQ ID NO: 123844 - DNA, 1452 bp, Homo Sapiens
acgaggacttcccctggagattctggcctgatctcctgttcactgcaaggagcagagaaaagcacgtaaagaagctctagagaagctggggctaccccaggatcaagatgagcctggactccacttaagtaagcccaccagctccatcagacccaaggagacacgggcccagcatctgtccccagctccaggtctggctcagcctgcagctccagcccaggcctcagtgtggcgggacagccagtgctgggggtcactgtggaaactgctttggctgctcttcagaacaatattaggtggcagcttccggggcttaggggttgtgaggggagctagtcggctgtttgggtcctcccctgatgagaggggagcatcttcagctcttgcattctgaggcaaccctgcaggaggaggctggggttgtgtgtacctggttgagactgtttccttggctttttgggacatggcttctgaaggagtctgctctctttcctgggagctggatggtgtgtggagctggggtgtgtggccctgctgtcctggcccctcgggcaggctggcttccctacactgctctggctgggtgtcccggaaagcttctggcggagggatgagcaccacgtccaagtcaaggcagcctcctgggggctggcaggtgcctgcctgggttggctgctctggctgacctgttctttctcaggctctggcgcaagcctccccggttctccagggttgtgactgctagcctgggtggtgcttttcctgaagttctggcttctggcaatgtggatattcctagggaggctgtaggagccagacctgaggcctaggccctggggctcaggagggtgggatgagctggactcagttactgtccttggcgttcgtccttgctgagtgatggtctcctctggacctccccggggagtgggttgggttatgggcagtgctcggaaacctctgggagttgtggctggctcagactcgtcagtggacagtccgctgtcagcctccgtgtccagtgagccaatggtctcctccaggaagagcagacactccttctcttcagtggacaggaagtcgtagctgctatcactagatccagagcgggtggaggtgctgctcatcatgctgtcacagctgccgacacgggtcacgggttctgagccagtccccgctggccacagctccctctcgggcatcacccgaaacaaggtgcagggatggcaaagggggcttctagaggggaagcgaggggaagtgaacaatgtcccaagccgggcctccactgggttgggggctgaagagagaaaagaaatacccttttgtttcaaagggcagagatggagacagaggctgcttcacctgcctcctactgttttcttctccttttgagctcctcctgacttacctagataggtaaatgcttcatctgtgctgcctggcccccac

SEQ ID NO: 123845 - DNA, 1134 bp, Homo Sapiens
ggggccgggtagaagctgtaagccatgggagaggcaggagaggtctagttgccaccccacgtggagttgtacgtgtgaagacactggctgaggaggcagggctgggtcggggccccagggtcagtggcagagctggcacttgaatccaggtctcctacctctggtgctttgtggggaactgggtggaggcaggatctgtggtagggtattgagggatgagggagaaaaacgacctaattcaggtaggactggcaacggctcccaccctccctggggacagggattaataaaaattgacatcactgtaggaatatattttttaaaagcccacgttttgtgaaaagatgaattaaaaaacccaagacccagcattcgggattgaaagtgcccgtgatgggagttcaagtattgactgagctgggagggaaggggctagagcccccaatcagacatgggcaactagagtgtggggtgggggctcccagtttgtcccaaaccctctaggtcttgtctcgggtctggggggattcggggggttcagcagtggctcctaaagcagccaccggtgcctcctccatctccctgtcctcagacagtgtgggccccgggcagaacgtgtcccctcggcccgcccggccaagcacagccatccagcgtcgctgtagttcctctgtctcagggctgaagtaccagctgaggtggctctgggtgatcttgaagacatgccttctgtcaggccgctcccctgcctcgggcggtcccacctcgaagccaatgaggggcaggctgcgctgggctttcacatcctgaggggctccgtagatatacagcaccaagggttcattttcagggaccacgaaccatgccttgtgccatcctttgccacccttctccatgtagtgcaggaagctgcagatgacgctgttctctgcagccactgaggcctgtttctccaggatggacctccggcgctggggtgtatgctggctgcaggctggactgctcccaggcaccccgtgcaaggccacatagcaatcagtgcacacacggttggagcggttgttgtcatagacgaggcgggcccggaactcggagcacttcccacaaaccacatgcccgcaggccttcatcgca

SEQ ID NO: 123846 - DNA, 456 bp, Homo Sapiens
cccatctgcatactcttacccactccaaattgggcctagcagttccccatctctactccttccaggaagccaggcccacaactcatcctggttttccctacataccacaaccactccttgtctctagccagtctttgtctctcaagggttggggttctgatttcctcttagagataggctcaccttatcttccaagggtcaccttatcttccaaggccaaggagaggtcaaggactggatctggctttgccaggtgggtgaaaggacccgaaggagtaggatgcatacctgaggggctccgtatatatacagcaccaagggttcattttcagggaccacgacccatgccttgtgccatcctttgccacccttctccatgttatgcaggaagctgcagatgacgctgttctctgcagtcattgaggcttgtttctgtggccagagacaccgggcatc

SEQ ID NO: 123847 - DNA, 573 bp, Homo Sapiens
aggggagaactgggaagattttcttctctagagatttttgggaaagggattagttttcaggaatgagtgtcctgcctgaaggcaggggactggcacttagcctgtggtctccaagtttaaatcaggcagtgaggtgattgcgatagcaccagctggcatggccctggtggaggcaggtgagcagggtgctctgcgctccgtggctgcggctcctgtgtgtgccctgcagtgccaagcatttgtgcgtggctgctccccgcctgcagggggaagcgttgttcccggggcgctgaaggacgtgctggtgagggcttgacgtgggcagccctgagcttctggccatgctgtgaggtgctcttctccgagcaaaggcagctgagagttgcagagttcacctttgtcggaggccacctgggagatggacactatgttattaggtggggccaggcctcccgagtacctgggagatgggagtgttcgcttcagacagtccatccactcgtgcccatccccatacctggcagatctgcaaagggctttgaaaaccttgatagagccaggcgtgggagctca

SEQ ID NO: 123848 - DNA, 2892 bp, Homo Sapiens
  misc_feature (815)..(855): n is a, c, g, or t
  misc_feature (890)..(955): n is a, c, g, or t
tgggttctgtgggtgttgttttgctgttggctttttctgtgcctcgtgtgtgttgtagtttgtgtggctttgtgggttttcgtgtgcctgacgtgctgcgtagtgttctccgctgtcatcccgtctcagtgctccgactctgtgtcccttggcttagcgagctgtgaggtgggtagagcggtctttgcttcttggtcctaggtacgtcaatcggcgtcgtagcactcttgtgtgctcggttggttcggtctgtttgtgagtggtcagtcctcgtcgcgctggcgtgtgtctgtgggcctggttgctctgtagttctgactgggtcgtcactgcgcgagatttttattatataaaaaacaagacccccccgtgggttaaaaaaatatttgtgtcctcctcgcgatatctagatgactcgtcggttggggggcgaaaaatgttttcgctaggcgcgaaggagggggatattatcgggcgccttggtgttgtacaccaccccttatgtagtacccccgtgtagaagagagtgttgtagatattgttctccccctagtggggggtgtaaataaatctctgtctggtgaggaggaggagtggggcgcccccacataggttggtggtcgcgcctccccccccgcgtgtgggggtggttctcttctcccacggaggttgctgccgcgctgtgggcgcgtgtttttcccctgtgcgcgcgcttgtttttaacgcggcgcccgctccgcgctcgctcggtcgggtataataagcgggcctcccttcttgtggggcgccccttcttgttcgcagcacaaaagtcnnnnnnnnnnnnnnnnnnnnnnnnnnnnnnnnnnnnnnnnnatatatttttgggcgcgcgccccccctctctctcnnnnnnnnnnnnnnnnnnnnnnnnnnnnnnnnnnnnnnnnnnnnnnnnnnnnnnnnnnnnnnnnnnggtcttcactggtctttattgaatgagggttgtcaggagcaaaggtgggatcaagagcagcaaaagcagaaacaagtataaaagtatcaaaaaatacaaagtgctagcactgaggagagtgagaagggttgggttgtggcccagagggacctctgggacacaggattgaggacttgccacagcctccaagggaacctaggcctggggggcctgtgcaggatccttggctgagggtggaagtggcttgagcggggcccaaccctgggccctgaagtatgagaccagttgtgtgggcacttctgcgagcacggtctgtgccaatgcctcccgaggggcattctggaaccggcggtagggtacaaactgcacaatgtcgcgggcagcagcctgcccagaacgtgtatgcaggggtccaccatcagcgtccagctgctccatggcctcaaagtcagcaccacccacacccacaatgatcactgacatgggcaggttcgaggcacgcaccacagcctcacgtgtggcttccacatccgtcacagcaccatcagtcagcagcaacagcatgaagtattgcgaggcagtcccctgatgtgcagcctgggctgcaaacctggccacatggttgatgatgggtgcaaagttggtagggccatagaggcgaacttggggcagggcttggcggtaggcatccacaatgccctggatgcctgcacagtaggggttactggggttgaaattcaaggcaaattcatgcgagacctgccagtcagggggaacctgggccccaaatccaaatgcagggaacagcttgtctgagtcatagtcctgaaccacgctgcccacactccacagtgccatcaggtactcattgacccctgttggactcaggtagtgtagggagtcaggtgaggaggggtctccattggagccagtgaagtccacgcccacagtgaagttgatctgacagcctcccatcacatagtccagaaaggagtactctgtttctacccgacaaatcttgacacggatagttccagagttcttgtagcttttctttttctgctgcttctcagggtggatgcattcaaactcagccgggactgcctgcagctgggccaagctggtgtggaaggtaccgatgagatcatgtgacccgtcactgtcataatcggagcattgcacctggatgggtgtgctggggttcccaccacagaaatgctgaacggggactgagaaacgcttccatgtagggttcaggttgttcttgatgacctcagatctgtacaccaggtgccatttcccatcaccctggcggaagaactccagaaatggatctgattttcccaggaagtccttcttatctaggtttctggcctctacctccatggttactacacgattgtcctttaattcctgagctgagaccgtgatggtcccccgcccagcaggttttccaggcttcagcatcaaggggagagtcagtacctggctggacacaatctgtcctagggaacactcagcaccccctaggaagtcatcatccctcagctctggcgtcttgttgtctatgtcatagattccaaagcgtagcttctggactgtctcaaagcggtactcaagctgtagagtcttggagaactcagggcttgagcagttccgcacccgttcagtccggccaagctcagcccagctgccccctcccacatcctgtaaaaggacgcagagtgggtcagacttggagccgatgtccttgtcaatgagatggtcacaggaaatggacagctgaaccaaggtcacgcagtgggccatcccccgcgcgagtgcctccgccccgcggccgacagccccagcccgaacggcttcccggagcccaacgcagccaccacctccttcgcccctcgtgccgaattcgccacccagcctcgcacctagaccta

SEQ ID NO: 123849 - DNA, 940 bp, Homo Sapiens
ttggtagcttttcttttttctgctgtttttccaggggtggatgcattcaaactcagcccgggacttccctgcagctggggccaagctggtgtggaaggtcccgatgagatcatgtgaccccttcactgtcataatcggagcattgcacctggattggtgtgcttgggttcccaccacagaaatgctgaacggggactgagagacgcttccatgtagggttcaggttgttcttgatgacctcagatctgtacaccaggtgccatttcccatcaccctggcggaagaactccagaaatggatctgattttcccaggaagtccttcttatctaggtttctggcctctacctccatggttactacacgattgtcctttaattcctgagctgagaccgtgatggtcccccgcccagcaggttttccaggcttcagcatcaaggggagagtcagtacctggctggacacaatctgtcctagggaacactcagcaccccctaggaagtcatcatccctcagctctggcgtcttgttgtctatgtcatagattccaaagcgtagcttctggactgtctcaaagcggtactcaagctgtagagtcttggagaactcagggcttgagcagttccgcacccgttcagtccggccaagctcagcccagctgccccctcccacatcctgtaaaaggacgcagagtgggtcagacttggagccgatgtccttgtcaatgagatggtcacaggaaatggacagctgaaccaaggtcacgcagtgggccatcggggaaagctgcgcggcaccagaacccagaccccgaattaccccccgcgcgagtgcctccgccccgcggccgacagccccagcccgaacggcttcccggagcccaacgcagccaccacctccctcgtgccgaattcaacacccaggcctcgtaccttagcctaa

SEQ ID NO: 123850 - DNA, 916 bp, Homo Sapiens
ttctcttgtgtctcctgcctttctcaggctggatgcgattcgcaactcgatctcggggctgcctgtcatttgggccatcccttgttttggttaggttatccgattgagactcatgtggacccccgtcccctggtcctggtcctgagccattgtgcaccctggactgtcgttctgcttcggggtttccctcccccctgtaatgcttgtaccgggtactgagaaacggttccaggtaggttttcagggttgcttcttgatgacctcagatcctgtacaccaggttgccctttccccatcaccctggccgtaagaatctccagaaatggatctgattttcccaggaagtccgtgatggtcccccgcccagcaggttttccaggcttcagcatcagggggagagtcagtacctggctggacacaatctgtcctagggaacactcagcagccccctaggaagtcatcatccctcagctctggcgtcttgttgtctatgtcatagattccaaagcgtagcttctggactgtctcaaagcggtactcaagctgtagagtcttggagaactcagggcttgagcagttccgcacccgttcagtccggccaagctcagcccagctgccccctcccacatcctgtaaaaggacgcagagtgggtcagacttggagccgatgtccttgtacaatgagatggtcacaggaaatggacagctgaaccaaggtcacgcagtgggccatcggggaaagctgcgcggcaccagaacccagaccccgaattaccccccgcgcgagtgcctccgccccgcggccgacagccccagcccgaacggcttcccggagcccaacgcagccaccacctccctcgtgccgaattcgccacccaggcctcgctaccttagacacgtataggtactgaccgtc

SEQ ID NO: 123851 - DNA, 269 bp, Homo Sapiens
cccctgcatacacgttctgggcaggctgctgcccgcgacattgtgcagtttgtaccctaccgccggttccagaatgtgagtaggtgcaaatttgatctgggagtttaccctttcacctttccctgatgtgagtagggttgaggcccaagggatgctcaccttttcctctaagcctgggatatggttgggttcttgggcatgaaatacagactttgggcagctgttctgggccaccactgacttttcccttttcttggcaggcccctcgg

SEQ ID NO: 123852 - DNA, 1311 bp, Homo Sapiens
  misc_feature (818)..(818): n is a, c, g, or t
ataagcttgcggctatcttttccctggtgtcttcacatggacttccctctgtatttgtctgtattctaatttcctttttttaaataaagacaccagtcatgttgaattagggctcaccctaatagccttactttaacttaattacctctttaaggaccctatctccaaatacagccacattctgagataatacagcttaggactcttaatatatataaatgtgggggacagaacacaattctgccaataacaatgtgaaatgttaatatattattttcaaaataatctgcatgtttcatttctactatatacaaatattgttttcatcttattactattttttaaatttattttgagtgagtttcatatataaccttttaaaataatgaaactcaaacatgaggaattaacttgtgcttgataaaactacattaggtaaataaaaacatagtataccaacttgacatacggtacaatgaaaataatttatattggttgttcaggtcttaaaatggatgtctggatctactattgtagcattcatttatggcagatggaatgaaataatggctttcttcagggtttctaccctaaggcaagaaatagtagcatagtattacatatccatagatacaaaaattatacaaaacctggcaaataaaaatattgttctgaaaaaaagatgataagctagtgtgaactgtatgacatcctagctggtagtgcatagattaattcaattaatcattttacctaaagataaatgaatgtaagcatttctagttctctgtgttactatgttaacttgatatgtgtcnattcagtaataatgagatgacagcctttgtgacctgacaagtgttagaagtatgaacaatcacattatctgctgtaaatcactagatttcctacaagtcaattcagagatgcaacaatatataagtaactatgttaatatttttatttatatatttgtacattttcagctttatctaagtattaaggttctgtaaaaaactaaaatcaatttaatgtagccaaatgacaatcacaagaacaaactatttaaagattattttctttataacaaagtgttaatgattagatccacttaattgaacttgataacaatgtatttatttataaaaatgcaaattaagtataaaattataaaggtaaatattaatattttaaaacagtatttactattaatgatagacatgttataatatgactaaggtttacatggatgatcttattaaaacataaaatgcagtactaaatcatactggtataaatttttatctaaaa

SEQ ID NO: 123853 - DNA, 987 bp, Homo Sapiens
  misc_feature (637)..(637): n is a, c, g, or t
  misc_feature (788)..(788): n is a, c, g, or t
  misc_feature (817)..(817): n is a, c, g, or t
  misc_feature (847)..(847): n is a, c, g, or t
  misc_feature (858)..(858): n is a, c, g, or t
  misc_feature (870)..(870): n is a, c, g, or t
  misc_feature (896)..(896): n is a, c, g, or t
  misc_feature (906)..(906): n is a, c, g, or t
  misc_feature (915)..(915): n is a, c, g, or t
  misc_feature (974)..(974): n is a, c, g, or t
cataaaatctatttacttcctgtagaattaacatccacacaacacacactttgggtaatgtgctgtccatttggtggcacagtccatgctcttagtgactatgctatgccaagaaccaagaaaagtggcccagaccctatcacggaggcagtgggagtcctcgagggttcctgagcaaaacagcggggtaaacgagcgggaggcttggggaaggggtaggggctgcacgagacagaaagggtctatccctaagcacctgcccacagcccaaagtcccagctgcaggggactcactggaccacttggtagtagcgctggaggaagagggaccagccctcgggggtgaggtacagcggggcctccaggtccttgtcgatgtccatgtgggccaagttgctaaggtactcctcgcacgcacacagagcttcatccacaaactctggggacaccaacactgggtttttctcctgtttcttgggctgcttgtctcctgcacatagggagacacagcttcttaagtccacacaccagaaatccagacccactcccagaatcctgatacagagctacaacccttagcccacagaaacactaacttctgtgtgcactgttactgcacaaggccctgacacacctnaaagtgattacagaaactgacctataccataaaagcttaagcatggggtctctggccacacccgaggcccttgtgccccttatcctggcacacaaccaagccttccttgtgcatgacacacacaagagacagcaatgggggagtctctctnggagaggcagggattttcctcctttctgnagagctgctctgctttcctgatcctcgctnatgggtcctgnatacaggactangagctggagacacgagctaatccaangggaagggangcagtggtngggttgcatgcagatatgagggtctctgtgtccctcactccagctgttcttatgttcangctagctgtctca

SEQ ID NO: 123854 - DNA, 574 bp, Homo Sapiens
gatctatctaggttcgtgctgggcctcaggtaagtgacaggccttaggacaatgggggctgtggcatgcgtcaggttacctgccttgatatgggatcgtgacaggcccctccctatgtgcaggagacaagcagcccaagaaacaggagaaaaacccagtgttggtgtccccagagtttgtggatgaagctctgtgtgcgtgcgaggagtaccttagcaacttggcccacatggacatcgacaaggacctggaggccccgctgtacctcacccccgagggctggtccctcttcctccagcgctactaccaagtggtccacgaaggggcagaactcaggcacctcgacactcaggtccagcgctgtgaggacatcctgcagcagctgcaggccgtggtaccccagatagacatggaaggggatcgcaacatctggatcgtgaagccaggagccaagtcccgcggacgaggcatcatgtgcatggaccacctggaggagatgctgaagctggtgaacggcaaccccgtggtgatgaaggacggcaagtgggtggtgcagaagtatattggcggccgc

SEQ ID NO: 123855 - DNA, 685 bp, Homo Sapiens
gcagctccgtaccccgatatttgtggttctggctacggatctggggaggggggaaatgccatcaaggatcacagttcttcatcacgggaaccctgggaatcggtgtcccggcttacacctgatacaggctccgagtctaaggtggggaaggaaggccagaaccacaaatatcgcgatatttgtggttctggccctagaagaatgtggtggggcccaggcctctgtcctttttgtccttcccagtagggccccatctcaagttgaatagtgcagggtggcccagggctgcttccaggacttgcctgtcctccctgagtttggatgggagagacacaagggcctggacctcagttttctgttctctgccccagctcagtgcacctgtgcaacaactccatccagaagcacctggagaactcatgccatcggcatccactgcttccgccagacaacatgtggtctagccagaggttccaggcccacctgcaggagatgggtgccccaaatgcttggtccactatcatcgtgcctggcatgaaggatgctgtgatccacgcacttcagacctccctggacaccgtgcagtgtcggaaggccagctttgagctctatggcgctgacttcgtgttcggggaggacttccagccctggctgattgagatcaacgccagaaccacaaatatcg

SEQ ID NO: 123856 - DNA, 1524 bp, Homo Sapiens
  misc_feature (1182)..(1183): n is a, c, g, or t
  misc_feature (1200)..(1200): n is a, c, g, or t
  misc_feature (1222)..(1222): n is a, c, g, or t
  misc_feature (1274)..(1274): n is a, c, g, or t
  misc_feature (1312)..(1312): n is a, c, g, or t
  misc_feature (1315)..(1315): n is a, c, g, or t
  misc_feature (1364)..(1364): n is a, c, g, or t
  misc_feature (1369)..(1370): n is a, c, g, or t
  misc_feature (1412)..(1412): n is a, c, g, or t
  misc_feature (1484)..(1484): n is a, c, g, or t
  misc_feature (1488)..(1488): n is a, c, g, or t
ccccgcctgaaggctttttcacattcagtgcactgatagggcttctctccagtgtggattttctgggtgtgtcgacaaggtgggacttctggctaaagactttcccacattcactacattcatgaggtttctctccagtatgcacacgatggtgtttaataagatctgagctgctcctaaaagattccccacatttattgcatacgtaaggtttttctccactgtgaattctatgatgtctcagaaggtctgagctctgattgagttttcccacattctttacattcatatggtttctctcttgtatgagttacctgatgtctgatgagatctgagctgccctggaaggtcctactacactgattacaccaataaactttcttttcctggtgagttctctgctcttttctaagctcctcatccttgctgaaggttttctcacattcttcaagtttctctccagcatgcagtctctgatgtttgaggaaagccgtgtgcctttttttgagggggacggtacgtttattgctcatcactcacacttggggccaggcccctgctagcatagcactcaaggcccccagcacaggggaaacagaggctcccaacagccactggctgcctgggcagaaacccaggccccctaggcaccagcggcagctccaagggccccatggctgacacaggcactgctccttccttgaggctgtcagacaccagggcgggcgaggagagcccccagcctgggcgtcctgccctctgtccccactttgggaaatgcccctaagcttagcctttaagaggtgatcacataggcactgtccctgggtggtgtcctgaatgcacctcccctaccccacaccgttgtcactgtggagggacctcctccatgcccttggcttctgtgaggggtaggggtacccacatagttccgggactcacaggctggcattcacaccccagccccgacacacttgcctggttgcctgcggcagacaacccactctgccgctcctctccgcagcgctgcctggcctcagcgagtgcagcccatgtcaggggctctggctgggtgggggatgccccgcctcttggacatgagtggacgaaggcctgggctgagctcagtgctgtgacatcagccaggaggccagagagcagggtcacctccctggttcctgnngctggctggtctcctancgctggggagagcacggcaggnattctgggtcagctcaccccagctttctggcaaggctggagcctcggccggngactggagaacacgaatggtctcaagcccgtggggcancanggcgtgggggccagggtcaacgcacgtggtccaaggtcatgctctcctnctcanncctttctgctagcactggaggggtcaactcccactgcacttnggctcacaccaggagctgtgcatgaactcatatgcacacacactggatggcaaggctggcagatgtgagcanccanatgtctcatcaacgcctctgtgtcatctggaccatg

SEQ ID NO: 123857 - DNA, 724 bp, Homo Sapiens
  misc_feature (676)..(676): n is a, c, g, or t
ggaggaaaaaataaggagggagctttatttaatatgaaggttgaggcagggccggggcgggagggcgctgtcacttggtgatggtgttcgcgttcatgctcttgccgctgccgctgagcacgatgtagggggtcttctgagccttctgcttctcctggagcagggccacggtgcccaggggcgtgtcgctggagctcatcttcttcaggagcgcctcctcgtccagcttcttcatccgccgctctgtcttcatcttgcctgagcccttgccatggaagcggtgcgacagctgccggaaagcctccttgggtgtgagtttccggcccgtctcatccacgtattcgatcttaacgtcgggtttgtagccgtccttctccttgaagtcctgtgtgaagcctcggtattcctccctccggctgtacttgtcatcgatggccatcttatcctcgatgcagtacacggctgagggcagcgacttgttgggggccttcacccgggccaccttctgcactgtggtctccagcagccctttgttctgacacaggagcagggcagctgccagccccctattcacgatcggttcctcgtccaggatggtggtggaggaagcagaggaatcctgctgctgcttctcctactccaggttcaccgtgctccaaatgatgttctactaccngtcagaatcgtagccaccgttggctgaacgctccatatgccgtctaaa

SEQ ID NO: 123858 - DNA, 1565 bp, Homo Sapiens
ttttagaattctgaattttattagagaatatatctaaaatacaatatttattaagttatgatatattgtctgaatggaaatatactctgtatcacaactctaattataacaatttttacagataatacttcatttatatctctgtaattcaaaagtcattaaattacaacagaattcatatttaagataactttgctataaatatataataatttttaaagtttttctttaatataacatcttgaaatcatgaacatttattttttctggtttacattacatagaatcatgactattttacctgatttgccttaactagctcaatttatcttgtgctatggatttgcactcaaccattctactttcctatgttttaaaagcagcattttagtcaacaattgtgagtgctcatcaccctacatgctgtgaacaaagtcaaggtactttattcttatttcttatcctatattctgtgttacagaaaaactactaccataaacaaagcaccaaccagccacagcagttgtgtcaagcatgacaattggtctagtcttcacattttattagtaagtctatcaagtaagagatgaagggtctagaaaactagacacaaagcaaccagggtccaaatcaccaaggtagatctgtgcttagctaaagggaaacacccgaagattcattatttggatacagactatgggaccatcttatttgaaggaagctttgatttgcctgttcttcagtggctgagctgggcgcccagttgtccaccatcagttcttcgggttcacccttccccattgaagttaagtttacggaatttcaacacctgctcgctgctgacgctgatgggttccttgagcacaatccaggtcacacattccagaagaggaggggtggtcagtgagcctgggtaggtccagtaatccaaggattcaggaaggaggccacgaggatcgaagttagtgaagtcagcactcttgccctttgttttaatggaatccagcacatcaacaactttctgaaggcccggtttagcgctgccaaccttcagaaaaatacctagaacggccagtccatcaggttgctgcacagctttcccaaaatccccatatttggtgttccagtgaaccaagtgaagttctgcagcatatttctttttatccacagtatgctctgaaccttgtccatcaagtgaaccccagtgaaagtgaaactgaatcaatctgtaagtgccatccaggggtcctcccttgagcactgctttgtcctgagagtcatcaaactccacgttgaaagcatgaccattgttgaggatcctcagggaagttgcttgatcataggaaacagacaggggcttcagggaagggtcatacttggctgtatgagtgtcgatgtcaacaggggactggcgctctcccttggcaatggggaagtccttatgccagtgctcaggtccgttgtgtttgccgtacccccagtgatgggacatggtcgcgctggcggtcggggcagggcaggaatcggcaccgatctggcggcggcggcttgggcgcccctcgtgc

SEQ ID NO: 123859 - DNA, 1096 bp, Homo Sapiens
  misc_feature (77)..(86): n is a, c, g, or t
  misc_feature (113)..(124): n is a, c, g, or t
  misc_feature (136)..(271): n is a, c, g, or t
gggggggaaaccaaccccttttatgtcccgggtttttttggagaaaagtattgcccattttcctttacctttggggnnnnnnnnnnaaaaaaagggtttaaaaaattttttannnnnnnnnnnncgcccccagggnnnnnnnnnnnnnnnnnnnnnnnnnnnnnnnnnnnnnnnnnnnnnnnnnnnnnnnnnnnnnnnnnnnnnnnnnnnnnnnnnnnnnnnnnnnnnnnnnnnnnnnnnnnnnnnnnnnnnnnnnnnnnnnnnnnnnnnnggggggaaaaagtcagtttatttgatgtgtttcttagtaatggaattgtggggaagaacaaaagcgggctctgggactcacattgctttgggggaggctcaagcttcccagaatcccttgtccctccccactttgggcacttaggggtggggctggggagtgagagggacaaggcagggcatgattgattaaagctaacgagcagacagaaggcactggtgggtcacatctcgggcctgggagagggagggcgtgggccaggccccatgtgacaccaggggctccttggcatccaggcttggcgtctagtcctttcccttccctttcttggctttggcctttgctttggtcttgggggtgcagggcttggtgacgcggatggtctcctggcactgagcattgtagcgcgccttcttcagggtgccttggcggactttggtgcctgtgcccccatcacacgcaccccagttctcaaacttgtacttgcagtcggctccaaactccttcttccagttgcagggcaccctgcaccggatgcgctgggtctgggccccgcaggtgccctcgcggaaacccacgccgcaatccttgctgctgggggtgcagggcccccaggcccactcagcgcactcgctccccgggccgcccttcttcaccttatctttctttttggcgaccgcggaggtgagcgccagcagggcgaggagggtgaggaggaggaagcctcggtgctgcatctcgctcgctgcccgcgctgcttcgctccctcccgcgccgggcccgtcccgctccggccgccctcgtgccgaattcgccacccaggcc

SEQ ID NO: 123860 - DNA, 797 bp, Homo Sapiens
  misc_feature (274)..(282): n is a, c, g, or t
ttgggtcaaccaattatgtgggacccaatgggggaagaataattaattggttcccgcccgtgctctgtaacacacttggagacgaacattaatcaatataatgtaggcgccaaatttttctgaaagaaactattgtgcccaggcagccgtgataggtccccccaagtggtagaggggcgagaaattactcggggaatccacttgggccagaggattcacaaaatttaggtgtgttaaccttgaaatatgtgccctttatacagcgggtggtgannnnnnnnncagccccccgcgacagccccacccccttctcctttcgctgacctttggcctttgctttggtcttgggggtgcagggcttggtgacgcggatggtctcctggcacctgagcattgtagcgcgccttcttcagggtgccttggcggactttggtgcctgtgcccccatcacacgcaccccagttctcaaacttgtacttgcagtcggctccaaactccttcttccagttgcagggcaccctgcaccggatgcgctgggtctgggccccgcaggtgccctcgcggaaacccacgccgcaatccttgctgctgggggtgcagggcccccaggcccactcagcgcactcgctccccgggccgcccttcttcaccttatctttctttttggcgaccgcggaggtgagcgccagcagggcgaggagggtgaggaggaggaagcctcggtgcatgcatctcgcctcgctgcccgcgctgcttcgctccctcccgcgccgggcccgtcccgctccggccgccgc

SEQ ID NO: 123861 - DNA, 942 bp, Homo Sapiens
cgacgatcaacaccagcattgtccagcccagcaagctatgaaaattgcgccccaggtcaatcatccactggattttatcgccctcgaaacccgccattatcggcaggccaaacgccgaaaactcacgaccggagccgtactggcgtaccagcccgataacagggataaggaacatcagcgcatacagcacagcatgcccgacagcagccgcacggttgaaactcggcgggcggttgtgccggttcagcaggttccagccggctcgcagtatcagcagcaccagcaaaagcaggcccgccgacttgtgatacggccatagccacttgtccagcgcagaatcggaggacaggaagtggacaaccgccgagcaataactccaggcaaacacaattgccatcaaccaatgcaaggcccgactgaccgggtcgtagcggtcgctcgcgcagaaggaatggggcatctcatcagaagttttcgtcatctcagcctcttattagtctgtgcattacaaagaccgtgaagatggcattcccggcaaaaaaatagaattgatgaggatgcccgcacggaacatcaggccgtttcctacgagataatgggacgctcttgtaggcggcgcggtcagcccgtaagaaagagcgagggctgctgcgcagcccaacgcagggcaagcctgctcgccacagtgacgatgatcgttctggagccacagtgtcacccaatgggttcgccagaacctcaaggcaccggcaaccagccgctgaaaccgtttttagccagcgggcaccaggcaaagtcgcctgccgggtccggcagtatctgatgctcaacgcccgccaaggcgctgcccttccagtcgaacacccttgcgtctcgccaggccaggaccacgccctgggcctggctttcatcggcattgatccagcgtgctgccgcggccgc

SEQ ID NO: 123862 - DNA, 210 bp, Homo Sapiens
gcggccgcaagtgcttacttttttaaaaaggaaactctcttggatcaagcagaagcccaaaaatgagatgacgaaggcattgtaattggcttgggtctgcttgtgtaggtctcggtggggagccctggggagcttagttctgttctgttttcagtcttcctcagtcttattagtcattgtttccttgagtgcctacttcagtttttaatt

SEQ ID NO: 123863 - DNA, 1521 bp, Homo Sapiens
  misc_feature (153)..(153): n is a, c, g, or t
  misc_feature (198)..(198): n is a, c, g, or t
  misc_feature (201)..(201): n is a, c, g, or t
  misc_feature (352)..(362): n is a, c, g, or t
  misc_feature (391)..(416): n is a, c, g, or t
  misc_feature (470)..(483): n is a, c, g, or t
  misc_feature (497)..(506): n is a, c, g, or t
  misc_feature (581)..(597): n is a, c, g, or t
  misc_feature (609)..(609): n is a, c, g, or t
  misc_feature (618)..(633): n is a, c, g, or t
  misc_feature (646)..(646): n is a, c, g, or t
  misc_feature (649)..(649): n is a, c, g, or t
  misc_feature (651)..(829): n is a, c, g, or t
ctcttgttgttattgataacgagggggccacccccgcagtgaggcaggctcccgtctgtgctgcgcctccctcccgcttttttcggcggcgcggcggggccgaatagtttttctttgtttagcagggcgccacccagcgccttgcgggtctcnccgccgcgggcgggacccccccagacgctatcccgatcccccgcnccnctggggggcgcgccgcgcatctcccccggggcagggaggcgttctattggtggatcgagccccacccgcgtcctccttctcggagcggtcggcgcggcgggggcggcgcgcgatattattgttcatccgcgggccgcttcgggtcgccgtnnnnnnnnnnnggggtggaggggccgccaccacggagagnnnnnnnnnnnnnnnnnnnnnnnnnnttcagaggcttgttcttcggacgccccctctttggttgtgccccggtccgccgnnnnnnnnnnnnnnggtgggggagtagnnnnnnnnnngtctttgcccgcgccgggcgttttccttggggcgcccgtcgtgtgtcgcctttctttcttctccgtggggggggnnnnnnnnnnnnnnnnnggtgtttggagnattcttttnnnnnnnnnnnnnnnncggccccttctcnccncnnnnnnnnnnnnnnnnnnnnnnnnnnnnnnnnnnnnnnnnnnnnnnnnnnnnnnnnnnnnnnnnnnnnnnnnnnnnnnnnnnnnnnnnnnnnnnnnnnnnnnnnnnnnnnnnnnnnnnnnnnnnnnnnnnnnnnnnnnnnnnnnnnnnnnnnnnnnnnnnnnnnnnnnnnnnnnnnnnnttatttggcaaaaaaacttctgaatttaataaagaaatggcaacaactggtacgtacagtaattcaaaatcttttcactaagcaccaaataggatagttctcaatcttctcaagaacctctttgaaagaacgcctaaaacctaatcagtttatttaggtttttagtcaagaaatacaaagctgccaatcagagtttctaattaccatgagtgaccaggttagcaaccttgaggtcataccacatgagcttttaaaagctttgtttaacctatacgttgtaactgaggggatttgttgatgtcaggctggtaatcagagatccatgtgccagataccatatacacacaccaaaaagatacagattatatggtccttatatatttaaggagaataatgtctaattctcatgggtgtagaattagtgaggggcagagagacagatacaaagcactaacccaccagggagaacctagcgagggcaacagaagagatcaaagtcctgtgccctggggatgcaactgaatgggtgctgggaggcttcagggatcaggcacatgagtggatgtcagtccatgtgggaaggggccttcaaggctgaagacaacacaatgagtcaaggcacaaagccacaggagtactggcaatcagaagacagtgaagcatttgttctggggtaagggatgtgatctaat

SEQ ID NO: 123864 - DNA, 599 bp, Homo Sapiens
aaccttttaacaatttcgtcataaaattagtaattttatttcagtctgaaatttaaaaacacagaaataccttggtagcatgatgaatccattgccttgatctttaacgtaagtgtgttcttgtttgttctcctagctgttacagacggccatgtacgaaccgccagaaggcttgtgagccaggattttcatatagtgaagaagtgtgtcgttgtgtcccttcatattggaaaagaccacaaatgagctaagattgtactgttttccagttcatcgattttctattatggaaaactgtgttgccacagtagaactgtctgtgaacagagagacccttgtgggtccatgctaacaaagacaaaagtctgtctttcctgaaccatgtggataactttacagaaatggactggagctcatctgcaaaaggcctcttgtaaagactggttttctgccaatgaccaaacagccaagattttcctcttgtgatttctttaaaagaatgactatataatttatttccactaaaaatattgtttctgcattcatttttatagcaacaacaattggtaaaactcactgtgatcaatatttttatatca

SEQ ID NO: 123865 - DNA, 1275 bp, Homo Sapiens
cagcttataatacaattttcattttattttaaacatattttgcatgatataaaaatattgatcacagtgagttttaccaattgttgttgctataaaaatgaatgcagaaacaatatttttagtggaaataaattatatagtcattcttttaaagaaatcacaagaggaaaatcttggctgtttggtcattggcagaaaaccagtctttacaagaggccttttgcagatgagctccagtccatttctgtaaagttatccacatggttcaggaaagacagacttttgtctttgttagcatggacccacaagggtctctctgttcacagacagttctactgtggcaacacagttttccataatagaaaatcgatgaactggaaaacagtacaatcttagctcatttgtggtcttttccaatatgaagggacacaacgacacacttcttcactatatgaaaatcctggctcacaagccttctggcggttcgtacatggccgtctgtaacagctgcatgtttggtggtggaacttctttccttttaacaagcatttctgtggactttctgtacattcacaggcacattttccaggatttaggggttgatttctggggcaggttcttttacatacacactggcatgtgttttcatcaaattctcggttggccccacattggctggggaagagtttgtttttacagacacactggcatgagtttctgtctagttctttggtggggtccacagctggcaggccgaagcccctgtcttcagacacactgaccggtctgttcttccagctccttgtttggtccacagatgtcatggaatccatctgttgagtcatctccagcatccgaggaaaacataaaatcttcctgagccaggcatctgcagatgtgattattccacatgtaattggtggggcaggtcttgttcgctgcctgacactgtggtagtgttgctggcagggaacgtctaataatggaatgaacttgtctgtaaacatccagtttagacatgcatcggcaggaagtgtgattggcaaaactgattgttactggtttggggccttgagagagaggcactgtaatttcaaataacgtcttgctgaggtagctcgtgctggtgttcatgcactgcagcccctcactattgcagcaacccccacatctgtagacggacacacatggaggtttaaagaaggtgtttgtcgcgactccaaactccttccccacatctatacacacctcccgtggcatgcattgagtctttct

SEQ ID NO: 123866 - DNA, 1956 bp, Homo Sapiens
  misc_feature (284)..(285): n is a, c, g, or t
  misc_feature (305)..(306): n is a, c, g, or t
cccttccttgcgctcatccgggctccggaaggaaatgcgcttctgcatgaccgcccgcaggtactccaccatccatcgccggtgcgcctcggccgtcatcctcttcttatacggctttttaattttggcaaaatcgttgaaatagtcttcccacggtgacacagataatgtctacagcgtttgaccctaatagccacttcttcgtcatcaattcattcagatgttgctccaggtccaggaagacctcctccagcaaacctgctgcagccctccgttcgcgatgnngcgtcgtaaaatgcccgtcnncatgctgggctggctcggagacacaccctcttccacttcattctttaaatactttctttttaaactgactatggattccttgaaggtctggcagttgttgatgatggcgatcatgtactgaacgtagcagtgagggtgctgccgattcctcaggtgctcttctttatacagctgcgcttcatctttatatctgcttaggagagaatgtcatgtggtgtggtctggtagtactcgtacctggttgttttctggctctgtctcttatctgagcagcagtcttgtcttttctgtctccagcgctttcggcagccaatggcggtgatgtttggtctggtagtacccgtcctgggtcggtttctggctctgtctctttgacccagtctttcttgtctgtctccagcgctttccgcagccaggcgatgatgtttgaagtgagcgtggacatgtacgtgtcaagcagctcagagaccacgtgtggagaaagcaatggctccagggtgccgacatccacttccggggccagctccacgttcctcatcatctcagtacttgtgtaggtgtttaagacccacgtcaagaggctcacgatctcattggcttccaggtcttccgatgcgaggtcctgcatccgcgtgctcagggcttggtggtacatgttcaggaggttcttaaagatctcatagtggggaggaaagcactgaaccatcaggtttttggcgacaatgaggtcatccaggacgtacttccttataatttccaggtggcggacaagccacatcttgtcagactctctggtatctgcctgtgtgccctcaattctggtggtcacagtcctctccaagatggtgaacattttctccttccaattcttgggcctcccaggaggaacaaagccagtttgctttttccggtcaagtatgcgcctgtcaattttctcttccctttcaatgatcctgacaactgagaccagcaaggtggggtcacggcggacagtgaccagtgacctctgcagcaccatccacagctgcttagccagctcatcagagagcccctgcgtgctgccaaagtagccatggatgagggtcatgtcacgcgtgttcccactgtccatgcggtactgctcgtacatcagcccgtcccgggagcactccaggtccatcagcttccggtgggcttgcaggagtgccccttgttcaattaggtcctgggtctccctcacaatctcaggcactgagaagatgttcttgaggttctccacggctgcggcgagctggctgtgctgcaccacggcgtctttgacgtccttgaggctctcaatggtgttgatgctctgcctccagtccttgctgacgtctgccagcgactgctggatgtctttgacgtcattcagggcgttgtggagctggctgaggcctgtgcgcaccccgtccaactgtgactggatggcggccttcaatctggcctccacggaggccttcttccgcgcttctctcctgcgatactgctccaccttgtccagctggtccgggcgctggagcatcccagcaaccctttgcactgctgtcgcacacggcctcccggtctgtctccttcatggtgaaaaagctggtggaatcctcacactgttcatgctaggggtgttctctgtgc

SEQ ID NO: 123867 - DNA, 1539 bp, Homo Sapiens
  misc_feature (1269)..(1442): n is a, c, g, or t
ttttctgagggactgcacaggcctggtagcatgcctgatgttccttctttattaaatgacggagtcaggatgttgtgattacagttgaaggcgacgtgttagaaaggacaggtgcatgaaggcagagagtgcccacagactcggctctcgaaccggggcaggagggaacaaggtgagctgtgcagcccacaggacgggcgggctgggtggacacagccccccaagttggccaagctgagtctctgggcgagtggctcccaggagaggcctggctgagcaggcagagcaccctgggaccccagggcagaaggacccctgccctccagtccccaagacccaggcccgtctccactcatacacgccacctacatgtgacgtcagccctgaaaaggtaacaggaaagttcagaacaaaaacaaaaccccaaaagtaaaaaggctacgtgtagcagagtaataccggaaacgttatatacacaggcggtgatggccccctcggaagtgtccgggtcacttagggggcactgcagaggtccctgtggccagagctgcggggcctcagtacacggagctgttccggatgccacagcacagcaccatgctcaggatcatctcgaagatcatgatcacagcgaccacgatggcagcaatgccgatgaggtacagcttcccggagaagaggtcatcgatcttctggtggcagtcctccttgaagaggttgctgatgatgttgctgcccgagggacacaaattgttcttgagcactgaggtggtcaaagcagtcagtgtgctggagccacagcagtcaagcgtctcgtggaaggtcttcaccacagccttggcgttgttggcgtcatcatccaccacggcctgctgtagggcctggtcatagaactgcttcacatccttggcgatctggtccttgttgacaaagccccagatgccggcggccacctcacaggcaaacaggatgaccaggcaggtgaagaacgtccccagcaggcactgggattcctggatggccccgtagcagcccaggaagccaacgaacatcatgacagcgcccacagcgatgaggatgtagatgcctacatagaaggtgttgggcgcgggcttgtctcccagctccagatacaggaggttggtggtctgcgggtcatggcggagccacagggccacacccaggatcacgcctccagccagccagaagacgaaattgaagacgaagagcaggtacttgatgcacttggtgcagccctccactcccatnnnnnnnnnnnnnnnnnnnnnnnnnnnnnnnnnnnnnnnnnnnnnnnnnnnnnnnnnnnnnnnnnnnnnnnnnnnnnnnnnnnnnnnnnnnnnnnnnnnnnnnnnnnnnnnnnnnnnnnnnnnnnnnnnnnnnnnnnnnnnnnnnnnnnnnnnnnnnnnnnnnnnnnnnnnnnnggaggcctggcaggatgcgcggtggggtcgccgccgtcgccgccgttgcgccggacgcgtgggtcgacgatatcccgggaattccggaccggtccac

SEQ ID NO: 123868 - DNA, 899 bp, Homo Sapiens
  misc_feature (147)..(155): n is a, c, g, or t
ttttattttcaacataatttactacaggtctctgaagtgtatataaaatgttttagtgcaacatcttacaaatagttttcctttaaaaaaacagaaacaaatcaacagctctctacatcatgcatgggtagttttcttaccccatcnnnnnnnnncctcaataattaacgcagagaaaccattgtttgaaaagaatatgaaaacttgctacagaaacacccggtgaaagagggtgtggtcatattcatgtcctagaatgcgcctagcacagtgtagtttttcataaatgcaacattgtagacatagatgaatccagagtattcagcagttttcctccgtctcagaagactaaagctccagtagacaatgcgcaatgaggtctcacagccactggagggcaccattaccatccatctgacatcgcatttccatagaaatggccaaagaaagaaggtcctggggtttttcatagaaagctcaaaaagttcaacctttgatgctatcccccagcccaatacaaaatacacagaaaaagcaattattaaaatactggcttcggtttctttttttcctttcaaatttcctacaattgctttacatatttgtgtgcagcacctacttctttatcgccgtgaactgaaatctaagatttcaaactgaaatcttagttacacatcctagtcccagccagcgctctggcaacctcccatttagacagaggaaacgccagtcatcttccctcattgactcagcctataaagtaggagtcagcaaattcccactgaaagcccacatctctgaaataaagaaatggggcaaaagaccttcttttttcatgactgagccgctcctgtacctctaatgtgttgatgcagatacacgttcgcgaggaccgacta

SEQ ID NO: 123869 - DNA, 1282 bp, Homo Sapiens
  misc_feature (153)..(153): n is a, c, g, or t
  misc_feature (160)..(176): n is a, c, g, or t
  misc_feature (189)..(189): n is a, c, g, or t
  misc_feature (195)..(207): n is a, c, g, or t
  misc_feature (209)..(211): n is a, c, g, or t
  misc_feature (213)..(214): n is a, c, g, or t
  misc_feature (216)..(237): n is a, c, g, or t
  misc_feature (1135)..(1135): n is a, c, g, or t
  misc_feature (1168)..(1168): n is a, c, g, or t
  misc_feature (1242)..(1242): n is a, c, g, or t
gggggaggattccccagccccttttgtccttgtgcccggggttttccctttggaaaccaagctatggccactgtttccccttttccttctgggggccgccgcgcccaaaacgaatggtgttatgaaaagttttttaagggccggaggcggccncacaagnnnnnnnnnnnnnnnnngttgtttttgtgngaaaannnnnnnnnnnnntnnngnntnnnnnnnnnnnnnnnnnnnnnngttgttgtttgtttggttttgaattccagcatttttattgagcgcaccacatcggggaggggcggcagtggtttccacggtaaccaaagtaaggcttgtgcacttgctgagcttccagatgcgaattagtaaaagctaaattcaaaagtagaatgggcatctccaaagagtacgataaaaacattttgtatcaaacttgtgattaaaaaaatacaaaagttaaacccacaggcaaagaggaaaatgacaatcctgagagctgccctgataggtgagcctcgaacctcgtctaaatccgtaagaaggcaaaccctggggaggccagcacccctcgggagagtgggagtgaacgcggagcccacctggcttcatctgggcaaagcttcgtagcgcctctggcaggatgtgtgtccagtcccccgaggggcagaggcactgcggtgtggacacacgagggctggggggcaggggcggagccgaaccctgcagccaggcaaaagcgggaaaggcctggttcctccagcatttcccagcttttgggggctcccaagagatagtggttcccacttgcccagccactgctgtggccaagcagcagggtcggacctgagcctgtggtcacagcagactggctactactcagctccaggcccttatttccaatcctcggtgtccaggagagaaagctggtcccagaggccccaggccagggatgggagaagggaaggaaggccaggccaggcctctgggaccagctatagcccttctgagctggggcccagcggtcagcagaagcagatggggaagagtgtgggaagtggcgtactgtacagagggcggcggcaggatcgcaatggtggtggctgctaggaagcatggatgctgcacggctctgcangactgcgcgtcacagcagagcacactcctcgancgctggtgaccgctgcggcctggctgtgtgacatgtcagtccagcgtcactgcagatctgtctcatctgagcangatcagagggtcctcaaaccggtgataaaccttgcgctgc

SEQ ID NO: 123870 - DNA, 1037 bp, Homo Sapiens
  misc_feature (922)..(956): n is a, c, g, or t
ggcagagcactcggtgtggacacacgaggctggggggcaggggcggaccgaacccgcagccaggcaaaagcgggaaaggcctggttcctccaagcatttcccagcttttgggggctcccaagagatagtggttcccacttgcccagccactgctgtggccaagcagcagggtcggacctgagcctgtggtcacagcagactggctactactcagctccaggcccttatttccaatcctcggtgtccaggagagaaagctggtcccagaggccccaggccagggatgggagaagggaaggaaggccaggccaggcctctgggaccagctatagcccttctgagctggggcccagcggtcagcagaagccagatggggacagagtgtggaagtggcgttactgtacagagaggcggcaggcaggagtcgcagatggtggtggctgctaggacagcatggactgctgcacggccttctgcagcgactgccgcgtcaccagcagacgcaccacctcctccgagcgcttggtgagccgcttgcgggcctggtcgtgtgtgaccatggtcatgtcccagccgttcacctgcatgatcttgtctccaatctgcagcccagcgatttcagcagggcctccttcagacacccgtgtgacataaatacccttgtccgtcttgtcttcagagaagggattctgggaagggtcctggtcgattccacctccaatgctgaaacccaggattaagttctcaccttgacgcagcttgtgaatttcaactctttgcaccacggcggtgaccggctggcccgggatgtaggacatctcgaccctgctctggtcgcccagcgccgctccgagaagccggcagcagagtccccggccgtaatggccgaattcccgggcatatgtccggtaccgtcgactgnnnnnnnnnnnnnnnnnnnnnnnnnnnnnnnnnnncggccgcttcctcgctcacagactcgctgcgctcgtcgttcgtctaatacagcggagcccctatagtgatcgatacagttg

SEQ ID NO: 123871 - DNA, 1096 bp, Homo Sapiens
  misc_feature (1012)..(1012): n is a, c, g, or t
ggcctgggtggcgaattcggcacgaggtcggagcggcgctgggcgaccagagcagggtcgagatgtcctacatcccgggccagccggtcaccgccgtggtgcaaagagttgaaattcacaagctgcgtcaaggtgagaacttaatcctgggtttcagcattggaggtggaatcgaccaggacccttcccagaatcccttctctgaagacaagacggacaagggtatttatgtcacacgggtgtctgaaggaggccctgctgaaatcgctgggctgcagattggagacaagatcatgcaggtgaacggctgggacatgaccatggtcacacacgaccaggcccgcaagcggctcaccaagcgctcggaggaggtggtgcgtctgctggtgacgcggcagtcgctgcagaaggccgtgcagcagtccatgctgtcctagcagccaccaccatctgcgactcctgcctgccgcctctctgtacagtaacgccacttccacactctgtccccatctggcttctgctgaccagctttctctcctggacaccgaggattggaaataagggcctggagctgagtagtagccagtctgctgtgaccacaggctcaggtccgaccctgctgcttggccacagcagtggctgggcaagtgggaaccactatctcttgggagcccccaaaagctgggaaatgctggaggaaccaggcctttcccgcttttgcctggctgcagggttcggctccgcccctgccccccagccctcgtgtgtccacaccgcagtgcctctgcccctcgggggactggacacacatcctgccagaggcgctacgaagctttgcccagatgaagccaggtgggctccgcgttcactcccactctcccgaggggtgctggcctccccagggtttgccttcttacggatttagacgaggttcgaggctcacctatcagggcagctctcaggattgtcattttcctcttttgcctgtgggtttacttttgtatttttttantcacaagtttgatacaaaatgtttttatcgtactctttggagatgccattctacttttgaatttagcttttactaattcgcatc

SEQ ID NO: 123872 - DNA, 1016 bp, Homo Sapiens
  misc_feature (275)..(275): n is a, c, g, or t
ctgagaggcggccctgataggtgagccttcgaacctggtttaaatccgtaaagaaggcaacccctggggagggccagcacccctcgggagaggtggagtgaacgcggagcccaacctggctcattcgggcaaagcttcgtagcgcctctgccaggatgtgtgtccagtcccccgaggggcaggagcactgcgtggtggacccacgagggctggggggcaggggcggagccgaaccctgcaagccaggcaaaagcgggaaaggcctggttcctccnagcattttcccagcttttgggggctcccaagagatagtggttcccacttgcccagccactgctgtggccaagcagcagggtcggacctgagcctgtggtcacagcagactggctactactcagctccaggcccttatttccaatcctcggtgtccaggagagaaagctggtctgagctggggcccagcggtcagcagaagccagatggggacagagtgtggaagtggcgttactgtacagagaggcggcaggcaggagtcgcagatggtggtggctgctaggacagcatggactgctgcacggccttctgcagcgactgccgcgtcaccagcagacgcaccacctcctccgagcgcttggtgagccgcttgcgggcctggtcgtgtgtgaccatggtcatgtcccagccgttcacctgcatgatcttgtctccaatctgcagcccagcgatttcagcagggcctccttcagacacccgtgtgacataaatacccttgtccgtcttgtcttcagagaagggattctgggaagggtcctggtcgattccacctccaatgctgaaacccaggattaagttctcaccttgacgcagcttgtgaatttcaactctttgcaccacggcggtgaccggctggcccgggatgtaggacatctcgaccctgctctggtcgcccagcgccgctccgagaagccggcagcagagtacccgcggtcgccctcgtgccgaattcgccacccagg

SEQ ID NO: 123873 - DNA, 2319 bp, Homo Sapiens
  misc_feature (1805)..(1813): n is a, c, g, or t
  misc_feature (2115)..(2217): n is a, c, g, or t
acgtaacacgggaatgaaaagaccctagacttaatctctgttagtagttggtccaataggtaccccgcgaggatgttagggcccttcgccaagatcctccagctacattgttccccgtcacggaacgttgtgtaacggacggcccagtgccgagcgtataattcgactcactataaggggacccctcttgtgacgaggaaaccggggtacgccgttagacttgggccccctctgagggatactgctagagcggccgccccttgttgtgttttttttcagaaattgaaaaagatgtattaaaatattcacaaaaatacaactgaagatcaaaaaataataatgagcttgatggtttttccctagctgatatatttccattgaaaaactagagatagtttgaaatttcaatctctaagtaatgccttttgagtgctcccatacagaattagcgcataattttaagacgaccctgtttgccaggacgaagacatggagagggcagatctgccctttaggcaaccttagttcgttatctgcaaccaggaaaggagtgctgaggcacagggaaaaggggagccaaaagggctgcaggggtgggtgtgcagggcttgggaagaggtcctgccctgagaggctcatctcagtgtgagcagcttccttcagggaaacctgtcctggcagagcaccatgctggcagctgcccttgcctggggggaaggttggtgagaactggtgaggattctctgccagaatgccagggcactgacagagtttgaggtgtctggttgggcaggaggccaagaagtcgggctggggaagggagtggtaagggaggaacaggcctccaggtgtcattcgagtgagtggcccccacagcaccagcttcaccaacacatggtcccggcaccgcaagaagaagtgaaggctcttgctctcagggagctccgaaatgtttcatttattcacaggaactgttgagaaagcagtgaaaaaacaatgccccttttctctgtaaaaaacgactgtaaggaaacatgacacaggcctgtctacaatgtgtgtcctctgtacctcaagcacagccctggtcagctatgtggttttcatggtggcaaaggctcaccaggagtctcagcttgaaggatggtgacaatctcaacacccttcccctccaaacataagaggccttccaaaggctcctatagttttcaaaatagatgcccaaaaagttttaggatgcaaggcagagttgaccactttgtggaaatgtctcagggccagcactgtgtgtcactctcttgggctgggcctatgaacatggaaggcagcagggcaggcgtttttttctccattccacacagaacacagagcagacgctgcccagcttcagacatgtgtggtgaccaaacctgatccctgttgactcacacagacgtggcatgtaaggtggagcgttacaagaataacaaaaatagctcctcaaaaaacaaaaggcttcatgtatgcaacagcattagttttgaagctcatatgccctttatcttaccaccttgtgcacacctcaaaatctcaatcctgttttattccctttgtgaattctgttggaactcagccttcaaacatccccagaagatgacaagatgagaagaaaaagcagcagctcataatggactccaaactacaaggagaaaaagtaacattgcccctcactcccactcaccccaaacacgttctgcagaccatctagacagtaattctttccataactgtgggctttcgaacaattttaaaaggggggaaatttnnnnnnnnnttcagaaaatgggagaaatgacaacataagtgttgaatgatcttcaccacactttccattcccagtaaaaagtaaaaactcatagattttaagtgcggtggggagtagtgaataggagaaaacaagttttagggaaggacagccaaactgtctaatctaggctctcattaacctcaacagtctttgaggcaccatgaagctgttataaagccatgactgatgctgcctcttgctggaagcatgactgacgctttataaaaaaggtgattcttgccagctgcagtggtgcaactatagttcgnnnnnnnnnnnnnnnnnnnnnnnnnnnnnnnnnnnnnnnnnnnnnnnnnnnnnnnnnnnnnnnnnnnnnnnnnnnnnnnnnnnnnnnnnnnnnnnnnnnnnnngcgaaagaaggtgattctctagagagcgagctctgggagattggagagcggcaacataatgataccatttctgcctacttagaaggaaagaaactcctctcc

SEQ ID NO: 123874 - DNA, 913 bp, Homo Sapiens
cacttgaatacagtatttgcacatttaaaaaaaacattgtacaaaataaaattatataaatgaaagcctcaaagaaatatccatcactaggtctttgagctgaagtgaccaaagaccacagtaaatgaaaacatttctaaacatgatgtaaacataaatgaagtaatgcaaaacatcaaggtattcaaatctactgtattgctattttcacccttaatgtatctttctacatagctttctccttttggaacagtaatacatggggcagtacattattttcataaccttatgccatcaaatcaattaatacagatgcttgacacatttaattatacaaaatcaatttgcttcaagatacaaaattaatgttgatatgtaattaatgaaaaaaataagatgttaaaaagataactataagaatatccagatatatgctgtattcccacttatatagatctgatcaataaaacatcaacacattcacttagatactgatttaatccatggatcaaggccatattttcacagtattttaaggatgccaggacactgcaaaagctggagaaaagagctgaggaacaacatatgcttgctaaacaagaactatgtttatttagctagtgaatacctagagtaataaatttttacttcatgatagcaatcaggctcgcaaacacccagaaataggaattaagggttttaaatgtagttataaaggtcataaaaagtctgattagactgaggtacatttactcaaaattttgagattcattaagtggtagcaaacaaaataattcctcagacaaatgcacatttttcagtatacatattaatggggggaggagggaagaagaatgtgcattaactggtgaaatccaccaagctgcatatcaatattctgttacaccaaaca

SEQ ID NO: 123875 - DNA, 1789 bp, Homo Sapiens
  misc_feature (70)..(98): n is a, c, g, or t
gttatttaatattttaatttcatagcattggacacacactcaacatattgaaatattgattccttagagnnnnnnnnnnnnnnnnnnnnnnnnnnnnntattgcatctttctgctggagaatctcggcccccaggcatggggtgtagtgcaccagtgtcctagcctgcaggaggcgctgaggtcggccgggtcctctggggaggaaggctgtgcccattgcctggggctgtatggcaaaaattgtgttgggtgtccttggccttgccagctcaggccctcagtcgccggtcacctggggggcctgcccgtcggagggctggttggctgactggatgaacatgggctgggcgaggtcctggcccgcaggcatggtgacttgctggatctggtagagctgctgtccatctgtgaactggctgaactgctgctgtccttgctggacctctgtctgtgtaatctgtaaggtttctttcaggcaccttcgaggcttcccctgacttgcatttctttgcccctgttgagcattggtggcacagtgtctggatctgtccctgcacaacttgagtgcctgatacaggctgggctaagcggatatactgcagctggccggcattcagctgcaccgggatctgctggatctctcctgtgttagtgatgatttggtgcatcacctgcatggtctgtccagtgccactctgggcctgttgggcttgaccctgtggctgagcctggacaatctgcacctgctgaccttctccaacctgcattgtcacaggtgtggtctggccctgctgaggctgtgcgatgatgatctgcccaggctggatggtggtcgtggagctggtggtctgctggccttgctgctggccctggacttggacagcggtgggttgctgagccagcgtgaaatagtactggactggctcggcaggagttacagactggcgcacctcctcctgacgctttggaggtttcagttcatctcttggaacaatatcgatgagaaaatcaaactgatcaaattttgtaattgccatggcgatatcatttctctgtagagtccggcgcttgttatcttctgtgtgaatccaggctcgaagagtcaactctgtgataaaaatctgggctgccttggcaaagagtacaggcgcttctgcactgatcatcttcacatcttcatccagtttcataatcttcttaatacgagccagtgggagttcctgcactcggaagtctttcactgttaaattccggatttcttccatgacccgaggccagaacgactgtagactttgctgggcatcactgctgctagtaccaccaaatcctccttctgtggacatctcgacaactctgctcaggagtccaggaagagcaggagccgcccccgcgctcctacggagtcgggcaatgcagaggcccaggcgcggcggaggggagggggaagtgtgcgtcacggagaacggagcgcgcgcgaagcgggggcacaagcaagatggcggccacgccgtttgcaccgtttccccttttcccttccccctcccttggcgcctggactcccagtatcgtgcggtgcgcagaagctgtgctccttgaggtctcgcgagaattgggaaggggcgacgacagagggaggcggaattagatctgagagttttaaccccgccccctttcgggagctcgagatctgagttttgaccccgccccctttcgggggatccggaggcgctgcccagtgacctccaccaccctgcctatccttgtggatctccttggtgcgagcttgaa

SEQ ID NO: 123876 - DNA, 1975 bp, Homo Sapiens
  misc_feature (147)..(193): n is a, c, g, or t
  misc_feature (397)..(491): n is a, c, g, or t
  misc_feature (898)..(925): n is a, c, g, or t
  misc_feature (1352)..(1366): n is a, c, g, or t
  misc_feature (1489)..(1517): n is a, c, g, or t
ctcttctcgtccgctccccccgctcctcgtccgcccgtctctctgtctcgtgctgctcggctccgtgtctctcgggctcccccgtcgccgtgtcggcttgtcgcctccgtctccgtccctctctcgtcggatcggccttcgcgctgnnnnnnnnnnnnnnnnnnnnnnnnnnnnnnnnnnnnnnnnnnnnnnngttccttctttctctttgctcgcgtctccgtctcgtctcagcgcccttcttgtcctctttccctttcctgtcgctcgtctctctctgctcgcccccctcccctgctccctgttttgtttctttctttctgtctcgtgtcgtgttgttcttgcctgtgtttgtttttcgtcttcttcctcttgttttcttcgtctctcgtgttgnnnnnnnnnnnnnnnnnnnnnnnnnnnnnnnnnnnnnnnnnnnnnnnnnnnnnnnnnnnnnnnnnnnnnnnnnnnnnnnnnnnnnnnnnnnnnnnctgctggttgtttccccaccgtcggccggcggggggcttataattggtgataattcggaggctcttgcgctttgggactccaccgctggtattaaagactccccctttattgtgctcctcctgagtatcccctaattttgcggtgattctggttccagagaagaacacgctcgtggttgttccccactggggagcgctttctttctataactgcggggaagagaaatcctcacaacgctcgtcgttgctctgttgttcctcgattgtttctctcttgggtacacacgctcttggcgcacagtgttcacgtcaccgctctcggggggtccgcgcgtgggtcccacaacgcgaagttgtttacgaaagtcttttcgcaggggcccacaggcgcgcgccgcaacacaggnnnnnnnnnnnnnnnnnnnnnnnnnnnngtctaaaatgagatttattgcatttcatgcagcttgaagtccatgcaaaggagactagcacagtttttaatgcatttaaaaaataaaagggaggtgggcagcaaacacacaaagtcctagtttcctgggtccctgggagaaaagagtgtggcaatgaatccacccactctccacagggaataaatctgtctcttaaatgcaaagaatgtttccatggcctctggatgcaaatacacagagctctggggtcagagcaagggatggggagaggaccacgagtgaaaaagcagctacacacattcacctaattccatctgagggcagaacaacgtggcaagtcttgggggtagcagctgttcccagagtcaagaaataccgtacacccctggggagatttgctcctaaaaagaagtggcagtaacaaacnnnnnnnnnnnnnnnccaaaggggaaattttttttcaaccccacttttcaagaaaattccataaatatgttatttaatattttaatttcatagcattggacacacactcaacatattgaaatattggttccttagagnnnnnnnnnnnnnnnnnnnnnnnnnnnnntattgcatctttctgctggagaatctcggcccccaggcatggggtgtagtgcaccagtgtcctagcctgcaggaggcgctgaggtcggccgggtcctctggggaggaaggctgtgcccattgcctggggctgtatggcaaaaattgtgttgggtgtccttggccttgccagctcaggccctcagtcgccggtcacctggggggcctgcccgtcggagggctggttggctgactggatgaacatgggctgggcgaggtcctggcccgcaggcatggtgacttgctggatctggtagagctgctgcgaggggtggagaggagagagtgaggtcatccctgggagaggggcatgcagctccctatgggtctcgagctggttggggtcccagatacctcaaccaccacccactgcaaggcgtcagaaggaggaggggagtggagctctgctgggttggagca

SEQ ID NO: 123877 - DNA, 725 bp, Homo Sapiens
tttttatttaatgtagattcaggagcacatccaattataaatgattgttaggaaaatcatataaaacaatggaatacataaaagtgtcaagagtaatcgtcagggtgcgaaattccttggtggccagatgcccatggcaagcagaaattatcctggcagcatcactaagaggtcgatgtccacagaagattctccagggatgcaagcagcatgggcaggtggaggttttgaatttcataccctgattcatagttttcacaattccatgtgcaatttcagaaagattcatcattgactgctgacatgtcgccctttggcgtggaggaacgggaggagcccttgtctgtgctctctgaccccgagctgctctggttctgctgttctgaccctgcactggaggtcactgtggatgaggatgtcgatgaggagcgagtcttttccttaaagtctgtgataatgacggtgacgttgcccacagttactgccaactgctgtgcagtgctcctgtccacgtttttcagccggggccttgaggtgtgatttgtttcgctggtctttgttgtagcatttgcagactgtatgctgtttgcttcactaggaggatctttcagaatgtcagactttggtttggttttcttgttggtatttttcttggtaacactaggactaatttccttgtctttctcaagtttctctttgtcctgcttttcactttctcttcttct

SEQ ID NO: 123878 - DNA, 2128 bp, Homo Sapiens
  misc_feature (156)..(191): n is a, c, g, or t
  misc_feature (251)..(260): n is a, c, g, or t
  misc_feature (291)..(310): n is a, c, g, or t
  misc_feature (321)..(323): n is a, c, g, or t
  misc_feature (381)..(392): n is a, c, g, or t
  misc_feature (544)..(544): n is a, c, g, or t
  misc_feature (914)..(926): n is a, c, g, or t
  misc_feature (1400)..(1400): n is a, c, g, or t
actatataagaacggggcttccggagactcttgtcggaggagataagccacgcagagaggcccgcccgcggcgcagcgcccgcagggggcgcgctcatcggcgcccggctgcggctgcccaaccgccgccttctttcgttttgccgggggcgcgtnnnnnnnnnnnnnnnnnnnnnnnnnnnnnnnnnnnntctcgccggcgccccacggggcgaaccggcgtcctgcccatccccaggggcgcccgccgnnnnnnnnnnaacaggggaccccgaacaacgccctctccgnnnnnnnnnnnnnnnnnnnnccccaggaggnnngtctcatcccaaagtgacctgtctcacccggcgcgcgcggtcgtgcttaagttcgcannnnnnnnnnnngccggccgggcccacccgccgacgcggcgctgagttattgccgaccctgggtggcccgcacccccgccgcgttcggcgcgctctccctcctccctccggtccgccgctgtcctgccctggccccccctacgcgcccttcgtctccgcctttntcgttttgggtattgaaccaggaagctttatttacacagtacaagtaacaagcaaattcctgagagactagagcggctggagtgcaagccacagcctgtgcggggaggccaggctgcaggggcgggcagaccctgggccccgggtctacgctttctggtcgccacacttcctgaagcacggcaacacccacaacatccagctcagggaagcccctgcagccccagaaacagcctatgtgctatctgtcgccccagcccccaggacagcttccccacacactgaaaacacaaatcatttgccaaaaagactatgctagaaggtcagactatcctatctaggctacaagatctccacttcggtctgccattnnnnnnnnnnnnntctttctcttcttttctctttaaagaggcatgacagaggggtttgaccaacagcgtggacatggcaaggtgtggcatcattgccagtgtggggccagagggtgcccgagccccggtgcgcggccagcctgctgcatccctgccggctgacgtctggagtgaccgtcattccagtgaccacccccatagccacagacggcacgtcagtggaaacgggggtgcagcaggcatgacaccaaggcagagcccgcagcagggggcccggggttccacagctagggaagcttgctcagacaggcagcacacccagggcacggccactcacgcccccgcaccaggagacccatttggaagttagttagggtttgttttgttttcttttttatgtggacttcccctttatttaaattttctttcagtgtacaaattcaccaaaactggctacaaaaatttggttgaaaagtaaggctttctngagaatgaaaatctgtacgtctggtcagaacaagctccccacgggcccaggtgcacgtctgcccgtgcaaatccggcctccaccgcgagtaaggcaagagggtatggcaacgaaaatggcaaggctgtggccccagcccctgggccccacgggtggacggcagcccctggcagtttggtggctttggaatgagtggggtgcatgtggcactaagccccccccaccgccccggctttcctgcaggcttagcccgcgctttaggaccccatgagcaggcagatggcctggcacggcttgcttctggctctgcccttcctcagtctcccctcagaggcagggtttgtgggcaaggctgtgacaaaagtaaggctcctgccactgcccccagctggggccatcatgctggtgggggtgagctgtctgcctgctgcccatggggacaccaatgtggggggcacctcctaggcgaacctccctcccagaggactgagatcagaagtcctggggccagcagggtggagtgcaggaacaggctgctccgggcagtgtggcagcttggatgatggggtggcaccttatagatagggtctactccctccagtcaaaaaacaaacattaaaccagctaaaggccatttctttctctaagcagaagggatagccaccattttctcccctgactgctgcgtggtgggcacaggacaggcaggcggggtctgaggaggctgg

SEQ ID NO: 123879 - DNA, 852 bp, Homo Sapiens
gagctttataaagaacaatatttatttccatttacagcatcaaataccataaataaagctaaacattgtttgttttgctgtgtgcaaaatacagggttccgtgtggcactgtaaatgattaccaaaggtcacagacatgcgttgtgatgagatggggaggctagctaaagaggaggctgagaggggaggagggcactctttggttgacattctataaagggagggagactctgtaagagaagataagacaagagcaacgactttgtactggccaggatctgcacaaatacagtgagcgtgcagcatgcagggccaggcaggcaggcccgggggtcagggtggtctgggccacatgcaggacagacgcccaccgcagcctgagaccgcgagtgttgcctaggacagctccactgtgcttggtgtgttgtttctcgttaagagtgtgttggtgattatcctgctgccccaggtacaagagtcagcagaaatgtgtgctttaagcagagtcacaggggcctggggctgaacttgagtcatttctcaaagatatccctgcctgggatgatgatggctctaattgaagctctggcatcatcgggggctttatgagccaagggagataagaagagccacagcaaaacccttgggtctacagtgcaggctgcaaccaaggcagcatttgctagcatatttcgtgattttgttttcaacctacagagcatgtgtcaagcttgggatgaggcctgagagtaattaagtttttcgacgcgtggcgacgcgtggcgacgcgtggtcgacgatatcccgggattccggaccgtaccagcctgctttttgtccactttatcacag

SEQ ID NO: 123880 - DNA, 1090 bp, Homo Sapiens
  misc_feature (667)..(682): n is a, c, g, or t
ttgtgaatataacagtggtaaaaaaagcaggctggtacggtccggaattccgggatatcgtcgaccacgcgtcgccacgcgtcgccacgcgtccgtcttacttcaaactattttgaatagaggttcactgagccattgctgatagactgtgcatagctactagctgtcacactatgtaggttttttggagagattcatagggaagtgaatgtaaccaggaataaaggctctcactttagctctgggactatgcagtggatcttgggaacaaaataagatatctaatctattttccccattctggctagattttggttgttgtgatgctcctacttcctgtataggtttttgggatcatggtgcaggctagtaataggattcagaattgcttcccttttatatcgaccatgtaagggattctaaaggagggtaaatctcaaagtgctctgaaatcatccctctaaaatctgtcctgtggtgtgctaagatgtctgttgcctttttatgttaagctaaggaacttgaatgccttacctaataactcaactagtagtaagctcattttgtaaatatgaaaatggctgtaagaagtggcattcatgtatattcaatgttagtcaatagaccatagtgggctggatggctttaacaagccaaattccgcaannnnnnnnnnnnnnnnccccttcatacttgtatgatctcacctgaccagtgatttcttttcctcctaaccccatgctaccaccattttctggaaatcaaagagatgtggtagtaaatcatacagtacacacgatcatctgagatcaatatgagcacaaaactcatcaagtaggtctgcctggaatgtatataaaaaatgtaaataaaaatttgtaaattagtgtgaactgtatcttgcatatgagactgtgtattgttttgcattctcttcccttttgtagaaatttttctgtaaggaaatgattcagcttgttggttttagagtaaaaatagccaacagttgtggctacacagtgagatcacaggaactggaaatagggtttgtcggctttggttaatgtcagtacttttctcatgccatacc

SEQ ID NO: 123881 - DNA, 444 bp, Homo Sapiens
tttcccagttcaaggtggcttttatttgctatcacttccaaacagccaataagtcttagaatggatcttcaccaggtaagaatacaattgattctgtgagtgaagctctcaggagctctctcagtctattagggttgctgtaacaaaatatcacagactgtgtggcttaaacaacagaaatttgtatctcacagttctggaggctagaaaatccaagatcaaggtgctggtccaatcgttcctggtgagggctctctcttggcttgccaatggtggctgctttctccctatgtcctcacatggcctttcctgtcaagtaaaatctctgatgaaagttcttggaatgtttttttcaaaacggagttgaggttattttgtttttccttccaggtattgaagacaggatttatcttctctacttcttcttttagaagcagatcaaga

SEQ ID NO: 123882 - DNA, 1481 bp, Homo Sapiens
  misc_feature (1359)..(1393): n is a, c, g, or t
  misc_feature (1397)..(1441): n is a, c, g, or t
tgttgataacaagtacaataagcatagaaaatttaatgaacatattaattaaaagcattttagaagaaaaatagaaaatcatagtgaaacatttcatataaaatatttagtagaattaatgttacattgctataacaaattcacatatttttaacaaaaatttcttcatatgctattttcactctctgcttctttctttttcttttggttttaattaggcctccttttgatattctttggatgaaaccttttttacatgccctcagacattcttgtttggaagtaaaattgttttcatttcccccacatccactgtacttaaatgggcggcatttcccaatgactgaattgtagtagaatctgttctcattggcacgacacaatcctctgtctgctggagtgagacaccatgagggaccgtgaaattcaaaaaggctgggaaccttggttgattgcggagtcagggagttattcacagcattgagctgggttccataattatccacctggaaaccattcggaccatcttcacaaatgttcttgcattcttccagtgtctcaaaattgttcatattgcccaggcatccaccatacttgaaacgttcacactgttttgtctgattgttataaaaatacctggtaatataacctcgacatattccaggatcttcttccaaaaagcagaaatctggcttttcttgttgcaatgttgtctttataatcctgtttgcattatctcttgtacacatttttttgcactcttccagactttcaaatcgattctgatttccttcacatcccccatatataaattcttcgcactgtcgagtgaaaatattgaagaaaaatcttttcatgattgctttacatgggccatcatccgccttgaatgcacaaaatgaatgcataagtttcagtggtggcaactccgtatctgtgataattgtgtgttcttcatcttcctcagaatcagcattaagaggggcaggggcaagattaagcagcaggcatacagaagcccaaagtgcatgtactttcttcattgtgtaaatcatctaagtaaaatctctgatgaaagttcttggaatgtttttttcaaaacggagttgaggttattttgtttttccttccaggtattgaagacaggatttatcttctctacttcttcttttagaagcagatcaagaaactggcgattgaagagtaactgaaagaaacgcaatctgatcttactagcagtgaaagagcgaggtaagaatttgactattatccagcctaaagtcgctgctgtctgttagagcaaagagccccggccgtaatggccgaattcccgggcatatgtccggtaccgtcgactgnnnnnnnnnnnnnnnnnnnnnnnnnnnnnnnnnnncggnnnnnnnnnnnnnnnnnnnnnnnnnnnnnnnnnnnnnnnnnnnnnaactaagccggggcgccctatagtgagtcgatacatttgg

SEQ ID NO: 123883 - DNA, 835 bp, Homo Sapiens
  misc_feature (54)..(86): n is a, c, g, or t
gcggccgctccaacatcacctcgtgccgaattcggcacgaggcaagtgcttacnnnnnnnnnnnnnnnnnnnnnnnnnnnnnnnnnggtttccaggagcatatattacacaggtctgagtgcaagaaatggcaaacaactgctatgtttgctttaaaagctcatctggaaccaatgccaaatcccgatgcttttgatggccccctggttcttggcccctcctgaggctgggctcagacttctgggtgagggggcagcctcggcatggaacgtcctgccttctgtcacctgaggcatcaggcacttgggtgatgctcagggctggatcctctttcactgcttgtgcacactcagactcccatagccagccctggctgggatcctcataagatggatgggccagtctgggggcactaggtggctgtgtcttcccctgctccctgggagacaggttcttaggctgggctggagttgtgttttccaaatcctggaggttggctagcccacctgccatggttgcctttctgcttggggatgccctgtctgggccctcaataagggatttccaggaccacatgctcagcttcccagaggtggagctgggaggagagcaactgctggtgggggtgagtcccgaagtgctgggagaaagtgctgttagtgcctgggtgtggaggtgctgggccttccagcaaccttcaggagggatggggtctgtggctccagactgacctaggttggggcctgctgaggaggagctggcagcctcctcaatggcttgtgggctcccgagcctcctgtggggaccactgggactttccattctgggaggcccc

SEQ ID NO: 123884 - DNA, 1396 bp, Homo Sapiens
  misc_feature (115)..(115): n is a, c, g, or t
  misc_feature (192)..(222): n is a, c, g, or t
  misc_feature (228)..(302): n is a, c, g, or t
gcgtttttttatttgggtgggggggatatccccaaagcctctttttttctttgttcccggggtgtttttcttttggaaacaacgctttttgcccccggtttcccctttccccccnggggggcgcgcgggggcccaaaaagaaagtggttttagaaaatttttttaagagggccccaaggcgcccccccaaannnnnnnnnnnnnnnnnnnnnnnnnnnnnnngggggnnnnnnnnnnnnnnnnnnnnnnnnnnnnnnnnnnnnnnnnnnnnnnnnnnnnnnnnnnnnnnnnnnnnnnnnnnngagtagtgagtagtgtaatgttaacatccaagaaagtaaaacaaatagtcacctctgcagcagctcattaatgactggtaacacatagaggtcaatgtgccagagcttaaaaaaaagtactgatacaattgaaggcccttccactataaataggatggaggatgggtcactgtgtccgtattaccaatgacagtcaccccaagaaacacaagcagctgcatccaccctctttcagggggtagagccactatacttctcatgtagatcagccacattgtcactggagactcggatccagccatcctcccgcacgtggtagaggttgactgcacctcctgagtaggcatctctgtaggtggcttggtagatggctcgacgggccagatcataggcctgctccacttccaggtcataggaatagccccgatccatgaccccatatgcatacacagagccagaacctacagagaaggtggcccctgaaatccggttcccttcactgtccacgtagtagaggccagggcctctcttatcccagccacagatcatggtgcccatggacagccccatgcctttgtactgatacaccatgttggcaagcagtttggaggcagctgctacagagatgcgttccttatttcgaagctcatagattcgacattgccgagccaacagccgttcccagaagctgcaatccgctgcgcccccagccatggtgcctagcaggtatgggttgatctctatcaccttcttcaccgtctgggaggcaatgtaagcacccgctgtagccctggagtcagctgcaactatgactccatggcggaacttgaaggccagggtggttgttccatgaagcatttcgattcctggctcttctgggacaccccagcctggcgcggccaggctcagaccatcactgagactcctggacctagatccagcagatctgcacgacccccaagtccgaaaaacccgcgctggttcaccggtagcggcggaacgcgtgggtcgacgatatcccgggaattccggaccgtaccagcctgctttttttcccactgttcatattacagtgccttctctctccgtggttt

SEQ ID NO: 123885 - DNA, 868 bp, Homo Sapiens
  misc_feature (69)..(69): n is a, c, g, or t
tcccccctcttttcagggggtagaggcaattatctttcttcatgtagatcagccacattgtcactggangactcgggatccagccatcctcccgcacgtggtagaggttgactgcacctcctgagtaggcatctctgtaggtggcttggtagatggctcgacgggccagatcataggcctgctccacttccaggtcataggaatagccccgatccatgaccccatatgcatacacagagccagaacctacagagaaggtggcccctgaaatccggttcccttcactgtccacgtagtagaggccagggcctctcttatcccagccacagatcatggtgcccatggacagccccatgcctttgtactgatacaccatgttggcaagcagtttggaggcagctgctacagagatgcgttccttatttcgaagctcatagattcgacattgccgagccaacagccgttcccagaagctgcaatccgctgcgcccccagccatggtgcctagcaggtatgggttgatctctatcaccttcttcaccgtctgggaggcaatgtaagcacccgctgtagccctggagtcagctgcaactatgactccatggcggaacttgaaggccagggtggttgttccatgaagcatttcgattcctggctcttctgggacaccccagcctggcgcggccaggctcagaccatcactgagactccctggacctagatccagcagatctgcacgacccccaagtccgaaaaacccgcgctggttcaccggtagcggtctctccaacacgctggcaagcgccatgtctagtgtccccggccgtaatggccgaattcccgggcatatgtccggtaccgtcgactg

SEQ ID NO: 123886 - DNA, 986 bp, Homo Sapiens
  misc_feature (70)..(70): n is a, c, g, or t
gcctataaaaataggattggagggatggggtccaactgtgtcccgtattacccaatgacccagtccaccnccaagagaaccacaaggcagctgcatccaccctctttcaggggggtagagcccactatacttctccatgtagatcagccaccattgtccactggagactgggatccaagccatccttcccgcacgtggtagaggttgactgcacctcctgagtaggcatctctgtaggtggcttggtagatggctcgacgggccagatcataggcctgctccacttccaggtcataggaatagccccgatccatgacccccatatgcatacacagagccagaacctacagagaaggtggcccctgaaatccggttcccttcactgtccacgtagtagaggccagggcctctcttatcccagccacagatcatggtgcccatggacagccccatgcctttgtactgatacaccatgttggcaagcagtttggaggcagctgctacagagatgcgttccttatttcgaagctcatagattcgacattgccgagccaacagccgttcccagaagctgcaatccgctgcgcccccagccatggtgcctagcaggtatgggttgatctctatcaccttcttcaccgtctgggaggcaatgtaagcacccgctgtagccctggagtcagctgcaactatgactccatggcggaacttgaaggccagggtggttgttccatgaagcatttcgattcctggctcttctgggacaccccagcctggcgcggccaggctcagaccatcactgagactccctggacctagatccagcagatctgcacgacccccaagtccgaaaaacccgcgctggttcaccggtagcggtctctccaacacgctggcaagcgcggacgcgtgggtcgacgatatcccggggattccggaccggtaccagcctgctttttgtacaacttgttctataggtcacctaa

SEQ ID NO: 123887 - DNA, 892 bp, Homo Sapiens
  misc_feature (130)..(130): n is a, c, g, or t
tggcagagcatgctcagctgggccatcagaaagacgattcagcggtgcgcacacacctgtgtcagcttatgtccagtgtatatagcttagctgctcacacatgtatcagcaggggtcacagacgattctnggtgatgctgaagtgcttggatgagctgcgccgctgcagtggcagtgctgatgacagcatgcatgtggaaaagagctgcatggcacatagtgggaaggttggtgctgagccattctgactcaggttgtgatcttgatagcactgcttgatgactttggtttcattttcatcttcaagaagaaagatggggaaactaaagtcttcataagccaaaccattgcccagcgaattccactgtatttctctgcagtgagcaaactctggcccataggaattggagtaaacaccaaacccatcatttgggcactgtacactaggagagaagcctgaggcaggactgggcttggtcaaggacactgcaagaccagcaattcggctggttctccctttcagcttctccattaaatccctggtaaaatgcttgctctccagcagaaccatgtaaggggggttggggccatcagtcaatacccactgtaggtcctcctctttctctactacgtggataacccctgtgtctccactaattgaagactggcagccaatctgatgagtggcgttgagcaggcgaacacagggagctgttttatttaaggggatatatatcttcctctccactgagtttcccctgcacaaacctgctagtaggacgcagaaagacagaaggcgaaggagaccccgacttcccgggtcagccccagagccaccccctgccctcgtgccgaattcggcgcgcctcgacttcatactctctcgccccta

SEQ ID NO: 123888 - DNA, 874 bp, Homo Sapiens
atggcgagagagtatgaagtcgacggcgcgccgaattcggcacgaggggagaggaagatatatatccccttaaataaaacagctccctgtgttcgcctgctcaacgccactcatcagattggctgccagtcttcaattagtggagacacaggggttatccacgtagtagagaaagaggaggacctacagtgggtattgactgatggccccaaccccccttacatggttctgctggagagcaagcattttaccagggatttaatggagaagctgaaagggagaaccagccgaattgctggtcttgcagtgtccttgaccaagcccagtcctgcctcaggcttctctcctagtgtacagtgcccaaatgatgggtttggtgtttactccaattcctatgggccagagtttgctcactgcagagaaatacagtggaattcgctgggcaatggtttggcttatgaagactttagtttccccatctttcttcttgaagatgaaaatgaaaccaaagtcatcaagcagtgctatcaagatcacaacctgagtcagaatggctcagcaccaaccttcccactatgtgccatgcagctcttttcacacatgcatgctgtcatcagcactgccacctgcatgcggcgcagctccatccaaagcaccttcagcatcaacccagaaatcgtctgtgaccccctgtctgattaaatgtgtggagcatgctaaagctataattcaactgggactttaagctgacgacagggtgtgttgctgcaccggctgatatcgtcctttctgatgtgcccagggtgaagccatgcttcttgcccactgcgcgtgacttgcaagcacgaggccctgcgcagttgtgctttcagga

SEQ ID NO: 123889 - DNA, 871 bp, Homo Sapiens
catggcttagcctggcacatcaaaaagaagtttcagcggtgagcaacacacctgtctcagctaattcccagtgtattatagcttagcatgctccacacatgtaatcagacaggggtcacagacgatttctggttgatgctgaaggtgctttggatggagctgcgccgcatgcaggtggcagtgctgatgacagcatgcatgtgtgaaaagagctgcatggcacatagtgggaaggttggtgctgagccattctgactcaggttgtgatcttgatagcactgcttgatgactttggtttcattttcatcttcaagaagaaagatggggaaactaaagtcttcataagccaaaccattgcccagcgaattccactgtatttctctgcagtgagcaaactctggcccataggaattggagtaaacaccaaacccatcatttgggcactgtacactaggagagaagcctgaggcaggactgggcttggtcaaggacactgcaagaccagcaattcggctggttctccctttcagcttctccattaaatccctggtaaaatgcttgctctccagcagaaccatgtaaggggggttggggccatcagtcaatacccactgtaggtcctcctctttctctactacgtggataacccctgtgtctccactaattgaagactggcagccaatctgatgagtggcgttgagcaggcgaacacagggagctgttttatttaaggggatatatatcttcctctccactgagtttcccctgcacaaacctgctagtaggacgcagaaagacagaaggcgaaggagaccccgacttcccgcctcgtgccgaattcggcgcgccgtcgacttcatactctcccccc

SEQ ID NO: 123890 - DNA, 3521 bp, Homo Sapiens
  misc_feature (66)..(66): n is a, c, g, or t
  misc_feature (71)..(71): n is a, c, g, or t
  misc_feature (126)..(126): n is a, c, g, or t
  misc_feature (128)..(128): n is a, c, g, or t
  misc_feature (159)..(159): n is a, c, g, or t
  misc_feature (185)..(185): n is a, c, g, or t
  misc_feature (187)..(187): n is a, c, g, or t
  misc_feature (209)..(209): n is a, c, g, or t
  misc_feature (232)..(662): n is a, c, g, or t
gtagcacgtgtgacgggtctaacaccagtgacgagactaccgaatggtctacgctgagttggagcncacgnccgagggagaagcgacagttcgtaagcgcaggtcgaacagaggcgcacgaggagntncaggggaacgcttgtatcttatgtctgtcgnttcgccactctgactgagcgtcgatntntgtgctcgtcaggggcggagcntatgaaaaagccagcacgcgccnnnnnnnnnnnnnnnnnnnnnnnnnnnnnnnnnnnnnnnnnnnnnnnnnnnnnnnnnnnnnnnnnnnnnnnnnnnnnnnnnnnnnnnnnnnnnnnnnnnnnnnnnnnnnnnnnnnnnnnnnnnnnnnnnnnnnnnnnnnnnnnnnnnnnnnnnnnnnnnnnnnnnnnnnnnnnnnnnnnnnnnnnnnnnnnnnnnnnnnnnnnnnnnnnnnnnnnnnnnnnnnnnnnnnnnnnnnnnnnnnnnnnnnnnnnnnnnnnnnnnnnnnnnnnnnnnnnnnnnnnnnnnnnnnnnnnnnnnnnnnnnnnnnnnnnnnnnnnnnnnnnnnnnnnnnnnnnnnnnnnnnnnnnnnnnnnnnnnnnnnnnnnnnnnnnnnnnnnnnnnnnnnnnnnnnnnnnnnnnnnnnnnnnnnnnnnnnnnnnnnnnnnnnnnnnaagaattcggcacgagggaaaaagacaaaaacaaaaatagatattacagcttaataaaaagtacaactgagcactgtgggctggaggtgggatacccacccgcagcacgcccaccctaatgtgccatctgagggcctggagaaaggacagtgggaaggagacagtaggctcagcccagagatgcccctgtcctcaggggctcaatgtagtttgaccctgacattaaaccttttatgtccttcccagtcaggaaggtggctgggtacaggggtgggggtgaggagcagagagaggtacagggcaggaaggaaaaagtagaagggtcctgaagggcaaattagggtgggtaactagggagttaaacaggagcaagaagcttctatttgtaatcccaaaatctggcatgagtagagaaggaagaggaaatggggaaggggtgatgggaaaggggagcggaggaagggaggcaatttatttatttctccctgtctcttttggatagttccactcttttatgttaatcccaatctgagacaggcccagggaggttccagtgacaaattagtggttgtgtcccagtgggacagatgctctaggaagtgaactgctgagctggcaagaaaagctggggtcctcctcagtatgacacagctcctggctcccggggagcaatgaaaaggacatcagctttggcattgatgcagtaggtgacgatgagggagaagatgaggatgccgaagcccactgtcagggtgatcaactcaagctctttgctggcgatgagaaatatccgggcacggatatctttccagcggctctcagtccatgtagagtattcagtagagctccactgactcagttcaaaggcaggagacaaggccctggctaatcgtgcagtagaacgcacacaccgggggagtcggtccgtctcattagaatgcaaagggccctggacccatgagtactcatacagatccttgttttcacttgggactttacttggatcctggcactgctctcgggtgaggttgaccactgtgccagtcaaatttgccaaggcatactgtacaacataagtggtgttggtggggctggagacagcgatgtaatgttgaagaggcccgtcacccaagtaggaccttaggtcctgcctgaggatagactggaaccatgagttgttggctttaatcaggaacccatagagcaggcgggtaaccgtttggggatcagcctgaactgtgtcgctgaagttggttcctcctgcaagctcatacagagcacgtcccagcaccgtggccacatctgccagggccttgagcagtgtctgttacaaagttcaggtcctcttcagggctcagccattcgggatagctcacattaatgttctcagcagtgtcgtaaatactctggtaatatttgttatggaaggcaccagagtggtcagccagaacaacgccagagatgtttcgagctcgaagaaatcgctgcagggaagatggtgggagaggctgggactgatttggcctcctgaggatgacagcagggacaccagcaccactcttctccaatgtggccaggagatcctccacctggttccgtacagactcatttttctgagaaacaggatctgtgtgcatccaaagctctaatgaagttcttaaggccacctgtcccagctccacaaatgagtcaacattctctaactgcacgggaaacttgcccttctccatatcgtagaccatcctcgagctgccaatgtagtcaaaagtttccccttgaaagaagacaaacatgacattgcggggcagggtggtcacatcaggtgccttttgcaaagcttcagcagcagccagctgggtgacaaaaggaagccactgcgctttcagcccctggggccacattccagaaaaaggaacgactatccagccgggtggcagcaaccacaaccctgtcgtcaggctttaatgtcccagttgtatttataggctttagcatgctccacacattgtaatcagacagggggtcacagacgatttctgggttgatgctgaaggtgctttggatggagctgcgccgcatgcaggtggcagtgctgatgacagcatgcatgtgtgaaaagagctgcatggcacatagtgggaaggttggtgctgagccattctgactcaggttgtgatcttgatagcactgcttgatgactttggtttcattttcatcttcaagaagaaagatggggaaactaaagtcttcataagccaaaccattgcccagcgaattccactgtatttctctgcagtgagcaaactctggcccataggaattggagtaaacaccaaacccatcatttgggcactgtacactaggagagaagcctgaggcaggactgggcttggtcaaggacactgcaagaccagcaattcggctggttctccctttcagcttctccattaaatccctggtaaaatgcttgctctccagcagaaccatgtaaggggggttggggccatcagtcaatacccactgtaggtcctcctctttctctactacgtggataacccctgtgtctccactaattgaagactggcagccaatctgatgagtggcgttgagcaggcgaacacagggagctgttttatttaaggggatatatatcttcctctccactgagtttcccctgcacaaacctgctagtaggacgcagaaagacagaaggcgaaggagaccccgacttcccgggtcagccccagagccaccccctgccgtagccatcttgcctctctgctgagcggaagcccccgttcggctcctgtctcctcgtgccgaattcggcgcgccgtgacttcatactcttcgcaccta

SEQ ID NO: 123891 - DNA, 653 bp, Homo Sapiens
  misc_feature (440)..(532): n is a, c, g, or t
  misc_feature (563)..(571): n is a, c, g, or t
tggctacggcagggggtggctctggggctgacccgggaagtcggggtctccttcgccttctgtctttctgcgtcctactagcaggtttgtgcaggggaaactcagtggagaggaagatatatatccccttaaataaaacagctccctgtgttcgcctgctcaacgccactcatcagattggctgccagtgtgagttgagatggattcatgtttgtggacattgatatttgtctgtgccctagatactaagtaacatccatgtcctgcttaggagatttgacacttatattggactgtatgtaggcagttacagataaccgtctgtcaagctaggcaagataattaataagaactaacatttagtaaatgctgcataccaagctttttacatgtgcatctcaatacaaccccaaccacaaccccacaaaataggtcttacnnnnnnnnnnnnnnnnnnnnnnnnnnnnnnnnnnnnnnnnnnnnnnnnnnnnnnnnnnnnnnnnnnnnnnnnnnnnnnnnnnnnnnnnnnnnnctggtggcccgagcactaagctgagagaccnnnnnnnnngacacggagtttcactcttgtcccccaggctgagattgtgccaccatactccagtataggtgacagagtgagacactgtctg

SEQ ID NO: 123892 - DNA, 407 bp, Homo Sapiens
  misc_feature (87)..(87): n is a, c, g, or t
  misc_feature (92)..(92): n is a, c, g, or t
acacacttatgtttgtacagtatgcttggcaattttgactggcacagtggtcaacctcacccgagagcagtgccaggatccaagtanagtcncaagctctaatgaagttcttaaggccacctgtcccagctccacaaatgagtcgacattctctagctgctcgggaatcttgcccttctccatatcgtagtccatcctcgagctgccaatgtagtcaaaagtttccccttgaaagaagtcgaacatgacatctgcggggcagggtggtcacatcaggtgccttttgcacagcttcagcagcagccagctgggtgacaaaggaagcccctgcgctttcagcccctggggccacattccagaaaaaggtacggctatccagccgggtggcagcaaccgcatcacccgtt

SEQ ID NO: 123893 - DNA, 1115 bp, Homo Sapiens
  misc_feature (932)..(957): n is a, c, g, or t
ttattccatgtttctctgtgggacatccagctaaagaggaaaaagaacgtattttcaaattattctgtctcttagccatagttacctagggaaggagtgaaagccattgagagtccacagacagaactcgcagccctggctcccctgcccctgcaggaggcggggaaggagtgagcttcaggccaggagggtccacggccccctgcagccatcctgcagcttccagtcctcctcctggaccatccctgcactcagaccttctccccggcccaccttccttcctcctctgggatcagacttcggtactgtgtcctcagggaccttcctctgtggccggcacccagtgatccctggctcccagcacacccagctcagaggtcggcagcccctgcccacgagctccagacggccctgcatggccttatgctggaacgtctctggaatcttttccctttctttctgtgttggctgtgtcggggtggtctttgggaagcactatcatccaagggtccctcactccgtggctctctctctgcccttccaggctgagcagcgtgttatgtcccgggtacactctctggagcggcgtctggaagctcttgctgctgaattttcctccaactggcagaaggaggccatgcggctggaacgtctggagctgcggcaaggggctcctggccagggaggtggtggtggcctgagccacgaggacaccctggcgctgctggaggggctagtgagccgccgtgaagctgccctgaaggaggatttccgcagggaaactgctgctcgcatccaggtaggaggtggaatacctcagggtgggaggtgggtgacacccataggaaagcgtgaaggtgcccagcagcagagagaacaagtgtcatttgggatcagacagctctgccattttgcagttactccctttctcnnnnnnnnnnnnnnnnnnnnnnnnnngagacaatatctcactctgtcacccagcccttctccccggccacagaggaaggtctctgaggacacagtaccgaagtctgatcccagaggaggaaggaaggtgggccggggagaaggtctgagtgcagggatggtccaggaggaggactggaagctgc

SEQ ID NO: 123894 - DNA, 2874 bp, Homo Sapiens
ttttcagctcttgggcgtcatttattttttgcataggcataaattaggatctggagataaaaaacttaagaaccaatagtgcagcatttgtgacaggagagcgcaaaacaaaccctggctgcctcgggatggagcggggcggcctcaccaccactgcatccagcctcatgctccagagcggatttgaggctcagtgctgcagtgaaggcctgcccgccttcttgccccttccccgcagccagaccaccagacacagccggaaccagtgccccaggcccctctccacggccaggaacaagaaactgagtatcacccagtgccccacagaacggggctaggaatcaagcccttagcttttcagttagaaaaacagaccttgaaaaatatatacataatacagtggggcctgctggctctaaaagtcccctcctcccccttccctatccagggtaacttctgccagcctcttcccccagcccccaccaactgccccacagagaacaaaccagaagggcgactacctgaacaagagctgcaagagcccaagggggcagcctgagcggacgacccctacatcagggcctggttagatgtgggggccggtgcagacagacctcgcaccccgataccctgaacgtccccacaagagcccaggagttccatgctccccactcttcttgctataaccccagatgctaatggccccaaagacaggtctaggtctccataccctgggagaatgtggaaagcaagctcaggggcactggcaggccctagcaggaacagggagcagggtgggccccaacctagcatcaggagagagaaaagcaactaccgtccccagcagaggggaagcctacagggttggccctgggccccttagaagatcacagcagccagtcccctttagggcacaagaagccccatggcccactgctaccctccccgggacaaatacacacttttgtcgaaggccctcagggaccctgtggttcaggcttccctaggtggagggcactaaccttgtaggagagctgggcagctctccatcaagtgcttcctgcctggggaagtcccatcctgctctggagctaagcaccctcctcccagagggcctcgcttccttgcccaggggcagaggcagctcacctagcccaggccgtagcttgcccctcccacagccctggcacctgcttcatcagctcccaggcaccagcccctgaccccagccaagaccagtcaggtcctacctctcccaacttcccagtcccccatgatatgctacatatatacacactcccaggatgggaagcagacgccacgggcacagagggaaggaagaagggagctgctggagcctgctaaccgcctcgagccacctgctgctcaggagaccctgcccgtccttttcatctgcatggggccacaggctcctctcttgtgctcctagaagtcagagcgccgagcaagcgtgtgggggaagcggcggggtgctgttcacccactcccagatggctggcagcaggcaccagtaagcagggctagtgggcgggctccccatgcactgtgaagcggtagatgcaggtgtactcggggtggccccagttagtcaggatccgcagctccaccacctggtacgtggccatcgtaggggcctgaaagtgaaccgtctgaatagggctcgcggtcctgatcgtaagtgaacttgccaaggagtgtcccctcctgctgcaggtcttcgtcaaacccaaagatggcgaagtccttgggggcactggagatagtgctgttgggtgacaaggcccttgggcacatgctctaaggtaacggctgtggggcggatgcgggcagagaggcggaccacggcgaagcccttgtggcccctggaaggcccagcagttgcctgggtgcacatctggctggaggatgactcggggtgactgggagtggtaccacagggggatgccgaagaggctgaggagggccgtcttggtctcgtaggtctcagaacatcgggtgctgatgacgctggcccctcctgactccagggcgtagtctgccagcccgatgcggtcctcactgtagcgctgcagggcctgcttcacgatgtggtgcacctgctcctctgtcactccaatcacaccttctttctgcagcgtcaggctcagggaggccgcggcttccctggccgacttgccctgcatctctgccacatgggtgaggatcttgctctccagttctggcagctgagcttgcatctcctctttctgaaggagccccacgcggccccctccacctcgggcaaggaactgactgatccaggccgggaactgagattccacgtcgtcccgcacggcctggatctgctggggcagcaggcccacttcttccgccaccgagctctgcttcagtgccagagccgccagctcctgctgcaggccggccagctggtcctccagccgcctcagctccttcacagagctctcctggaaggactcctgggtcatgctttgccactctgacttcagctgctggatgcgagcctcggactcctgggaggcccgggcgatcttcttgaagaggtcttctgagtcttgctgatgctctgctctcagggcagacagttcttcctggatgcgagcagcagtttccctgcggaaatcctccttcagggcagcttcacggcggctcactagcccctccagcagcgccagggtgtcctcgtggctcaggccaccaccacctccctggccaggagccccttgccgcagctccagacgttccagccgcatggcctccttctgccagttggaggaaaattcagcagcaagcctcgtgccgaattcggcgcgccgtcgacttcatactctctcc

SEQ ID NO: 123895 - DNA, 800 bp, Homo Sapiens
  misc_feature (68)..(68): n is a, c, g, or t
  misc_feature (785)..(785): n is a, c, g, or t
gcggccgcaagtgcttacttttttggatgtcatttctcagcgataaccttactttctactttcactanaggaaatccttggagtttcactccaccaggagataattttcaccgacttctcatctgccagggtctgtgcccactgcctcccacagatgagctgttcgaactgtttggctgctgtctaaaggcaatgctgagcgcatcctgggtcctaccctccagccttttccaggccatcactccacctctctcccgcctgtgtcacctgatttgtctttctgctggattgctccatcaggatacacatgtccatcctctgaaaagaaacagacactcagtgaccatgttcatctcaccagctgccaccttcccctggctcctctgtgtgtaagctctctttcacagggccattggagctcgctgttttcaccctcagccattctcttttgaacccactctagtttttgccccagtcacttgttccacaaaagctgccttgtccaggccactgttggtcctctggttgcttaaaccagtggtcagttttcagtcttcattatgcttgacatgatgacaggggtcttccccctgctccacctggcacagtctctgcatgatagctgggccttctctgttgtcctccgcccccaccactgcctgtcctctgcagggcactcctcgttcttatctcctgcacatgggagagcacatagttcagacctgggccctcttctcgctctgtacttattccttgggagctcgcagccagttttatgaattganataccactgatttgc

SEQ ID NO: 123896 - DNA, 1383 bp, Homo Sapiens
  misc_feature (198)..(206): n is a, c, g, or t
  misc_feature (317)..(329): n is a, c, g, or t
  misc_feature (340)..(479): n is a, c, g, or t
ttaaggttctaccacccccctttgggagggcttccccctggggggagaacctttattaaattcaacccctcttctaataatgtcccgggcggggggggaatttgaaatgggaccccccggggccccctttgaagaatcccctaaaacccccgaaagccccttgggatttttttaaaaccttcggtttcccccgggggnnnnnnnnngggggggatccaaccctttttctggccccggtttttttggggaaaagtttggcccattttccttttcctttggggcccgcggcccaaaaaaaaggttttaaaaattttttnnnnnnnnnnnnngcgcccaaagnnnnnnnnnnnnnnnnnnnnnnnnnnnnnnnnnnnnnnnnnnnnnnnnnnnnnnnnnnnnnnnnnnnnnnnnnnnnnnnnnnnnnnnnnnnnnnnnnnnnnnnnnnnnnnnnnnnnnnnnnnnnnnnnnnnnnnnnnnnnagtaggttcaaagcctttattattgctattatgtataagcctagaaatggtcacttcccaacaaaaaatacatcccttgttatacttaggacaagttgtaaaccccctttgttttgacagtagaattgttccagtgaatcatttatttccggtgaaccccagacacgataagcagtgtggtctttaaattttattagttggttgtcaccatcgcactaatagacaatctccattttccacagaataaaactgtaatgactttaggtcattttccagctcgatttctctgcccggctttttgggactttcataggacaacagaaggtctgacacaggaactttgagaagacgtgacagcaatcccttcaccttttgaattgtcatggagcccggcagttgtttctccaggactttctgatcaagttgatgagggtattttatcttcagtgttagtagctggtttttcagcataagtggttgctgtgttttgagttcccaatcttcaggtgcaccatatttcaggcagaggaactggtatctgggatgggctgtgaggaattcttcgctgagtctgtttttttccggatccttatgtccaccagcctgtttccactcatttccaaaagcttttcggtagtcaagctcagctctccgcctctcctcggggagaatctcacatttgttcagcgtctttagctgcccaatgctggcgataatgaggtagtcgcgccgtctctgcttctttgtcctctttgtgcagggcgttctttagccgacaaagcccgaagacttggtaactctttagctcattgaaaaacgacattgggtaattggatgccggtactaccaggacctaaaggatggaaacctgacgtttgcccaattccaccttcggaaaatgtaa

SEQ ID NO: 123897 - DNA, 767 bp, Homo Sapiens
accttctgttgtcctatgaaagtccccaaagtaagttgcccagcaaatacaagtcaaagtcaagcttagtcctcgtattatgacattaaactgtctctagatagcaacagtttgattctaaatggagaccatgggtctgtttgtttgattttaagggtaagctactgcctggggacggggtgggggaagagtatgtgtagcatgctttatcggatctgtcttaatcacatccttccccaccttcgttctaattttagaagccgggcagagaaatcgagctggaaaatgacctaaagtcattacagttttattctgtggaaaatggagattgtctattagtgcgatggtgacaaccaactaataaaatttaaagaccacactgcttatcgtgtctggggttcaccggaaataaatgattcactggaacaattctactgtcaaaacaaagggggtttacaacttgtcctaagtataacaagggatgtattttttggttgggaagtgaccatttgctaggcttatacataatagcataataaaggctttgaacctactaatgattttctgatcttatttcatatttatttttacagctcatcctgcatttcatgataagatttaaatattaaatagaaagaaactagctagcctaataaaatctgaacacagttaatatctgtcataagactagttttaatggaattctctcattgaaactactattttaaagggttactagaaatgatttggttggtcattttgggtat

SEQ ID NO: 123898 - DNA, 1657 bp, Homo Sapiens
  misc_feature (156)..(156): n is a, c, g, or t
actgtggggggccttgaaagggacaaggatttcctggcggcctttcccccagtgggtaaacaggccttccccttcccttccaaggccagaggcaaaaggttggtagggggccctctcaagtccccaagggagggaggttggggcagggggaggggnctggttctccccctcccccagcctaagagctgtgcccctgggaaagctgggcggggaagagggggctctatggcaggcacttgatgtccaccgttctcagactgggggtccaaggcaggaaccctgcccccaggaagcagaaccggaaggggccaaggggcccaaatttggcagcagagaaacatggcagcatggacagagacagaaaaagggagcagcaggcagggccccccaggtcccctgagaataggggaggaggtttgaaggcactgacacggggcctggagctcacggtcctcagtgcagcctgctgcccctacaccgcctggtggggctggtgggggagacgcccgcttccccatggcactgagtgtggcggcggcccatgggttttcctaacaaaggcctgggcagtcttcctgggaggaggtgtgggtatcattggtcaggggcaggtcctggccccatcaccctcactagctccctggccgtggctgcctgagcactgagtacacgtcgtccacacggctgagttgctcgaagaaggggaggaggtcgtggagctctgtgtcactcatgttgtcaaaccacgaggccaccggtacagcattgtctggatggaagacataggaggcaggtgaattgtccaggatgagcacccgccgcaggtctcgacccaaccggctcaggtccttcacgtagttcccccggtggaagacgcaggactctcgaaacagccgggcccggaaggccccccatttgtccagcaggtcagctactgggtctgcgtacttggcgaggctagcagtgaacagcacacattcaaagagctcgcccattcgctgcaggaactcatccacatgaggacgcttcaacacgtagacctggtggaccaccccatcaatctccacagggatgatgaagtccgcgttgttcactggcttgaaggagctgtgcaccagggtctcgtccaggtcgatgaccacgcagatcttgtctgagtcctgggccttggcctcagggagcaggtattggactggggtcttagggatggcgccattctcctccacaagcaggggcgccccgctgtgagcaggcagggcctccccatcatcccggcagacacagcagaagagtgagtggaggatgccccggcttcggggcttctgggaagctgctgacttctggtcacctcatctgtaaaatgggtcttctctcctgtctggtggtcgcagagatcacctcgcaaggacgtcaagagccagcgaaggctctgctggcctgaaacaggcgctgttcctttcgcgtagccaaattccaccgacctcgaggaaatgccaccttctccaggggccttcccagaccccctcccctgcccgcggtcgccggccgccctgtgattactgggggtgcggtgggagtcactggactcgctgccgatcctaggagcccagcacggcgccgcacgcggtggcccaaagatcccgggaattccggaccg

SEQ ID NO: 123899 - DNA, 1149 bp, Homo Sapiens
  misc_feature (37)..(37): n is a, c, g, or t
  misc_feature (60)..(83): n is a, c, g, or t
gtgctaagctaaaattaccctcactaaagggaataangcttgcggccgcatacgcggtcnnnnnnnnnnnnnnnnnnnnnnnnctggctttctctttagttctcatcacactagggctctcagtcacagagaaggcacttaaatgggaaggccacctgatgcaggccaaccatattcaccccccgcccacccgctctgggggaggggagcacaacgacatcaccacttgacatcccccttggcactggtatgtgggtccccttaaccgttagaccctggggagagcccaaggccttgacctccggaatcgccatgttaggaggaggggcttcagaaacagttggaaggcaggatatcctgggagctgcccccagccagcaggggatcaggcagggggctgtaggagatgggttggcacaggggaaggggacagcttggtcgggcttcctggagatccccaaaccccacagaaggtcccacctcctacagatcccccaaaggcaccggtgaaggatgggcaaggaggcactgatgagctggcgtagagaccccccacacacacttagctggtgggcctagcatatgctgggcacagaaggtgctcaagaaatgtttttttgaatgaatgaacggagcaaaggggtgtgagggacagaggacagggcctgggccccttggcccagcttgttccattcagaaaatagcagtttaaaaaatgtaaaaatcctttccctccctccccccaacttctgggcccaggaaaggggcaagggaggggtgtctctaccctgacccttccctctctccttcccctaaaaatctatatacacatgtacatatttatatggcaccacaaggggggtcctgcctatgcccccacgctcagagctgggggagccaagccccggggctggttaaggcagaagtctgaggtcattgcttggatgatgcagggagcagccctcagctgtcggccctggagaagctgcactgtggggcctgaaggacagactcctgctgccttccccagtggtaacagacctcccctccctccaaggcagaggcaaaggttggtaggggccctctcagtcccaagggaggaggtggggcagggggaggggctggttctcccctcccagcctagagctg

SEQ ID NO: 123900 - DNA, 940 bp, Homo Sapiens
gggtttctatgcgtagcaggacgttcaatgaccttcagcatggccccattggttccaatcttttacaattcgactttacgatgatgctgagcaatgggtcttagtggattgacatacgcctcacttcctgtcttcagaatgttccctcttagagtccctcaaagcaagttcaccaactacaacttggatcctggttcacgcagcatactgtataatgtcatttaccagggcaccatctacttcagagtctccatgaagattatgcatcttggcacatccaaggactgccactctcctgacatatgaagccttatcccgcagaccattgagaataggctgttgtatatactcctgcacaccaggcatcctgaggctacacatgctccgtaacgccagccctcgcaccattggattggggtctgagcagtctttgcacagcgtattgatggccaggagagccagatctggtttcaggggagcatatgtgcacatgtacagataaaccaacttcttctggacaatatctacagtggcactggccttcaccatttccataaaaacaccagacatgtccaagccttgagtcatgtacctaatcactcgctggatgacattccggtagcgcagcctatcagcttgaatgtgaggattgcacagagccttcttcagctccttcaccacgtcctcggagccaaggtacggcatcttcctaagagtcacagggcagctcccacagctcccacggtaactcgagggctccttctcgtcctgatgtgggagccgtcggccggcaggccgttcgccccgcccacagatcgctcccgctacttctaggtcctccgccggatttccagcgccgcgtccgactgaccgcagacccctccctctccagttccagccttaattccccctccacgccgttctcatcgcggcctcgtgc

SEQ ID NO: 123901 - DNA, 1070 bp, Homo Sapiens
  misc_feature (923)..(1012): n is a, c, g, or t
tggaatatttcctttactcaggctcccacatcaggacgagaaggagccctcgagttaccgtgggagctgtgggagctgccctgtgactcttaggaagatgccgtaccttggctccgaggacgtggtgaaggagctgaagaaggctctgtgcaatcctcacattcaagctgataggctgcgctaccggaatgtcatccagcgagtgattaggtatcacctacctcccttcgcgtgctaactgctccctttgcaatccccatcagggctcactagccccagtctctctgaaagggtgaattagctttcacacgtggcagttatatggttcggtcttcgtcctgctgctttggagtaccatgtcagtctcccctctgcagcatcttttactcagctgggtagtttgctccatatcacgggcttgagcaattactggtgactcttggatctataatatagctagtacagacttccttttttagcttcagacccacgtatcccactggctggttggcattttcacgtgcgtggtttatcaaaagtatgtgcggaatagcccgggcattcttccgtcttcctcaaacctgttcagcttacatttgtgttgatgaatgccaccagcagccgactatgcgtgggagccaaccttgaggacacctgatctctcacttcttatgtcagatggtttgaattcataattctaaatatccatcctctcttgtttattagcattgttgttctggtccaggccttcatcaataaagcaattgcagcagcttactagtaggccactttgcctcatttgagacagaatttttccattatacatacctgaacacataactcttgcctacagctatggttcacaaactttactatgcataaaaatcccttggggtgctttttgtcatccagtccagggactnnnnnnnnnnnnnnnnnnnnnnnnnnnnnnnnnnnnnnnnnnnnnnnnnnnnnnnnnnnnnnnnnnnnnnnnnnnnnnnnnnnnnnnnnnacaataaagtccaaacttatcacagcacccaaggaacaagctgttaattcaactacct

SEQ ID NO: 123902 - DNA, 1838 bp, Homo Sapiens
atagtgctcaaacattttaatcatttctgccctgttactcccaccccagatccaagcgccagcccagttccggtgggggctcagtcctccggagtccaggagtcagggctcgggggcgctcagcggccagtgggcaagattggggcctttcctgtcctcgaagctgcacaaaggtggccccagcccagaacacagggagagggcagagagatgtgctcatcagtctgggcaggcgggccgggagcagtcttccagaaacaggtgggagccagggctcattttcatagccaagggtcccaggagctccccaggagctcggccaatgggctggtccatggtgggtgaggggccagaggctctggccattgctacaggcagtaaaactcctgactctcagtgatggtcccaaaaagcacacccagaagaatgggctcaaagatcaagatggggccccagcctcccgcagagtcctgaaggaaggagtggctcaagtcaggccctgggtccaaaggccatcagggaaggaccaggctcctgtccttgagtgtgatgcatccatcctggaagtagggccagctcagtgctcgctgagccatggggagaggaggcccagagccaggcccagaggcaggaaaaggatgggcctcagcaagccctgggctggggcagagctgaaggccaggtggctgccacagaggttgctgtcgggctgggactcctgggtttggggcaccacacgaggctggagttctgtcaccttgctttggatccaggaggcatagctggaggccagagtgtacacaccaggcctgttgcgggccccacaggcatctccccagctcacaatgcccgtcaggtaccagagaccctccacagggcaggagagtgggcccccagagtcaccctggcaggcgtccttgcccccctccacatagccagcacacaccatgtcctcttggacaaagtgcggctcctcaggcttggcgtcgatgttgtacaggcagttacacgtctcacgactgatcagaggcacctcgagttgctgcagtggcttgggcgtcaggaggctcactgagggggccacatgaccccagccagtgacagtgcagtggaggccgttggggaaggaggcgttggctgcagggaggcagatgggccggatgtagcgggagaaggtgatgggtctgctgagttggaggagtgcaatgtcgccctgggagccctcctggaggtagctggggtgggggatgatgtccttcagggtgctgaccttggcgtcctcggagtaggagtctagctggtgggcccccagcttgacctcataggcttccttgtggtgctcgctggggaagcagtgagcagctgacagcacccactgctcagacacgagagagccaccacacacatggacgccttcataggtgatgctgacctgccagggccactgaccggcgactgcactgctgccacctgtgatgcgtgcttggggggccacaccgcagggagcttctgccccttccgctcctgtccccgaccggagtaatccaagatagagcagaatggccacagcccccagctgcccaggccccaggacccccttctgggccatggcccaggacaagggcccctggggcagactccaggcacgcaaggtaggaagccttggggtggtgtcgaaggcaggacccagatgttggctcagagggaaggatcccagaatccgggctggaaaggggcagcaagtgtccaaggctggcctctaaggcagggagcggccgcaacgggagacgcctggagtatccgaagcgagcagtgtggacgagtcaccagcaccgtct

SEQ ID NO: 123903 - DNA, 553 bp, Homo Sapiens
  misc_feature (386)..(394): n is a, c, g, or t
tttgacagcccaggagataactttattgaaacgcaaatggcattgaacagatgaatcttgctgggaggagacatgccagatggacagagggcccagattgggggtggcctcagtggtgatgaaggaaggcctcttcagctggctctggcatgaattttatttttaaataatttgttatttaaaatgaattactgaggggacagcccggctctctcttcatgattgttaccgcaactatatacaacagtttgctttccagattcaatttcgctttttctacattagatataaaagggggtaggttgaaagaggggagggtcaaataaaaaacataaacacacagacatacacatatcctggtttgggattttgcacccaataacttnnnnnnnnngtgttgcaaaaacttctgcccactctccacctgaggaacaccatgcatttgagaaacacggactctgtcacataaacggtgctgcctaaaacagtatggaggcggggaaggaagctagcaggggttggaattcattttgaaaaaagattgttttgttag

SEQ ID NO: 123904 - DNA, 924 bp, Homo Sapiens
cccctctttgtgttttctttgtctgtgcgtgtctatatctcaaacaacctgtttatttgggcttatgatttactaactgcaggtctatgtgcaggaaggccagcatcccctcctgccgttgtcacccacatccacagagcagccctagtgccaggtgcagccactgccacccacggcacacgggaacaggacccatgctgcaggcctgctctcctgcccagggagatgccacgtgtgtctgtccggcagcttcatgacacagttaccaagcagctagggagggcttagatttgttggtgtccccaggcctctccctcgggggcttgggcgcatccccacagcccccaagggatgggggctctgccacggggcccaattccacagctccacggctggcgcccctcccgtgcccatggggcagagccaagtatttccagaggtggcttggaggccctggggtggcggggagaggaacagggagagcatgagacagacccacagggctgaggccaaccctgcttttatttcacaagagcttctcgatggctgacaggagctcgggtttcaggatggagtccggctcggcccccgcggccttgatgtcctccagcacagccatgtcccacgagaaggtcaggagggcagagggcaccagcccgcactcgttcaaggccaggttctcgtcctcggacagcttctgccctcccgaggccagcagctcaaaaggcagccagtcgctctgcagggcctcccggacgaacccgtacaccgcccccagccgcttccgagcgtagaaagtgccctgcaggaggcagccatcggggaggcgcacgcgcagcagcgtgtagttgtacttgcgcagcccccgctgctcctccttctcccgcatggccttggtccgcagcacgctcagccgctccaccg

SEQ ID NO: 123905 - DNA, 1367 bp, Homo Sapiens
  misc_feature (19)..(19): n is a, c, g, or t
cgcccccgcggccccccgncgccgggccagccgccaccatgaagaaattctttcaggagttcaaggccgacatcaagttcaagagcgcgggacccggtcagaagctcaaagagtccgtgggggaaaaggcccacaaagagaagcccaaccagccagcccccaggccgccccgccagggacccaccaatgaggcacagatggcagccgctgctgccctagcccggctggagcagaagcagtcccgggcctggggccccacatcgcaggacaccatccgaaaccaggtgagaaaggaacttcaagccgaagccaccgtcagcgggagccccgaggccccagggaccaacgtggtatctgagcccagagaggaaggctctgcccacctggctgtgcctggcgtgtacttcacctgtccgctcactggggccaccctgaggaaggaccagcgggacgcctgcatcaaggaggccattctcttgcacttctccaccgacccagtggccgcctccatcatgaagatctacacgttcaacaaagaccaggaccgggtgaagctgggtgtggacaccattgccaagtacctggacaacatccacctgcaccccgaggaggagaagtaccggaagatcaagctgcagaacaaggtgtttcaggagcgcattaactgcctggaagggacccacgagttttttgaggccattgggttccagaaggtgttgcttcccgcccaggatcaggaggaccccgaggagttctacgtgctgagcgagaccaccttggcccagccccagagcctggagaggcacaaggaacagctgctggctgcggagcccgtgcgcgccaagctggacaggcagcgccgcgtcttccagccctcgcccctggcctcgcagttcgaactgcctggggacttcttcaacctcacagcagaggagatcaagcgggagcagaggctcaggtccgaggcggtggagcggctgagcgtgctgcggaccaaggccatgcgggagaaggaggagcagcgggggctgcgcaagtacaactacacgctgctgcgcgtgcgcctccccgatggctgcctcctgcagggcactttctacgctcgggagcggctgggggcggtggtacgggtttcgtccgggaggccctgcagagcgactggctgccttttgagctgctggcctcgggagggcagaagctgtccgaggacgagaacctggccttgaaacgagtgcgggctggtgccctctgcccctcctgaccttctcgtgggaacatggctgtgctggaagacattcaaggcccgcggggggcccgaaccgggactccattctggaaacccgaagctccctgtccgccatcgaaaa

SEQ ID NO: 123906 - DNA, 948 bp, Homo Sapiens
  misc_feature (923)..(923): n is a, c, g, or t
tgcttatataacatttaatctgttactaataatgactcaatcttcaaaaggactctgagatagacattatccccatttcacagattaaaaaactacggcacagacaggttaggtcatttgcttagggtcacacagctagtgacaaagccagtattcaaactaggctgtgaaaacatgtaaggtctccagaatgcagtactcagtaaacattcatttatttcctgccagcaggtgcagtggggccccactggggaggggactggtgttctaacaggagcgagaaaatgaaggaggcctggcttaagaccagacatttgaagaaggctccaggcagggaaaggaaaggagaggccaggcccacactgtcccctccctgcccccacgtctccagcaacacaaggcggccagtggaccgtgaaccatttatttccaaactataaagaaacctgctctctgagaaaagacactgcccaggtgatgaagctccagcccctggaggtccaaaacccagtccaaactcagtccctttagaaagctgctgtgccttggaaatgagtcttctgcaggagcatctgggtgagggtccagcgaatgccaccgatgaacgaggcccccagcaccaaggcgaagccctccacgttgaactgtgtggacttgtaggtgaacatgaagagacccccggcgatgaggaggaccaccaggaccagtgccgcgcgagcgagacggtgacatacaggaagctccagttggacaagcccacgtcaagcgccgtcgccagagctgtgggagccactcttctgaggtagtcggcccagctcagcaccacacgggccctgtggctggagcactgaaccagcgccctggacagggcggagaagaggaagatcacggccaggtgcagcatcgtcatgaagagggggaanatggagctctttgtcagcacttgtt

SEQ ID NO: 123907 - DNA, 2062 bp, Homo Sapiens
  misc_feature (50)..(50): n is a, c, g, or t
actcagtaaacattcatttatttcctgccagcaggtgcagtggggccccnactggggaggggactggtgttctaacaggagcgagaaaatgaaggaggcctggcttaagaccagacatttgaagaaggctccaggcagggaaaggaaaggagaggccaggcccacactgtcccctccctgcccccacgtctccagcaacacaaggcggccagtggaccgtgaaccatttatttccaaactataaagaaacctgctctctgagaaaagacactgcccaggtgatgaagctccagcccctggaggtccaaaacccagtccaaactcagtccctttagaaagctgctgtgccttggaaatgagtctcggctgtcagagcctgggaagtggtgggaagaaccagcccactcccctctcctgctgcgattccagcgcagcttgggcccagctctggccagtcccaggctggcctggtgctcgccccttgtgtgaccaggctctgaagggaggggcaaaagtcatgagtccctggcttggccccaccacctggtgactcccgtccacagctcccagctaccatgatgagccctggcggcttgagcacagtgagtgctggcagcaggctggggagtggcctgcttctaagccatttgccctggctggtcactgctgcccctgggccacaaagtactcctcctcctcattgtcaccttcctcccgctggctgctccggagcagcagctccaggtcggggctggagcccagccccttcaaggccttggggccaccatcacctctggaatgcagggctttgagggcaacgtggagggatattcccgagaggcagagggcgaagcccagccagttcaggaggctgatctgatcgcccagcagatgagctgccaacagcaaagtgcagacttccttaaaaatgccggcaatggagagagtgaggctggaggttctggagaccaggaggaactcagagaagcccaaaccaaaggcgagaatcccgccaaggaagaggctcccaagtacccgcaggagcagccctgtgtcctggaaacggaagattttctcagatgtggacaaatggagaccttcaaatacagcaaagagagggaagagccccaggaacatgagtggctgcaggtggaacatggtgtcgatgggattctggaggccgagttcagccttctgcaggagcatctgggtgagggtccagcgaatgccaccgatgaacgaggccccccagcaccaaggcgaagccctccacgttgaactgtgtggacttgtaggtgaacatgaagagacccccggcgatgaggaggaccaccaggaccagtgccgcgcgcagctcctccagcttgaagatcagagagaagatcaagatgaagaggacagctgaggatttggtcattgtgtacagcgagacggtgacatacaggaagctccagttggacaagcccacgtcaagcgccgtcgccagagctgtgggagccactcttctgaggtagtcggcccagctcagcaccacacgggccctgtggctggagcactgaaccagcgccctggacagggcggagaagaggaagatcacggccaggtgcagcatcgtcatgaagagggggaaatggaagctctttgtcagccacttgttgtagaaggtgatgccgatggagaagcagtagtagagaagcaccagccccagggtcaacaccgccttccacaaaaaggccacatcgagggcccacctccccattcgtggcggctgcagcaccggagctcctgagtcagcgggggcaggcacccctcttgaatacaatgtgcaggaagagccggtggagttagaccacagctttcaccaagaacgtctccaggctggaggagctctctgcagctccatgattcggaaccatcagcagagccccaggcagagtcctcacctaaggggctggtggctggtgctgacccttcccatggttaattggatgcagcgctcacaggtcccaaggtctgctcggccctgggagctccaggccggaatctccccaccggaagtgcg

SEQ ID NO: 123908 - DNA, 976 bp, Homo Sapiens
ttctggatccagtgattaagagatactgttttatttttttaaaaagttatcctcaaagtttcaggcgtgactgttcacctacacataagcaagccaaaaaacagtgtgtggtaaaatcagtggtggaagagccgaaggttcgtatgagcgaggatgattcccagttcgtcgcaggcctcaatcacaactttgtcagcagcagaaccggagggagccgcaatgtacgccacaccactccttttagctctgtctacgttatctcggaaagggaagaaggcatcagagctgatagaaacttcagtcagtttctcaacccattccttcttctctgcctcagtgagtaactcagggacttcctcaaacagtgccttccactttatcaaatcttcatcctcgccaatggttccagtcacatattgatcgatggcattggagatttctgctctcttcactcctgttttaaacttcatcgaaagcacttgtggatggtgtctaagccaccaatagtttgccttatctcctgcaaggcgagtgcagtgtatacgagactgctgtcctgctccaatgccgataacctgcccgttcttggcgtagcacacagagttagactgagtgtacttgacagcaatggtggctacgatgaggtctcggagggcagactctggcaaatctttatttttggtaacaacattgctaaataatgacttgtcgacgacaccattatttctcttctggcttaaatgaagaccaaagagagttcgaacttcattttcatctggtttgtaagattggtccatctgaaggacacaatagtttccatttttctttttggaaagtattgtcaaggcttcttcttcatatcctggggcaattataccatcagatacttctctggaaataatttttgcagttggtacatcacaaacatcggacaatgcaacaaaatcaccaaatgaagacatcctatcagcccccc

SEQ ID NO: 123909 - DNA, 1418 bp, Homo Sapiens
  misc_feature (45)..(167): n is a, c, g, or t
  misc_feature (188)..(198): n is a, c, g, or t
  misc_feature (222)..(232): n is a, c, g, or t
  misc_feature (247)..(385): n is a, c, g, or t
  misc_feature (1217)..(1218): n is a, c, g, or t
  misc_feature (1352)..(1352): n is a, c, g, or t
gggggccccgctggggccccctcctgtttgaaaccccccaaagannnnnnnnnnnnnnnnnnnnnnnnnnnnnnnnnnnnnnnnnnnnnnnnnnnnnnnnnnnnnnnnnnnnnnnnnnnnnnnnnnnnnnnnnnnnnnnnnnnnnnnnnnnnnnnnnnnnnnnnnnngtttctttttcctttgggggnnnnnnnnnnnaaaaaagtttttaaaaattttttnnnnnnnnnnngggcccccaatttcnnnnnnnnnnnnnnnnnnnnnnnnnnnnnnnnnnnnnnnnnnnnnnnnnnnnnnnnnnnnnnnnnnnnnnnnnnnnnnnnnnnnnnnnnnnnnnnnnnnnnnnnnnnnnnnnnnnnnnnnnnnnnnnnnnnnnnnnnnnctattggaaaagtaattatttattatgacaaaaataaaactgttgaatgaaaacaaatgaatgttacactatattgcaccatgattggaaatgagccaaaacctgtctaaaagatgaacattccagagcaaacagcatcgttttacttgggttaagtaggcatgcaaacaactcattataacataattgcagaaataaaaattatgagtactggcaacctaaacttaacatataaaagaagcacttcataactaataaagtattaaaaactttaaaacatgtcatttaaacaatcccaccatcaggaaaacatgctttgaaccattttcaagaagtgatcatgtgaatgcattaatttacttgttttaaattttttgttgttgttgttaatgcttatatattggaccaatggaacacatttgtttggctggggttcagacacacagtttgtggtgtgaaagacatttttctttcctctgcacaataccggaggacccacagagcaatccaattcctaattctgaccttattaataccatcttccagttgaccaagcatagtaatgaagatattcttagagctttcgcagaaagcctgaagcttaaggagtaacaacagtttgtatttaaatcttaagaaatgcacatatatatgaatatagacactttagagttgttttgcattctgaggcaagaataataatactgagtacagggcctgctgcttcctcttttatgctcttaagcacaatttatgttaaatagcaagtgtgattatatcatcactctgattagataacgcacaccaggttgtaatgctgtacgttttggtnngtgtgttttaacagcctgtggatagaaacatggtaatttgtactatctgtattgaaaatcagacgtttatttaacttcactgaatagcactaactttttaatcatataaagtttgtactaactcacattatcanaagataataggctcaaatcctattctgaggaattaaataatgtaggccttgtaaagctattgaaaa

SEQ ID NO: 123910 - DNA, 424 bp, Homo Sapiens
  misc_feature (145)..(354): n is a, c, g, or t
acatttttctaaagaaatatttaattggtagtcttctagaaagaaggcttttcatatagtacaaaaacatgcagtcggaagcactgagaaaactgggcaacataagagaagcatgagatgtgacatgaagcagctgatagtctannnnnnnnnnnnnnnnnnnnnnnnnnnnnnnnnnnnnnnnnnnnnnnnnnnnnnnnnnnnnnnnnnnnnnnnnnnnnnnnnnnnnnnnnnnnnnnnnnnnnnnnnnnnnnnnnnnnnnnnnnnnnnnnnnnnnnnnnnnnnnnnnnnnnnnnnnnnnnnnnnnnnnnnnnnnnnnnnnnnnnnnnnnnnnnnnnnnnnnnnnnnnnnnnncaggctctttgtagcaataagataacatgacagataacaggccctgagagaaatctaagtattttacccc

SEQ ID NO: 123911 - DNA, 496 bp, Homo Sapiens
  misc_feature (146)..(358): n is a, c, g, or t
tacatttttctaaagaagtatttaattggtagtcttctagaaagaaggcttttcatatagtacaaaaacatgcagtcggaagcactgagaaaactgggcaacataagagaagcatgagatgtgacatgaagcagctgatagtctannnnnnnnnnnnnnnnnnnnnnnnnnnnnnnnnnnnnnnnnnnnnnnnnnnnnnnnnnnnnnnnnnnnnnnnnnnnnnnnnnnnnnnnnnnnnnnnnnnnnnnnnnnnnnnnnnnnnnnnnnnnnnnnnnnnnnnnnnnnnnnnnnnnnnnnnnnnnnnnnnnnnnnnnnnnnnnnnnnnnnnnnnnnnnnnnnnnnnnnnnnnnnnnnnnnngctctttgtagcaataagataacatgacagataacaggccctgagagaaatctaagtattttatcccaaaacaaatttctcttaagtctgataagaaacatttacaatctattctctctgaagcctgctaccttctgg

SEQ ID NO: 123912 - DNA, 351 bp, Homo Sapiens
  misc_feature (262)..(274): n is a, c, g, or t
aggtcatcatctaaagatttacataaacttttgtataaacattcagttcctttttttactcataaaagggtttcagcagaaaaagtgtctaatatagatacctagaaagggtactcagttgatactgatgttgagtatttttttagtattcatggccatcatgcttagggtttgaagtcagaggcagggctgtaggctaatggagtggagtaggctcccgggggtgatgcccagggaggagccagattatctgtaccaaagnnnnnnnnnnnnngagatggagcctcactcagccttatggaggacattgtaagagtaaatgagatgacaaatgtaagcacttgcggccgc

SEQ ID NO: 123913 - DNA, 734 bp, Homo Sapiens
  misc_feature (318)..(337): n is a, c, g, or t
caggttagcaaccaggtgtctttatttttcggaaagttcgtcgctgggttaacaaaatcgcacctgccggtttgggtgacacctctggccaccatgcactgggccccaagaagagaccaccctgagccatggccctgcaggcaagcaagggacagctgcccagactcagggcccagtaacagtacagaacgaaccaactgaattcacggcttccctccaagctttgaaaggtagcagtccaggctataaaactctagaagcattgcgtaagaagtgttaagtctacaacaaatacatcttgtaaaaactcaataaatnnnnnnnnnnnnnnnnnnnnaacttgtaacatctaataacatcggaacctgcacacagggccggcccctccctggaaaccgtctccctgcctgggacacacagcaattagaagaatttgtatgaaaataccagcttgctttgaagtccaaaaaataaatctcctaaagaaaaatcctatagaaatctaattctcctgaaaaaggacaaaggaaataaaatatcttcactggaatcacctccaactattaacaaccttttaggcttggaggggatcctccagctccggggcaggctggacgtacattcttggccgtccctctatcggcgggataaaccttctcggttgtcaataagttaaaattaaaactctccggcatgtgggcagctaaatgctggaagtgttggggtgtgggaac

SEQ ID NO: 123914 - DNA, 1175 bp, Homo Sapiens
  misc_feature (52)..(56): n is a, c, g, or t
  misc_feature (58)..(58): n is a, c, g, or t
  misc_feature (61)..(61): n is a, c, g, or t
  misc_feature (64)..(64): n is a, c, g, or t
  misc_feature (68)..(69): n is a, c, g, or t
  misc_feature (72)..(72): n is a, c, g, or t
  misc_feature (75)..(75): n is a, c, g, or t
  misc_feature (77)..(78): n is a, c, g, or t
  misc_feature (1061)..(1095): n is a, c, g, or t
taaagggtctagaaagctttttggaggcccggaggcggccaaccaggggttnnnnntnttngtnattnngtngtngnnggggaggaaatataaaagtttattgttaaattcatacattataaaagtgatcttttaaaaaaaatccaatattcacttaaagtagacataatacaaattaggctaccacccatcatatattttttgtatgcttcttatgaaaaatgtctactgttgtttcatgacatggtcttaaatcaaaatcacaatatccaagggaaaaacgactctgtggtttcttaaaataatcaagtccccttccaatcttaatcatccatccattgttgaacctaatttctcggtcatgtattgaagaagagtattgaacttccaacagcactccgtgactcctgagtgactcttctatttcttgcaggcctctactttgctgcacttgctcaatgccttcatccagagaggtgagaaggtgaatagtttttactttacatggtctcttaataagcatctcacaaaatcgaagaaagttatacagctgatgagtatgtctaatataaggatcttctatccaaacttctgtaactgtctcattaaggtattcgcgaaaaagtgactcataactgaaacctgttgcattctcttctattttaatttgcttgtgatattttccatcttctttttcttggtccaagtacttctttatgttttccgctctgtccatgtatttggaaattttttctctgagattacatctcttagtattatctttggtacctttcagaacctgcaggagcagatcaatcccctcttggtaacacaccagagcctgcggataccgcgactccgaatctagttctactgcccgctttagcacagtggctgcagctgtgctctgcgggtcctgcctcagcccggacttcgccataattctggaagttctcctccgcctcaacccaggatgaagttgagcgggtctgctgcgcttccgggaaggccccggccgtaatggccgaattcccgggcatatgtccggtaccgtcgactgnnnnnnnnnnnnnnnnnnnnnnnnnnnnnnnnnnncgccgcttcctcgctcatctgacttcgctgcgctcgtcgttcggatagcgacgtagcgcctatatgatctatacattttt

SEQ ID NO: 123915 - DNA, 1212 bp, Homo Sapiens
  misc_feature (370)..(370): n is a, c, g, or t
  misc_feature (372)..(372): n is a, c, g, or t
gcggccgctccaacatcagaatggtaacactcacatctacagtgccctcatcaacgcggccatcaggaagctgaactacacctatctcatcagcatcttgaaggacatgaagcagaacagggtcccggtgaacgaagtggtcatccgccagctggagtttgcagcccagtaccctcccacctttgaccggtaccaagggaagaacacctacctggagaagattgacggcttccgagcctattacaagcagtggctgacagtgatgcccgcagaggaaaccccgcacccctggcagaagttccggaccaagccccagggggaccaggacaccggcaaggaggctgatgacggatgtgcccttgggggcagngntgatgggagcacagctggaacaatgtgctcggcccccagtgctctgtgggagccccaggacaagtgagctggtgtcacctcctgcctgggggaagagccaggccctgaggaacagccgcagcgtgtcacaggtgttggtgaggacacacactaggcccaaggtgcctgtgctcccagcaggtccaagtgcagctccagccacctttgcgtgtcaccttcacgggacttccagctccagctacctttgtgtgtcacctcacacaccacaagggggctggggcatctggtccctggggcctgggccgccccgccgggttccataggccgatgctctgaaagaagagacgtggggctcgagagatttaaagattttatttttacaaatcacagctgatagacagcgaagccttccccatagagaccgtgctccaactcgggcctggggcactgctcgctgctcccaggaagggggtggcgtgacaggcaggaacctgcgaagtccagagtccagggtggagcgcgccagcctcagccagagcagccacgacagccacagtgtgtgcactcgatgatgcggccctgcaacggaggaggacagtgagacgatgccactgcgccacgctcgcccctgcacactcacatatgtggcaaccctcccacgaaggacctgccaccatgccatatagggacacacctcagaaacccttccttgacagctctggacagggaaaatttggctccctcatgaaggtagaaccagctgctgttgacaccgaggttacatctgtatgtctatttataatatgttctgcaaatccaacacacgtttgccaatcacgc

SEQ ID NO: 123916 - DNA, 975 bp, Homo Sapiens
  misc_feature (103)..(110): n is a, c, g, or t
  misc_feature (112)..(130): n is a, c, g, or t
aatacgcctcccctatagggggcccctttgtccaaagaaagctggttacgcgtagccttgggccccctggagggatttttcttagagccggccgccctttttnnnnnnnntnnnnnnnnnnnnnnnnnnnccgagagatttaaaagattttatttttacaaatccccaggtggatagccaggggaaccctttcccacattaggagcgtgctccaaactcgggcctgggggcactgctcgctgctcccagaaagggggtggcgtgacaggcaggaacctgcgaagtcccgagtccagggtggagcgcgccagcctcagcccagagcagcccacgacagcccccagtgtgtgcactcgatgatgcggcccacttccagcttgcttttgggcacgcggcagatgcagttcgtcccgaagttggtgtcccgtgtctgaatgcaccgcaggcagcacaagttctcatatccttgctttttccattttgcaatcaggtttttgtctgcatagccttctttaatacaatattcatagagttctctgctgatggctttccgcttgtaaaagaggtcgaagatgtagcgggttttctggtggtggatcctgaagatgggccacagagattccactttcctctttccctcatgcggttctgtttcagcttctctcatcttttgatctaattcatccagtgttggctcaatcaactcccagccatctgggggtgctttccggcttcttttgactttaggcattttccttccacaggataatctgcaaagatcttaggatgtgctttccaagagtatagacagcagaaagatctctcgtctctgcagttgcaggcttggattcttgttcagctctaaaaaattattctgtgactttcaggtcaccttccctctctggtcctgtttcttcggaagctcctggagcttgggtagctgcttctcgacagaaggcttccgctcttcagccc

SEQ ID NO: 123917 - DNA, 1442 bp, Homo Sapiens
  misc_feature (110)..(169): n is a, c, g, or t
  misc_feature (317)..(339): n is a, c, g, or t
cttccttcacatgtggttcgcgctcatgtgtagtctactgtctgttgtgctgtttttgtctctctgtgtgtcttcattcgttctctccgtcctcttccgcgttcctctcnnnnnnnnnnnnnnnnnnnnnnnnnnnnnnnnnnnnnnnnnnnnnnnnnnnnnnnnnnnncctcctggtccgttccgagtgcgtgtgttctctcgggtctgattttccgtcttgattggggcccctggtttctccccttttgtcaaaaacgtgcctgcgacccttcattgcctttttacctttttcgcaccgcgaaagtgcccaggtnnnnnnnnnnnnnnnnnnnnnnnctcgagagatttaaagattttatttttacaaatcacagctgatagacagcgaagccttccccatagagaccgtgctccaactcgggcctggggcactgctcgctgctcccaggaagggggtggcgtgacaggcaggaacctgcgaagtccagagtccagggtggagcgcgccagcctcagccagagcagccacgacagccacagtgtgtgcactcgatgatgcggcccacttccagcttgcttttgggcacgcggcagatgcagttcgtcccgaagttggtgtcccgtgtctgaatgcaccgcaggcagcacaagttctcatatccttgctttttccattttgcaatcaggtttttgtctgcatagccttctttaatacaatattcatagagttctctgctgatggctttccgcttgtaaaagaggtcgaagatgtagcgggttttctggtggtggatcctgaagatgggccacagagattccactttcctctttccctcatgcggttctgtttcagcttctctcatcttttgatctaattcatccagtgttggctcaatcaactcccagccatctgggggtgctttccggcttcttttgactttaggcattttccttccacaggataatctgcaaagatcttaggatgtgctttccaagagtatagacagcagaaagatctctcgtctctgcagttgcaggcttggattcttgttcagctctaaaaaattattctgtgactttcaggtcaccttccctctctggtcctgtttcttcagaggaaacggcgcgagaatcctagaggaaaacccccaaatctaccgtcccctcagaagaacgaacgtggcgccgcctcctctcgggagctctctccggcctcaaggtccaaagcccgaacacatcccagtggctggctgagagtccagccactcatatctccctccaggacggtgcagaccaccggtctcccgcctcagccgttgccaaggtaatcgagaacagagggaaaacacataccggaagctcctggagcttgggtagctgcttctcgtgccgaattcgccacccaggcctcgctaccttagaaccgttagagttactgc

SEQ ID NO: 123918 - DNA, 494 bp, Homo Sapiens
  misc_feature (159)..(196): n is a, c, g, or t
cacagaaaacagccaggcatggtggtgcacgcctgtggtcccagctacttgggaggctgaggtgggaggactggttgggcctgggaggcagaggttgtgcagtgagccgagatcatgcaactacactccaatctgggtgacagagggagactccatctnnnnnnnnnnnnnnnnnnnnnnnnnnnnnnnnnnnnnntcagccaacgttggctccccctaattttcgtggtaagaaaaaccatgacttgcacagtttgcgagaataaggattgtggttagttcagtaactccaaaagtgacgcgagcttcaaagtccaagagagactgactaattacctctgctgatggctttccgcttgtaaaagaggtcgaagatgtagcgggttttctggtggtggatcctgaagatgagccacagagattccactttcctctttccctcatgcggttctgtttcagcaggggagaagcaaagagtgtgtttgggaacaaag

SEQ ID NO: 123919 - DNA, 1111 bp, Homo Sapiens
tttttttcagtacaattcattttattattttagtgcaacaaaacatttccagatttatttccaatttcagtttcaaaacaaactgacctgaaatttttagtatttactatctgtgacaatgaccaataaaatgtgtaagaatataaaaaataaattcattcattgttggtagtactccaaattcaatgcataagaaccttttctatctaaagcattttcctaaaactgcaaactaaaaatctgatatttaaaacatttatgtggtaaaataatctcatttgattatggatatcataaatagaatataaaagatattacatttcttcaaataccatttgtttcactgtgttcaattttgagtttcctaacatccattctacaggtcaatcaaaatacaaaggcgtgcaaatgaaacaagctattgaaatgaaataaaattcaagaataaaagttagaattaacttatgaggtaacttttatgtaagcaaacatcacagttgtaagaaatgcctctctttacaaagagtcattaagatgcgcattttcctagagctattatttcatgtgcccaaaatcaagcaaaataaaatcccatgcttcctggaatattaaataccatgcagtgtactatttaagaaaagaacaaggttaactaactaaaagcagaactcacttattttttgctccctagccaattaaaaataagttcattaaaagcacttgaaattatatatttaacctgaaaaaaagttgctaaaattccaatataaatgtaaatatctttaacttgcttaacccagctatccccaaacagtgtagtggggcaaaatgttcaaaagaaaaatcatccagtgcacgtagatgggcaccaagaagctaagcttccctgagcgcgtacagagccgccaggcgactcaattcacgtgctccttttctggggatgaaaaggtgctcaccagatctttctatgcaactgagagctcctaaatcaagtcaaaggggaccatcgtactgaaatattccatattttccagtggtccaccagctgggctcagaggccaggagctgttccccttgcccaggctgcagaccaacctgaatttcagctttt

SEQ ID NO: 123920 - DNA, 968 bp, Homo Sapiens
attttttgaagttttgcctaaccatcccatttttaccagggtcaatccaaaattcccaaaggcggtgccaaatggaacccaaggttattggaaatgaaaataaaatttcaaggaattaaaaggttagaatttacctttatgagggtaactttttatgtaaggcaaaccatccacagtgttaggaaatgcctctctttccaaaagagtcattaaagatgcgcatttttcctagagctattatttcatgtgcccaaaaatcaagcaaaataaaatcccatgcttcctgggaatattaaataccatgcagtgtactatttaagaaaagaacaaggttacctaactaaaagcagaactcacttattttttgctccctagccaattaaaaataagttcattaaaagcacttgaaattatatatttaacctgaaaaaaagttgctaaaattccaatataaatgtaaatatctttaacttgcttaacccagctatccccaaaaacagtgtagtggggcaaaatgttcaaaagaaaaatcatccagtgcacgtagatgggcaccaagaagctaagcttccctgagcgcgtacagagccgccaggcgactcaattcacgtgctccttttctggggatgaaaaggtgctcaccagatctttctatgcaactgagagctcctaaatcaagtcaaaggggaccatcgtactgaaatattccatattttccagtggtccaccagctgggctcagaggccaggagctgttccccttgcccaggctgcagaccaacctgaatttcagcttttaatgttcttatggtacagagtggtgcaggatggaagccattcagagcctgatgaaatggaacagaaaactcccattttctgtcacctgtcaacttcctgtaattcaaatcacccttgaataaaattaaatgtgccttctgtagttcagcatataagtcaggtgcaacctcc

SEQ ID NO: 123921 - DNA, 1519 bp, Homo Sapiens
agccaggacaagggagcccaccgggcccagataggtacagagagcagaggctcctgttctgtcctcgccacccacgacggtgacactgcttgtaaatggtggctgtgctctcccagcaagaaaaaagcacaactaaatccacactgcacacagacgcagacagaaagccttcaagtggctctgttttctgctccctgccttgccaggtccacaagcagagaggagtgtcaggcgcatggacccactgtcaggctccctagtgagctgcgggttcagcaggagctgcccactgacacacaggggacacccactcctcccaccttgggagcggttgccagacagagccgcactgggtgctggtgtcatccagggaccccacacacttccttaaatgtgatcctgcttccctctgggcagctgcatcctctcctcctgcaggactgtgtggaaacttggctctcagtttgctctcccttctctcctctgcctgccccaagcccctctttctaaaaaagtgatggaatattcatggggttatttcttgaaaatacttggcggtctccatgcttctgttttctttgagccaggtggtcaggagggcttacaaagaatgcctgggctcccccgcaggtgccggcagatggggtagcgaatggtcctgtgcctccacctgctccgggagggagtctcccgtctctaggcctggccccttcctaaccctccacgtatcctgttctcccagagacttcagaaccccactcctgagaacagcggagccaggcgcttagaggaagaccaaatgctgccaggacacggattgtccagggattacattccagcatcttattaggtatctggatctgttcggaaaaaaattagaaactatgtataaaacttaaaaatattcaagtatcaaaaggttatttaggatgaaagttttaaaacaagtcatcagcaagctgctgccaccaagtggagacttatacaaaagttgagcgagtccactgagctgagaggacagaaatgaagtcacctgtgctggggcaggggcagggacactgggggcagggagtgtgtgggcagagaagccagagaagtccaggcctgtggaagccaaacaggagagcgtgggccggaagggcggtcaggatcgggggacgaggtcgctctccctggagaacgaaccctaaagtgcgtagcctggggttccctccctgggggtcctgtcccctgacatttcacaggccttctgagctgccttccaaggaggactaacatggcaacaaaagacccatttctgcacaaaaatccttctggaaagaaaaagaagaaagccaagaatggagtcaaaacgctacccagtgctgaccaagcctctcaaaccctgttagaagtggagtgtggtttctaagtcagggaaatggaagaggccccacccacacagggacagggccacggcccccacaggatgaagcagcagcgtttattcaagatacaacagtgagggaatccagtcacg

SEQ ID NO: 123922 - DNA, 1126 bp, Homo Sapiens
  misc_feature (396)..(413): n is a, c, g, or t
  misc_feature (432)..(466): n is a, c, g, or t
ggataggtagaaggcctctcgctcgtgggcgaggcggcgctggttgtaaataagagtccccacgaataatagggaccccttggagagaactctctcattcggggagatatgggttgtcaagaaaaacacattccgggttgtgcccggcgccggggcgcttcttattttattgtggggggggagaatttccacacaccccttattttccatgtcctccggggtttcccctttgggaaacccaaattaaagacccaagtgtccaattcccctaattggggcccgggggccccaaaggaaatgggtttagggaagtttttttggagggccggaggctgggccgaccaaggaatatgacttgttcctgtgggggtggtgggtgttttttgtgtatggggnnnnnnnnnnnnnnnnnnccagaatttaatatttttnnnnnnnnnnnnnnnnnnnnnnnnnnnnnnnnnnngtttaaaggttcattttggggctaaatactaggactgaaactcttttcttgtaattgatttatggtaaagagtaaaaataatataaaaaacacagcagttatagctgtccaaatgaaagcctatctgcaaaaaggcaggacaaggtgggctgactgagcaaatattcacatcacgaccttagtaataaatttcaaatggtttcagttcccaagatctgaaaagagaatcatcttgcacgcttagattccacttcttcaagaatccactcaatgccattcaaaaaaccagtcagagtttcagcctctgtatcctggaccagccatgggtgatttagaagattcagatgcagctcatgagccaaataaaaacagggcattctttttacatccccttgagaaatacaagataaaaccaacaatggtcttcccgaagacccaaaggctggatctgtcattgccataatatgagaaaattcatcttgccattcatgtcttttatgagcttcagcatttgcaacatagatgaacccatctacaacttcacacactttttgaatctgtggaatcacactgtaccggcttccttgttgatcatcaccttcattgtgtcgactgaacatcttgttaactgcacttgtatgctcttccttgctctatctc

SEQ ID NO: 123923 - DNA, 716 bp, Homo Sapiens
  misc_feature (176)..(234): n is a, c, g, or t
  misc_feature (422)..(450): n is a, c, g, or t
ggcacgaggccagcggcctgaggacaggcaaaagggcagagggcaggggccagcaacaggaagttgggctgggtggcaaacagcaggcccctcgtggcagatttcacacctctcctgccctggctggccccagcttttcctccagaaagatccctgccaagaattagccaagaagnnnnnnnnnnnnnnnnnnnnnnnnnnnnnnnnnnnnnnnnnnnnnnnnnnnnnnnnnnngattacacattctgtacacagctaacaacaacaaaaaagggacaaaaccccacacgctaaaattacaatgaaagtgtgaacttcaccaattgcaacctaaaaaacacaacaaatgcagcagttggcagtgcggcctgcagggaggtctgcacaggcgctgcccaggccgccgcggggctccttgcccnnnnnnnnnnnnnnnnnnnnnnnnnnnnnaaaatgggaaagaagagggggagggtagaagaggtgggagcacaaaggcctctgagaaaatgtgtaagcttcctgtggggtcactgagcagggtgggccgggggagcctgaggaagggaagttaggtgactggaaacacaaggggaagaaaagaaaacagaaccagacacccaggccagggtgccaggaaagccactctggggagggccaagagggacgcctttcctcccctccatgcctgcccccgacctggccctcaggaacgc

SEQ ID NO: 123924 - DNA, 1779 bp, Homo Sapiens
  misc_feature (62)..(127): n is a, c, g, or t
  misc_feature (178)..(186): n is a, c, g, or t
  misc_feature (188)..(384): n is a, c, g, or t
  misc_feature (1302)..(1359): n is a, c, g, or t
  misc_feature (1545)..(1572): n is a, c, g, or t
aaataaagccgttggttcggcccccgcgggcttttttttgtgtgagtgaataacacccaagnnnnnnnnnnnnnnnnnnnnnnnnnnnnnnnnnnnnnnnnnnnnnnnnnnnnnnnnnnnnnnnnnncccccggcccacaaaaaagccccaggaaactttttttgagagggggtcggnnnnnnnnngnnnnnnnnnnnnnnnnnnnnnnnnnnnnnnnnnnnnnnnnnnnnnnnnnnnnnnnnnnnnnnnnnnnnnnnnnnnnnnnnnnnnnnnnnnnnnnnnnnnnnnnnnnnnnnnnnnnnnnnnnnnnnnnnnnnnnnnnnnnnnnnnnnnnnnnnnnnnnnnnnnnnnnnnnnnnnnnnnnnnnnnnnnnnnnnnnnnnnatttcaaaaaaagtcttttaattgttcaaaatagcacaaaacgacatcgcactatggtaatattgagtcacaggggttactctacaatagtgaacggtgtactctcctcagaaacaaatcaataggcgcgcgagagaagggatggggtaaaacaacaggaccaggtgagtgggctccaaggtgactaaacgtgacattttccacagcgaaatatactataatacaacaaaccagaggccctggaggacacaggctgctgcgtctccaggcagaggtcggtaggggagggctggaaagattggctgctcggttcaaatccttctgacttgctggcaagccttgctcctcgacagaagtttggggtggggggcagaaaactccaagcagatcccccagcctcggagcctggcctgagttccatgctgcacagctgctgctggtggcctgctccattgccctagcctcccttgtgggtgacactacacagtcaccctcccaagctgcctccaaggacgcctggttcccctccattctccaccctttccatgacgatttgggggaggtggagcagtggctgcggaaaccagcagccctgtttgggaggcggtgccggtggtgctcagggagggggcatggggaagagctgggaatccaggacaaggaggccccagccctccctcaagctcccctaggctcgaccctatagatgcggagtgatcgcccatgaggaatgagctgtccttcctttgttccagcggcctgaggacaggcaaaagggcagagggcaggggccagcaacaggaagttgggctgggtggcaaacagcaggcccctcgtggcagatttcacacctctcctgccctggctggccccagcttttcctccagaaagatccctgccaagaattagccaagaagnnnnnnnnnnnnnnnnnnnnnnnnnnnnnnnnnnnnnnnnnnnnnnnnnnnnnnnnnnttacacattctgtacacagctaacaacaacaaaaaagggacaaaaccccacacgctaaaattacaatgaaagtgtgaacttcaccaattgcaacctaaaaaacacaacaaatgcagcagttggcagtgcggcctgcagggaggtctgcacaggcgctgcccagccgccgcggggctccttgccccnnnnnnnnnnnnnnnnnnnnnnnnnnnnaaaatgggaaagaagagggggagggtagaagaggtgggagcacaaaggcctctgagaaaatgtgtaagcttcctgtggggtcactgagcagggtggccgggggagcctgaggaagggaagttaggtgactggaaacaacaaggggaagaaaagaaaacagaccagacacccagccaggtgccataaagccagtctggcctcgtgcca

SEQ ID NO: 123925 - DNA, 535 bp, Homo Sapiens
  misc_feature (19)..(19): n is a, c, g, or t
  misc_feature (25)..(25): n is a, c, g, or t
  misc_feature (59)..(59): n is a, c, g, or t
  misc_feature (85)..(85): n is a, c, g, or t
  misc_feature (172)..(172): n is a, c, g, or t
gtagtcacactcagcactntggtcntattcagaatgagaaaggaaacagctagagggtntggaacagaggtgtgacactgcttancattgccacaggatcactgtggttgctgtatagagattatacctggagggaatatgggagggcagcagagaaacagggagaccggtntggaggctgtttgaactaatccaggtaagtggtgatcatggtgttgagcaaggtgttagcagtggagatggcgagagtaagacctgttcatactttgagggggattacagtccacaggcagagacacgctgtaacccgaaaggagttggagaatgcagcatggagagcacagaggagttgtagaatcttattgaaggagtctcgttaaaatttcctgaggaggtaacacctgagcagggtcttcaatgctaatgattctaggcccacatcccccgagtctttgttctccactgcactaatacaagtacctgctttaatagtgaaagactgtgtagtcatagccaacatggctgtacctctgat

SEQ ID NO: 123926 - DNA, 813 bp, Homo Sapiens
  misc_feature (256)..(277): n is a, c, g, or t
ttttatgcacgagatcaactgtttattgatttttttcctcaaatactacacatttaaaggaactgttaaactgaaaaagacttgacaatttttggtaaatccgtagcacagaaatgaggatttctgctggtaagttctcaggacagacacagacacaggtccactttccaagcaagacatctgctcactggaaacggagtgaatgcatagctggtgacggcggcgggcactgctgagtcacgtgaaacacaggttnnnnnnnnnnnnnnnnnnnnnngccggcccgcgtggcccccgcgtaactctggctgcagcacctgctcccgggcgactccgggcagcccgagacactcgtgctgcgggtaagacccagcttctgtttgtgcacaagtaacacgacgactgaaatctgcaactactgcaaagacgcgggcacttttacagtgttctgctacggagccaggacaaaggccggtcagaagccggaccagcagtcagctggtgacgacgagcctccctccagcaggcaccacgtcagagaggccccaggcccactgagcccgggaggagacccagccggccagccagatgtgtgcctgaatgccacagacttcaagcagtttacaaacgaaactcactgttaaaagctgttaaatctcattaaaacagtagacgagtgctttagattctctgaatatcaaataatatatacagatagacactgagacatgacagtctaatctaaggcatctttacagatgcatttgcttgaaaagttagtcttctttttaactctgaatcagtgataaaatt

SEQ ID NO: 123927 - DNA, 654 bp, Homo Sapiens
ttaaatcttttatgtatttattatgtttgttgcatcgagtggcataattgtttgaatacaaaactaaagaaattcagggaatttctccctaacatgcactgtaatagttaaaacacatacagacaactgcagattatgttagaatacaagattgttatttgctatttaccacaattgcaaaatcaacttgtcaaggaaagacaattagagtccttcaaatatcttgatgtttatgtgtttgatggctgtaatatacatgtaaattgtggagtatgacatacaaaaaattattgctttaaatatcattattgctagccccaaaaagagttgcaaaacatagctaagtgtatgtttttttcacatagcaggcatttgcctcccattccttttcctcaataaacaataggataaaggtctaaagccttgactttagatttggagttgacaatctgcacaatccttctgcccaaagccatgaatgtcttctcgtgtaagtgcgcgtgggtgggtgcgtgcgtgcgtgccacgcctgcagagacttaagctttgggatacagagtgaccgtgtcatagccctctgggggctttgtgcgggctcttgcgtgggtttcgcagtacagctccccttctatgaagaaatagcccttttgcttg

SEQ ID NO: 123928 - DNA, 895 bp, Homo Sapiens
  misc_feature (895)..(895): n is a, c, g, or t
gcggccgctccctgtttgtctcctaggttgttgtgaggaataaatgagatgtaaggcaagtgaagcacttagtgtcttggcatgtggttctgctgctgcttactatttgattaccttggtgctttctctccagctatgtttttatctacaattaatatatttcattttgttaaaacagatgaacctgataaatgtgttggcctgtcttaacccaatcctgtagcttttttaatgttgtttatatgttttggactgttagatattttgccgaattaagtatattttatgatctgcaaaaactcaatgaaaagccaggatttcaaaaccctgagcttacatttttgttctctaattaaggtgtattgtacgagcattgaaagatccaaatgcatttctttttgaccaccttcttactttaaaaccagtcaagtttttggaaggcgagcttattcatgatcttttaaccatttttgtgagtgctaaattggcatcatatgtcaagttttatcagaataataaagacttcattgattcacttggcctgttacatgaacagaatatggcaaaaatgagactacttacttttatgggaatggcagtagaaaataaggaaatttcttttgacacaatgcagcaagaacttcagattggagctgatgatgttgaagcatttgttattgacgccgtaagaactaaaatggtctactgcaaaattgatcagacccagagaaaagtagttgtcagtcatagcacacatcggacatttggaaaacagcagtggcaacaactgtatgacacacttaatgcctggaaacaaaatctgaacaaagtgaaaaacagccttttgagtctttctgatacctgagtttttatgcttataatttttgttctttgn

SEQ ID NO: 123929 - DNA, 1701 bp, Homo Sapiens
  misc_feature (112)..(152): n is a, c, g, or t
  misc_feature (173)..(185): n is a, c, g, or t
  misc_feature (203)..(218): n is a, c, g, or t
  misc_feature (250)..(342): n is a, c, g, or t
  misc_feature (350)..(440): n is a, c, g, or t
  misc_feature (485)..(495): n is a, c, g, or t
  misc_feature (510)..(514): n is a, c, g, or t
  misc_feature (516)..(517): n is a, c, g, or t
  misc_feature (519)..(669): n is a, c, g, or t
  misc_feature (1407)..(1407): n is a, c, g, or t
  misc_feature (1499)..(1499): n is a, c, g, or t
  misc_feature (1580)..(1580): n is a, c, g, or t
  misc_feature (1609)..(1609): n is a, c, g, or t
  misc_feature (1614)..(1614): n is a, c, g, or t
  misc_feature (1657)..(1657): n is a, c, g, or t
ccgcccgtgttttttcccccggggggggcgagtatgttatttttcccacagggcgcccacaaggtggggtgggtgtttcccgccgcgggtgttacaagtgtttttctcactnnnnnnnnnnnnnnnnnnnnnnnnnnnnnnnnnnnnnnnnnagatgtttttaatattttttnnnnnnnnnnnnnctccccaataaagcggcnnnnnnnnnnnnnnnnaaatttttatttttaataagccgccggggggnnnnnnnnnnnnnnnnnnnnnnnnnnnnnnnnnnnnnnnnnnnnnnnnnnnnnnnnnnnnnnnnnnnnnnnnnnnnnnnnnnnnnnnnnnnnngggcggtnnnnnnnnnnnnnnnnnnnnnnnnnnnnnnnnnnnnnnnnnnnnnnnnnnnnnnnnnnnnnnnnnnnnnnnnnnnnnnnnnnnnnnnnnnnggggggcccggcccccccacaaaggttgtaaaaaatttttttgtnnnnnnnnnnncgggcgcacttctcnnnnntnntnnnnnnnnnnnnnnnnnnnnnnnnnnnnnnnnnnnnnnnnnnnnnnnnnnnnnnnnnnnnnnnnnnnnnnnnnnnnnnnnnnnnnnnnnnnnnnnnnnnnnnnnnnnnnnnnnnnnnnnnnnnnnnnnnnnnnnnnnnnnnnnnnnnnnnnctagtttataatgttttactatgatttagggcttttttttcaaagaacaaaaattataagcataaaaactcaggtatcagaaagactcaaaaggctgtttttcactttgttcagattttgtttccaggcattaagtgtgtcatacagttgttgccactgctgttttccaaatgtccgatgtgtgctatgactgacaactacttttctctgggtctgatcaattttgcagtagaccattttagttcttacggcgtcaataacaaatgcttcaacatcatcagctccaatctgaagttcttgctgcattgtgtcaaaagaaatttccttattttctactgccattcccataaaagtaagtagtctcatttttgccatattctgttcatgtaacaggccaagtgaatcaatgaagtctttattattctgataaaacttgacatatgatgccaatttagcactcacaaaaatggttaaaagatcatgaataagctcgccttccaaaaacttgactggttttaaagtaagaaggtggtcaaaaagaaatgcatttggatctttcaatgctcgtacaatacacctgtgggcatcaactcgagcctgggaagcattgtcctctgtgtaacttccgagcaattccaccatgacttttgaagcagcatcactcttcttacaatccacaagtgcctcataaagtagtcttaaaagggtgtgctttttttcagtggtgagattcagtcnagaatcattttctacttgatcagctagttgggatgtctggatggcccacagatgctgcacttttataggctgcatacactgtgtatctacanggagtatctatccatccgtggaaagggtgctacactgcatctcagaacggcgttcactcgcgaattgacagctttccatangcttcatcaaagctctgctgtctggtcangatcngagtaggaacaactgtcacaacttcacatcttacatctctcancaacacacagttcatattggggaatcacaggatcactccgatcc

SEQ ID NO: 123930 - DNA, 957 bp, Homo Sapiens
  misc_feature (44)..(78): n is a, c, g, or t
ggaacgaccgagcgcagcgaagtctatgagcgaggaagcggcgnnnnnnnnnnnnnnnnnnnnnnnnnnnnnnnnnnncagtcgacggtaccggacatatgcccgggaattcggccattacggccggggggtcggcgtggtcttgcgagtggagtgtccgctgtgcccgggcctgcaccatgagcgtcccggccttcatcgacatcagtgaagaagatcaggctgctgagcttcgtgcttatctgaaatctaaaggagctgagatttcagaagagaactcggaaggtggacttcatgttgatttagctcaaattattgaagcctgtgatgtgtgtctgaaggaggatgataaagatgttgaaagtgtgatgaacagtgtggtatccctactcttgatcctggaaccagacaagcaagaagctttgattgaaagcctatgtgaaaagctggtcaaatttcgcgaaggtgaacgcccgtctctgagactgcagttgttaagcaaccttttccacgggatggataagaatactcctgtaagatacacagtgtattgcagccttattaaagtggcagcatcttgtggggccatccagtacatcccaactgagctggatcaagttagaaaatggatttctgactggaatctcaccactgaaaaaaagcacaccccttttgagactactttatgaggcacttgtggcattgtacagaagagtgatgctgctttcaaaagtcctggctggaattgctcggaaagttacacagagggacaatgcttcccaggctcgagttgatgccacaggtgtattgtacgagcatttgaaagatccaaatgcatttccttttgaccaccttcttaacttttaaaccagtcaagttttggaaggcgcagctatcatgatctttaaccattctgtgagtgctaattggatcatatgtcaggtttatcgaatatta

SEQ ID NO: 123931 - DNA, 1306 bp, Homo Sapiens
  misc_feature (1232)..(1266): n is a, c, g, or t
aagcataaagaacgctatgtatcagaaagactcaaaaggctgtttttcactttgttcagattttgtttccaggcattaagtgtgtcatacagttgttgccacttgctgttttccaaatgtccgatgtgtgctatgactgacaactactttttctctgggtctgatcaattttgcagtagaccattttagttcttacggcgtcaataacaaatgcttcaacatcatcagctccaatctgaagttcttgctgcattgtgtcaaaagaaatttccttattttctactgccattcccataaaggtaattagtctcatttttgccatattctggttcatgtaacaggccaagtgaatcaatgaagtctttattattctgataaaacttgacatatgatgccaatttagcactcacaaaaatggttaaaagatcatgaataagctcgccttccaaaaacttgactggttttaaagtaagaaggtggtcaaaaagaaatgcatttggatctttcaatgctcgtacaatacacctgtgggcatcaactcgagcctgggaagcattgtcctctgtgtaacttccgagcaattccaccatgacttttgaagcagcatcactcttcttacaatccacaagtgcctcataaagtagtcttaaaagggtgtgctttttttcagtggtgagattccagtcagaaatccattttctaacttgatccagctcagttgggatgtactggatggccccacaagatgctgccactttaataaggctgcaatacactgtgtatcttacaggagtattcttatccatcccgtggaaaaggttgcttaacaactgcagtctcagagacgggcgttcaccttcgcgaaatttgaccagcttttcacataggctttcaatcaaagcttcttgcttgtctggttccaggatcaagagtagggataccacactgttcatcacactttcaacatctttatcatcctccttcagacacacatcacaggcttcaataatttgagctaaatcaacatgaagtccaccttccgagttctcttctgaaatctcagctcctttagatttcagataagcacgaagctcagcagcctgatcttcttcactgatgtcgatgaaggccgggacgctcatggtgcaggcccgggcacagcggacactccactcgcaagccccggccgtaatggccgaattcccgggcatatgtccggtaccgtcgactgnnnnnnnnnnnnnnnnnnnnnnnnnnnnnnnnnnncggccgcttcctcgctaaatgactcgctgcgctcggtcgt

SEQ ID NO: 123932 - DNA, 891 bp, Homo Sapiens
  misc_feature (767)..(801): n is a, c, g, or t
cagtacggccagggatcatgaagtcttgattattctgataaacctgacatatgatgccaatttagcactcacaaaaatggttaaaagatcatgaataagctccgccttccaaaaacgttgactgggttttttaaagtaagaaggttggtcaaaaagaaattgcaatttggattctttcaatgcctcgtacaatacacctgtgggcatcaactcgagcttgggaagcaattgtcctctgtgtaaacttccgagcaatgtgccaccatgaactgtttgaagcaggcatcagctcttctgtacaatccacaaagtgcctcataaagtagtcttaaaagggtgtgctttttttcagtggtgagattccagtcagaaatccattttctaacttgatccagctcagttgggatgtactggatggccccacaagatgctgccactttaataaggctgcaatacactgtgtatcttacaggagtattcttatccatcccgtggaaaaggttgcttaacaactgcagtctcagagacgggcgttcaccttcgcgaaatttgaccagcttttcacataggctttcaatcaaagcttcttgcttgtctggttccaggatcaagagtagggataccacactgttcatcacactttcaacatctttatcatcctccttcagacacacatcacaggcttcaataatttgagctaaatcaacatgaagtcccccggccgtaatggccgaattcccgggcatatgtccggtaccgtcgactgnnnnnnnnnnnnnnnnnnnnnnnnnnnnnnnnnnnccggccgcttcctcgctcaactagctcgctgcgctcgtcgttcggtaatacgccctagcgccctatagtgagtcgattatgcaaagtttt

SEQ ID NO: 123933 - DNA, 1565 bp, Homo Sapiens
  misc_feature (1456)..(1490): n is a, c, g, or t
acttttaacaaaagcaacaatttttattatcttgctttatatttaatggattagaactataaagattcttaactttgaaagcagaaatataagttggatagtagttgcagatctttaataccattttcaatttcatttatgagctgctacattataaatgagatgctctaaaataataatcgcttttgttgttgttgttatagaacaatgaaaattcctgttaggaacacaagttgctgtttatatttgcttgttctcttaaatagtatgagaagaagtaaggtggagctgttggaaaagcccatcgtggacctttggagattatcttcttggttcagtcatctccaccacagatttttaagagtgtgatttcatagtctccagaagtatccgatttaattgctgaatatagggaatagccataatgcttcttgaactctgttcgaatgtccaaaaggtcaatttctgatctggacaccattattcggttcagagtaaactcatcagttccaatacccttcaaggctcgatgcagtctttcggctaaaaaggccggcgtgttcctcacacaattaactatggccaacagtaagtcttcaaaatgcccagataattctccttttatgctgtccacaatgtccttttggctgatatttctgtattcatcaaatgttagttttaattgaggaaagctccttaaacacaggatctcagtgaatttgtcttcatccgtgccccatctgttctcaccagctttatagagaatctgggcatcttgtttggccagatgctcatccactttcagactttcatctcttctgccatctgccaaagtcaacagagctttccggaagtcaccagatgtttcggaactaatgtcatctccaagactcttcttgtatactgtataataggcttgagagatatccttcatttgcctgcttgtcctggtagttaagatttcaatcaaggcatcttcgtttgttcccgcgcccttcatggatttctttagctgctttgcatcaaagactgctggtggagtcactagggccaccatgagatgctcaaagtggccagagagatcacccttcaagtcatctttcagctcctttccatatgctgcttgatattccttaacaatcagctgccgctgtgcatttgacctctcagtcagaatgctgatgagcattttctcatcagttccaattcctctgattgctttctgaatagcttcagcatccactgatgggctaaagtctggataatctcttactgttcctcggtgtccaacccagatagatgccatgatatcccacctttgccttgagctgagatcacactaatccaaagcgcggtgggggaaactggtgtgcgagtaaactgcgaacaactgcgagcgaaggtgcccggccgtaatggccgaattcccgggcatatgtccggtaccgtcgactgnnnnnnnnnnnnnnnnnnnnnnnnnnnnnnnnnnnccgccgcttcctcgctcacagactcgctgcgctcgtcgttcgcataagcgggcgcccatagatcattaattcatg

SEQ ID NO: 123934 - DNA, 975 bp, Homo Sapiens
  misc_feature (847)..(881): n is a, c, g, or t
  misc_feature (885)..(927): n is a, c, g, or t
gctgatattttccgtattcatcaaaaggttaagttttaattgaggaaagctccttaaacacaggatctcagtgaatttgtcttcatcccgtgccccatctgttctcaccagctttatagagaatctgggcatcttgtttggcccagatgctcatccactttcagactttcatctcttctgcccatctgccaaagtcaacagagctttccggaagtcaccaagatgtttcggaactaatgtcatctccaagactcttcttgtatactgtataataggcttgagagatatccttcatttgcctgcttgtcctggtagttaagatttcaatcaaggcatcttcgtttgttcccgcgcccttcatggatttctttagctgctttgcatcaaagactgctggtggagtcactagggccaccatgagatgctcaaagtggccagagagatcacccttcaagtcatctttcagctcctttccatatgctgcttgatattccttaacaatcagctgccgctgtgcatttgacctctcagtcagaatgctgatgagcattttctcatcagttccaattcctctgattgctttctgaatagcttcagcatccactgatgggctaaagtctggataatctcttactgttcctcggtgtccaacccagatagatgccatgatatcccacctttgccttgagctgagatcacactaatccaaagcgcggtgggggaaactggtgtgcgagtaaactgcgaacaaactgcgagcgaaggtgtcagccgcgggcgcaggtgctccgcgctccccggccgtaatggccgaattcccgggcatatgtccggtaccgtcgactgnnnnnnnnnnnnnnnnnnnnnnnnnnnnnnnnnnncggnnnnnnnnnnnnnnnnnnnnnnnnnnnnnnnnnnnnnnnnnnnaataagaagctagcgccctatagtgagtgttacagcggggggcggtgt

SEQ ID NO: 123935 - DNA, 981 bp, Homo Sapiens
  misc_feature (869)..(903): n is a, c, g, or t
agtcctgtggcctatatttccggattcatcaaagtttagtttttaatcgaggaaagcgcccttaacacaggatttcagtggaattgtcttgcaagccgtgccccatctggttctcaccagcttttatagagaatctgggcatcttgtttggccagatgcttcatccactttcagacggtcatgctgctgtctgccatctgccgagggtcaacagagctttccggaagtcaccagatgtttcggaactaatgtcatctccaagactcttcttgtatactgtataataggcttgagagatatccgtcagtttgcctgcttgtcctggtagttaagatttcaatcaaggcatcttcgtttgttcccgcgcccttcatggatttctttagctgctttgcatcaaagactgctggttggagtcactagggccaccatgagatgctcaaagtggccagagagatcacccttcaagtcatctttcagctccgttccatatgctgcttgatattccttaacaatcagctgccgctgtgcatttgacctctcagtcagaatgctgactgagcattttcgtcatcaggttccaattcctctgacttgctttctgaatagcttcagcatccactgatgggctcaaagtctggataatctcttactgttcctcggtgtccaactccagatagatgccatgatatcccacctttgccattgagctgagatcacactaatccaaagcgcgttgggggaaactggtgttcgagtaaactgcgaacaaactgcgagcgaaggtgtcatccgcgggcgcagagtgctccgcgctccccggccgtaatggccgaattcccgggcatatgtccggtaccgtcgactgnnnnnnnnnnnnnnnnnnnnnnnnnnnnnnnnnnncggccgcttcctcgctatatacttcgctgcgctcggtcgttcgctaataaggatgcgccatatgaggtatatagtctt

SEQ ID NO: 123936 - DNA, 320 bp, Homo Sapiens
tttattattatttttattattacttatgaaaatctgtttttcagaaacacgttgtcagatatccaaggaatgtatttttaagcatgttcaccacagtaatattgtaataataaaaaatgggagacaacacaaatagaggataaaggattagttaaataaattttagcacatctgtgggaggcaatatagagaaaggatggatgtgggctctggagaagacatggcctgattccaaatcctgcctcagccctatgagctcatgggccttggtctctgtgtcttaggttcttcaactataaaaatcatgggtaatcatgccc

SEQ ID NO: 123937 - DNA, 556 bp, Homo Sapiens
agatttaaaacagcatacatttattatctgaaagtttctgtgggtcaggagtccaaacgtgatttagctgggtcctctgctcagagtttcacaaagctgcaagcaaggcgttggctggggctgggcttttatctgaggttcagatgcttcttccaagatcacatggttgttcacaaaacttatttccttgcagccgtagagctcatggcagcttgcttatttaaggctaataggagagagagtctctgactggttcactctcttttaaaggactagtctgattaggtcaggcccacccaggggatctctttgattaactcaaagtcagctgattagaaaccttatgtatatctgcaacttctcttcacttttgttatataacataacataatatgggagagatgatcccatcacttttgccatattctgttggttagaagcaggttacatgtcccacccacactcaatgggggagaggattataccaaggcatggattattgagaatcactctagaattctgtctatcatagtgtaattatatatctatgtagtga

SEQ ID NO: 123938 - DNA, 1562 bp, Homo Sapiens
aaatttcttatagacatttctttattatattttcccacttgaatagagaataatttaaatgtaatgcatactgacagcaagcacagtatcaaatattagcttttttaatatttttctttcctcaccctttattcctttaggaaaaaaatatttagatgacctcaaagaaacaattattatgctaatcacagtatgcagtaacacaaacaagcccagactcaattagaaaagaaagcaacaaaggaagtgaaaaaaggtctttctcctcaaaacattttaattcgtttttccacagccatataaatttaaagtatgaaacaacaataatacaactatagaatctaggttctctttcaaagcagcggcatataaaacatagaaaagctaaaacctcagcacaagcttcaaaagaacaaggactgagaggattttgatgaagacatgaaatgcacaaaatacagtacacaaaaatactagaatgccataaaatataaagctacacatttcaggtagaaagcattgtaaaatatataaaatatgcaagaaatcaaaaccaaagagatttttcttagagtaccatgaatacactggaactggcaattagcatttgaagatgggaacaagaaaatagcagtttcccatttaaaactttatttctaggctttaggatttcaccttcttgacatccttctttccagagctctcagtagctgactctgcttttcttttctgtgacattggagttttagttgcccgtttcttcttttctgctctctctctttcctcaatttccatattttctttctcaatcaatgaaatcagagtgttacagcgtctctggaattccatggcagtcctagactttgataaaccagtcaaatctaaactggggagcatttcgtacacactgtcttaattcttcatatacattttctctatcaaagcccattttgtgtaacatacaaatcaagaatctatcttcttcctcagtatagttctttcctttgctggttccatactgaatgcgcaactgatgaaatggagccttgtatcttgcaattttggcatccagggctttcttgatactgatccttcgttgaattcttgcttctccacgttcaatttgagccataattttctcaatgtcctgtaattcattgcaacgttcccaaatacagctgaatactccatgacctcctcaggggatttgccctctacctctcgagctatgttatcaatgtcatctcttccatatttctcattagctttaataaactggttaaaatctcgtttagtccagtttgtgaaaccttgtgtgagaagtttttccttttcttcagtctcttctggtgtaagaggttcagctccatcaatcttttttttgctcttctctttgagccagagctggatttgggatatcaggattccttggaaccttatagcctattgtcttccgataataaagaatttccttttccaggagctcaaataagcgcgacgcgtgggtcgacgatatcccggaattccggaccgtaccagcctgctttttaccaagtgtcatt

SEQ ID NO: 123939 - DNA, 1297 bp, Homo Sapiens
tttttagctatggaagttttctttattgattacttaatgtgtaacaataattggcatctttttcacacattacaaaaaattatacttggctcagtatgcaaccttttaagcatagccatattatttaacaaaagaggggaaaacctattctacccaacacagcatttacaaatgcacaaaacatgccactttggcttgtatattgtctagattaaaaaaaatcttttaacataaataagttagtataatttttcagtgtttttacagagttatgtacacaggtacacttcaaatggtttttccatacacaggcaatgaaatactgtttaaagatgtagtatccatttcacttatcctacaagtgtgcttttctctacatgaaccttcctttaaaaataacactttcctgtggataaatggacagagtaagctttaaattaaaaaatatttcattttttaatgtgaagttacttacagatctttaaaaatatcgagggatttagaattattttgactgtgtttacacagcccgaagtgaaaagaaaatgagaaaattttgtcaacaaatttaataaaagcagatggtcaattcttaacattcaaaactcccaagcacctcggatttttgccccaaactacctggagtgatcaccattctgctgagtaattaactggtaaattccaactttaagagagactggggagggcagtgaggataggtttctgttgcttttttaaaaaagccacatgcagctatctaacaaactttagatagcttgggagatcaccagatctcccaaatgagaataaacttcttgtaaaaataaatagcaattatctttagccagtgttcaaatttttgtgatttttttaaatgaagtatcagctgtctctgaaagggacattacatctttaaagaaaacaattcaaacccttcccctaaattgcttctcttcatgcaagtcaaatatttatctacttgctgtaaatcaaagcaagctcttcataccccgctccacgtcagttcctcagccccaccctgccctcccttccccaaagtttatgtgctacataaaaggtaaaaactatatacacaggtagtacaatgaagcaaataaggaaaaacctaattgcataatgctacatccaacgcttttagaggcagatcatttaagagtgcctaaaattttagtgttattgtgttgttgtttttcagtgcttatacaggatgtccattccatgaagtcagcggatatgtatttttaaaattttcatgtatatcttccttgcttcaccc

SEQ ID NO: 123940 - DNA, 903 bp, Homo Sapiens
  misc_feature (20)..(20): n is a, c, g, or t
  misc_feature (52)..(75): n is a, c, g, or t
taaaattaaccctcactaanagggaataagcttgcggccgcctgctcaggtnnnnnnnnnnnnnnnnnnnnnnnnctccaaggagtagctttattcagggatcataaacatcacagcctctcctcaaagtcaagcctaactgctaggtccccagatgtacccaagttgtctaggactggcaggggtagcttgtttgctgtagtgtttgagggcaagagactgaccatccatgcagaaagctggcctgggctgctcgctgcctgccgtggctttcccacctcattaggagcccgcttctctcggtggggagatgctgcccccagagcatcacctggccaggtctgagggcagagcatggagtgggtccagactttgtttctctgctgccagccgtagaaaggtctgggctgtcagatctcccccaagcccgacagcctcgctcagctccttggctggggccccttagggaacaggcctgcaagtgtgatgagccaggtgtgctcatccaggcagctacaggcgcagcctcttgatatcttcactgcggaagtctatccgcagggccagcacctggcgcacttcagcaggggtgaggcgccacgtcaatgggccggaattgggtccccagtaatcgaggatctcggtcacccgctccagattgaggatggtggccatctgggagagccgggcaaacttgtctcggatggtccaggtggtcaccgtggtaaggtaggcaatgagtgacctcagctccttgtcaaactgcagaccacccagccggttaaaggtggatttcagcaccactttctccaactcgacggcaaccaggctagtcatgaggccggttaggctgtcgtagatgaccggggacaggctggccttgaactctgccatttgctgctc

SEQ ID NO: 123941 - DNA, 1605 bp, Homo Sapiens
  misc_feature (644)..(644): n is a, c, g, or t
  misc_feature (718)..(718): n is a, c, g, or t
  misc_feature (798)..(798): n is a, c, g, or t
  misc_feature (954)..(954): n is a, c, g, or t
tttcttaggttttagcagcacttttacttccacatccaaactccctgggtcctcacaacagccctgtgaggtaggtagggtaggaaggtttcagagatccccatttatagatgaggatgctgaggcacagagaggtgaagtgacttgtccaaggtcatacaaccagcagtgtagagggctcaaagccagcattcctccacttgaactcctgcgctccggccctctggcagttcccacatcctctctattctctctgtgtcccccaccctctcaactctcctgggtctacagggaccctaaaggcagcctggcagctgagatttttcaggaatggcaactggggtaggcctggtcaactccagataggaactgaccctgaagagcatgaggccagctttgcttctccccatttcccagttggatggaaggcctagtaggtcccagggcaaggatggagctaggcatgattcatgaacgaatggtgataaaggtaggtgtaagcatatgtgtgtcctgcactaaagacaaaggctcccctaacccaaggccccaaggcagtgtttcaagtgctcacccccatgcctctctcatcccacagagccacagtgagtgtcctcagcagcaaaaggagcccatagaaatangctgcttctggcaatgagctgctccagtggacagctcccaccaagccttcagaccccatcacgcagacacagtnctccacggcttgactgggccctgggccacacccccaataacaaacagccgggcccagcctgcagactagagcaggagcancgggcagtggcatggcaggctatgcctcccagcgccgccgtgcaagctaaagctctccccaagagcccaaaggacatggctggtttccaaggcccccgtggctacaatgtggcccccaagggaccctaccacaaagtctgccctcttatccctcantgcgcaggctgcggggcaatttggtccaggacccatgctccaggtcaaacatctccacagtgttgacaaagtgtgggcgagagtagaagttctgggcccaggctgctgcaggccacccaggctaaagacgctgccttcagccatggcgcagccagcaaaggcccgacggctgggtaggcttggatgccgggtccatgtacgggcctccagatcaaaggcttcaaaagcagtcaccgggagcttgccctggcggcccccacaggacatagatcttgttcaccgtgcaggaaggtggaggccccatagcagggtctgggcatggagggtagcgaaagccagcagtcccgacggggctcatacacacgtacctgggcctgggggcccgtgtcagggcccattccccccagagcatacaccataccatcaagcaaaggcccggccacctcctgcagacatggtgttcactgccagtggcacggccatgctgtctgctcagactgtaggcctcactggggaggcatgacagggcctcatcttgattctgccagggccacaagaggtatatgaccagtccagggaccttgccttcacccgccggtgctccgatgctgccagggtacggggtccgccgttccgcctccgttgacgcgg

SEQ ID NO: 123942 - DNA, 1203 bp, Homo Sapiens
aacggggggagggtagagacgtaagcgcgaagatactgttcataagatatgggaaagttctagtttctagattcatgtaggtcggaatatgaagttagaatgtttgaagcaagaaggtggcgggggagctgtcgtatagaagaaacgggtgtgttgagtcggatgataggggggcgaggaatgtttagaagagggatgtaaaaaggtgtgatgggagaaggttggaagtttgttggagaccaaggtttggggtaaaggcccagccctggggtaagtaagggtttatctttatagccgttggagcgtctaagcaaaaggctctgttcgtctgggttaggcttggaatgccggggtcgcaatttacggggcttccaagatcaaagggtttcaaaaagcagtcaccggggagcttgcccgggcgggcccccccagggacatagatcttgttcccgtgcaggaaggtggaggccccatagcagggtgtggggcatggagggtagcgaaagccagcagtcccgacggggctcatacacacgtacctgggcctggggggcccgtgtcaggggcccattccccccagagcatacaccataccatctctctccacagttgcaacccccatggctgcttgagggagggtggcccgacgctcccagcggccctcatccatcaggaaggcctctacagcagctaccgggctctggacctcatccacaccacccaccactagcacctgcttgcccagaactaccgcagctgcaccagcccgggcagtgggcaggggtgccagtgccagccatgtgtgcgaggccatgtccagtgtctcagcagtgtccaggggcagtccagcccggccacaaccccccaacaccagcaggtgcccatcttggtgtgccactgtgccatagacccggcaagtgggcatgggggggaacacttgccaagcaaaggcccggccacctcctgcagacatggtgttcactgccagtggcaggccatgctgtctgctcagactgtaggcctcactggggaggcatgacagggcctcatcttgattctgccagggccacaagaggtatatgaccagtccagggaccttgccttcacccgccggtgctccgatgctgccagggtacggggtccgccgttccgcctccgttgacgcgggatctgactggggctgaagtcgggctcatcccggaa

SEQ ID NO: 123943 - DNA, 893 bp, Homo Sapiens
tttttttgggttcacatttattgtaacttggaagcccacccttcttcctactcctggagctgtcgtccccaagggctcaggaattagccttgctccacagcaaacagcccagaggccccacctgggcaaaagcaaacaaaacagatacgttcctttccggcaggtgcagatgctctgcccaggcctgcggaagccagctccggtctgtgtgtaaatcctccccaggacttccggcccaccagctccattccagcctccactcggctcagctccgcggcttcctcgagccaggctggtcctgcatcgccatctgctggccgcgcggcacggccggttcctggagccagcaggagtcggaggctgcagggcttgaaggcctcttcaccgtgccctccagggagcctagctgccgaagtattcctgctggaacttctggaagtcttcctcggtgaacacggtgccctcagccttcttcttcttggtcttggccacaggccggtcacaggccttgcggccccggttctggcgcaaaatctgctggctcacagactcagccacggtgcttctcgtcctggtcagaaacttcaggtttactctgaggtggtctcgacactctcgcttccggtactcgtccagtgccgacttgggcacctttcccttggccgagttccgcagtttctgggcctgaattgccttcgtcttccggggccgtttcaccggagcccctctcggcttggcctgacctggagggtcccggggggcctcggacgccgccagcagctccaggccccgccgcagcagggcggcggacatggcggcgcttggctccgcccacgagcctcccccggccgtaatggccgaattcccgggcatatgtccggtaccgtcgactg

SEQ ID NO: 123944 - DNA, 493 bp, Homo Sapiens
  misc_feature (354)..(381): n is a, c, g, or t
tttttatagacaaagtggcagcagctcatttatttagccaaaaatagatactttctcgtacaatttggttcacacatatgtacatttctctgtatatatacacacacacaaaggcagacacgtttattctcactgaaactccaccccccaaaatcaaccggacaaacaaacctcacagcgaatgcggggtgccacagaagcgacttggggagggctgaggaggactggttttatttctttttcttactttctttgtttagttttgcttttaggtatttatacacggacatgcttacaagttgtaactatacagagcgattttttttatacaattattacaacgattaaaaaaannnnnnnnnnnnnnnnnnnnnnnnnnnnaaagaactaggatgaggagagagccgataagaccagggcggcgtccagatggttctggggccgcctgggcacgggatggaaagctgtcttgagtaactttttctccacttcc

SEQ ID NO: 123945 - DNA, 564 bp, Homo Sapiens
  misc_feature (303)..(364): n is a, c, g, or t
tggcagcagctcatttatttagccaaaaatagatactttctcgtacaatttggttcacacatatgtacatttctctgtatatatacacacacacaaaggcagacacgtttattctcactgaaactccaccccccaaaatcaaccggacaaacaaacctcacagcgaatggtgggtgccacagaagcgacctggggagggctgaggaggactggttttatttctttttcttactttctttgtatagttttgcttttaggtatttatacacggacatgcttacaagttgtaactatacagagcgnnnnnnnnnnnnnnnnnnnnnnnnnnnnnnnnnnnnnnnnnnnnnnnnnnnnnnnnnnnnnnaaagaactaggatgaggagagagccgataagaccagggcggcgtccagatggttctggggccgcctgggcacgggctggaaagctgtcttgagtaactttttctccacttccaaggcactacagcgatcagctgcgggaagatgggcagctccgcggcgtagggcaggaaggcgccgtagccttgggcggcggcggccgc

SEQ ID NO: 123946 - DNA, 478 bp, Homo Sapiens
  misc_feature (225)..(266): n is a, c, g, or t
  misc_feature (351)..(376): n is a, c, g, or t
tatagtcaaagtggcagcagctcatttatttagccaaaaatagatactttctcgtacaatttggttcacacatatgtacatttctctgtatatatacacacacacaaaggcagacacgtttattctcactgaaactccaccccccaaaatcaaccggacaaacaaacctcacagcgaatgcggggtgccacagaagcgacttggggagggctgaggaggactggnnnnnnnnnnnnnnnnnnnnnnnnnnnnnnnnnnnnnnnnnnaggtatttatacacggacatgcttacaagttgtaactatacagagcgattttttttatacaattattacaacgattaaaaaaagnnnnnnnnnnnnnnnnnnnnnnnnnnaaagaactaggatgaagagagagccgataagaccagggcggcgtccaaatggttctggggccgcctgggcacgggatggaaagctgtcttgagtaacttttt

SEQ ID NO: 123947 - DNA, 699 bp, Homo Sapiens
  misc_feature (217)..(269): n is a, c, g, or t
  misc_feature (345)..(369): n is a, c, g, or t
  misc_feature (600)..(600): n is a, c, g, or t
  misc_feature (630)..(630): n is a, c, g, or t
caaagtggcagctgctcatttatttagccaaaaatagatactttctcgtacaatttggttcacacatatgtacatttctttgtatatatacacacacacaaaggcagacacgtttattctcactgaaactccaccccccaaaatcaaccggacaaacaaacctcacagcgaatgcggggtgccacaaaagcgacttggggagggctgaggaggactnnnnnnnnnnnnnnnnnnnnnnnnnnnnnnnnnnnnnnnnnnnnnnnnnnnnntacacggacatgcttacaaggtggaactatacagagcgattttttttatacaattattacaacgattaaaaaaagnnnnnnnnnnnnnnnnnnnnnnnnnaaagaactaggatgaggagagagccgataagaccagggcggcgtccaaatggttctggggccgcctgggcacgggctggaaagctgtcttgagtaactttttctccacttccaaggcactacagcgatctgttccgccttcgggctccggtggccgagcgaaggcggcggtggcagccgggtggcccgcggcttcgggaagtcccagcaggtgcggaggggcagagcccancagggaagagcggggtgcgggcgggggcgnggcgtgggccctgaaaacggcggtttgtcccaagccgggaaacttgcccagcggcgcttgagacagtct

SEQ ID NO: 123948 - DNA, 863 bp, Homo Sapiens
  misc_feature (526)..(698): n is a, c, g, or t
cccatgctgatcagcatcacttgcctctggccaccctcccctgtgaccggcagcacatgtcgccccacgcggccccggcttggggagcgtaaggcatgtgtggcctccatgcggccgccagacgagggcgggaccgggacgcttcgccctgcctggggctcctggtgagttccgggtgactggagtggggacaagaggcaccagggaaggacgtgagttctttagattttccaaacgcctctgacacatgtcctcactcaaagctgcccaataaaacaaaacaagctccgctaactagggaggcgggaaaaagtgggggaggcaatgaaggtttggcctcagaatcccagaactacagtgggatgaggggtgggcagggaggaggtggagaggcaggcagggctggccgccctggcacagccttggaagccaagctttggggtttagaggagagcaggggtcaaatgcctgagagcctgcgtaggcaggtaaggggaaaggggaaagtgtccagggtacaagaggnnnnnnnnnnnnnnnnnnnnnnnnnnnnnnnnnnnnnnnnnnnnnnnnnnnnnnnnnnnnnnnnnnnnnnnnnnnnnnnnnnnnnnnnnnnnnnnnnnnnnnnnnnnnnnnnnnnnnnnnnnnnnnnnnnnnnnnnnnnnnnnnnnnnnnnnnnnnnnnnnnnnnnnnnnnnngcagtgcaagagctcgctgctcagagctggtcccaagcccggcagcatgaaccacaactgggagcttgtcagaaatgcagaatcttgagccccagctgggatctactgaatcagcatttgcattttaaaaataacagccctattaaagtatcattcacatgccat

SEQ ID NO: 123949 - DNA, 2220 bp, Homo Sapiens
  misc_feature (484)..(484): n is a, c, g, or t
  misc_feature (513)..(522): n is a, c, g, or t
  misc_feature (834)..(842): n is a, c, g, or t
tatctagttgatcagccggtcccggatacgggcgtgtcagatcccttttgtccctcccccgagcgaccacagtgctgtgttgggtgtcggacaggtatcggcggtctcgcttccgcgctgagtgaggatggaatagtataatgacgacaaaggggcaggcccgtacgacatttatggcggcgcgtctgctcctgcgggaaaatgatgtgctcgatggcaggggcgtagtgcggagagccccgtgggccagaccacgctgccctcctgggaatagtccgtgcgagtggctctcaagggatacgtgatcgcgcggacggcagcctcctttccgggacgcagttggcctagtgggacgcgcgcttcgttcgtgagttgaggtgcgtttaggtgcgtggtaaaggagtaatatggtacagagtggggtaggtgaggaggtgggagatatctagggacagaggaaaacgggtgtaaatactgtgaacgntgggtgttatcgcctccaaccagcgattnnnnnnnnnnatgcgtctgcgtgattgctactgtgacgtgaggagagggacatatgaaataagacacgggcggtggtgagtgtgtactagtgggatcgcagcggactgttgcgcggggtctcgaggagagcaaaatacaggggtgagagaagggtgagcggttgacacccggctcggcgcggtgcggggggcgcggggggttctgagtattcccctgtgacttgcttgaagcgccgtttcgttctcatcggcgaggcggagggcgccccgccccccagaccgcggtgccctgttggggccggtgcgtcgcgaagcgggtgtnnnnnnnnncggtgcggccgaggcggtccggcgttgagatcccgcctcgcacggcgtcggcgggggcgcttgagctcctgcagttgagcgggggcgcctggggccgcagggcggttctgttcgttgagatttaggattttattattatttatttttagaaaaaagagaaaatttacaagatgcaaaggtctcacacaatacattatcattgatgattgctctcttgacacttcaacacgggccctggcaataaaaagaacatggacagtgtgagtgtattggagaacccccgccatggacacgcagaatacaccacagtggacttgatgacaaatgatgctgggccagcctgttccaaaagcaagccaagatgtggtagaaaccaacaaagcctttctgtgggggaggcacgagcgcacaccttctaccacatgcgcacccgccccctggcccaccggcagtgcccactgcatcactccaccacagcaacaacagaaaacgataaaacggtcctttggtgttttttgcagagctattcaggttcccaaattcttatttctgtcttcctcttcatgtttcagttccaaattcttaaagtagtgtaggtgcttagcatcttgaatttttcaggatccagttctgcccaatgataacacactgaattctgcctcctgagctacggctcccgttcagaggacacgtcgccctcagccccgctgctggcactgcggtcttcttttcggggagtgtttctttccttgcttgattcagaaggtcccttagctctggtcttttctttcctctgctgctgtttttcgagctttgacagctgctttgggtcagaggtagcagtgccgggagctggcgattccagctctatggtcacaggcccatcattctgaatgtgcacctgcatgtaggccccaaacttgccatctttgataagctccggcctgtatgttttacgcagctgctccaggaagctgttgtagaagccctctgcctgctccgtgggcattgctaggtggaaatcaggcttgtttcccttcaggacacactggagggtaaactggctgacacacagaatctcgtactgtttgtccatcacactcttcgaccagtgcttcccactctcatcctcaaatacacgcaggtttagaatctttcggaccatgtgttccagttccttctgcgtatcctccagggaaatacccagcaacacacatatgccccttccaatggcactaatctgctctcctccaactgtgacgctggcccgggtgacgcgctgcaccacggccttcatggcggcggctggggcgagtggggcggcgccgcgctgcgcctcgtgccgaattctccacccaggcctcgctacctagcccta

SEQ ID NO: 123950 - DNA, 1049 bp, Homo Sapiens
tgttttttgcagagctattcaggttggcaattctgaagtcggtctccgtcttcatgtgtcaagttccaaattctgtaaagtagtgtagttgcttagcatcttgaattttgcaggatccagtttctgcgcaaatgataacacactggaattctgcctcctgagctacgggctcccgtttcagaaggacacgtcgccctcagccccgctgctggcactgcggtcttcttttcggggagtgtttcgtttcctgtgcgtgaattcagaaggtcccttagctctggtcttttcgtgtcctctgctgctgttttttcgagctttgacagctgctttgggtcagaggtagcagtgccgggagctggcgattccagctctatggtcacaggcccatcattcgtgaatgtgcacctgcatgtaggccccaaacttgccatctttgataagctccggcctggtatgttttacgcagctgctccaggaagctgttgtagaagccctctgcctgctccgtgggcattgctaggtggaaatcaggcttgtttcccttcaggacacactggagggtaaactggctgacacacagaatctcgtactgtttgtccatcacactcttcgaccagtgcttcccactctcatcctcaaatacacgcaggtttagaatctttcggaccatgtgttccagttccttctgcgtatcctccagggaaatacccagcaacacacatatgccccttccaatggcactaatctgctctcctccaactgtgacgctggcccgggtgacgcgctgcaccacggccttcatggcggcggctggggcgagtggggcggcgccgcgctgcgtccggcctcgcgactctgaggtgcggctccgcagccggcgccctctggaggtgacacccggaagcgcgcccaactggccggtccgactcggtcggctgctacccaccccacgtcggccacgcccacgacgcgtgggtcgacgatatcccggaattccggaccgtaccagcctgcttttattaaccacggttctatagttcactagcctt

SEQ ID NO: 123951 - DNA, 650 bp, Homo Sapiens
  misc_feature (378)..(391): n is a, c, g, or t
gtgtaaataaagttttattggaacaccagccacactcattcgtgttcatgtagtgtctgtggcagcttttacattacaacagcagggctgagcatttgcagcagaggctatatggcctgcaaagcctaaaatcttcactttctacccctttacaaaaaagtttgccaattcctgctagagaagagatgacatacaactaagaacttaaacgagtgatcagggaacacaaattatttacataataaaatttcagagagggggggctggctgaatttaaaaagcatgaattacgtgaggcttgattactgtgaagagataagtcaacttaaagttacttacatttaacatacaatttatatgcactggtttaaaacacgnnnnnnnnnnnnnnaaatgtaacacaagccaactactgatttggtacagatgacaaaagggtgatcagttccaacttcaaaaggaaaactggctatgatgagtccatattgaaaaagtccctgtcatttatgggtggtccaagggatttttttcaagggtaattttacctgcttcattgttcatttaagggtacacactgaactttggaactaacgcttgcatgggtttgtgcctccaaagcagtcaacactgaagttttggctgggctcagt

SEQ ID NO: 123952 - DNA, 1350 bp, Homo Sapiens
  misc_feature (1296)..(1324): n is a, c, g, or t
  misc_feature (1350)..(1350): n is a, c, g, or t
aacgatacggctaggtacgaggctgggtgtgtaatcggcacgagggcgaggttctgcgcgggcgcggaagacgggcggcgcgtggcggaagggttcgggacggtacgcaccagccaccttcgcgccgaaggcggtagggcgccacggagaggaaccgctctaggcacgtaaggcctcgtgaggttgcgtcgcgcgcggagcactctgggacttgtagttctggagatggagcgagctgtgccgctcgcggtgcctctgggtcagacagaggtgttccaggccttgcagcggctccatatgaccatcttctcccagagcgtctcaccatgtgggaagtttctggcggctggcaacaattacgggcagattgccatcttcagcttgtcctctgctttgagctcagaagccaaagaggaaagtaagaagccggtggtgactttccaagcccatgatgggcccgtctatagcatggtttccaccgatcgacatctgcttagtgctggggatggggaggtgaaggcctggctttgggcggagatgctcaagaagggctgtaaggagctgtggcgtcgtcagcctccatacaggaccagcctggaagtgcctgagatcaacgctttgctgctggtccccaaggagaattccctcatcctggctgggggagactgtcagttgcacactatggaccttgaaactgggactttcacgagggtcctccggggccacacagactacatccactgcctggcactgcgggaaaggagcccagaggtgctgtcaggtggcgaggatggagctgttcgactttgggacctgcgcacagccaaggaggtccagacgatcgaggtctataagcacgaggagtgctcgaggccccacaatgggcgctggattgggatgtttggcaactgattccgactggatgggtctgtggagggggcccagccctcacccttctggcacctccgatcctccacacccaccaccatcttccccatccgggcgccacagaagcacgtcaccttttaccaggacctgattttgttcagctggccagggccgctgcgtcaaccagtggcagctgagcggggagctgaaggcccaggtgcctggctcctccccagggctgctcagcctcagcctcaaccagcagcctgccgcgcctgagtgcaaggtcctgacagctgcaggcaacagctgccgggtggatgttttcaccaacctgggttaccgagccttttccctgtccttctgatctctgacgacacccccagccagctcagggttttagagtgnnnnnnnnnnnnnnnnnnnnnnnnnnnnnacaataaagtttcaggcttttttacn

SEQ ID NO: 123953 - DNA, 685 bp, Homo Sapiens
cctttgctcagcaatctttattcagttcttcttgggggtgggatgcctcccttcccatgctcccacccctcccatcccagaactccgttgggctcagtgtcctctgttgagggaaggtcttggtgcccagatgcctactctgcaggagagggaggaaccttgtccctttgcgggagtcgctggtctcttctgttgtggggaagaaggaaggtgggaggggcactgtccaccagcactcagagctccattatgtccccagctggggttgcagggtaggggggactgggggtgtcccccagcctcagcagacggagggcctcagggatgaggctgccaggatagcgccagagaagcagctcagagcaagggctcctgagtgggggcagggctggggagaaggtcatgggggggctgcagtaggggtggtcattgtgcaggctgagttgagagaagtgggtggccatgttctcctcagacagaaactgcttgcgcagaggctcctgctcctcctccaggcgccgcttggtgctcatgggcacagctcctcggagaggggagctggcgtccaggccccaagtcacccccaaggcggcccgcgggaggcgctgggcccctccctgggggcctcgctgcaagggctgctgcaggatcctcgtgctggattcgccactcaggcctcgctcct

SEQ ID NO: 123954 - DNA, 1677 bp, Homo Sapiens
  misc_feature (214)..(223): n is a, c, g, or t
aggcggcgggggcgagacaaggtgtggcgggcggggcgggagcaaataacggggagggggggaggaaagaaatatgaggggcgagaggaatgagaggggcgagaaaacgataactatggtgggtgataattataagtcgggtctaggacccgctcgggccgggaaaaataagagaggggggtggaccgcgggtgaggagagcgaatatgggaannnnnnnnnncgccgataataattgcgggaggcgcgggaacaaaggagaggtataattgggggcggggagagggcggaatggccaaaggcggaggggtttgaattaagggggaggggggcaggggtgaaagtatttttcttcggagtgatggcggagcacgggggagggggatgaaaagataggtgggcgggggggcggttcggggaggacagagatgctccgatatactcagaagcccttgctcaaagctgctgctcttgcgctatcctcccagcctcagcagacggagggcctcagggatgaggctgccaggatagcgccagagaagcagctcagagcaagggctcctgagtgggggcagggctggggagaaggtcatgggggggctgcagtaggggtggtcattgtgcaggctgagttgagagaagtgggtggccatgttctcctcagacagaaactgcttgcgcagaggctccctggcgtccaggccccaagtcacccccaaggcggcccgcgggaggcgctgggcccctccctgggggcctcgctgcaagggctgctgcaggatcattgggttttggggtcctgcgggtgggatctgggcgacaggggaggagtctctgagggcgtggccaagagaggatgggcgtggctttaggcgggcacagccgcgaggttctgcgcgggcgcggaagacgggcggcgtgtggcggaaggcagtgcttgctcctcgtgggtgggggagggtatccggcttaagggggctgcggtggacaccacttcttaatgtcgggggtcttcgcggcgctcacctcgtgctcctagggttcgggacggtacgcaccagccaccttcgctgccgaatggcggtagggctgccacggagaggaacctgctctaggcacgtaaggcctcgtgaggttgcgtcgctgctgcggagcactctgggacttgtagttcttggagatggagcgagctgtgccgctcgcggttgcctctgggtcagacagaggtgttccatggccttgcaagcggctccatatgaccatcttctcccagagcgtctcaccatgtgggaagtttctggcggctggcaacaattactgggcagattgccatcttcagcttgtcctctgctttgagctcagaagccaaagaggaaagtaagaagccggtggtgactttccaagcccatgatgggcccgtctatagcatggtttccaccgatcgacatctgcttagtgctggggatggcggagcgtggaaggcctggcttttgggcggagcatgctcaagaagggctgtaaaggagctgtggcgttcgacaagctccatacaaggaccaggctggaagttgctgagatcacgcttgatagtgtcccaagagatacctcatctggctggggcaactgtcagtggacactattgacctgaattgggattacagagggctcgtggcacaa

SEQ ID NO: 123955 - DNA, 454 bp, Homo Sapiens
tttggtgaaagaagcaaatttattagaaacgactttgttacagggtagggcatcctcagaaaggagaaggaggaatgcgccattctttgttagtgtcttcgttgataagaaattctaaggagctgtcattaaaattggaatgtgcagatgtgctcactaaaggtagggggtattggtgctgttaaatcaagtttagcctaaagctgcctccttacatattttaagtttggcctaaaatttctctgtacatggtgaactataacctaaaaggatgtgtaaacagactgcaacctactcttgtgccaatcactgagtttcggccaatcaaaggtggccaactgttcaaatctcgttcaaataaggccaatgctgagctataaccagtctggctgtttctgtacctcactttcattttcagtacatcattttctttttcctgtccataaatcttctt

SEQ ID NO: 123956 - DNA, 561 bp, Homo Sapiens
  misc_feature (549)..(549): n is a, c, g, or t
catgaaaccacacaaacaggattcttttgttttattgataacagaaactgtgcataattacagatttgatgaggaatctgcaaataataaagaatgtgtctattgccagcaaaatacaattattccatgccctctcaacatacaaatatagagttcttcacaccagatggctctggtgtaacaaagccattttagatgtttaattgtgcttctacaaaaccttcagagcatgaggtagtttcctttacctacgatattttccacatttccattattacacttttagtgagctaaaatccttttaacatagcctgcggatgatctttcacaaaagccaagcctcatttacaaagggtttatttctttctactcaatttttcttaaaaagaatttcaagaatcactacacagctaagatatctgagacttgcaatggctggagtctatcagtacaatagtaattgcaatcagattcagatacaagagaacaggttctaacaatttcataattaagttgatattctgtttctatctataagctcacatttanaaactacttcct

SEQ ID NO: 123957 - DNA, 1272 bp, Homo Sapiens
  misc_feature (795)..(840): n is a, c, g, or t
  misc_feature (920)..(942): n is a, c, g, or t
gccttaagaaataaaagaatctttattgttttagaagcaattttgagcaaacagacaggcaaatatctaaagataccatacatcaactagtggtttaaacatttgaagaaaaaacatggaaagtatttacatggaccagtttctttatacaaatgctaaaacatgaaaaacacccaaaaccagatagagcgttaccatcaaggtatgaatctagtaatacaaataaaactacaaaaggtacaaagaacatgtagctataggaaataatagtgtaaatagcagtatataaactggcccatgtaaaatacaaaaatattcactgaagtcaggttttctataaaacagtgtttattagaggtattttactatgaatcaggcatataatctgaatgtagaaacttttagaaatattaacagcattcagtcagtgccatgcacttgtgcttccaattatttttttaaagctgctttgttttgactcatgtgaaatagttaaggcctacattcttatacacattatccatcttacaaggttaacaattttacactaaaacacagtttaaattaaaaacgattttgaaaaattacatctatatttaatccctaagaagtgttttaagctggtaatgcagctcgctgtagctctaagagaggggttagtcaggaatctgatcttgagccataaaggttttcaggctaaacaaagaacaaatttaagtgacggaaaatatttataattccaatataactcagttatattgttataaaaatacccatgctagcatgcaactgccnnnnnnnnnnnnnnnnnnnnnnnnnnnnnnnnnnnnnnnnnnnnnngatccattcaatgtcaatattttggaacccagacaattttctcattttctagtgaatgggaggcacataatcccaccacnnnnnnnnnnnnnnnnnnnnnnncaaccccacaggaaccttccatatatggctgcatattaacaattttaatatttgctcagccattccaacacacaccaaaaaagttctcctagaagcagcaagaaatatttgatgtgttaactaccaagctgatgtattttgctttctcctataaacattaggtggtacacggtaatttgacaattggtacatctctcagaccacaaaactgaacacaaagcacgtgaattaaaaatgattctaccataacgaataataacaacgaaagttttgattagcacagaaccatttaaatgtgaaagccaaaattagtgatgttgtagcggccgc

SEQ ID NO: 123958 - DNA, 909 bp, Homo Sapiens
ttttttagtgggacaataaaaatttaaaaataattttaaaatagaacagcttagagatagaaactaaattatttccaattcctactgtgccccaaacaaggttcacaaaagggctgtcctcccaacaattttctgaattctatatattcagcattaaattccatgataaagttggaaatccattcaccatttgtaatacatattgatgcatttaataaaattgcatgggccgtatcttttgcatttctgtatcctagtattaagtacagtgcctaccacaggccaggttctcaatacttgaataaatgacacaaaaatagccaggaccagcaagttttttctgggtgggcttcatagaatctctgtacttgctggaatcaccatgaaatccatggtcttcagctttgcattttcagcaacatagttatattgagttatcctcaggtgagcagtgagacccttgggagcggattcatggtagggtggctttgtaatgtgtcaccttggtgaggctatgtttcccggaactctcttccagtaagatgggccacaagagacattttgcttgataaccggagggcggaagtgaagcagcagcacattgtttttacacttggaaggttggtgctggggcaccaggcgttgttgcagttcacacgttgccatgtatctgctagatcacctcgttggtgtgggcagtagtcaggcctgcagccaggcctgcagctgctccaccttccccaggatcatcctttcagcttctctaattcctgggccagatgcatatttaactctgtgaggaagggaccagcttcttctgcaggacacccacatcatcgaagctggaggtggtgagagactgacatgggttcaggccatcctcgtgggttcagctcgtgctcgtgggct

SEQ ID NO: 123959 - DNA, 652 bp, Homo Sapiens
  misc_feature (213)..(237): n is a, c, g, or t
  misc_feature (594)..(594): n is a, c, g, or t
cacatgttaactacttgaaaaattcacatttatttactgtcaaaccgtgttaaactttacactggatattagtgatgggctcattattaacaggtttacacaaagggatgaaaaaaaagcagaattttgctgaaacaatttacatttcattagaactttatcataaaataaattaattactaaatataggcagaaggaatatggaagagtaannnnnnnnnnnnnnnnnnnnnnnnnaaaaaagaataggcaccttttgttcactagaaagtttgtgagaagtgcccagtgccctctttgccctctgttcaagaataaacaggggtgacacacaatcttttctagatttcatcacttttgtgcaaggcatgacataactggcttcaaagagtttgtttctccccataaaacacgttcttttggcaataagaaatttaaatgtaagtaataaagactaactttgtcaaagcagaacactgtatacagtggaaaagaagtgaaaatgagtagaacttaccatgacaaagtgtaagaaaaaacatttcataacatgtgcaaccaagagcttttcacaatattttcttcactctttanaattattttaatgacaattatatttcagttggacacaaatgtatttattttaccctag

SEQ ID NO: 123960 - DNA, 1761 bp, Homo Sapiens
taacagtacacagattgtgacattttatattctttgttaaatggttcctggtacatgttttaagtgcctctgcttctagtttaaatgaatgacccagacagagctttcaagctgtttcttagagaatgtgtggttgagcagaaatggctatccacacctgacacaggtccccacccacctcacaccctggaggcagcagcataagccccagtttccactatggtgtctcctcaatgaccagaatacccgccagttccaggggtcagcaattccattctctctctccggctcagttcagaagctgtgatggtcctgttagagagcactgcctgcaggtcaaaacctggaagaggctctcccaggccaggcgacaacccttcaggtgcagacggggaacaaaaggcttaacctgtgataatcccaacaccttctgaaaaaagagtaacagtcatccagcaacgggccatgggtaggggcgggcggtagcaggggacactgtcccctgcctcagcatgtcctgtccagagggtgggcacagatataggctcgcttctcaaggatctgctgggacactttcttaatctgctcatctaggttttctggagcatacttgtccagctgagagaggctgaagagattctgcaagtaagcttccacgcagaaggtgttggccaagagaacctcgtggtcgtggttgcggagcccaatgcggatggagcggctggcccgcgacagcacggccgtcatgccatacaggttgatgaggatgttggccacccgcttcagtaccagctgctcctccatgatggtcttgccaaagcggagcagcagtgtctccacggtccggccgaagcagtaggtgttctcctcaaacttgttggcactgtccgcaagactggggtgcacaactccatggttgcctgtcagccccaggtccacagttcggcccagggagtcccgaagcctccggccaacggtatccatgactgtgctcactttggcctgtttaagctcatggatcctggtagtcaggatgcggccggcatgctgcagacccgtcagggcgatgtacatccggagaatctcattggttccctcgaagatgaggaggatgcgggtgtcacgcagtatgcgctcgtacggatagtcccttgtgtagcccaagcccccgaggatctgcagcgcctcactcacacactgccaggcggcctcggagctgaacaccttcaccatggctgcctcgatggagcagtcgggaaagccaggttggtccagcatccctgctgtgaggtaggtcatactctccatgacgtaagccttctgagccatcagtgcaaatttctcctgaatcaatccaaattcactgagcctcttgttaaactgtttccttgtgcaggcgtactcagcagtcatttcaatcaatctcttgagcagcccagccacgacgctgcccatgctgaaccggccgctgttgaggatgttcatggccaccttaaacccatctccgacctctccaaggatgttttccacaggtatcttggtgttttcaaaatggacttcacaagtgttggagccccgaatgcctaatttatcttcgggtttcccattagtgactccaccaaagtctctttctactatgaatgctgtgattttgtctttcactgatccatcagaatcaacgacctcagtctttacaaacacagtaaaaatattggccagcctccggccgattcgcccacccaggcctcgtacctagccgta

SEQ ID NO: 123961 - DNA, 650 bp, Homo Sapiens
  misc_feature (193)..(201): n is a, c, g, or t
  misc_feature (534)..(591): n is a, c, g, or t
cggcatggacctatgaacagctggtaaaaaaagcaggctggtaccggtccggaattcccgggatatcgtcgaccacgcgtccgattagttttttaaaccttctgttagtggctttttgcagaagcaaaacagattaagtagatagattttgttagcatgctgcttggttttcttacttagtgctttaaaatgnnnnnnnnnatgtttaagaggggcagttataaatggacacattgcccagaatgttttgtaaaatgaagaccagcaaatgtaggctgatctccttcacaggatacacttgaaatatagaagttatgttttaaatatctctgttttaggagttcacatatagttcagcatttattgtttaggagtataattttattttatctaaaataatagtctattttttcttttgtattttgttataatcttaagcaacaaagaaaaaaccctaatatttgaatctatttatgtctttcaatttaaattcacttcagtttttgttattgtaatatatttacttttacatgnnnnnnnnnnnnnnnnnnnnnnnnnnnnnnnnnnnnnnnnnnnnnnnnnnnnnnnnnnccatgtattgatgtagttagtccacatttaaatttttatagaattatatagtttttgaa

SEQ ID NO: 123962 - DNA, 1148 bp, Homo Sapiens
  misc_feature (102)..(102): n is a, c, g, or t
caaattcactgagcctcttgttaaactgtttccttgtgcaggcgtactcagcagtcatttcaatcaatctcttgagcagcccagccacgacgctgcccatgntgaaccggccgctgttgaggatgttcatggccaccttaaacccatctccgacctctccaaggatgttttccacaggtatcttggtgttttcaaaatggacttcacaagtggtggagccccgaatgcctaatttatcttcgggtttcccattagtgactccaccaaagtctctttctactatgaatgctgtgattttgtctttcactgatccatcagaatcaacgacctcagtctttgcaaacacagtaaaaatattggccagtcctccattagtaatccagaccttggagccattgaggatgtagtgcttcttgtcttcacttagtgtggctctgctccggattgaggctgcatcgctcccactggctggctccgtgaggcagaaggctgcaatgtgctccccggacgccagtttaggcaagtatttggctttctgctcctcagtgccagccaagatgatccccttgaggccaatagcctggtgcgctgccagggtcacagtgatggacccatccatgctgatgatctcccctagtcttgagtacatggtgttggagaagcccaggccaccatattcttctgggacttgcagcccaaaaagccctaggctcttcaatttctccaaagtttcatctgggattttcccttcctggtcaatttttcgggagtccacctcttcagtgaagaatttttccacgggtcccaagaactgattgatttcattaagttcatcttggctaacttctggaaatgggaaaacttctttcttcttgattttgcctaggaaaagctctttggcgaaagctcgtacaggcgggctggtgcgcagtagccgccggttcgcggtagagaccaccagaccccggcaggcacgagccgcagccgtggtgcgcaggaagagcccgcagccgctcatgctgcccgatgttccccagcctcagcctcagtctccccttcttagcgccgcagggacacacacacgtctgatgacgttactaagccccgacacgcctcgtgcgattaaaccccagcctcgtactagctat

SEQ ID NO: 123963 - DNA, 1094 bp, Homo Sapiens
  misc_feature (898)..(913): n is a, c, g, or t
tttaaccttttcataatgcatcccccaagttgggggattaaatcgctgaaatgtttatttagcactagagaagtaaattcaaagttgcctgtgggtagacgtacaatagaattggttgacaaagtttggtttataaaatatacttacatattgtttcttaggcaaaaatcggcagcaatctggaataattcagattttttatgagattaattgccaatctttttatctgtgacgataatgccaaaaatgactcagagccaataaccttcatctgtcatatggaagaaacaatcctagggcaatagttttttcaaaagcggaactgacaaagataagcgtttaaaagggtcttgatcaattagttacaggaacatgaaagaaagtgttccacagagaactgtgtctcctaaaatctctttcttctatcatctaccttacccaaaatttctcaatccaaccacatctacctgctggtccatcagataccagatgcctttacatccaaaattctcttaatgctttttttccccccaccaagttctcattacaataatatagattggaagtttggaggatggaggggaataaaaaggaaaagtaaaacaaagtcactttccccaatccatatataaaactacaaaagagttttcctgtattgaaattaacatgcttttgtaatgagcaacgccttagtggtagggtattcagtgaatttaaactaagttaacagaatctgagaggcaaagaactaaaaacaggatatacagttaccccttaaaatgtcatttctgttaccaaaagcctgcttcagtaccaagttccacatatctgagttatgctacttcacttttagccaattccaactttgatactttaagaaaaaatcattttattgttnnnnnnnnnnnnnnnncttagatcttatagttcatgaacttctaggacaagataaattcctctgttttagacaccaatagatcacgtcagttaaatagactttgttttaaccggacgcgtgggttcgacgatatcccgggaattccggaccgtaccacctgctttttgtaccacggttcataggtcacatgctgggc

SEQ ID NO: 123964 - DNA, 740 bp, Homo Sapiens
tgcctcacagaattgagagtttgttcttacacacaagtttaatgccaccttcctctgtctgccatggaccaacaagcaatatatgctgagttaaacttacccacagactcaggcccagaaagttcttcaccttcatctcttcctcgggatgtctgtcagggttcaccttggcatcaatttgccctgaaacttagctgtgctgggattattctccttgtcttggttgttactgggttgagtgtttcagtgacatccttaatacagaaatcatcaatagaaaaatgcagtgtggacattcaacagagcaggaataaaacaacagagagaccgggtctcttaaactgcccaatatattggcagcaactccgagagaaatgcttgttattttctcacactgtcaacccttggaataacagtctagctgattgttccaccaaagaatccagcctgctgcttattcgagataaggatgaattgatacacacacagaacctgatacgtgacaaagcaattctgttttggattggattaaatttttcattatcagaaaagaactggaagtggataaacggctcttttttaaattctaatgacttagaaattagaggtgatgctaaagaaaacagctgtatttccatctcacagacatctgtgtattctgagtactgtagtacagaaatcagatggatctgccaaaaagaactaacacctgtgagaaataaagtgtatcctgactcttg

SEQ ID NO: 123965 - DNA, 476 bp, Homo Sapiens
catcacaacacagagacagacaggagcccgccctgctttaatgcgcatgcgggggagccgagaggcggggctgctggcgggggagccgagaggcggggctgctggcgggggagagcgtgtccgggcgctgcactctgcgcagggctcttggatggcgctcaccacgtcacgtcttctgtgctttcggccaagcactgggccaggtggctgtcaacatccagctgggtcagcctgcaagggaggggccacactcactcggccacctccgcggcatgctggccgcagagagcaccgtctggacctccgggccctctctgctcctgccgctggagaggatccggctggtcagaaacaagggacggggccaccccaggggctcatgcacccggcagaccacggtaaccgccagtggtgtttccacaccgtgcccgtgaggaggccacgccaggcccctgcgtccgagctgggggtgggga

SEQ ID NO: 123966 - DNA, 1208 bp, Homo Sapiens
tcctggggggtgatgagcgggagcggctctgggccgagctactgcgcacggtgagcccggagctgatcctggatcacgaggtgccttcactgcccgccttcccaggacaggagcccaggtgcggcccggagcccactgaagtcttcactgtcggacccaagaccttttcctggacaccctttccgccggacctgtggggcccgggccgttcctaccggctgcttcacggggcaggagggcacctgaaatcccccgccaggtccctgccccagcgcccggcacctgattcctgcagggcccccagggtggagcagcagccgtctgtggagggtgccgcggccctgcgcagctgccccatgtgccagaaggagttcgcccccaggtacttcaactcccgcccccacctgtgtcccgctggctcctaagctgcccccctacgtgtgggttgcgtctgagatgtggggcaggcgccactcactgaaaaaaggcatcagaggagcttccacatcatcggaacattttattcctcaggacgctacacgctcactttcctggcggagcaggtcagtgcatcgagttctgtttccgtggaaaatgtgcaccttggaaaccgcatgacagccccctcggcagggtccccgcggatccgccgcgacgcaggcacagcagcaagttcctccagcacgaagctggcctgcccgggcccaggtgtgagggactgttctgctcccagcagcgcccgctgacgcttccctctgcggtctcggcgcaagcgtctgtccctggccgccctcggagccgtgcccagcctggcatgcatatgcggtggttaaggatacagttaaagggtcaatcacgcgtgtccacgacagagacgcacgcggcctcacaccgactcctcggtggacagcaataatgggttgatatactcaaagccttcgaactctgactggtcgatcctctttatggcatcctcatcgtctggggtcagctgcacgggctcgctggtgaactgtgtgtcaaagttgtccagaccgtagtcgtctgtgatctgtggctggaatggagggagcgcctgcttcttctccagcaagtcccagtctatgctgcggaagaacgcgtgggacttgatgtcagaaaatccagtctgtggccggcagccgagcctctctttggggtccttatgtaaaaccttttaaacatgggag

SEQ ID NO: 123967 - DNA, 614 bp, Homo Sapiens
tcctggggggtgatgagcgggagcggctctgggccgagctactgcgcacggtgagcccggagctgatcctggatcacgaggtgccttcactgcccgccttcccaggacaggagcccaggtgcggcccggagcccactgaagtcttcactgtcggacccaagaccttttcctggacaccctttccgccggacctgtggggcccgggccgttcctaccggctgcttcacggggcaggagggcacctggaatcccccgccaggtccctgccccagcgcccggcacctgatccctgcagggcccccagggtggagcagcagccgtctgtggagggtgccgcggccctgcgcagctgccccatgtgccagaaggagttcgcccccaggctgacccagctggatgttgacagccacctggcccagtgcttggccgaaagcacagaagacgtgacgtggtgagcgccatccaagagccctgcgcagagtgcagcgcccggacacgctctcccccgccagcagccccgcctctcggctcccccgccagcagccccgcctctcggctcccccgcatgcgcattaaagcagggcgggctcctgtctgtctctgtgttgtgatga

SEQ ID NO: 123968 - DNA, 1268 bp, Homo Sapiens
  misc_feature (203)..(203): n is a, c, g, or t
  misc_feature (1012)..(1035): n is a, c, g, or t
tttatattaaatatatttattacgagtataaaatggtttgtggaaatcccaaatgattctgattttaaaacttgatgacagatccatcaagtacaaacgtgtcattcaatagtggttattttttcctggtcacctcctccctattttttcagagagataaatatttgcctaatactgtgtttaacttcttccaagacttaccntgagactcaaaactgtggccatggatattcattaaaaactctatcactgtggcacaatttcttcttctgcattttggagcttgtttaggaatgctaggttccaggaaactgtataaataaagccaatttagtgagaaaacagtgcaacctggttgtctgaagtgcctgatgaatttcacctaatggtgtaaagggcactcccaggtgctttgacaggttcacacagcaggactgggtgagattactgactttgtatatgtctatgacatttacacacatttgggtatttactgtacatactttaaaatagtggttaggtgctgtcattttcatgattttgacagttgagaaaccatgttagggagagagctttgtgtgacaccctaatcagaccgtgaagggacaggtctgagttgttcatagtgcagagcgaggcatggccacggtacacagcacacaggtgataggcaaatatttaatgcactgagccttttgtgtgtaaggataattagttactttaaggtattcggcatacacttttacatttccatattttaattggactttactggtcactgtggggcatagatacaactgaactgttcaatcctaatcaaataaaactattagtacattcttatacatctttttgggacaaagtacctcctacttacagagtatccaatgtaaattttttatggacaaagtaaatgtttataaatattttggcattttataacttttcctagcatagcttgagggctgataagaaactcagcagaaacaggctgtggttggcatgaagacannnnnnnnnnnnnnnnnnnnnnnngctctaggggattttactcactttgggacaaaagcaatatagtagcatcttttcactgaccaaggtaaccagagtgttgatcagatcacactgatacctacaagtggccaaaattaaatgacaagcatggggggaggtgccaggaagtggcaggggtatagagtgtgagagagacagatgcatgtgagtgtggtgtgatgagggaagcagctcaagagctgacacctaaaccc

SEQ ID NO: 123969 - DNA, 774 bp, Homo Sapiens
tttgtttttgccttgtccagtgctgtttattgagtccatcatcagaggcaggaaagacgccactcatcacagagggcatgtgggctgcgggcaggggcttagggtcctgcagaggacaagtagctgggacagcccttcaccccgacaccccatggccactgtgaggcaggctgaggagacaggacagggaatggccaggtgcagaatctgcacagccccctgccgggtcgcagatggccaccacccagcaggcccctggcactcacccacaggcagttccccaccccacttcccccttggaccctcccaaatcagggccggggagtgagacccagacctggccccgatggcaggaggcaccctagctgcttccagggccaggaggggtgggtgggatacagtgaggccaaacaaggcagaagcgggtgcagtagtccctggctactgcccagcttccgggactcccacagctgggctcagccttggtcctggcagtgctgggctcagaaatacagggctggctcgctgcggaagtccgagaggtcattctgactggcgggtgtgagcatggcctccacgggcgggggctctgcctccctcggggcctgctccagcgcctgctcctgccacttgctgaaggccacagagtgcttcggggtgtagctggacaggcctgagctaccctctggcagccgagagctctcgggtctcacgctgctcacaaacgtggcccggcctcgtgccgaattcaacaccacgcctcgtactagcctt

SEQ ID NO: 123970 - DNA, 1102 bp, Homo Sapiens
  misc_feature (128)..(129): n is a, c, g, or t
  misc_feature (135)..(135): n is a, c, g, or t
  misc_feature (982)..(1016): n is a, c, g, or t
  misc_feature (1020)..(1062): n is a, c, g, or t
tctcccaaaatttaaccccattccttgggaaaaagtggataaaaaaggccaggtttttcaaaaccggggggttctttttttctcaattggagaaaaggtgccagataaccaccagggggtgattctanntgaatntacctttctgaaaggtactcttttggaagccaggctggactttggcttgatccgtaggaggattcccggtgttccagtttcgcttgggcagacttctcccatgtgtttctacatactggaacgccttcaccaagcggagggtttcttccacgcttcggcccactgggagatcgttgacgctcaaatgcttgatgactccattggggtcaattatgaagagacctcttagtgcaagaccagaaccttctaacagcacaccgtagtctcgggaaatctgcttagttaagtctgacaagagtgcgatgttcatgtggcccaaaccaccattctttcttggtgtatttatccaggcaagatggctaaagtgggaatccactgagactgcgacaacttcacagttcacatcgtgaaattcgttagctttgtcactaaaagcaacaatttctgtaggacacacaaaggtgaaatccaaaggatagaagaaaagcaccaaatatttccccttaaagtcatcaaggcttaggtctttgaactctccattgacaacggctgtacccttaaaatagggtgcatgctgggtgacagcaggtgcatggcatgaggaactggtgctgaataattttgcttgactggaaccagaacacaataaatttgtcaagctcgttcttccacatgcagcaggcctgagggctgcagtggcagaaatgccccaaggaatggcactcacatgtcgggcaaccgacgctcggagcaaccgtcctacagcagccgccatcttcagtgcactcgggcgccccccggccgtaatggccgaattcccgggcatatgtccggtaccgtcgactgnnnnnnnnnnnnnnnnnnnnnnnnnnnnnnnnnnncggnnnnnnnnnnnnnnnnnnnnnnnnnnnnnnnnnnnnnnnnnnnacgaacagagctagcgccctatagtgatcgatacagtctt

SEQ ID NO: 123971 - DNA, 997 bp, Homo Sapiens
  misc_feature (883)..(917): n is a, c, g, or t
gtcttcttcaatgagaagtgcagatacacatgggtgatcacggatgtaccttgctgaaagtactctttggaagcagctgggacttggcgtgatgcgtagagaatcccggtgtgccagttcgcttgggcagacgttgctccatggtggtttctaccatactggaacgccttcaccaagcggaggtttcttccacgcttcggcccactgggagatcgttgacggctcagatgcttgatgactccattgggtcaattatgaagagacctcttagtgcaagaccagaaccttctaacagcacaccgtagtctcgggaaatctgcttagttaagttctgacaagagtgcgatgttcatgtggcccaaaccaccattctttcttggtgtatttatccaggcaagatggctaaagtgggaatccactgagactgcgacaacttcacagttcacatcgtgaaattcgttagctttgtcactaaaagcaacaatttctgtaggacacacaaaggtgaaatccaaaggatagaagaaaagcaccaaatatttccccttaaagtcatcaaggcttaggtctttgaactctccattgacaacggctgtacccttaaaatagggtgcatgctgggtgacagcaggtgcatggcatgaggaactggtgctgaataattttgcttgactggaaccagaacacaataaatttgtcaagctcgttcttccacatgcagcaggcctgagggctgcagtggcagaaatgccccaaggaatggcactcacatgtcgggcaaccgacgctcggagcaaccgtcctacagcagccgccatcttcagtgcactcccccggccgtaatggccgaattcccgggcatatgtccggtaccgtcgactgnnnnnnnnnnnnnnnnnnnnnnnnnnnnnnnnnnncggccgcttcctcgctcactactcgctgcgctcgtcgttcgctcaacgagctagggcccatagtgagtcatcacaagttt

SEQ ID NO: 123972 - DNA, 1111 bp, Homo Sapiens
  misc_feature (984)..(1018): n is a, c, g, or t
  misc_feature (1022)..(1061): n is a, c, g, or t
gttccaaggccataatttggggtccccttgccttttctaacaaaataaacccattcttgaaaaatgataaaaagcagggtttccaacctgtggttcttcttctcagttgagaaaggtggcagatccaccatgggtgatctactgatttacctttctgaaagtactctttgggaagcaactggacttggcttgatcgtaggagaatccggtgtccagttcgctgggcagacttctcccatgtgtttctacatactggaacgccttcaccaagcggagggtttcttccacgcttcggcccactgggagatcgttgacgctcaaatgcttgatgactccattggggtcaattatgaagagacctcttagtgcaagaccagaaccttctaacagcacaccgtagtctcgggaaatctgcttagttaagtctgacaagagtgcgatgttcatgtggcccaaaccaccattctttcttggtgtatttatccaggcaagatggctaaagtgggaatccactgagactgcgacaacttcacagttcacatcgtgaaattcgttagctttgtcactaaaagcaacaatttctgtaggacacacaaaggtgaaatccaaaggatagaagaaaagcaccaaatatttccccttaaagtcatcaaggcttaggtctttgaactctccattgacaacggctgtacccttaaaatagggtgcatgctgggtgacagcaggtgcatggcatgaggaactggtgctgaataattttgcttgactggaaccagaacacaataaatttgtcaagctcgttcttccacatgcagcaggcctgagggctgcagtggcagaaatgccccaaggaatggcactcacatgtcgggcaaccgacgctcggagcaaccgtcctacagcagccgccatcttcagtgcactcgggcgccccccggccgtaatggccgaattcccgggcatatgtccggtaccgtcgactgnnnnnnnnnnnnnnnnnnnnnnnnnnnnnnnnnnncggnnnnnnnnnnnnnnnnnnnnnnnnnnnnnnnnnnnnnnnncttcaacgactgagccggctctctatagtggacgtttcccttttttcaac

SEQ ID NO: 123973 - DNA, 894 bp, Homo Sapiens
tagggtgtggccaaggattacccaacaatgggggtgggattcttaactggaattttaccctttcctggaaaaagttacttctttgggaagccaagctgggaccttggctttgatggtagggagaatcccggttttccagttcgctgggcagacttctccatgtgtttctacatactggaacgccttcaccaagcggagggtttcttccacgcttcggcccactgggagatcgttgacgctcaaatgcttgatgactccattggggtcaattatgaagagacctcttagtgcaagaccagaaccttctaacagcacaccgtagtctcgggaaatctgcttagttaagtctgacaagagtgcgatgttcatgtggcccaaaccaccattctttcttggtgtatttatccaggcaagatggctaaagtgggaatccactgagactgcgacaacttcacagttcacatcgtgaaattcgttagctttgtcactaaaagcaacaatttctgtaggacacacaaaggtgaaatccaaaggatagaagaaaagcaccaaatatttccccttaaagtcatcaaggcttaggtctttgaactctccattgacaacggctgtacccttaaaatagggtgcatgctgggtgacagcaggtgcatggcatgaggaactggtgctgaataattttgcttgactggaaccagaacacaataaatttgtcaagctcgttcttccacatgcagcaggcctgagggctgcagtggcagaaatgccccaaggaatggcactcacatgtcgggcaaccgacgctcggagcaaccgtcctacagcagccgccatcttcagtgcccccggccgtaatggccgaattcccgggcatatgtccggtaccgtcgactg

SEQ ID NO: 123974 - DNA, 1651 bp, Homo Sapiens
aatggtggtaaaatgcaaatgttttaaaatatgtttattttgtatgttttacaatgaatacttcagcaaagaaaataattataatttcaaaatgcaatccctggatttgataaatatcctttataatcgattacactaatcaatatctagaaatatacatagacaaagttagctaatgaataaaataagtaaaatgactacataaactcaatttcagggatgagggatcatgcatgatcagttaagtcactctgccactttttaaaataatacgattcacatttgcttcaatcacataaacattcattgcaggagttacacggctaatcatggaaaattatgatctttgttagcttaaaagaaaattcagtttaatacaaagacattcaagatgaaaatttcaggaccgttgatcagaagctttcaatgtgtgttgctctactttattataggcaagattcaagtaaggctaagaaagaagagtgtttccattgagacatgatctaagaatagccttctatagaggcaaattatgttctgtagaaactagctagccagccaccaagatgttaccaataaaggattccttgtactagcaactaaccatgtttaaaaggtcttagccagaattacaaaaacaaaacatttagagtaatacttatgaatacaagcataattggttccttgccttctacaaataaccatcttgaaaatgataaaagcaggtttcaactgtggttcttctctcagttgagaaggtgcagatacacatgggtgatctactgatttaccttctgaaagtactctttggaagcagctggacttggcttgatcgtaggagaatccggtgtccagttcgctgggcagacttctccatgtgtttctacatactggaacgccttcaccaagcggagggtttcttccacgcttcggcccactgggagatcgttgacgctcaaatgcttgatgactccattggggtcaattatgaagagacctcttagtgcaagaccagaaccttctaacagcacaccgtagtctcgggaaatctgcttagttaagtctgacaagagtgcgatgttcatgtggcccaaaccaccattctttcttggtgtatttatccaggcaagatggctaaagtgggaatccactgagactgcgacaacttcacagttcacatcgtgaaattcgttagctttgtcactaaaagcaacaatttctgtaggacacacaaaggtgaaatccaaaggatagaagaaaagcaccaaatatttccccttaaagtcatcaaggcttaggtctttgaactctccattgacaacggctgtacccttaaaatagggtgcatgctgggtgacagcaggtgcatggcatgaggaactggtgctgaataattttgcttgactggaaccagaacacaataaatttgtcaagctcgttcttccacatgcagcaggcctgagggctgcagtggcagaaatgccccaaggaatggcactcacatgtcgggcaaccgacgctcggagcaaccgtcctacagcagccgccatcttcagtcggacgcgtgggtcgacgatatcccgggaattccggaccggtaccaggcgttggtgggtgatgggtgcgggatagctccgaagcgctgtggttc

SEQ ID NO: 123975 - DNA, 909 bp, Homo Sapiens
  misc_feature (839)..(839): n is a, c, g, or t
  misc_feature (843)..(843): n is a, c, g, or t
  misc_feature (894)..(894): n is a, c, g, or t
aagagtttaagtggttttatctttattggaaggaaatgtgttaaagacagactcactacagtgttgagacagtagtgagtagcacagtaaggagactgcccaggacttgaggtccttggtccctctatagaagtatcaagtgtttgtaaaaggtttagcacccatgtgacagaaagaagccatcatcctcttaatttctcttggttttacttaatatatagaagggcaaactagtgggcctctgagtgcaagatgaggacttcattagaataaagacatattgcctcctggatttctaacccatagctccaagagcctcagtgtcagaacataggtaagggacttgatttactgagagaccctaccctacaacatcctgtggacattagagctctgtgctcctgtcactgagtatcactgtgagcttaaaatatgtcagctgctccatttctctttccttttgtgtattcagagctctgattttaaaacactgaaatctggaagattccagtagctgcactctgtctaaagcatatgaggaatgactgtagaatttgcatgtcctctatagcttttgttcacatgtatgcaggcagggataatgttattgattgttcaacctatttaccttgcccaggggttgttagtaatgcccaatatgaatcaagttggcacaagtgtgatcagatgatcaggtcttgtctctttacactgcaccaccaatgcttcagcactgcctccctttgccttaaggactgggagtgcgatgctgtgaatgggatggaaggggttattcacatgtgctttcattacttcttcccttcctcagaagggaaggnaaanacatctataaaacctttacagctgtgcagacttctgtatccctccatcctnatttccaccctttgt

SEQ ID NO: 123976 - DNA, 996 bp, Homo Sapiens
  misc_feature (52)..(73): n is a, c, g, or t
tttttttactgttatcactacaaattttattcagaaacccatctttgtatgnnnnnnnnnnnnnnnnnnnnnnaaaaaaaattccccttatgaactggtttggtcaatcaactacaacactttctagcagacataaggtaaaaatggcatggctcagaatcgcccagatctttcacgatctctcgaccgcctcctgtcacgctcccgtccgccgccacctccaccaccgccaccgccaccgccacgaccacggtctctagaccgagaacgacgctcccgggatcgggatcttgatctatgcttcttgcgacggcggccatacagctcccgccgcagctctctggaaatgggcttcaaatgcatgaagttgcagaagccgcctcgtgtgcattctcccatctcatactgacggcagcaggcttctctgaagtccgtcacgggtgacagctcggcgtggatcggctgtccattaaaccaacggttattcaagtcaatcacagccttttccgcatcttcctcacggcgaaacttgacgtacacgttccccaccaggtggtctcccaggttgtcacagacgttcatctcctctacttccccatacttctcctccatttctgtaaaaacctcctcaaaaaactcatcatagtgttcctgcatctccacatcgctcacggcacagcgcaaaccgtcagcagactgggaagagttttgagggttacggtaaatgttcaagagggcaatggtctggctaaacgtcggtttattgtgcaaccgagagcacctgtctccatgacgacatgctccaattttgaaataaaatgaacagttgactttgtctttctcggtgccgaagatggaggccagatactccgccatttcccacccgccgccgccgctgccgtcgacactgctgccgacgccgccgaccctgccgacgccctcgggagacgtcacccggacgcgacctcgtgccgaattcgccacccagcctcgtac

SEQ ID NO: 123977 - DNA, 783 bp, Homo Sapiens
  misc_feature (648)..(648): n is a, c, g, or t
  misc_feature (684)..(684): n is a, c, g, or t
  misc_feature (690)..(690): n is a, c, g, or t
  misc_feature (773)..(773): n is a, c, g, or t
acaatagagcatccccgaacgggtgatgcggttgaagaagaaagacatccagtcttccattaggctcaactggtttcagctcaaagcagaactaatacttttaatggaatggctggagctctcatactgttactctaggaaaatctatcaattattgagtccaggtcaggggaccccccaggtctgtctcttcacccacacatcatcatcaactcaccagggaggcggggccgggactgaggccgggcccgagactcaataaaaagctgctggccctggtgcttcaccagatgcacatccttacagatctgctggaaagtcacctgtgggacacagcaccacagtgagcagaaccaggtggtgtcgccagtgtcaggggccaagggcacaataaaacaagaaggtaccagtggggaggcacagacgccttgatgggagcaggacaagaaggaaaaggcaggaaggagagggcaaaggaggatcgggcaagactctgggactggcagtgctggttccaagaaggagaggggaaagggcgattagagggtgaggtaggagcaggtcactcactggcgcaggaggcccaggcccctctgcatcacccccgttgctatcactggaggacccagggctgtggagagggcctgnggatgtcacggcgccgactccacagagtcccgtggngctggngctgtggacgggctgcagcagcagccggtggatctgctctgacagctcctggatatcagtgtccagggagggagctcggctgnggcccgggga

SEQ ID NO: 123978 - DNA, 816 bp, Homo Sapiens
tttattttgccattagaaatgcttttatttataaaagaactacttaaatataaacatctctacatagaaacactcttcacaaaaggactcttgcattactgccttctgaccacgaccagcagacactgtggatgtaaggactccacggtgtctcccgactcccaggattttaaggctaaatgtgcacttggaggaacaggggctgtaaggctatttcttccctttcttttaaaagacaaatttcatggtttcccattccaagataggcttcatagctggggaagatcttaagattcttggtctaaggggtaagcaaatatcttcctgagactgggaggtatgatcaggcacttgggaatctggctttgaatgtcatctctgaagcatggaagttagtggtgaaaaaaatcttatttccaagtctaggataagctacttctggaatggcttatcccaattcaagtaagtcacaggtgttatgttgtctgcatctatggatgtaactaaacagtcattagggtgcttggatgaagaagaaagacatccagtcttccattaggctcaactggtttcagctcaaagcagaactaatacttttaatggaatggctggagctctcatactgttactctaggaaaatctatcaattattgagtccagggcaggggggccaccagacatcacagactgtgtaaagaccatcagaaaggtgtcattgaggttgcggtatggtggcttacacctgtaatctcagcagggaggcgggagggttgcttgacccaggcgtttaagaccagcctgggcaacatagcaaga

SEQ ID NO: 123979 - DNA, 1305 bp, Homo Sapiens
  misc_feature (1042)..(1061): n is a, c, g, or t
ctcgtcatctgtggtgcaggggtcagacagacaaggatgggagtgccagggcaccacttcatcatgaatgctggttttcacaccttttccttattttattgccaatcaggacaaggccttgaaggaacgcagccttagacatcaggtgaggatgatggaggtagacagtcgactgaatgtcagctggaaaatccagtcactagttggggtttggtggccatgttttctacccagacaggccctgcttttctaggatgtggccttagagcaagaacagacccaacagccagcccttcatcctccagcgtctgccataggaatgtgagaggggtgtttgctgagcgctccgggcacggccagagggcaagtgagcatgcacggacctcttccccctgtcctgtttctcacccagcacctggggagatcggtgctaccaaggaagagagcacacagataagacagaggggaggaggtgggcatttcctacattcctccttgtttgccgctgctgagattgcagtatttattgcaatgtaaatgtatcctgaaggtggggaggaatgtttaatctaccatgtccgtgtgtcatcttggtttgtgtttttccctgtttgtagcaagactctgatgataattctgtttctcatctgcccattcagtattttgttttccttccgtcaagttgtcttattttttcaatgactacctctccatcattgaggttctggtgaagctctctgcagctgtctcattccttcccaacgatagtaacaggaaatgactctttagcatcgatacctcaacatcaatttagggtagagattcctgcccctcttttgtcacagattaggaaattgagaactagggttaaccttgactatatttagaggtctttttgcctcttttccccttaacaaggatttcttatggtggtttcagtttcatttgcataaaggtattgagagggaacaaaaaacataaagctgagaatcttgagagagctcatctaccctgtctgttggtcagactcaaatgagagttnnnnnnnnnnnnnnnnnnnntctgtatgcctgagtaccatcctggatgaatctagaaggtatggggtagagcttgacagggttcctgtgtacccactgggtatccgttagaggtaagggagaggagaggattgatagagtgttgcaaaagtatagattattcattgagataaaggatttggtttccctgccatgagtattaaaaaaatttaagttttcccaagcttgcatctctgaccaaatttcacataaaacattggaagga

SEQ ID NO: 123980 - DNA, 1088 bp, Homo Sapiens
tttttgctgtaacagtgtttattgatgatgagtccagggctcctgctgaagccctggtggggaggggcacagagcgagatggggcgtaatggaatgcttgaaggctgctccgtgatgtcggtcggagcttccagactaggcgagggcagggtgaggcctcgggcacacagccggcgcccagtcacccggcccagatggagggcggccgggccctgcgcaggcacttgccaaggtggctcacactcacgcacactcgcaccgagactcaaggccgtctccacaactccaaccagtgcaaatgacttagtgcaaattaaattcagaagggacgggggaaacagagtcgtggaggctttgaatctctcagaaaaaaggaaagacaggaaagctcagaaacaaagagacagaaggatgaaaaagaagaagagggaggtggtggggacggcgtcatcccgctggaggagctcagctctgggatgatgtggtggctggtggtcaaccgtccgccgcagggggtggccatgaagatggagtcgccggtgcggggtgggtgctgcgggcgctgctgttccgatggtgtctttgatgttgggctgatgaggtctggttcctctagcttcaccttccagagccgattcctgagtcaggtagtgcagtggttgtaaagtgcagcatattcatttccaagctagagggttttgtgtccggattcaaaggcccaggcttgagctgggtagcaccatttctttcatgttgtgggttctgggagcccagagggcagccatagtgtgccgactccgtggaggaagtaaagaaacagacccgcttcttgccgcagccccaccagcctaaggtgttcaggaaggccggacgcgcctcctctgtcctcgccgtcacaccggaccatgtcatgtcctgcttgtcacgtccaccggacctggcgtcttggccttcggcagctggtgggcacgtccaccccagctggagacctggcctcgtctccagcccgaacgctgaggcaccgatcccggcgccgtcgccgcccgtgaggccggccttggccacgggctctggaggccagtgcctcc

SEQ ID NO: 123981 - DNA, 1192 bp, Homo Sapiens
  misc_feature (68)..(68): n is a, c, g, or t
ctgtaacagtgtttattgatgatgagtccagggctcctgctgaagccctggtggggaggggcacaaancgagatggggcgtaatggaatgcttgaggggtgctccgtgatgtcggtcggagcttccctggatgctgtactgtctgccaagccagccccaggggctgagcggtgagggcatacagcgtcaccaagtccactgtgggccctctccgcaccagaccctgggccgcagtgcttggtgggtccggcgccctcaggtcgagcccctgcagcctccttgctgcgcaatgtcccggggccccccttcccgtggccgcttcgccctcgctggtgactgtcctgctgctactccgccgagcactgcctgtcttcccgctctccagccctcgaggctccggcataggcctgagaaagccgtgccggagctgcccctgtgcctgctactaaatgaattgcggtgggtgaggtggcagctggggacccctctgtcctgtgtcccctgccttgtccctgtctgacccaggcctggggtaccaccccacgtgctggaccctacgctggccacccctgtgctccctccgctgccctcttgctctttctgcctgtaacgggcccataacccgcccagccttgcgcagtctcggctccccccgagaagatgtcacctttgctaactctcctgcccccatcctgcccctctgctgggagggtgtctgcttctccccgccagccctcgatcccctaaacctccttctttcagaaggctggggaagcgaggcctggggagggaagggactcacctgcccggcagatggggtcctcacctgcccgctgctgccagctacacctccgttgcccaggccctgggatcaaaccctgcccaccagctcccctcgtccaaccagctgccacgtcctgtaaccaaaagtgaccgggatgaatgcctggctcccccttctttccagccctagctcaggcccatcgtccccagctgatgtcgccctgtctgcacgatgcctgggcgcctactccacactcctcactggcctcaggccccaccagccatgccttgagctagcccctccacccgtcatcactcctgacagactccagatgttcaaggtgctccttggttcccacaagctctcctccagcacccccataaggaggattgacagggtaccgagctg

SEQ ID NO: 123982 - DNA, 455 bp, Homo Sapiens
gcggccgcacacgtcctccatgtccgcgcccagccgggcctgcgccgcctgcagctccttggacagccgtgcccgcgtctcctccgccaccggggtcagttgttcctccagttccgatttgtaggccttcaactccttcatggtctcgtccatcagcgccctcagttcctgggtgacctgggagctgagcagctcctcctgcacctgctcagacagtgtctgcacccagcgcaggtaatcccaaaagcgacccagtgccagttcccagcgctggccgctctgccactcggtctgctggcgcagctcgggctccggctctgtctccaccgcttgctccaccttggcctggcatcctgccaggaatgtgaccagcaacgcagcccacagaaccttcatcttcctgcctgtgattggccagtcggctcctggggaaggacgtccttcacctccgctgg

SEQ ID NO: 123983 - DNA, 687 bp, Homo Sapiens
atacatgatacaatcgagctcggtaccgaacgggtgatgcggttggggcggagatgaatgagctctcaggagggaggatggtgcaggcaggagtgaggagcgcagcgggcggcgagcgggaggcactggcctccagagcccgtggccaaggcgggcctcgcgggcggcgacggagccgggatcggtgcctcagcgttcgggctggagacgaggccaggtctccagctggggtggacgtgcccaccagctgccgaaggccaagacgccaggtccggtggacgtgacaagcaggacatgacatggtccggtgtgacggcgaggacagaggaggcgcgtccggccttcctgaacaccttaggctggtggggctgcggcaagaagcgggtctgtttctttacttcctccacggagtcggcacactatggctgccctctgggctcccagaacccacaacatgaaagaaatggtgctacccagctcaagcctgggcctttgaatccggacacaaaaccctctagcttggaaatgaatatgctgcactttacaaccactgcactacctgactcaggaatcggctctggaaggtgaagctagaggaaccagacctcatcagccccacatcaaagacaccatcggaacagcacgaccgcatcacccgttcggtaccgagctcgattcgatcatgtc

SEQ ID NO: 123984 - DNA, 846 bp, Homo Sapiens
cgggcgcaaaaccgctctggctcctggggagctcgccccctcttccccggcgttgtcgccgtccacagtgtcaggttgtctcgcagcagctgcatgatgagggtgctgtctttgtaggagtcctcgctgagggtgtgcagatcagccatggcctcgtcgaaagtggtcttggccagagagatggcctcctcggggctgttggcgatctcgtagtggaagacggaaaagttcagggccaggcccaggcggatggggttggtgggcggcatctccttcttgctgatgtccatggcctcctggtaggctgaccgggctgagtcaatgatgcgcttcttgtcgtcaccggtggccacctcggccaggtagcggtagtagtcacccttcatcttcaggtagaagacccggctctcggcgtccccggcctccttgatgaggtggctgtccagcaggcccagcacggtgtcgcacacgccctggagctcagtctccaccttctcccggtactcacgcacctcgggccccttctcctccgagccctcctcgttgcttttctgctcaatactggacagcaccctccaggcagccctctggccgcccaccacgttcttataggctactgagagcaggtttcgctcttcgcaggagagctcctcgcccttctccacggcgcctttcatgaaggctgccatgtcctcatagcgttcggcctgctctgccagcttggccttctggatcagactggctctctccatggctctggggacacacaggcgggcggcgggctaactgctgcctgggaccaatgcctcgtgccgaattcaccacccaggcctcgcacctagccct

SEQ ID NO: 123985 - DNA, 1385 bp, Homo Sapiens
  misc_feature (98)..(134): n is a, c, g, or t
ttttttgagtgtcacaggggaactttattgagaggaaacatggtcacacccagcagacatgctttccctcaatctcggtcttgcactggcgcgcgcgnnnnnnnnnnnnnnnnnnnnnnnnnnnnnnnnnnnnnccatctccagcccctgccactgtccagttctcagccacaaggcgggacactcctcaattcctacgatcagaggcagcaggggcaggagggaggcaagaggaggggagaagtagcctggtcctggggtcgggaggaagcgggtgcggagagcaggggtgggggcatgaccagtggttaggtgcgctcaacagctgcaagaagagtgggatccccagccccaggtggcctcagctctgccagtccctctccacggagccctttggagcaagaacagcgcctaggggagaagggtggggcctcccaccccatactagtcctctcggcagggtgggggactggagggggcagggcggggcggtggcgggcaacactcagctctggggctcctggggagcctcgcccccctcttccccggcgttgtcggccgtccacagtgtcaggttgtctcgcagcagctgcatgatgagggtgctgtctttgtaggagtcctcgctgagggtgtgcagatcagccatggcctcgtcgaaagtggtcttggccagagagatggcctcctcggggctgttggcgatctcgtagtggaagacggaaaagttcagggccaggcccaggcggatggggttggtgggcggcatctccttcttgctgatgtccatggcctcctggtaggctgaccgggctgagtcaatgatgcgcttcttgtcgtcaccggtggccacctcggccaggtagcggtagtagtcacccttcatcttcaggtagaagacccggctctcggcgtccccggcctccttgatgaggtggctgtccagcaggcccagcacggtgtcgcacacgccctggagctcagtctccaccttctcccggtactcacgcacctcgggccccttctcctccgagccctcctcgttgcttttctgctcaatactggacagcaccctccaggcagccctctggccgcccaccacgttcttataggctactgagagcaggtttcgctcttcgcaggagagctcctcgcccttctccacggcgcctttcatgaaggctgccatgtcctcatagcgttcggcctgctctgccagcttggccttctggatcagactggctctctccatggctctggggacacacaggcgggcggcgggctaactgctgcctgggacccgacgtgtggtcgacgatatcccgggattccgaccgtaccagcctgctttttgtaacactgttctatagtgtcacctaaattgc

SEQ ID NO: 123986 - DNA, 529 bp, Homo Sapiens
tgagtggaaaacaaaaggaaaacttatttattcttagaggtgggaatgtggggagtggggcagaacaggtggtggccctgggagagggtcccaaggggcagaggttggggatgtctcagtaaagaggggcaggtcatgaatagagcctccacccccagcagggggttcctgggcccgcccaagcactgggctaaaacgtggaaactgggcattgacaaagtacagcgggatgtgggcaattcggcctgtggaccagcccacactgagcagggcccctttgttgaaggaaggatggaaagtgatgagctggggctgggctcctggctccccctggataatgccacagggaaggagctcaaacacagggctgtttcgagtgcgaaaaaggaggatgactggtttaccatcctgtacccttggctttcctttcataagcacagccagacgttccccactggggtcccagaccatggagtgagcctctcccccaagcctctcctcaccatctggtgtctgtattgttgtctca

SEQ ID NO: 123987 - DNA, 1447 bp, Homo Sapiens
  misc_feature (1429)..(1429): n is a, c, g, or t
agtggaaaacaaaaggaaaacttatttattcttagaggtgggaatgtggggagtggggcagaacaggtggtggccctgggagagggtcccaaggggcagaggttggggatgtctcagtaaagaggggcaggtcatgaatagagcctccacccccagcagggggttcctgggcccctttgttgaaggaaggatggaaagtgatgagctggggctgggctcctggctccccctggataatgccacagggaaggagctcaaacacagggctgtttcgagtgcgaaaaaggaggatgactggtttaccatcctgtacccttggctttcctttcataagcacagccagacgttccccactggggtccccgaccatgggagtgagcctctcccccaagcctctcctcaccatctggtgtctgtattgttgtctcagacagatctgccacaatcgtggctgactttgcacctccttttcacccctttccctcatctctacgttctggtaaagacagggagtaaatcagtggctctcccaatacagtgaacagcagtcggctgccatctgggctccagcagccagtctgacagcgccctgatagagtaggccacctctcacaagtccacatctgggcctcccagactcgaaagacagctgaaggagtggtagccaggattttgctgccgtctggggaccagagcaggttggtcaccccacctcctcgaaaccagggaagggggacacaggtctctgttgagacatcccatacccggatagcagcatccacgggtgaagctgagagcagccgccccccactgggggcccaggccaagctggtaacaggtgtatgcccagggtgagacagcacttgggcacagccagaagagggtggggtagacaaggaggtagggtccagggtccagataagaatgcagctctggcaggccacagccaagacagaggcactaaggggcttccaggccagagacgccacatttcgctgcagccggtgcttcagggaggggactatggtgcaatttgtgacttgggcaaattcagcgatcagatcttcgctcctgagagacagatgggggaacagggacccatggagggaagaggcccatcgacagagtgccagggcccagccggatgccgtcttcacccactcaaacacctcttcttctgagtttgcaatttcatttagcaccccaaaaaggcccacatcacgccaaatgttgatgcatctcttccacacttgctcccggtgatggatgaaggcagttcttgtgccatggtccagccttccaggggtctttaggggatcctttgtcagttgtaggacaggaagattgatccacggttcgcaggacgtctgcagtcggcaactcctggccggaacggcacagaccgcactcccgcactcgtgtcccgggntagattcgtatgcggacg

SEQ ID NO: 123988 - DNA, 941 bp, Homo Sapiens
  misc_feature (81)..(81): n is a, c, g, or t
aggtgagagccagccgcccccccattggggggcccaggccaaagctggtaaacaggtgtatgccccagggtgagacagccnctgggcaacagccagaagagggtcgggtagacaaggaggtagggtcccaagggtccaagataagaatgcagctctggcagcccacagccaagacagaggcactaaggggcttccaggccagagacgccacatttcgctgcagccggtgcttcagggaggggactatggtgctgctggcattatacacacggactgagtcatctagcagggccactgcaaacttgttggtgtgggggtgccatgcaaagacacgcaagcagcagctggaccaatttgtgacttgggcaaattcagcgatcagatcttcgctcctgagagacagatgggggaacagggacccatggagggaagaggcccatcgacagagtgccagggcccagccggatgccgtcttcacccactcaaacacctcttcttctgagtttgcaatttcatttagcaccccaaaaaggcccacatcacgccaaatgttgatgcatctcttccacacttgctcccggtgatggatgaaggcagttcttgtgccatggtccagccttccaggggtctttaggggatcctttgtcagttgtaggacaggaagattgatccactggccccggaagtcggggggcgggctctcatagctactgcccgtcaccagctcgttattgtgctcatatagggtgacttgaccccgaggcggtggaggagggaacaaccccagagagcacatcttgccggttcgcaggacgtctgcagtcggcaaactcctggccggaacggcacagaccgcactcccgcaactcggttcccgggctagattcgtatgcggacggtaccgcaggcctcgtgccgattcgaccccagtctcgtactag

SEQ ID NO: 123989 - DNA, 993 bp, Homo Sapiens
  misc_feature (112)..(112): n is a, c, g, or t
ggtcaaagacgcgtgaccaccgccgcctagggcgcctccgccatggcccaacgaaccgaagggaccagttcccttgggccaggcgggggcaccccccccgaaaccaggaagnggaacccggtcttgtgaacatccaacccggaaaccagcttcccggtgaacttgagacaccgccccccactggggcccagccaagctggtaacaggtgtaggcccagggtgagacagcacttgggcacagccagaagaggctcgggtagacaaggagtagggtccagggtccagataagaatgcagctctggcaggccacagccaagacagaggcactaaggggcttccaggccagagacgccacatttcgctgcagccggtgcttcagggaggggactatggtgcaatttgtgacttgggcaaattcagcgatcagatcttcgctcctgagagacagatgggggaacagggacccatggagggaagaggcccatcgacagagtgccagggcccagccggatgccgtcttcacccactcaaacacctcttcttctgagtgttgcaatttcatttagcaccccaaaaaggcccacatcacgccaaatgttgatgcatctcttccacacattgctcccggtgatggatgaaggcagttcttgtgccatggtccagccttccaggggtctttaggggatcctttgtcagttgtaggacaggaagattgatccactggccccggaagtcggggggcgggctctcatagctactgcccgtcaccagctcgttattgtgctcatatagggtgacttgaccccgaggcggtggaggagggaacaaccccagagagcacatcttgccggttcgcaggacgtctgcagtcggcccaactcctggccggaacggcacagaccgcactcccgcaactcggttcccgggctagattcgtatgcggacggtaccgccctcgtgccgaattcaacaccagcctcgtactagcctaa

SEQ ID NO: 123990 - DNA, 562 bp, Homo Sapiens
aaaaaacttatgcagcttttcaaagttgattgtttcaaaattggtgtttatttaaaataagtggtaatgtacttgaatgcactttttatgacaatgattcagtaatggtaattttactattaaagaaagtgaaaggtttagttttgttagcatggctcagcatgtagctgtcaggtgtttttcacctaagggcaaaagaaaatgatagtaataattgcagtagttgtattgtattgtatttttgcacgtgtggtaagcataggcttgaagaggtgggtaggcaggtacatgtacttcctaaatttggagataattatctttctgtaagttcgttatgcttgactgtttccatgttctcccaataatgattttatagttacttatcactttactcatggagaattaaaacgtaatgtttttcaactgtatctttctttaactggataatactgctatatgatatgcttactacagactgcattaattcacgaaacgaattctgttatgctgtaatttgaactctcctcaccacaacttattaaaaaggcaccaatagtttccc

SEQ ID NO: 123991 - DNA, 1334 bp, Homo Sapiens
  misc_feature (41)..(59): n is a, c, g, or t
ccctcactaaagggaataagcttgcggccgcctgctcaggnnnnnnnnnnnnnnnnnnngctgctcacactttattaagatgcaccaggagccccacgggcccactatggaatgtaggtgaggggtccacggccccgcctggagcaccaggaccagtggggccacctccaggatgccaagacccggctcctccagcgccaacctgttttccaggaggctgggggccacaggctggctcccgtgtgaacactgctttggagaatacgtaaatataaaaagtgctggaggcccctcccacccctgccctgggttccgcagccagcacgtggccacccctcccagggggggtccggaggccctgaagccacctgagctagggccttccagaaacagggttccgggggctccaggcacctgtccctccctccctcctcccagcatggggcagagcaccgaggctggtggtgggaaaggcagctgtgggtgcggccatctccccgtgggcgtccttttggcagagaagcgggcggtgggcggcctacgcgcagtaggtgtctgccttgaccacttggcagtacatggtcatggcgaaggtcaggcccaggatctgcaccagcgccgtgcacagcccaaagatgcccacagccagcaggttctcctgaagccacaccttcaccgtctcgtagcacggcgccttccaccaggtgccgggggcgtgcagcccacagctctcactgaactccaagcagcaggagtcaggtacccgcgtggcgttgtacacctcgaaccagtcagtgtagttggagacgccacagcagcggaagtcggtctggatgatgctccaggcgttggtgaggcccacgttgccctgcgtgccgtacaggtgcaagcctttcttcaggtcttgctgggcatacctgtcaatcttgtccgtgtaggcgaagaagaggatggcgatggtggcctccagcaggaacaccagcagcagcagcaggaagaaagtgagcaggaggcacttgttctccttgatggcacccaggcagcccacgaagccgatggccatgacaaaggcgccggtgatgatgagcaggttggcagccgacagggacgggaaggaagaggacagcgtggcgaagctcccctgtgtggcggccagccagatgccgacacccagcacgccacagcctcccagctgggctggccacaggaaagagaccaggcggtgctcagggtccctgaaggctgaccagtgggcaggcaggtggtgggtgcgaccaaggaagccccaagctctgcgcctcgtgccgaattcgccacccaggcctcgctacctt

SEQ ID NO: 123992 - DNA, 566 bp, Homo Sapiens
  misc_feature (521)..(521): n is a, c, g, or t
ttttttgctgctcacactttattaagatgcaccaggagccccacgggcccactatggaatgtaggtgaggggtccacggccccgcctggagcaccaggaccagtggggccacctccaggatgccaagacccggctcctccagcgccaacctgttttccaggaggctgggggccacaggctggctcccgtgtgaacactgctttggagaatacgtaaatataaaaagtgctggaggcccctcccacccctgccctgggttccgcagccagcacgtggccacccctcccagggggggtccggaggccctgaagccacctgagccagggccttccagaaacagggttccgggggctccaggcacctgtccctccctccctcctcccagcatggggcagagcaccgaggctggtggtgggaaaggcgaaaaataggatggcgatggtggcctccagcaggaacaccagcagcagcagcatgaagaaagtgagcaggatgcacttgttctccttgatggcacccangcagcccacgaagccgatggccatgacaaaggcgccggtgatgat

SEQ ID NO: 123993 - DNA, 1125 bp, Homo Sapiens
aggggttccgaggccctgaaccaccttgaactagggccctccagaacaagggttcccgggggctccaagcaacctgttcctccctccctcctcgcagcattgggcagagcaccgagctgttgtgggaaagcacctagtgggttcgcacatctccccgtgggcgtccttttggcagagaacgggcggtggctggcctacgtcggcagtaggtgtcctggcccttgacccaccttggcagtacatggtcatggcgaaggtcaggcccaggatctgcaccagcgcccgtgcacagtccctaagatgcccacagccagcaggttctcctgaagccacacctgtcaccgttctcgtagcacggcgccttccaccaggttccggggggcgtgcagcccacagctctcactgaactccaagcagcaggagtcaggtaccccgcgtggcgttgtacacctcgaaccagtcagtgtagtttggagacgccacagcagcggaagtcggtctggatgatgctccaggcgttggtgaggcccacgttgccctgcgtgccgtacaggtgcaagcctttcttcaggtcttgctgggcatacctgtcaatcttgtccgtgtaggcgaagaagaggatggcgatggtggcctccagcaggaacaccagcagcagcagcaggaagaaagtgagcaggaggcacttgttctccttgatggcacccaggcagcccacgaagccgatggccatgacaaaggcgccggtgatgatgagcaggttggcagccgacagggacgggaaggaagaggacagcgtggcgaagctcccctgtgtggcggccagccagatgccgacacccagcacgccacagcctcccagccagaagagcaggttgaaggcgaacatgaggtacttgacggcctggaggcaggcgcgcgccatgccgcagcgcttcagttctgggctggccacaggaaagagaccaggcggtgctcagggtccctgaaggctgaccagtgggcaggcaggtggtgggtgcgaccaaggaagccccaagctctccacagccaccagcagcctcgcagctgaacccccggccgtaatggccgaattcccgggcatatgtccggtaccgtcgactg

SEQ ID NO: 123994 - DNA, 870 bp, Homo Sapiens
  misc_feature (796)..(830): n is a, c, g, or t
gatctcctgaacccacaccttcccgtctcgtacacggcgccttccaccaaggtgccggggcgtgcagcccacagctctcactgaacttccaagcagcaggagtcaaggtacccgcgtggcgttgtacacctcgaaccagtcagtgtagttgggagacgccacagcagcggaagtcggtctggatgatgctccaggcgttggtgaggcccacgttgccctgcgtgccgtacaggtgcaagcctttcttcaggtcttgctgggcatacctgtcaatcttgtccgtgtaggcgaagaagaggatggcgatggtggcctccagcaggaacaccagcagcagcagcaggaagaaagtgagcaggaggcacttgttctccttgatggcacccaggcagcccacgaagccgatggccatgacaaaggcgccggtgatgatgagcaggttggcagccgacagggacgggaaggaagaggacagcgtggcgaagctcccctgtgtggcggccagccagatgccgacacccagcacgccacagcctcccagccagaagagcaggttgaaggcgaacatgaggtacttgacggcctggaggcaggcgcgcgccatgccgcagcgcttcagttctgggctggccacaggaaagagaccaggcggtgctcagggtccctgaaggctgaccagtgggcaggcaggtggtgggtgcgaccaaggaagccccaagctctgcgccgccgcctcccgctcgcccccggccgtaatggccgaattcccgggcatatgtccggtaccgtcgactgnnnnnnnnnnnnnnnnnnnnnnnnnnnnnnnnnnncgccgcttcctcgctcaatgactcctgcgctcgtcggttt

SEQ ID NO: 123995 - DNA, 943 bp, Homo Sapiens
gtggccgctaacgcgcagtaggtgtctgcctggaccactggccagtacatgttcatggcgaaaggtcaagccccaggatctgcacccaggcgcccgtgcacagaccccaaggatggccccacagccagccaggtttctccctggaagcccacaccgttcaccgtcttcgttagcaccggcgcctttccacccaggtgcccgggggcgtgcagccccacaagctctcaactgaactccaagcagcaggagtcaggtacccgcgtggcgttgtacaacctcgaaccagtcagtgtagttgagacgccacagcagcggaagtcggtctggatgatgctccaggcgttggtgaggcccacgttgccctgcgtgccgtacaggtgcaagcctttcttcaggtcttgctgggcatacctgtcaatcttgtccgtgtaggcgaagaagaggatggcgatggtggcctccagcaggaacaccagcagcagcagcaggaagaaagtgagcaggaggcacttgttctccttgatggcacccaggcagcccacgaagccgatggccatgacaaaggcgccggtgatgatgagcaggttggcagccgacagggacgggaaggaagaggacagcgtggcgaagctcccctgtgtggcggccagccagatgccgacacccagcacgccacagcctcccagccagaagagcaggttgaaggcgaacatgaggtacttgacggcctggaggcaggcgcgcgccatgccgcagcgcttcagttctgggctggccacaggaaagagaccaggcggtgctcagggtccctgaaggctgaccagtgggcaggcaggtggtgggtgcgaccaaggaagccccaagctctgcgccgccgcctcccgctcgcgccccccggccgtaatggccgaattcccgggcatatgtccggtaccgtcgactg

SEQ ID NO: 123996 - DNA, 1012 bp, Homo Sapiens
tctccttctcgcaccgacatagatgccctgagtaacggtggcctggggtcagagccaggttcagctgcgaggctgctggtggctgtggagagcttggggcttccttggtcgcacccaccacctgcctgcccactggtcagccttcagggaccctgagcaccgcctggtctctttcctgtggccagcccagaactgaagcgctgcggcatggcgcgcgcctgcctccaggccgtcaagtacctcatgttcgccttcaacctgctcttctggctgggaggctgtggcgtgctgggtgtcggcatctggctggccgccacacaggggagcttcgccacgctgtcctcttccttcccgtccctgtcggctgccaacctgctcatcatcaccggcgcctttgtcatggccatcggcttcgtgggctgcctgggtgccatcaaggagaacaagtgcctcctgctcactttcttcctgctgctgctgctggtgttcctgctggaggccaccatcgccatcctcttcttcgcctacacggacaagattgacaggtatgcccagcaagacctgaagaaaggcttgcacctgtacggcacgcagggcaacgtgggcctcaccaacgcctggagcatcatccagaccgacttccgctgctgtggcgtctccaactacactgactggttcgaggtgtacaacgccacgcgggtacctgactcctgctgcttggagttcagtgagagctgtgggctgcacgcccccggcacctggtggaaggcgccgtgctacgagacggtgaaggtggtggcttcaggagaacctgctggctgtgggcatctttgggctgtgcacggcgctggtgcagatcctgggctgaccttcggcatgaccaagtaacggcaagtggtcaaggcggaccctactgccgtaggcgccaccgccgcttctctgcaagggacgccacgggaacaggcccaccacactggcttcaacacagccgggccgccagctggaagcgccg

SEQ ID NO: 123997 - DNA, 960 bp, Homo Sapiens
ttggaaattgcgaatttttttggaccccccttgcccaggaaagtccccattcccgaatttgagggcccagggttgtgtcttcccttgacagcacaattttggaaaaggcctggagtggacctttcaggtggggagtgaagccttttgcccttgcgcagaccagacggtgaatgggggtttaggggtgtgcaggctgctttcttggggcttaagatgcggtcccttttggcttcaggtcagggggttgggcggatccctcttagagggagtgtttcagaggcccaagggagcctccctgactgtggccatggagtgtggggtttggggatggggtgccagcccagggtgtcgggaaagactggcctgcgctggacacccccccgggctgctgtgggatctagcaggactctgggtggttgtggctcaggctggcaggcggcatggctttgggcttgtggtccgggctctgccctggggtccagagcttgcattggggcctcaccctgtctgtgtctctcctgttgctgtgccccagctgggaggctgtggcgtgctgggtgtcggcatctggttggccgccacacaggggagcttcgccacgctgtcctcttccttcccgtccctgtcggctgccaacctgctcatcatcaccggcgcctttgtcatggccatcggcttcgtgggctgcttgggtgccatcaaggagaacaagtgcctcttgctcactgtgagtgccggggcccaagcgatgctccgggtgggaccacgcagggtggggctccggtggcccccaggccttggctgccgcagtgaccccccagacgtgggcaccacctctggggccggacctccaggctggcagtgtggcccggggccctggccactgttgggtctttcaggccacactggggctggggggcctcgtgccgagtacgccacccaggcctcgctccctagacc

SEQ ID NO: 123998 - DNA, 1083 bp, Homo Sapiens
  misc_feature (52)..(52): n is a, c, g, or t
ccccgtgggggggcgtccctttttggcaagagaaaagccgggccggtggggncggccttaacgcgccaagttagggtgtctgccccttgacccaccttgggcagtaccatggtccatggcgaaaggttcaggcccaggggatcttgcaaccaggcgcccgtgcaacagcccaaaagaatgccccacagccagcagggttctccgtgaaagccccacgtttcaccgttctccgtagcacggcgcctttccaccaggtgccgggggcgtgcagcccacagctctcactgaactccaagcagcaggagtcaggtacccgcgtggcgttgtacacctcgaaccagtcagtgtagttggagacgccacagcagcggaagtcggtctggatgatgctccaggcgttggtgaggcccacgttgccctgcgtgccgtacaggtgcaagcctttcttcaggtcttgctgggcatacctgtcaatcttgtccgtgtaggcgaagaagaggatggcgatggtggcctccagcaggaacaccagcagcagcagcaggaagaaagtgagcaggaggcacttgttctccttgatggcacccaggcagcccacgaagccgatggccatgacaaaggcgccggtgatgatgagcaggttggcagccgacagggacgggaaggaagaggacagcgtggcgaagctcccctgtgtggcggccagccagatgccgacacccagcacgccacagcctcccagccagaagagcaggttgaaggcgaacatgaggtacttgacggcctggaggcaggcgcgcgccatgccgcagcgcttcagttctgggctggccacaggaaagagaccaggcggtgctcagggtccctgaaggctgaccagtgggcaggcaggtggtgggtgcgaccaaggaagccccaagctctgaggagggccaggcccaggctccccagggtcctcaggtagagcccagtcgggactgaggacaggcctgggcccccaggggcctccgcacatatgtggtgggggctcgggggagatgcacagagcctgaggctggggcagtctccagatctcaggggctc

SEQ ID NO: 123999 - DNA, 1000 bp, Homo Sapiens
  misc_feature (880)..(880): n is a, c, g, or t
ccaaagcacaaaactttattttcagaaaggaaaggacatcaaaaataggactgtcctgtgcagatgtccaatagccttaatttggggaccaaatgcccccggccattggaaagacagatcttgtaagctccattcatccgtgcgctcatccattcattcgtgtttaccgagtgcctgctcagtgttgggacagacgaggatagttgttcctgccaccgtgccctggaggacataggcaaacaaacgacgacacagtgtggcaagtgtcacagttaaggctgctgtatggtggctgtgggtggtgacagacctcaaggcttcattctgcaaagctgagggcaagccttggcccagactccttcacaaagcccccggtgttcaactattctcagtccaggagcccagcagtgctcccagtggagtttatgaagccgattcagacccagcaaatccaaagttttcttcccttaagcagactgacagccttacttacagaattcacttgtaatttatgacaaaaactgcactagaacttatcacaaaactaactttattatatttttcccagttcgatttttctgtcaaatatcttcactgtccctatgacttctggttcttattttcttgacacacacattgtcctcagccttctttggattttctgcacacctcttgacactccgcgttactctctgcacagatttgctctccaaagtgcttgctgcaggctggctttttgtctttcttgatctcaggcacatggagtctgaatttcctgcttctcctttccctttctgattctgcatgagaaccttcgcactcttctgccctccgctctcctctgccaccttaggctgggagctctcattctgtctagcanacctcaagcaccttttgttctcactgactttgtctctaggtatgggtttccgggctccatcatctggattctgaatgtccatctctggggaggtcttcatgggcttcttttcatttctgt

SEQ ID NO: 124000 - DNA, 1518 bp, Homo Sapiens
  misc_feature (230)..(240): n is a, c, g, or t
  misc_feature (1409)..(1443): n is a, c, g, or t
ttttgtaaatatttttcaaggttttattgcaaaccaaaatcagtttatcacacacaaaaaaagttgtgtgatgggatgagggaaggattgtacgtattataaccatgttaattacagtacattaaaatggtggtttacattacaaataagcctgtaagtttaaatatactagtgttataacccaatgtacagacgttctttatacaatacatacaattatcaggaatgcnnnnnnnnnnncataaataatgcccattttacaggtgacattttaaacaatgaaaaacaccaacggctctgactgacaactggggcattggtccataaaaaccctttctaaaaatagaaatatttgtagcagcaatgctttctttaagcatctgaatacgagtcattgcaagaccatttcaataaattttagttattaaccgtatcttacaaaaaagtctacacataaatttatcttccaaatatggaagaaacaaacaatgtcccacgttgtagtgtcctgcaagtgtcacattgatgcttataacaaaatccatctgtgatcaggcataccacactcacacgacggttcacacagcatatccacaagggaaaataaagaactgaaacactgcgataggaaaagctttggagctaacacaatctcttcagaaaaggcacatttcataatattcgtcatcacagcccagacagatctgcaggagaccttttttagaacagcgtccgctttctaacgaaactcctgcctccgtctaaggcggcactctaacgctcgtttcagagatagcaccacgttggaaggaagaataaaaatgaaaacctcatgagctcactgaggagaatgtgctcttcaaaaagcttccagcgaacagtgtgcaataagacttcgctaagcttccagagatgtgcaaattctcttgtaagatgtcctgtcagctggcggctccaccaaaaggctaactaaaacattcgggaacacacataatatccttttaaaaccaagccctaacagggttcagaggaaagagtcccgtgggaggcgcataggtaaagcctaggaaagcctcggcagcttccttgacgctggctgtgacgaggacgctgtcaggggacttgccaatggagttggggacaggctcttcggtaaactcggggtcaaagtgccgtaggtcgttgggcccactctgtgacgggaagggaaaaacactcttgtcaagaactcacactagacacaggacagggaaatcttgaccaggctttaaataccaagtttaagtcttatatcaacttccataatcacccacttcaagcacaaaatctcaaaaggctacacacagttaaacataagacccggccgtaatggccgaattcccgggcatatgtccggtaccgtcgactgnnnnnnnnnnnnnnnnnnnnnnnnnnnnnnnnnnncggccgcttcctcgctcactacttcgctgcgctcgtcgttcggactacagcgagctagcgccctatagtgattca

SEQ ID NO: 124001 - DNA, 694 bp, Homo Sapiens
  misc_feature (668)..(668): n is a, c, g, or t
aactgatgaattctggtgatattttatttagaaaaagataatcactgattttaagatcttaatttttctttcttgtaaatgctacactaattagacgtaagatagtattagataataaaagtatttacacattgaatacaaaataaatataaagtaactgaaaaacaaatcaggtttccattgacttattttgttttcccactgtccatcctctgtttcatttttctttgccttttgtaaatccgtttctttcttgctttcaaatcaacttttggctctggttttacccactgtatttctattggtttctcctcagctggtgttacaaaaacatctgcagtgggatcatgtggaagaagagtcttcggctctttctttctcagtttttgcacatctttcacttgctgtttctctctgtattttgcagctgtgatggatcttatgacacgccgatgcatgtttggtgactggtagtgaggattttcatataaagttggtcctccaaaacttccctggaaaatctttatgagatttaagacaaaacgaggtcctatttctacaagagcagcatcttcttctatgatctgaaagttccgaaaccatatcctattatccaaaatggtgaaagtaaacacgtggtccacaaatggttggcttttgggatgatnacgtggtgtactaaagatctgaatta

SEQ ID NO: 124002 - DNA, 536 bp, Homo Sapiens
ccaagaaatacagctggtacttgcaatagtacttgggtgttgaacttgttaagagtgcatatcctttttttcagatccatctatcatttcctagttgtatgtggttgtgtgggttatttctcctcttttacattgattttctcaccagtattaataattatcaccaaataactattacagaaaacttcctcagaaagtaaaattagagtgaaggtatcacaggttggcactattttcattcccgaccaagaaactgacacctgagaaagtatctctttgttgcaggtttttggaaatgggctatattttttgaatcataaccgatatgtactgccataaacaagaggatttcaagccagctccatctggtcgaaaattattttatttattactaagagaaaagtgtaagacaagtcctgtggtaaaaacagatttattgcctctgctattcacctgtgttatttcttcatatattaccattgacatatattatccattcttcacagcaatggctttgccgtggcaaattaaatatc

SEQ ID NO: 124003 - DNA, 977 bp, Homo Sapiens
  misc_feature (672)..(672): n is a, c, g, or t
  misc_feature (785)..(785): n is a, c, g, or t
  misc_feature (845)..(845): n is a, c, g, or t
  misc_feature (859)..(859): n is a, c, g, or t
aacttttataacctttattaaggagtcagttactgcttcaagaaaaccttgttaatctgacacagaggcccatatgctggtcttgcttcagtgtgcctttgacattaatgattaatttatagggaaactgaacttattttatctctcaaaatcagcctttacaatctcatctgtccgcctctttcttgatagtccctgggccttgaggagttgaatagctttgattttccagccccgtgcttcaggaatgaagtttattttgattggcatcttctaccgggcgtgaagatggggctttaattgccgtcagtgtttaacatttagcaggacttgctgtccttcttagacccaggaatcaaagccctagtctctggaatacaaacagcatttgaagtccatctgtccatatgaagctgttggagtttttccagcgtaagttcatgacccagacatgaagggagatgctgagggcaaagtacacagctgtcaggatgatggtccctttgaacttatggaataggaggttgaccaggccagcctggaagacgaaggtgttgaagaacatgaggaaaatgatgatgatgttgaagaggactgcaatatcctggatgatgaagagcacaagctggatgacaggagtcttttggagcagttctgagaaggaattgacanagaggtcataggacagcagcaggaactgcagagagagaccaggctgtagttactggtctggagcacttccttctgttttctcgggcccccagggacatccacagttccaaganacgctctggtgtctcctacacgaggagagctctagttcttgatgaagtgttcctgtctanggagactcaatcangtcgctcggcgatctggctcagcaatccaatgagcgatatcgacagcaatgtctgggatgtacgcaatcacacaacacgacaatgtacgggtgcagagacacatatgtcgcagcgtca

SEQ ID NO: 124004 - DNA, 1753 bp, Homo Sapiens
  misc_feature (1742)..(1742): n is a, c, g, or t
caaaagccaaagccaccaaggaaagcagacaggcagcaagcagccagagaaggcaggcccagcacccaggcaaagccaccaaggaaagcaggcaggcagcaagcggccggagagggcaggcccagcacccaggcaaagccaccaaggaaagcagacaggcagcaagcggccggagagggcaggccagcacccaggcaagaagtctgggcccagcattggaagaaagtcgcctgctgaaaccagccgggagccctgggaagagcagagcttctgaggggagcacaggctgcaccaccaggagctcttgggagccccttcctgctgcttcactccccatcatgcagcaggggctgtctgtcggtcaggatccccggctctgggcgcttccaagatgaagccagaaggatgtagagcaccagcagcccaaaggccaccaccagcatcccggtgctgttggcaaagaccgcctcactgggcaggctgtggtatggcctggtggtgtttttcaaactgaagaaaagcttctcattaatgcccgaaatgacggatgcgatggacagagagaggatggcggctccaaaaaaagacgtggataggttttaggaggctgcgcagccacatggacgcccagggcaggaggaagacagcaaagcccaggaaccactggcaggcgaagaggaagacagtggtgatgcccagccagctgtgaagggagtagaggttggcagtccttccatggttgtgaaacgtaaagacagcaaccagccccacaacagtgaggacgaaggccatcaggtgcagcgctgcatggaggagtttccagggcagtttgggccccacccacgactggggcaggcggtacaccagtgacgcacctccatagaataccaccatgccagcaaccataagcactgggtgccagttgaacatgtagatgctgccattccaggcaaagccaccacgccagtactgcatccagtagatagtgaagaggatgcacatagagcccagggaccccagcagcaggcaggacaagtagaaccgtccagacaccattctgatcacgcactcctttagccctaatgataggctcagagaactggcctgggctccaattcctgcgaaatgggcaccttgagcaaatcacttaacatttgcaggactcacccctaaccacagtgggacgaagtgaggccgggatctccggaacccgcctctcgctaccaggcgccggagctgccgctcccgaggttcctaggagatgcagaagacactgccctgaatgcctacagccggctggcaatgccgccccagagcagagcggcgggtgccgcctcgccttcttataggctcgcagcacttccagtcgcgcgcgaggcctcctgggaagtgaagtccggagaccaggggtggccggctcccagcgcgccaagctgctaaccccctaactcccgttcctcctcggcgtttcttctccaagtccgaagtcagggtccaggactgctgcgatgcatcagccccgcctctcatcccccatccagaggaggcggaaatgttcaggtgaacgcgaagcctcccactacgagccggccctcagcaaggccgtgcgcagtgtgggcgggagccctaagtcagctagcggcgacgctgggagggcccggagcaggccgggccccgaacagcgaaagctccaacatggcggccagactggccatacctcgtgccgaattcggcgcgccgtnacttcatactt

SEQ ID NO: 124005 - DNA, 1183 bp, Homo Sapiens
tttatggaacaagaattcaatttattctctatttataaaacatttttttaaagtgccttgggtataaaaatctaaatgtctgcggtgtgatcagtcaggagcacgtaactatcactcttcgcatcctttggtcactgggagatcctttgggggctgggaggtccttctgtcccaggctaaaggaaaagcttcacaagggtaagagccacagaaccctcggcaagaaaggccggtcagggagaatgaatggtacagagaggaaaggaaggaaagggggtggaacagaggtagaaggcaaggaagggatgccgcactggagaccgatggggacactctaattgtgcaagagggaggatcttccttcttgaatgctgaacacagctagtctgaaccttccttggaaagtccagctgtttgcccatgcatagggccaactctccctgcaaagcagcaaatgtggcttctatcaggaaggaaaagtatccatcagtgtgacaagaggtcaccttcgaacttgcatgaactccttgcgcagccacaaagagtcctggtagaagtgaggatcgcctagtcttacggctgtccgtttatagaagtagcagtacaacactgctgctagtctctggaatacaaacagcatttgaagtccatctgtccatatgaagctgttggagtttttccagcgtaagttcatgacccagacatgaagggagatgctgagggcaaagtacacagctgtcaggatgatggtccctttgaacttatggaataggaggttgaccaggccagcctggaagacgaaggtgttgaagaacatgaggaaaatgatgatgatgttgaagaggactgcaatatcctggatgatgaagagcacaagctggatgacaggagtcttttggagcagttctgagaaggaattgacaaagaggtcataggacagcagcaggaactgcagagagagcaccaggctgtagttactggtctggagcatcttccttctgttttctcgggcccccaagggcacatcccacagttcccagaaaaccgctcctggctgtctccctaccactgagggagaggcttctagttcctttgaatgagagctgtttcccttgctctaaggcaagcacctccaaactccaacgtcggttgtcatgcggacatcgtcccggcttccggaccc

SEQ ID NO: 124006 - DNA, 1130 bp, Homo Sapiens
ttttttaagccacccaggctattatatttttgttatagcagcctgaacaaagacagctttgattcttaacatatttaatgaaactcgagcttcataaaccagtgaaatgcctacccctatggagacggggagctggtcatgggacccaggtgcctggaggacatcccagtggctttgaaggctccagccagtcaagacggtcaatattagcccttctgccaacatctggcaatgtgaggctggggtggacgttggcctgatgttgccaggagtaggatgctgatgctgccagagagtaggtgggctccaaaccccaggcttctcacttgcttactaagcacagcagtctgaagcttgggacctggcagtgcgtctttggagaaggcaaaaaagccacagcagcaacacttaggagcaagacccttcccgctctccaccctatttcctcccctgaagaagagcaacagctcaagctctagcatggcacagaacgctaggttgggccaggcaagcagccatggtggggccaggtgaagcaatgtgggtctcagcaaggaacccctctgaaggtggcagtggctcccagggctgctgcacactggacaccacaactttggcatcagctgcatggtgagctgcagagtggtcagaggggctggggccctgccaagagagcaaggccagacctgcccagcgggaggcaggaaggccctgatccagcaaggagaagtagaggaagtccacagccacctctgttactcatcgctactgggacatctggggacaggctctgttcttgggagagcaggtcaccaggatttgtagggctgcctgccggtgacagacacgtaagttacagggaaaggccgggatccaggcctcagctgtagcagcagctgtctgtcggtcaggatccccggctctgggcgcttccaagatgaagccagaaggatgtagagcaccagcagcccaaaggccaccaccagcatcccggtgctgttggcaaagaccgcctcactgggcaggctgtggtatggcctggtggtgtttttcaaactgaagaaaagcttctcattaatgcccgaaatgacggatgcgatggacagagagaggatggcggctccaaaaaa

SEQ ID NO: 124007 - DNA, 758 bp, Homo Sapiens
ttttactttgaaatagttttattggctcgtaagacctttgcatataaaaaaaatacccaaaacactatgcagtattaaatcacaattacatttttttaccaattaaaactacccagaatatacattttttaaagaaaagaaaatcctacagaactgaattctgaaatgacattatgacttaaatactatgacaaaatagataattccttataacattaattcattgcacaaagctgccaggtattttcataagcataaccgctgcaccgagtgcaaatgaacacaatttcaaagttacacatttattcgaaagaactgcgcctccacctatggaactcttaaatttctggcacaaaatgttggtctgttctaacttccaccaggcaaccaactttgcaatccactaactttctttctggccctcccttaaaaaagcaacatccttctgctgtcgtgccctgaggagtcagcacctcctctgcttgaagaaatctacccccctcaactcttcaggcaggtactcctgatccacaggctcgctgtacatggggttgtacttgtagcctttgccatagcccaaatccttcatcagcctagtgggcgcgttcctcaggtgcaggggcacggggggcagtggcccctggtggttcctcaggcaggctttgacgttgttgtaggcgctgtacacctcaatggactttggggctctggcaaagtagaccacacactgggccagaaccacaaatatcggtacgaga

SEQ ID NO: 124008 - DNA, 827 bp, Homo Sapiens
  misc_feature (658)..(658): n is a, c, g, or t
  misc_feature (759)..(759): n is a, c, g, or t
  misc_feature (810)..(810): n is a, c, g, or t
ttttcagatagtataaaatatttattgaaaacaacagtatttaaaacatttacagagagtcccatagaggattctcaaatattttaaacttaggatgcagactgctattcacaacgcataaagaaaaaggtgatctctagagcaactatgtatctgcaacataaaagaaacatttacttcaatgcttttacattgaggaaaacgtcattaaacgtattttaattttagtactctcacagtaggaagataatagtctgcttttacacaggtctccagaattcctgtttttcctttagataaatttgacttcatagtcaagagtctcatggtaaagaaaaggtatcaaaatactcatatttttgttttcagctcaatttcccccaaatgttaacttcagctattctttattccacttgatgacatttttcatgtttagcagcattacatggttgtcctctttaaacatttaaaataattagaacattttagcattatctcaggtttcaagctgatgtatgtcagtttatatacctttgtatcttacaaatagtaaaacaaagtacattctatatgtctgatattaatgtaataagaaatccacttagagtaataaattagccctctttaccatttattccatgatataggaggcaaacanaacaattccaaaacttaaatattgataaagatgacacatggccttggggtatatgtatctgtgtgaatacatactcccaacacacatttacataggtgtanatgtatttatgcatgtatgtgtatattgctataactagaaagacacatgcnaccataaaatatatata

SEQ ID NO: 124009 - DNA, 1236 bp, Homo Sapiens
  misc_feature (282)..(293): n is a, c, g, or t
  misc_feature (1037)..(1037): n is a, c, g, or t
  misc_feature (1070)..(1070): n is a, c, g, or t
  misc_feature (1083)..(1084): n is a, c, g, or t
  misc_feature (1111)..(1111): n is a, c, g, or t
  misc_feature (1114)..(1114): n is a, c, g, or t
  misc_feature (1170)..(1171): n is a, c, g, or t
  misc_feature (1189)..(1189): n is a, c, g, or t
gaaacaaaaaccgaaacatttaattttttctccccaaaccaagacgctgacactagcctgagttcccctaacaatgttattttctacaacagaagctgggacagaggaacaaacacagcccactcaagcagtggtggcaacattctgttagaaaggaggggagtcaaagaaaaaaacacccctccgcccatctccttatcacctccctaaagacagaggagaacatggacaccctccatcctgatagacatgccatgtggtcagtttgtgcggtaaacaggnnnnnnnnnnnncctaaagatattgtagacctttattttctttaaatctcctaataaaaacattaaactttcaagaagattccaaactgacattgcatagaccaactcctttccaaaaatatctctgatatactctccaactctctcaatatatagaatttgaagtccaggagctgtgggcacctggtgggaattcactgagctcaaggggacaagagggctgaggacagggctcccacatggggacaaggccaggctttctggcctctggttccagccagcatcaatttggttgtggccaaattctcagtccaatcaccctggcccagggcctggcgtgggaggatgtggcaggctctgtctccttctggggttcctggtctggaggagtctccccaacagcgccaaagctggctgttttccgcccaaagccccagaactttgaatgagaggcaaatctaccctgaatgcacctccctcctaggctgggtgaggtcacgcagacacagaagggcaggacagaactccccatcttctgggggccaattcgtctggacactgtgcggtcagcttcctttttaaagtgccagtatcggtggggcaggaagggactctcagggctgagcagagccttctccagcgcgagcgaacactctgtcccgcctcggcaggcaccttctaacattcattttctaagggtaggtgagtaaacaccacaacaatgctggaatgtctgttccaatgccaggagttcangacagggagccactctaacagcggggcagtggngagctaggaggannctccagctggggaggcactgcaccctncanagagagagcccatccgggccccagtgggcccacgtctggacagcggcagtggggannaagagactcctcaaggcngagagatatgacgggatcagctctgcgatctggccgaggcaatctaa

SEQ ID NO: 124010 - DNA, 485 bp, Homo Sapiens
  misc_feature (78)..(88): n is a, c, g, or t
cagtttggaatcttcttgaaagtttaatgtttttattaggagatttaaagaaaataaaggtctacaatatctttaggnnnnnnnnnnncctgtttaccgcacaaactgaccacatggcatgtctatcaggatggagggtgtccatgttctcctctgtctttagggaggtgataaggagatgggcggaggggtgtttttttctttgactcccctcctttctaacagaatgttgccaccactgcttgagtgggctgtgtttgttcctctgtcccagcttcttgttactttatcatattgactttagggtcaaaggcaacatcagaagaagtcagatatgtatagtgacattccaggggtggggaaggtgtagggatccagggttctcccggtcttggccacaggcacaatcatcaccttcatcgttccagattcctttctctgagcctcacttttcccatctgaaaaatggaattccgatcccgcac

SEQ ID NO: 124011 - DNA, 694 bp, Homo Sapiens
taatttgtaagaaaataaactcttgtattgtagcacatttcatcacagcctgactaggaccagtgctcgactttctggtggcagggcccagagctcacggacaccactgacagtatggggggtgttctgcttggcaccatgtctggctttttggccagaagtcctttgcagagctgaatatccccttgccagcccgccagctctggctgggaggacttgctcttgggtctgcagcctgcatcaggagcctccactttccccagtgctggattatgcatcctgctctccagggtccaccttgttgctacagctgcatggcttcctgctccactgactggttcgagggtgccaggtacttctcctggatgcccagtgtggaagagaaatggaagtcggctcccattgcggcagacatcatggcttccaagcttcgctgctcttgggctccgaaacagtatccattggctttatccacagcctgcaggactcgctggatgctctccttgtcctggatgttgagagggataaaggagacaaggctatagtcttcgatgagctgcactagcttctcattgagctggcggtagtggcggaagaaagggtcagaagccaggtggtcaagcaggtaggagaggtccagaacctctgtgtagtagtccaggttgaaggccagcttcccataatgctcaatgag

SEQ ID NO: 124012 - DNA, 688 bp, Homo Sapiens
ccaactttcaaatgttttatttttagtgtttttaaacattttaatacaacaaagatataaaataatatatattagttaaatctggatttaatttagaatcaagatatttacttatgtacaaacactgtgcttcaaggtatggctaccacaggaactttcacatcttcaagtaatactagtttctctgtggatagagagacatttaggtagaattcacaaaacaaaacatgtccgttttagtcccagctaattttgcttcccccattaagtaccagtttccactttctttgttccatgtcagaaatacttcatttttctaataatacatagatcctctgaataaaacttagtaaaagtgaacatttttaagatgacattactaattgataatattgcttggctatgttcaattctccagacaacccagttcttcagattgaaagagacctgaagtaacaatgaaattaccatagtgttctttctcctgccatatcaggcacaaactttccttatgctgaaacatggaatacactgaataaaaagtcctttggttaatttagggtagaatgtattataaaaaccagaatagctgaaatatggcttacagatttcagagatatttgtatagaacttgaagcaaagtaattggtcacattttagttatttgaaattggtggcattacatccg

SEQ ID NO: 124013 - DNA, 974 bp, Homo Sapiens
  misc_feature (771)..(771): n is a, c, g, or t
  misc_feature (958)..(958): n is a, c, g, or t
cgttttataatgtttgttttatactgaggcatgttttcggttccagttgttcacatgcagtctgctgtgagactccaagatcaagggtgctgggaggccttaggcaagtcaccttacttatctaagactgtttccccacctggaagatgccctacaagcctcctgtggctgtgtttagaaagcatgcccggcctttcttgacagccagccaccccagatgatggcagggcaaggaagactgttaggagtcagagtgctcccctcaggtggaaggaaactgggccaactctactttgtaagccataaggtgccaggtagcccggccaccctgagcctgtgcctccactgcccccgcgtggccagtcaggtgcagctgctcccagagatggagggtgaggaacagacgtgggagcaccagagggacagagctgatggcctgacgctctcttcaggagggcacccccaaggggcctctgcttcctcagtgccccctgagctttatcagcagaggggtgttttccagccacaaggagctgtatctaacactaatgcctttaaactcaagactggctccaggagagaggaggacggacactaggttgaggggccaggccacactcactctggaccacctgttgttcccgggtcaagttcccagggtcacaccagcctgcctctgcaggacaagaggaccaagctgcccttgagtggacactgtgaggctggggctcgtggtagctcttcacactggaccaaacgggaaaatcaggnaaagctggtagtggccctggagcttcactcccaggcaggggcagcaccctctggcctcttaaggagaaagggcctgtcactcccatccatgtttccgggtcccccctgccacctccgggttcccaccttcatccccgacatcttcccatgggatccctgcccctccattcccagcttcctaaaaatncttgggttcttgggtt

SEQ ID NO: 124014 - DNA, 658 bp, Homo Sapiens
  misc_feature (571)..(571): n is a, c, g, or t
  misc_feature (630)..(630): n is a, c, g, or t
gcataagagattttaagagagcagatttaagaaagattcagatgacttcacgtgagctactgaccatataaaccttgcatgtgctggccccagggaatatggaagcttcggaaggtattgctctgccctgcctgggtcccttgctcctattgcagccagaagtcccaaaaaacctcagaacagatatttgcttctaggggatatgaggggaaagcaccgggaattaccatgaggtaatggatacggctatgcaggtggcttcttgatgacaataacccatcctcaggaggaagcttttttttgtttcttccacagactcaaaatagctgagagaatctgactctgcccaaatacatgtggtgtgtgtcattggattgaatttcttttttttctttattacatagcaacttactagataataaatttcttaattaattccaatttccctggagcaaattggagccactagatgactcagaaatagtcaagactgtacatatggcattgatgccaaagtgcttcttctaccctgtcagattttaagatttctctgtcaaccccatcgaaacanagctcccaaatggtgcttgttcagtttcaccagtctgcacggtgattcttctagggtcncctacagaatgcttgccagggggttggc

SEQ ID NO: 124015 - DNA, 1270 bp, Homo Sapiens
  misc_feature (91)..(186): n is a, c, g, or t
cacggaaacagccgtttttattccacaaacagtaaactccatccactacacagtgacatacactgtgtagcacaccccatcaccttggccnnnnnnnnnnnnnnnnnnnnnnnnnnnnnnnnnnnnnnnnnnnnnnnnnnnnnnnnnnnnnnnnnnnnnnnnnnnnnnnnnnnnnnnnnnnnnnnntatagaggtggccactacaggtgaggaaatgaatttctacagttaattcaaattcaatatgccacatttaggctcgtggctcctgtactggacaacacagtctgtaggccctgacctggtccagggcactttggttcaaaagccaactctgaggagagcaagtggcagaaacagcccttgggctcccctccccagagagaaacggcagctgcagctgctggaaagggcaagaatcagagtggggggacacctcgggcgcgccggataaggttggccagccgcttggccaggccacctgtgcggggctcctcgatgtggaaggttcgggtgaggagattgtagaaggagccgtagcacacggccaccacagtgcacgtgaggcagatcacgttgtagggcatgctgaagtccggtgtcggcaggttcaccagcagcggctccgtgtagagccgcacaaagtagttagagccatcagagactgggaacaggctgttgaagaggggactctcttcccagtccactggcttggctgctaccatgctgggcacaagggcgctgaggacagatgggctgacatagaagccatggttaggatctggtgtgtactcggtccacttcagcagcgcccgctcaaactggatggaaaccttggtgactgagttggccggcagctgaatcagcatctccaggaggtggggttgcagccggtcctgggcaggctggtagtggatgtaacttggtttgttctccttgcccttggaggtgatggtgagggtgtgcacatacagccgcagataccagggtacggtgtccagcagcagcaccgggaaggcccggtatgggtgggtgttgtacagcagtgtgctcagctcccccttctgcagcccatagccactcacgtaccgctgggcatgcaggaagggcactggggggggctcattctctgggggtctcttccacttgagctggatgttgaggtttcgagagttgttgatcatggcggtgtcaagcaagtcatatatggcataggtcttccgagtgcctaggatgacgtcctgatatgtagtggtcgggggtgggtgca

SEQ ID NO: 124016 - DNA, 1103 bp, Homo Sapiens
  misc_feature (142)..(142): n is a, c, g, or t
gccttccccggttcccgtggggccattcaagaaggggccccgggggggccctacattctttggggttttcttccactgaagctggatgttgagttttcaagaagtgttgatcatggcggtttcaagccaagtcatagatggncataagtttttccgagtgccttaggatgacgtcctgatatgtaagtgtcgggggtgggtgcacctctaatgtctcgttgtcctggttgtaggtggtgatgtccacatagactcggctctctgaagccagggggcagggctccgtgagggttcgggagaacatccggaagagggaccagtctttctttccctgccccgtgatgaaggcatcaaatacaactgacagggtctgcctcagctcccaggagatgctagtacagcgtgcatttctgcaaacagggcggatatgcactgcctgggagtggtagctggtgtggaacaagcgatctgccttcagcagcacagagaggcctgccttggaactacagggcaagagcttcttccagggggtgaggttttcggtgcagaccacctcccgcggcagcacagcatagcgcagaaagtagtggtcagtgtcattggccagacccaggggtttgaaggaggcagtgggagtgactgtgttggtggagtcgatgaagttgagagaggcgcagaagatccctgagaggacattactgagctccttccaagatttatccacatcagtgacagtgtcttggaaccagacccacagctctgcacctgatggggcctgcaggaagggtggcccccagtatcgggtcctccaaaagccttgtgtgaatgacaggtgcagctcccgtagagaatacttggagatcagctgccccagggctttgggaaagagcctgtaatgggacactccttcccgctgaagctccgaatcccagcgcgtgcggaactggaatgtggcggctacgtccccggaaggcagcggggtgatgacaagttcctcccgcaggctgtcgcgtgggggttctgcaaggcaccagccgccgggccccaggagcaacaggacgagcagagcaagcggcatagccgccgccatgcctgcggatact

SEQ ID NO: 124017 - DNA, 588 bp, Homo Sapiens
  misc_feature (64)..(64): n is a, c, g, or t
  misc_feature (403)..(498): n is a, c, g, or t
cagcatgccctacaacgtgatctgcctcacgtgcactgtggtggccgtgtgctacggctccttntacaatctcctcacccgaaccttccacatcgaggagccccgcacaggtggcctggccaagcggctggccaaccttatccggcgcgcccgaggtgtccccccactctgattcttgccctttccagcagctgcagctgccgtttctctctggggaggggagccacaagggctgtttctgccacttgctctcctcagagttggcttttgaaccaaagtgccctggaccaggtcagggcctacagctgtgttgtccagtacaggagccacgagccaaatgtggcatttgaatttgaattaacttagaaattcatttcctcacctgtagtggccacctctatannnnnnnnnnnnnnnnnnnnnnnnnnnnnnnnnnnnnnnnnnnnnnnnnnnnnnnnnnnnnnnnnnnnnnnnnnnnnnnnnnnnnnnnnnnnnnnnggccaaggtgatggggtgtgctacacagtgtatgtcactgtgtagtggatggagtttactgtttgtggaataaaaacggctgtttccgtg

SEQ ID NO: 124018 - DNA, 448 bp, Homo Sapiens
  misc_feature (95)..(190): n is a, c, g, or t
  misc_feature (423)..(423): n is a, c, g, or t
ttttcacggaaacagccgtttttattccacaaacagtaaactccatccactacacagtgacatacactgtgtagcacaccccatcaccttggccnnnnnnnnnnnnnnnnnnnnnnnnnnnnnnnnnnnnnnnnnnnnnnnnnnnnnnnnnnnnnnnnnnnnnnnnnnnnnnnnnnnnnnnnnnnnnnnntatagaggtggccactacaggtgaggaaatgaatttctaagttaattcaaattcaaatgccacatttggctcgtggctcctgtactggacaacacagctgtaggccctgacctggtccagggcactttggttcaaaagccaactttgaggagagcaagtggcagaaacagcccttgggctcccctccccagagagaaacggcagctgcagctgctggaaagggcaagaatcanagtggggggacacctcgggcgcccc

SEQ ID NO: 124019 - DNA, 919 bp, Homo Sapiens
tggccattggggggggcccccaattcttctggggttctcttcacacttgaccttggatgttggaggtttcgagatttgttgatcatggccggttccacgccaagtcatagatggcaataaggttcttccggagtgccctaggatgacgtcctgatatgtagtggtcgcggttgggtgcacctctaatgtctcgttgtcctgcttgtaggtggtgatgtccacatagactcggctctctgaagccagggggcagggctccgtgagggttcgggagaacatccggaagagggaccagtctttctttccctgccccgtgatgaaggcatcaaatacaactgacagggtctgcctcagctcccaggagatgctagtacagcgtgcatttctgcaaaacagggcggatatgcactgcctgggagtggtagctggtgtggaacaagcgatctgccttcagcagcacagagaggcctgccttggaactacagggcaagagcttcttccagggggtgaggttttcggtgcagaccacctcccgcggcagcacagcatagcgcagaaagtagtggtcagtgtctgatggggcctgcaggaagggtggcccccagtatcgggtcctccaaaagccttgtgtgaatgacaggtgcagctcccgtagagaatacttggagatcagctgccccagggctttgggaaagagcctgtaatgggacactccttcccgctgaagctccgaatcccagcgcgtgcggaactggaatgtggcggctacgtccccggaaggcagcggggtgatgacaagttcctcccgcaggctgtcgcgtgggggttctgcaaggcaccacgccgccgggccccaggagcaacaggacgagcagagcaagcggcatagccgccgccatgccatcaccgggatgtccga

SEQ ID NO: 124020 - DNA, 705 bp, Homo Sapiens
  misc_feature (493)..(501): n is a, c, g, or t
  misc_feature (505)..(543): n is a, c, g, or t
  misc_feature (687)..(687): n is a, c, g, or t
tttctgtgtttttgtgtttattttaaaaagttcacacaccttccccatctttgtcccagcactggttttggtgactccacccctactcccctatgagtcagcccagaatgtgaagccagtggccccagggcaggagatggccacccctcagccccaccgcagggtgaagctgggcccgaagctcctcctgtcctagggccacgctggctgcagtgaggcggcggggacggaatgtgagtgggtggagagctcctggcaggaaggccaggtagcacctctgccctcatggcactgataaggagccaggaagcagggcaggtggggcataggccgtggcagggtacctacatgtcaatcacacgtgatgggtgggcctgggtagctgcatgccagactgggcaccagactgtggcacacagctcaagggtaaccttgcatccaggcccttctgtgagagtaggatgggagggagttgcacccatctcctgtccgnnnnnnnnnaaannnnnnnnnnnnnnnnnnnnnnnnnnnnnnnnnnnnnnncacctgtacataaaattgttgccaccaaccactaaatggttacactacaccaagacactaaaatggcagggagccctgggatcctggggttggcagacacagggaatagggggtagaggccaggctaatttctccttcacaganagcagggagagaaaggag

SEQ ID NO: 124021 - DNA, 747 bp, Homo Sapiens
ccctttttttgtatggagatcgttgtttctttttataaggcaggagggaatttagtggagctggggaaggaataaagtggggttgggagaacctccccaaccccatccctgctggcccggggacgggcatcggctctcagcaagagaagtattcccgggatgctgagcgcttcattctgtctccaggactcaggcaggtaggtcccagctccgccgcgcccccggacctacaggtcagcgtggtccgaagtttcctctgggggcttcgcgggcgcccacacgtactcggggggcacctgcgcgtcgggcgccgccttgcggtagaagccgagctcctgcactagcgcattgatctcttcgcgggtcatttcactgagtgggatgcgctctagttcctcgtagcggcggcccagcagcacgagctcagggtcggccccagggaggtgtttcatcaccaggttgtgatagaatggaatgtcctgcgtgacgaaagccttcacctcctttaggcggttcagctgtcatcccccgcaggtctctacccgggcgcgggttaggccgctcagacggttccagtccggccggtaggcagtggcggctgtggctggggccacaagcgccgcgagaagcagcagcagcgccagcggaggcaacaggaggctcatcgggacccggccgcagatgatgcgcaagctggaggcgaacctccgagtcgcggacgcgtgggtcgacgatatcccgggaatc

SEQ ID NO: 124022 - DNA, 158 bp, Homo Sapiens
gtatcagtcttgtcaaatttttattgtagtatgtaatagaattaaagctatgatgaatcaagtaaaaaatgatttccttaaaaactaagctaataggcgaaaatactcgcttgttcaacaaatacccagtctggcagatataataccctgcccttagt

SEQ ID NO: 124023 - DNA, 1981 bp, Homo Sapiens
  misc_feature (153)..(171): n is a, c, g, or t
  misc_feature (209)..(268): n is a, c, g, or t
  misc_feature (291)..(291): n is a, c, g, or t
ggagattcgaccacaaacagttttaatggtctggttttctccctagttccccaactgtttgttagtattattattactacaagaataaaggattcctgagagcctgtcccctcctctcctgtggcccccttgacaggactcatccctaccaannnnnnnnnnnnnnnnnnnggatttctggggaaaaaaagaagtgaaaggcactgcannnnnnnnnnnnnnnnnnnnnnnnnnnnnnnnnnnnnnnnnnnnnnnnnnnnnnnnnnnncactagggcagggcccggcctanaggaggaaagttccagtccatgcctgaacctgtctagcaggcatacctaagtcccatcctcccacccccaggccccccactgggggttctgcagcaggagcataaaattaattagtgttgggctcagaaaggaggaatggagggtccactctactaggactccagggccaaacccaaagggaggttgcaaataactagaataatcctcaaatgctcttcttcttcaggttggagagacaggaattaacaaaatattaatgttaatgaaaactccccagccgagggatcaggcagcagtagggaaaaccaggctccaagaggaaggggctggtcagtcccaggccttggagactagttgttgtccccaacagccccctgccgagccctgatgaacgccatgccatgcgtgcggaagtgggtcttgaggtttagagggctgtcgcagctcttgccacagaccttacaggtcagtgggcctccagaagcaggcaggggtgagtctccaccatcggggtcagaccttgatggaggggcctcttcctccccatcccccagccccagggcactggctttacccacaccccgtctcttcttgtggctgatgaaacggtgtcggctcagggagccaggggaggcaaagcacaagccacagtcgaggcactgctgggcaccatcctccaccctcaaccccatcatgaggctctgttctgtggagctgctgctccggtagcgcagagggccatggcctccagatccaggtccgcccctgggggacttggctggcggtgtcgtgctgtcaggctcctcactgcaagagtcagaagactggcggcgtttccgacctggcccctgggctctggcactggaaccccgagccaaggtggtcccccggccaggggactgggccccaagctgcaagccgtgccggacctggacatgtttctctaggatcaggcggctgctgaaggtgcgttttccctctgtgcaatacctgcaggggtaaactcgcttgatgccctcgtgattaactctgacatggcgcttcaggctgggggcggagcagaaggagcgctcacacaggcgacaggggaactttttcactgacttgccatgctccttcttcatgtgggccacgtattcatcacgctcagggaaccaggagtgacacaggccacaggtccagcctccaggccccccacccccacccttgaggcctttgctccctagttcccgccgaggccgtttggctggacgggggggctcaggggagctgggtacttcctcctcttctgaagatgaagacgactcctcagtagcaggggctgcccctccctgagaaacagccagctcctcaggctcagtcttgggggtcagcagggcacccccggcccctttcccagcagtctcctccaagcgcccagactgatgggtgttcttgagatgttccagcatggtccttttttgggcaaagagcagaggacaagacgggcacttaaagacactgacacgctggggcagcaagtgctggtcgaagtgtgaggagaggaggggtttgtgagtgaagactgtgtcgcacatggcgcacttgtagatcagcttggcctgctgagtttggaagctgggatgctgggagtagaggtgggcatgggcacttgcccacgcgtccgcccacgcgtccgcccacgcgtcc

SEQ ID NO: 124024 - DNA, 1670 bp, Homo Sapiens
ggcctttccttttccgcgctttgaaacccaagttggtctctgactgcgggtgaccctttccgaagcgcgcggattccgcccatgacaggcccatgctcctggctgggacgccacaaacgggagaaagctgtcacaactgtggtagcaattcggggactccacttgcagcttgcctatgtcatccaccgaccagccttatccatcttttcaatagttggcacagtgctgaagctccagctcgctgcctcatggtaaataccacattcgggcaagttttctacggaccctcgtactccgaattcggttctcgggatccgggcagggacactggtggtgtcaaaagttttcacattcaaggacttccacataaatcaggtaggagccttgtccttggagttgaggacaacagcctgtgtgtggggtacacggaccacgtggtggtcaaagccagcagtggcagccagactcgggcagggagcttatggttgagcagggagagctctgagatcagcctctgtgttttctgctctttggtggggagcgtggccagccgcttgccgatcgccatcagggacttgatgaattctctctcaggagccagtcgaacaggctcatcctcattctccactttagggttgctggctgttcgtttcaggttgctgctgagacttatgctggcagtggcatctgacttagagcgctggtgagtccttttggagggagacagccctgtgtcaggggccgggctcaaggagggcagctccctcttcctgtgagctggctttagctcatctgagaggatcagcttccgtagctttgtcccacgggagtgtcgttgagtggaaatgtgcatgtctgaagaataggccccaagcaacagggcacactggagggaaaagttaatgctctggcggcaacggtggactatgtagggcttaatggcatcacccacgtcctcatccatgtgtatgtacatgttaagcaactggggcagatagaagtccacgtcctcgttgcgaaagcagaagagccggttgccaatgtaggcttgtactccaggctccttggagttatacaggtatgaaatggccatggagatgtcaaacagttttgactcaaacagcctcagcagccaagactgtttagctgagttgttctgccgccgtcttcttgctcctttggctgtgcctgaggccacagcggcccccatctcatcttcctcctccctgatctgggcaggtggatcatctaggcaacggatctcactgtccacaccatccccattgaccaactccagtggggtgcctctgctagagactgccacgcctccatgcaaaagcttgactttctccaacacctcctggcaggccttctgggccacctcagggtcaatcactgatagttccccgaccccctccgtgatgacacttagcagggaccccccattattccctggtgggccagaagtgggctcagaagttggcttcaagggggcaggctccactactgtatctcccatggccacagccagacttcgagcttccaagctctgggggacccccgcggagggggtgcgggcagtcgcggttggactgccgacactgccgcctcagcagcagcgaccgctcccgggttccattggccgcctgcgcttccctgacagcggccgc

SEQ ID NO: 124025 - DNA, 672 bp, Homo Sapiens
  misc_feature (386)..(404): n is a, c, g, or t
  misc_feature (470)..(501): n is a, c, g, or t
gctggagtacaagctaccattggcaaccggctcttctgctttcgcaacgaggacgtggacttctatctgccccagttgcttaacatgtacatccacatggatgaggacgtgggtgatgccattaagccctacatagtccaccgttgccgccagagcattaacttttccttccatgttctctcacccgcttcaactccacattgtccaagtcacagaaaaagagaggcctgaatggagattcgaccacaaacagttttaatggtctggttttctccctagttccccaactgtttgttagtattattattactacaagaataaaggattcctgagagcctgtcccctcctctcctgtggcccccttgacaggactcatccctaccaannnnnnnnnnnnnnnnnnnggatttctggggaaaaaaagaagtgaaaggcactgcaggggtagggggcttgagtgccagtgagtnnnnnnnnnnnnnnnnnnnnnnnnnnnnnnnncactagggcagggcccggcctagaggtggaaagttccagtccatgcctgaaggaattgtggagaggtgtgtccatccatgacacccccatcagtccttccctgaacctgtctagcaggcatacctaagtcccatcctcccacccccaggcccacactgggggttctgcagc

SEQ ID NO: 124026 - DNA, 2702 bp, Homo Sapiens
  misc_feature (53)..(61): n is a, c, g, or t
  misc_feature (190)..(244): n is a, c, g, or t
  misc_feature (251)..(314): n is a, c, g, or t
  misc_feature (316)..(320): n is a, c, g, or t
  misc_feature (322)..(323): n is a, c, g, or t
  misc_feature (325)..(338): n is a, c, g, or t
  misc_feature (340)..(340): n is a, c, g, or t
  misc_feature (342)..(346): n is a, c, g, or t
  misc_feature (373)..(391): n is a, c, g, or t
cccccgagagggctttaaaaactttggaggggaagtgttgccccaaatagtgnnnnnnnnnacagaagaagggttctctctccaaaaaacctcccaagggcggcgttttttcccaccccccggggtgaataaaaaggggcccccgcgcctttttttaatagacccctcctcttagggggccccttttacnnnnnnnnnnnnnnnnnnnnnnnnnnnnnnnnnnnnnnnnnnnnnnnnnnnnnnnccccccnnnnnnnnnnnnnnnnnnnnnnnnnnnnnnnnnnnnnnnnnnnnnnnnnnnnnnnnnnnnnnnntnnnnntnntnnnnnnnnnnnnnntntnnnnnggctaactaaggactttatttcaaacnnnnnnnnnnnnnnnnnnnttgagagctcttttccctgggtttggggaaggagtcagggtagggaattccacatggctaggccagtaccctcagtacactggagggctgtgggaattcccttccttgcccatgatggggaacctcagcaagtgcagggcccacgcagcgcccgccagcaaggggagcttgggccaggggtcggtccctgggaggggtaggtccctgggaggggtagagctgggcagcagcatggccagtggccaaccacaggatcaagtcctaagtaccgagaacctactcttccccacttcctgggccccagaacggaataagaggatggcctgtggaaagaacctctgagagacccctacaaggagaagaaaggccccagtgtccctcacatttgtcacctctgttttctggagggcagtgagtcctggagtcagtctggtggtaatactgacacagaccaggaggggcagggaagccccaacaagtctggaccccacagctggctctcccacccctcagcaagctctcgcagttaccacatgatccttcgtgtttcttgccttccatttcccttgggtggatggttgggtaggtggggtttcctggtttggggtttctcagacaagggccctctagggagggtgccctggaccccccaccactcctgggctgaggagcgtgtcacatgatgccgttggtgaggtactggaagccgtcatagagtttggtggtgatagaccgcatactgccatccaccatctgctccaccagcagctgcagctgctcctcagtcatgctcatgtggaacctctctttgaggtttcgaatggtgctggagccatggaagcaaggaagctgagaaccttgctgcatgatctccacgatctgcaccaccttgtccatgtgtttccgagcggcaatcagcccttgcagcatcagcatcttatagtagttgaacatgtcgccatccaggccgcccatcacatccacaaactctgtggtcagcttaaaggctgacgtctcaaagcccagatttcggggtgagctggagaggatgaagccaaagtcgatgtggatgatgtggccttctgcgtccaaaaggatattcccattgtgtctgtccttgacttgcagcaggtagcagaccaagcagtacccagcacaactttgcacaaaattgcgctgtgcactgaggaatgcctcagtggtgtaactgccgtgctcctgtaggaagtaatcgagcaaggagagctgtgactgtttcttcacctgatggatggacacagcattgaccactggttcaatcatgccactatcagccgaaatcacaagaatcttgtatggcttgatccaaaggggcactcgctcctgttcccaaatggactgcagttgcttcaacacctgaaaggccagaagctcttgccgaaggtcatccccacacttgacaatgactgacaggagccgccaattggggagatggccgtagggggagccctctctgatccgccgtactttctcctgccagggctctttgagagcaactgcagaaggatcttctgggtctcgtttgaaggctgtcggggtatgagccagctgttccgaaaggcgccggcggatgtcccctgctgcaatgaacacaggctccttgctctcctggctggtgatgctgtccacagagaactgggagatgttgtcacagctgttggtatgcacttcggggagctccacttgcagctcgcctatgtcatccaccgaccaggcctcatcatcgttgtcatagttgggcacagtgctgaagctgccagctcgctgctcatgggtaataccacattcgggcaagttttctacggacctcgtactccgaattcggttctcggggatccgggcagggacactggtggtgtcaaagttttcacattcaaggacttccacataaatcaggtagggagccttgtccttggagttgaggacaacagcctgtgtgtggggtacacggaccacgtggtggtcaaagccagcagtgggcagccagactcgggcagggagcttatggttgagcagggagagctctgagatcagcctctgtgttttctgctctttggtggggagcgtggccagccgcttgccgatcgccatcagggacttgatgaattctctctcaggagccagtcgaacaggctcatcctcattctccactttagggttgctggctgttcgtttcaggttgctgctgagacttatgctggcagtggcatctgacttagagcgctggtgagcctcgtgccgaattcggcgcgccgtcgacttcatactctct

SEQ ID NO: 124027 - DNA, 1044 bp, Homo Sapiens
  misc_feature (617)..(617): n is a, c, g, or t
  misc_feature (666)..(687): n is a, c, g, or t
tttagtagggttttcacccatgataagaaatctttaaattgatcagagcccacattgaggcatcatatcccaggatcggaggcccctacccactggccttctaggcaggagctccacccgtaattgcccctgctctgtcctgggagcacagcttaggtcagactcttgtagaccatgttcatcctgtttatgtgagttctgctgacattgagctatcctgtataatgtgtgcctgtaattaccatacctttcccagaccttcagaggaatactttggggccctttcctaggcgtggatgcttgttgagcaggcattgaggggtgggtgatttgcttcatctgcctgtgttccgtagcccattttattcctccagtccttatacttgctcctggtctcttctggagaaatccttgtcttcatatacagttttctctcttctgtctcctggtgggtggtcctgctgggtaaggagcgggtatggtgagaggtggagcagcccataccctacctcccagctgacagtctctgtgctttcccaggctcaagttcggctaaagggagctggcctaggagccaaaggcagcgcatatggtttgtcgggcgccgattcctacanaagatgctgtccggaaagccatgtttgcccggttcactgagatggagtnnnnnnnnnnnnnnnnnnnnnntgacaaggagcacaagaagtggtccatctcccgaattcgctgttaccgcctgtctctttaagggcttgtgaacagaccggagaggacagtggattgtttatactccagtgtacatagtgtaatgtagcgtgtttacatgtgtagcctatgttgtggtccatcagcccctcacattcctaggggtttgagatgctgtaggtggtatgtgacaccaaagccacctctgtcatttgttgtgatgtcttttcttggcaaaagccttgtgtatatttgtatattacacatttgtacagaattttggaagattttcagtctagttgccaaatctggctcctttacaaaagaaatacctttggg

SEQ ID NO: 124028 - DNA, 731 bp, Homo Sapiens
  misc_feature (491)..(512): n is a, c, g, or t
ttcccatttctcaaggtatttcttttgtaaaggagccagatttggcaactagactgaaaatcttccaaaattctgtacaaatgtgtaatatacaaatatacacaaggcttttgccaagaaaagacatcacaacaaatgacagaggtggctttggtgtcacataccacctacagcatctcaaacccctaggaatgtgaggggctgatggaccacaacataggctacacatgtaaacacgctacattacactatgtacactggagtataaacaatccactgtcctctccggtctgttcacaagccctctggcgggaaggaaggccattcaccaggcaacccacataaggggaacttctttaaggtgggagggagaaccctgcagaatgaagtggttcaccctaagatctattaacagcacaaggcatgcccttaaagagacaggcggtaacagcgaattcgggagatggaccacttcttgtgctccttgtcannnnnnnnnnnnnnnnnnnnnnactccatctcagtgaaccgggcaaacatggctttccggacagcatctttgtaggaatcggcgcccgacaaaccatatgcgctgcctttggctcctaggccagctccctttagccgaacttgagcctcaatgggagccgtaatgccttgacactttcgtcccaagtcagatccttcccgtagcccatggcctgcaccatctatgttccaatgttactgtg

SEQ ID NO: 124029 - DNA, 741 bp, Homo Sapiens
tcatatttaaatccatatttattaaatatcccttgtttttcattcaggagataccagaagggcccaggtcctggtgcacagcaaagcttctcattctggaagcagagaacctggcacccaaacctagggccagaggtctgtctgccagacccacagcccaggcccagaactggaaattcctgactccttccagaagggcaacaagcgaggtttcaaacttgctcaattaaggtgccaaggcttgcattcaaattcagctccactcctcactaggtgtattaacacaggcaggcctcatccctgcacaggttccaaggaacagcctggcagccactgaaggtatcttctctcaggtcaggtcccctctagctccagcatcttgggattgctgctgtagaaacactgacggatggcaggcactcttgtgccatgtgctgggtcagggacacagagtgaagccactggtgagaggtggctgtcaggaactggcagctaacacggtcgcctcccagtttcatggacactggtagaaaatacaaaattcctcgattagggacaagggaccactgattattcaaaacaatagcaatagccagagcatcagcattttccaccaccctcccaagccccagttcccataggggagtcagaggcacctgcatgagccattggactactacaagaaaggagcgcaggactctaccctttcacaacgcacagcaagaatgcctgcctctgctc

SEQ ID NO: 124030 - DNA, 960 bp, Homo Sapiens
catatttaaatccatatttattaaatatcccttgtttttcattcaggagataccagaagggcccaggtcctggtgcacagcaaagcttctcattctggaagcagagaacctggcacccaaacctagggccagaggtctgtctgccagacccacagcccaggcccagaactggaaattcctgactccttccagaagggcaacaagcgaggtttcaaacttgctcaattaagggtgccaagggcttgcattcaaaattcagttccactcctcaactaggtgtattaacacaggcaggcctcatccctgcacaggttccaaggaacagcctggcagccactgaaggtatcttctctcaggtcaggtcccctctagctccagcatcttgggattgctgctgtggaaacactgacggatggcaggcactcttgtgccatgtgctgggtcagggacacagagtgaagccactggtgagaggtggctgtcaggaactggcagctaacacggtcgcctcccagtttcatggacaaagactgcttgaacatgagactcaaggagggacctcagcaggcctggggtgttcagcaactattcctggcggctcagaaatcacttctgaagggagtaagtagaccaggcacatgaagtagatttcattttctccatgaaataatggttcagagaaaacgcaggcctagttccaggaaggcagagttggggtctctgcaacgtgatttaccggggcatcttgcaaaggagttgctgtgacagtaagctcttccactttgagaccgtcacctcagccacggctcccacctgggctcaggaatggtcaggcaacacgtggggcccaggatggcggtggatgactagactgccgaagaccgcgccgctgcgactacgaagtacggagtacggagtacaggtctgccagccaagactgacgccgcgcgctgcgccccc

SEQ ID NO: 124031 - DNA, 865 bp, Homo Sapiens
cttttggtatttaaatccatattattaaatatcccttgtttttcatccaggagataccagaagggcccaggtcctggtgcccagcaaagcttctcattctggaagcagagaccctggcacccaaacctagggccagaggtctgtctgccagacccacagcccaggcccagaactggaaattcctgactccttccagaagggcaacaagcgaggtttcaaacttgctcaattaaggtgccaaggcttgcattcaaattcagctccactcctcactaggtgtattaacacaggcaggcctcatccctgcacaggttccaaggaacagcctggcagccactgaaggtatcttctctcaggtcaggtcccctctagctccagcatcttgggattgctgctgtagaaacactgacggatggcaggcactcttgtgccatgtgctgggtcagggacacagagtgaagccactggtgagaggtggctgtcaggaactggcagctaacacggtcgcctcccagtttcatggacaaagactgcttgaacatgagactcaaggagggacctcagcaggcctggggtgttcagcaactattcctggccggggcatcttgcaaaggagttgctgtgacagtaagctcttccactttgagaccgtcacctcagccacggctcccacctgggctcaggaatggtcaggcaacacgtggggcccaggatggcggtggatgactagactgccgaagaccgcgccgctgcgactacgaagtacggagtacggagtacaggtctgccagccaagactgacgccgcgcgctgcccccggccgtaatggccgaattcccgggcatatgtccggtaccgtcgactg

SEQ ID NO: 124032 - DNA, 2180 bp, Homo Sapiens
  misc_feature (345)..(367): n is a, c, g, or t
cactgtggagaactttttattgtttaaaaatcataatcgaagcttcaaaaaacatacaagccaagacatcccagttctagtcccccactccctaaaggagtacacagaactatccttcccctcctgctcccacactgctggccaggaccctgcccggggaggttgcctgcccaccctcctgcctgctgtacagtaagtcaccggctggggaggagccctgggggaggtcagggtggctggctcccagcacccccaccccctgcacgaatgcagcatatgagctgtgtgtgggaaaatggggacagtgccctgggcaggggacccccaagggggaaagtgcctgtnnnnnnnnnnnnnnnnnnnnnnncagcccccagctcaagggaagctgtcatcatcatcttctgccatctccttggcaaactccaagtcctgctgttctcgctcacgccgttcctctgcagactccaagtccttgttgtacgatttgggaggaaacctcatggccttgacagacatgttgtggatatctaggcagaaggagatgcgctggtggaaggctagctggggctctcgggtggaatagatgtcaatcatctccttggattggacatagcccttctcgtggttgatgctggcctcaatgacaccatcccggatggccttggcaacaatgaactctgcatcttcggggctatccaactgcagcttctgggcgatgtcagccaaggagattcgggaataggagaggctgatcatgcgtacacctgtcttaatcacgttgtgccgcagccggataattagggtgtaggtcccatctgcttgaaacttctccccaaactgatccaggacctggttgaacttggctaggtttcctgtcctgacagcttgagtcagaaggaaatagggcatgagtgagcgcttgagggagggctggcggaactgcagccggtcagggatctcccccagcaacagctccaccacgatgagaagcttgtgcaccgtctgtttgaagccgacagctgtgtgctgaggggccttgcgaagggcgttggtcatcgttctccgggcctctgagtactccagctggatggctttgattcgccctgtgtagtagaggtacctggcccactcattgttgttggcctgctctgggaacacagacttggacaccagcttctcagcctggtcgtacaagctgtagtgtaggtaattccgcagcaggaggttcaacagggtggcctgcccgtctgcgtcatgccgaagcgtagctgtccggagccgagcatgcaagaagctgcgcaccacatccagcttgtccaggaactcatagacccgggcgtgataatagtaacactttgcggctacaaggtctagggcccggcggttctgagtactgatcttctgcatcagatcatcagagatcttctgtgcctctttgtagcgcttgctgttcatcatgaagatgaccacgaggagttggagataggcttccacttcaggcaggaggggtgtcgacgcagcttttcccgtgcggggacggaactgtaaatcagcctctgtgtccatgggctcttccaggaaggggagcaaaaagtctcgagtggcattatttgaagtgaagaagccctgcacagccttatacagaacatagtggttgaggcggcgtgatgtggaaggcagcatccgcagggcccgcagcacgaatctcggctccttgcctgaaaccgctttctctagctgtttcacgtgctccttgatgtcctccaaggtgactgtgtccagctctcgctgggagtgctcagccgctgccgccgccgtcttgccgtctgcctcccccgtcgacccgccacccgtcgctgcctcctctttcatctccacatcctggggggccggcggcggtgggggttcttgttctcctccgccgggcggcggtttcgccttgtccgcgccgcggcgccgcgccgagccctcctgcttcatggcacccggggtcacggcctagtccggggaccgaggccggggcctcgcgttaaccctcgcaccggggaccaggagccgagccgggcctgcacacgagcgcgagatagcgtcgggccgcacgatgacggagcagcatcaacctcgtgccgaattcgccacccaggcctcgctaccttagaaccgttagagttactgcc

SEQ ID NO: 124033 - DNA, 361 bp, Homo Sapiens
ggttgttttttgaccagtaaaatttattttgtaataccaaataggatttaagaaaattaacgtatttctttactatggaaaaccacattgtcatttgtgacatcatctatattaaatatggttttcacattagttatttgtcacttacttggaaaatgatgctgttaggtcctggtattaaaaatctagaaaagacttgttggtttatgtgctgaaatgtctttatttataattaattttaactactatttacttcatttcggatcctgtttaacaaagatacttgagacatccatttgttttaatgaaatctgtatggatatggaaatgcttgccctaataaaagcctacatatacaaaa

SEQ ID NO: 124034 - DNA, 1517 bp, Homo Sapiens
cagcattgagacagtttattggtttgctgttcgcatatcacccattttatgtaaatagattatacagagactcggtgtttccttcttccacacaggaggtaatcagtctttctctttcatgcacacaaacacactcacattccacgcggcgaacaactttacacctcgctgagacattcacgtcttaaaatagggggaggacaatataattgcttttaaaatgcccttaatacaatatataacgtacaaaaatatctctatatttgaagttccaaaaaaaatcttgacagcaacaaacttaaatattgatagttacctctgtatgtacaacacgcattgcacttttcctctttaggttttggaaagttcaagtaatagtgaggcttgcgccctggtggggtgacacgccgtgagaaatcagtttgtgggcgagcacggctgtggctcagacccctgctccgggggtctcagcattcatttctcagtttctcctctccttaagcctggcaaacactcggattcttctgcaccccgccccctggggcacttgcacctgagcaaggctaaggaagcgaagcccccagaaggaggggcccttgcaaagccagagctcgccgccggacggtgcctcccggactcagggtctccgcagggctgtcagagcccggtcccccacaccgctcgggaagtccttcgtcccgggaggcaccagcgggatgcttgcgcgactattccttgtaccatgggcgcctaaatcctaaagaaagtggggagcacttccactcgggggggctggagccccgtgtgcttgtggcttagaagacaccagagtccgacccgggccggcctcgggcagggagcgccggcgccggcggccgtagccctgggggctgatcttgctcctgggggcgacgttgtccttgtccttatctgtgaactggtagatctggtgtgccagcttctgcaccgtgcacgtcccgaagcggcagccaaagctccggaggccctggaagttgttcatgctctggcggtagcgcttgactcggatgcgggcggcatccggactgctgtcttcggggcttcgagaggcacccttcatgtcctggggccgaataagggtctgggcaggcccggccttcacgtcagcgagcccggtggggtagctgctggacatccgcagttccctcttcccacgactcagagcccacttattccacttctttcgaaactccgacgcgacatccaaccgagcggtgtcagcgcctaggaaggcgagcgaacccaggtacatcagggcgacggaaaccagcttcatcccggctgcgaagcgcagaccctgctaagagagtgatctgccaagtacttgaaggagaaagtctcagacgtcccactggcaatggcaaaactccgaagtccaagcccagctgcagtgagaagcccgaagtggcaaggcttgagctgttctatccagtgtcaccagcctcggccgattcccacccagcctcgctacctagccg

SEQ ID NO: 124035 - DNA, 1052 bp, Homo Sapiens
  misc_feature (597)..(605): n is a, c, g, or t
tttttcattcaatttcctttaatgagtacttgttacagtaaaagaggtataaagtcctgttcccaagtccaaaccactttttaacttaaatcttgagtttttctgaattactcaatttgaagtaattctctttatatctgaaaaatggttttattgaaacgtttgagattaaaaaatatgcattgcaagaagcatatgacaaacattctgagagtacaaaattagttgtaaaaaataacataatttaccagtaaacccactcatatagaaatgtgcaaagccttttgatataaaaagttttgtacaccaagcacctatttttataacttagcttcccatggagagataatggcttgcgtgcattttatgtatccataacatacatacaaggctcggtcttttcaatgggataacagttcacaactcttcgatttgaattgtaatgaatctggtgacaaggatttttctctaatggattccaaagttagccagaacttttaatgtcaagatgaaaaagggtgtaaggtgttatattttcttcaattcctttaccacaggaggctaactccacaatttccctcatgtttctcattcagnnnnnnnnntattaaatttgtgttcagaattatttgatgattgcttctttgtgctgatgtttcagttcctgaagtcaacttggctctcacaattttctaaggtcaggttattgacttagggttgtataaacatttttttctggtttttggattttcactgagaacgaccttcccttaatcgtcttctagatccttgaacttttttgttggcttgcaactttctcacgggtgtgtcttcttgtaacaatttcttcagagtttcttctgtttctccacctccagtagaaatcctagtgtattttatttcaggacctgtaatgattcgttcttctcgtgtctctttttcagttatttccacaggcactccatcaatgattttggtgtattttttaataattggctctccatggatcacttcagttattgtttcaccttctttaatcagtctgaattcag

SEQ ID NO: 124036 - DNA, 637 bp, Homo Sapiens
gggagttctatttcataaagaaaaaaatcatttactggaatgagctaaaatgctagagagaaatccacagcaataattatccaaatatatgaacaatcccatcttcaaagatcattattccaacattctctgaggtgcaactaataattgctaacttggctgtgactttacagtgcctgtcaatgtgatttcaaggatcccataagctatctaatcacagtggatgcacagtacatgtgatgtgatcagatgaaggtttgatcatgaactcaattaaaaaactgaaatataagagagaaggaaactgatggggaaacactcaagagctttggcaagattagaaaggttaaaggcaggatggggaagaaaagcaaggacatctaagagtacagagagaaacctaatcaaaggttacaagtacatacaacaatactgcatgggaaggaaggttccgctggtaatttggacagacggcacctaaagccattctgtttatccatcgcacctgagggcatgggtgtgcggagtgctgacccctcaagctcttctgaagtccacctgcctgccccactttcccacagactgcaaccatgccagggtggactcaaagcgagagactccctggaagtcatctggt

SEQ ID NO: 124037 - DNA, 876 bp, Homo Sapiens
  misc_feature (162)..(205): n is a, c, g, or t
taaaggttttaaacgtttctctttgaaaagatggtatcttacagtacatacaaaaatactctgaaaatacatacgacttcatttacaaaacactgaatcaacatattacaagaattacatggttatggattttaataaactgagcatgcattcatgaaactnnnnnnnnnnnnnnnnnnnnnnnnnnnnnnnnnnnnnnnnnnnngacaactcatatagttaaataaaaattacaaaggtcctgagccaattaatggttggtaacaatgtcattcaaaatgcctttaggtttcaataaaatccactgcttatttctgcatgcctagtccgtgaagaaactatttgaagttgtggggtaaataatgatcaggaattatcatgccaagttaattttacacctcaaaaatacaagtgtgccatacttaaaggttatcttattgttgatgctggaatgagttgctcctcagtaaaaaataccagtcaactaacaagaatggcatgaaataggatatgtaacaattttaccattcatatactgactttcagtatcctggttatattttgatttttaataaagatgcatttcaaaggcctccatgggaggcaaaatatagagaatttatggtgcccaactcttatgtaatcactggactaatcttccctggtaactatgcaacatttggacagaaaggcacacaaaaaagtttaaatatttcatgtgccaatctggaaaaaaataatttaaatcaacagaacagacagtacatctacacaaatgaggaaagcagaaaagatacctcacattcatttatctcaggtttcaaagtggcttcaatgctaaagtaaatgtattaacatttggaaaatacaagacaa

SEQ ID NO: 124038 - DNA, 796 bp, Homo Sapiens
  misc_feature (753)..(753): n is a, c, g, or t
cagcttttcagaagaaacgttttattatttttttgtcgaagaaaaaaagccatataaatattagagtataaaacttgcgtgagacacaggaagagggtggggtgggagctacgtgactatgcgaagagaagcgcttataggagaagtcagtacgggggagggggtcgccttagcgcgtggacacagcacaaaacacaacacgggccgccgcgggcagatcaaggacagacggctgcgcggagcccgccgcccgctgcccacccgccatcacgtaaaagcacaccgcactacactactggctattctacaccagccgaaagagggagggggcgctacactactgtaagggcaggtctggggttctctggcagccccgctggatggccggggacccaggggcagaagggggtgggagaagaaggtctatgcacaaggaggcactggggaactttaaccaggctatggccactagggggcgcactggggacctgggcagtggccttcacggaagagaaacggcacctggcaaggtgaaggactgaggcttcaggagggcaggggccctgttgaagaagcccatcctgggctgagactttctgttcatttggtccctgccctagctccctgcctccccaacccagggactaagaatggcctggctggcccacccttcctgctggggctccgctgacccttccaccagtggcacctctggagtacccagcacccacagaggccctctgactctcaggngactggtcctaactgctcgagctccttggctgaatgcagttat

SEQ ID NO: 124039 - DNA, 1342 bp, Homo Sapiens
  misc_feature (52)..(52): n is a, c, g, or t
  misc_feature (1196)..(1196): n is a, c, g, or t
  misc_feature (1223)..(1223): n is a, c, g, or t
  misc_feature (1243)..(1243): n is a, c, g, or t
gcgaagagaagcgctatagggagaagtcagtacgggggagggggtcgcctangcgcgtggacacagcacaaaacacaacacgggccgccgcgggcagatcaaggacagacggctgcgcggagcccgccgcccgctgcccacccgccatcacgtaaaagcacaccgcactacactactggctattctacaccagccgaaagagggagggggcgctacactactgtaagggcaggtctggggttctctggcagccccgctggatggccggggacccaggggcagaagggggtgggagaagaaggtctatgcacaaggaggcactggggaactttaaccaggctatggccactagggggcgcactggggacctgggcagtggccttcacggaagagaaacggcacctggcaaggtgaaggactgaggcttcaggagggcaggggccctgttgaagaagccccatcctgggctgagactttctgttcatttggtccctgccctagttccctgcctccccaccccagggagtaagaatggcctggctggcccccccttcctgctggggctcccgctgacctttccaccagtggcacctctggagtacccagcacccacagaggcccctctgacctctcaaggggacctggtcctaaacctgcttcgagcttccttgggctgaaatgccagtttaatccattggtcctgttagctcagcccaaagctggctgcctgggctgagccctattatgtagtgggaagggtccagcctagttattggtttatggctggaatctggaggatgttgtcagtcccctgaggacatacagagcctcctccaaggccttgataacttgatgtgtcaagctttgtccatgcccccaccatccacatccacacacttcccttccttatcttaccaccccatactgtcttggaacatgcagtggagtctcttgtttgaggaggaggtgggggaagtcaaggcatgcagtggaaacgtcaaacaatgaaaaacaaaacagaagactggtccccagggcgttgggaagaggcttggtagcaaaatgccctccctaaatccagcaagcatcaagtaccatggggatggtgatcatgtcctccaaaacttgagcattgatcttgggctctggaaggaggtgaaggggctggcaccaaaccatgctttgggggaagattnagaattaaaggagaggccaagaggtcntgatgcccttccaacttttnagaactaggaggcttgtaggttacttggtacttcaacaccccaaccaccttactcgggaaagaggaactgttggagtggggtggggaggagggaggcat

SEQ ID NO: 124040 - DNA, 360 bp, Homo Sapiens
ccaagcttcccaagctttatttattgccaaatttgggcggcctcgcccgcacggcaccctccgagtccccgccgcgtctgcaccatcccgcgatggcgtttctcgtgtttttcttttctggatgatataaatattgaccgcacactcctgcttgctccgggttttctctggggtcccaagagcgcagtggccttgggggagaggtgagggtcctgccctccggccgggccgccaaagcggggtgacccgagagcgcaaaggcggccgcgacgtgagcccgaccccacagcccccctgccacccagcagctcccaaacacccctcacagccacagctcaaatccaccttttattttttctt

SEQ ID NO: 124041 - DNA, 415 bp, Homo Sapiens
  misc_feature (112)..(293): n is a, c, g, or t
gtatttactgcagacctactttattatgcaccgtgatgtttcaagtatcacaaaccattacaaagcaatataatcaccctccttcccccttactgcttcaaactattgtggnnnnnnnnnnnnnnnnnnnnnnnnnnnnnnnnnnnnnnnnnnnnnnnnnnnnnnnnnnnnnnnnnnnnnnnnnnnnnnnnnnnnnnnnnnnnnnnnnnnnnnnnnnnnnnnnnnnnnnnnnnnnnnnnnnnnnnnnnnnnnnnnnnnnnnnnnnnnnnnnnnnnnnnnnnnnnnnnnnnnnngcgccaccacgctgggggacggagtaagactcagtctcaaaggcatgacgaaaatagcaaaaatgctttagtgttatacctgttacgattgtaatgggctcctacttgtaatttcctcgtgc

SEQ ID NO: 124042 - DNA, 1645 bp, Homo Sapiens
  misc_feature (106)..(287): n is a, c, g, or t
actgcagacctactttattatgcaccgtgatgtttcaagtatcacaaaccattacaaagcaatataatcaccctccttcccccttactgcttcaaactattgtggnnnnnnnnnnnnnnnnnnnnnnnnnnnnnnnnnnnnnnnnnnnnnnnnnnnnnnnnnnnnnnnnnnnnnnnnnnnnnnnnnnnnnnnnnnnnnnnnnnnnnnnnnnnnnnnnnnnnnnnnnnnnnnnnnnnnnnnnnnnnnnnnnnnnnnnnnnnnnnnnnnnnnnnnnnnnnnnnnnnnnngcgccaccacgctgggggacggagtaagactcagtctcaaaggcatgacgaaaatagcaaaaatgctttagtgttatacctgttacgaatttaatggaaattacaagtaggagcccattacaatctctagccttaaaatgctgaaaacatacacagtgtgacaataagtaaacttcgagacccaataagggggaaagtccaacgtggaaagtatttggtaggagtgaagaacagagtgacaactgcttagtcccactggatatttcgctcctcttcaggaagaatactccagtttggggaggccatatcccgggccagccagttaaaatcgtcaacatcgttccagttatttttgctcctatctaaaccagagctctcgaagtccttgtcgatctccgggtagctccaggtgtaaggggcgaactggatcccactgcagtcctccacgatggccctgctggtcacctgcaggaagatgcgggtgtctttcgtactgtgtatgcggagctgttggcaggccactgccagcacgcagtcactgcagtcctccaggaaaacagaggtagacaccggaccgcagagcagcttgcagctgtgggccttggttagccgcagggtgttgggatttccatacagtctgaccgtgcagttgctcagttcggtcaaaagaacgtcgcgctggtgcaactcgctggctctcttctccaagacttgggactccaggttggagaaaccgcagacccagctggggccgaggtctccttccgccttcttgggcagcggggagtcctgtatgctttcaactgccggggggatgccaggagccgcgtctactttggtagacgaagcagcatcctttccccgggtcttgaaagcgaaacgcttcttgggctgcagcccccggcgccgctcggccaaggccgcctgcagccgcgccagcgcctcttgtccctgccgcaggtcgtaagcggctaggaaaaaaactgagtcgttgattagtttctgcagcccctggagccgagaggccgcctcctccagccgctcgaccgactccgcgcgctccagaagctcttccacggccgctcgctcccgagcaaaggtggcgacgaaaaagtggctgttctccttctctacctcctggttctgccgcttttgtttccgcctttcaacttccagctgccgttcttgttcgcgtctctgaagccgctcaggcaccaggctcaggtcccgctgggactccatgtctccggtcctgacagcagcagcggagcaactgacggactccatattggcttcaagccctcgtgccgaattcgcacacccaggcctcgctaccttaaaccgttagagttactgcc

SEQ ID NO: 124043 - DNA, 494 bp, Homo Sapiens
  misc_feature (108)..(288): n is a, c, g, or t
  misc_feature (301)..(301): n is a, c, g, or t
ttactgcagacctactttattatgcaccgtgatgtttcaagtatcacaaaccattacaaagcaatataatcaccctccttcccccttactgcttcaaactattgtggnnnnnnnnnnnnnnnnnnnnnnnnnnnnnnnnnnnnnnnnnnnnnnnnnnnnnnnnnnnnnnnnnnnnnnnnnnnnnnnnnnnnnnnnnnnnnnnnnnnnnnnnnnnnnnnnnnnnnnnnnnnnnnnnnnnnnnnnnnnnnnnnnnnnnnnnnnnnnnnnnnnnnnnnnnnnnnnnnnnnngctccaccggtgngggggacggagtaagactcagtctcaaaggcatgacgaaaatagcaaaaatgctttagtgttatacctgttacgaatttaatggaaattacaagtaggagcccattacaatctctagccttaaaatgctgaaaacatacacagtgtgacaataagtaaacttcgagacccaataagggggaaagtccaacgtg

SEQ ID NO: 124044 - DNA, 323 bp, Homo Sapiens
agcaaattaggaccttcggcaggttttccctctccctaaactcattctttccctccacaggattgctttgtccatctcctgctttcatttcaagtgcataaacaaaacctcaaagggcctgggaaggtgaggcaggccagagtctgtgttctgtgttgagtgtcaagctatttgttaagaaggtctgcaacaggcctttggtgtggctctgccagagactgttctgaacactttgcttgagatccgtgccctgtaaaatggatatgatgttttactgatgtctgtaatacatttgtaaacttccaataaaatttgaataaaag

SEQ ID NO: 124045 - DNA, 715 bp, Homo Sapiens
  misc_feature (279)..(300): n is a, c, g, or t
tttagggttgaactgactttattattttgtaaatgtgaattttacaaagcgctttacaattaatgatcacatccttttgtttgtcatggatttccactgtctgaaacggctctgagcacgcttgaagccctcggtttccctgttcgcttttgaatgtttcagttttagttattgatacaatgtcagccatggctaaaaagtaacagtcttgactctaccgagtaacagcacaaaaacagagtgagggctcaggaaaacaaaacaaaggcttcctccttnnnnnnnnnnnnnnnnnnnnnngctaagcatctgtggctgaaatctaactcagtggtactgtgaaaccttcctttacagcacaggaaaatttattttttaacagtcgtgagttacagtactttaacccctaaacagactctttaaaacaaccgtctcctttttaaaagtctcttttttccaaacattccatccgaaggatggatgctctacttgcacccagtgccatccaaatgttcaagtcaaaaatatttatacattttatacttagttcttttttttgtctgctaaaaatagtattgcaagttttggcttcttttgacataaaaatcacaatcgtgtacgatgctaacaatggaagcgactgatcggaatacgagccggtcgtccagtctgaatgcttgcgattctgcatgattttcctttccttttctttttc

SEQ ID NO: 124046 - DNA, 1352 bp, Homo Sapiens
agcatcgtgaaaaatttccccgccttcttccccaacgcctggggtgtggttgttccctctcggatggcaaactcccaggtatgtaaagaggttccatgtgaggtcattattgtgcatgatgaagccgtgcagagagtattcgccatccgatgccaggtagacgttcgctgtctctgtgttactgtaaccttgctctgtcttctccaggagccccatggcagcacagatgtccagaagcctctccattccacacgcagaggcgtccactttgctggcaatatccgcagccttctggggtgcttcatcttttaacaaatcgaacaccttcagtttgcaagcggtgagcaggcccttggatagcataaagccctcaatcagctccaggaggcgtgtcgggaacggaggcagggtctcccgagtcctgtgacactcagcctctgccgtggcctgtcccgcctctcccgcctcggccttctcatcgcggctgcccgcgtccctctgagtgggctccgagccacccccctccacgtcactgaggtcttcgaaggtgtccgcggccgggatggagtcgtgcttgacactccgccgcaggtcctccgggcggggcgggtagtagagcttcaccagctgcttgcagaagtggttcagcgggaatcccaccacgttcagaaagtccccgtgtacggactccaccagcatgccgcccagggcctggatcccgtagccgccagctttgtccatgggctccccgctgtggacgtattcccagagcagctcctcggacagctccgagaacttcaccttcgtttcctcgtagaattccgagaccctggtgtccagctgatggtctttgctggagcagtggacgatcgcgacacctgtgaacacgctgtgttctctcccactcaaccgggacagcatcctgtaggcgtcctgcttgtccaccggcttctccagaatcagccccccgactgtcacgatcgtgtccgctccaatgaccacgtcgggggcccgcaggtctttctggtacagccggttggccacctccagggccttctgcttggcggtctccatggcgtacccatacggagtagcgaaggaggctttgtccagcttctctttaaacttggaggggaccacctcaaacctgagacccgcgttgctgaggatctcctgacggcgtggggaggcgctggccagcaccacgcgcttgtgcagcagcttcccaatcaccgggcacagcaccatggcgtccacgccgggagccgggcgtccgcacttctgagcccggagcccgcggtgcgcgcagccctcgtgccgaattcacaacccaggcctcgtacctagcccta

SEQ ID NO: 124047 - DNA, 1181 bp, Homo Sapiens
gcctcattaattgcattatttattaatttaacttctagtactctcgataaagagccagtgaaatgagttattgagttccagggaaaaaaatgagaacataattttgaatttattatctctctatacacacacagttcataattggattacatataataataatatcaacaagtctatcagtatcgaagttggatactggtaatttctcatgtgaggctcttgtgtcacagtcagcatagatttctggagcatttgtctgttgatcttttggtggcctcaaacctcattaagtggtgtgggagatgctgtttctgccatgtgagaatgtgatggcagaattaacacaaccccaccaggggtacaacagagcactttacatccaaaggcagagagggacacagcaatgcagaattccagcacacttaagaggagcaccatgccatccagacccattaagatggacatagtcccatgacaattatttgagttgccatagtagttacagtaagggtgatggaatgaataaaacgccaagctaaatgtgttgattaagatccctgatgcagccagtacagagctggtgatattcattcctagactacctcggaccaggccttttgtagttctaattcctgctgcaattgacaaggatcctgaaataataaacattactgacccccaaattgtgtacccgatatacacggaaatagggttacttccataagtattagatgccatacacatcattgttattcccatgctaaggctcatcagggcagtcagaatctgcacaaccccaaggactttgggttctcccttcaagaacttctcttgcaatcctttccacagatgtgaatgtatgacagccatgtttcccagctggggcacaccagggccagccctggcatggcctgttccattccttgcatggttgtcatggcagcagaaaaggtgctttcttcaggcctgcaatgtctgctgtaggtctgatgcatgcagggctctgggcaagttcctcaaagttctttggtctagacccaatcaacttcccccactgcacacctcactcagtttaaatctgcattcctcttctagcagatgtttggaaccttaaaggctgtgctgagaatccccggccgtaatggccgaattcccgggcatatgtccggtaccgtcgactg

SEQ ID NO: 124048 - DNA, 3601 bp, Homo Sapiens
atctctgtgcgtgctctctttgtgctctattctctcccgtcttttcgcgttcctctctgtgtgcctgtctatcccctggtggctcctctcgcgtgagtctctggtgcctctgtagctctcctcctccacgccctccttggtaagggttcatactcgttatacgggctttcctgccctttcttagcttgcgcctggctctgcttctgaatgatgtaggcaagatggggccatagctcattgcggtcacctcccacccaggtcccggcccccagaaatgactttcagcagcaaccagggagagcggtgcgaccgcccacaggggagggatggggaataccagagagatgcaagcatggcggacccctcctcggtgcccacggcccagctagaagggcctcatctatcacccaataccatgcctggcattggcgtgcaggaaacacaggaagtgagaataaaattccttattttatttcaaaaaatgtaggggtggggaagtaacatgataaacattacgatcagctccctatgggttcattctgcctctgcgggggtcgggggcatacagtagctggggggcatgccattgccatggcaacccagatgcttagatgcaggtccctcctggctgcttagagctggggggactaggcgccctccccgaaagcccccattctgagttgttggtgcctgcccttcccctgaatctaagaactgattagtgggttagactgcaacagcagctcaggatcctcccaggacttccctccctcccctctcacttgcccgtcccctcagctaccagcacctccagcccccacctcctcctcttctcagctccaccctggtcctcatgaggtaccccctccccagcccctcagggcagcctcctcctgagactccctcccgctctgcctccctggccctccctgacagtcagggccaccgaggcaaggccatgtggtgaaaggcagattgtcacaaggcccagccctgccgccccctcctatcagaatgcatcctggagcaacaggttaaacacagtaagggcaggttcagacaggagagtgcctgaggcagcgccgtccacacagcagccccgagatggggagggctgggacgagacctcccagctccagtgccctcctgcagcctgcagggcccacgtcccctggggccaaatggccagggattggctggcactgcccagctgataacagagcctttggagaagggtcagattgctccagaatcttggacctcaggacaccctgaggaaaagctggagggtgggctgagcctccaggccagccggcccctccctgaacgtggccactgcctctgctgagtcacaagagacgagggactccccctttggtcccaaggtcacaggctcaagttggggaggcggtggaatggggcccgtgaaagcccagggtcagagcactctagtgatggggtggaggactcttccagggcccaaggtttgggctggctgtgcccgcgggcctggggccctggacatcttaagagaggcctcgggtacttaaccgagctgcaggagggagacccgagctttgtaacaaagcaggcctctctatgaaagggtggaccaatggcagccgtcagggagagtgaagccaggccgggagggtcaggggccctgcccgactaggacctgcccctatgaaccccaagagcatctgaagaaccaaagcgggggtgatgcctagtgaccaggctgcaaggggagactcacaggccagacccatggaccgctggtctcctcccatctttaggggcagagagtggaggtaggacagagcccacccccggtggccacctctctgctccttggaagaaggggctaggaggcactgggagggccatggctgatggctgacggctgagggagggcaggtcccatgagggcagggtgctatgggggagatgtgaagagaaaaaggagaggagaaagggagaaagatccaacatggggtccgtgagcagtgcatacaccagcctctcggacacccctcagaacaaaagcccatcattcctctggccatcaccccacctgcaccccttccccacggtgtcccgggggctgtggcttcatttgtgaaggtaggcgtccagccacagcttcccagacttcttcagggacctgatgatgtccagcagggccctcagtagcggcttctcctggtattcaatgccatgcttggcacatagagacttcaccagcggggcgatcttgtgtaagttgtgccggggcatggtggggaagaggtggtgctcaatctggaagttaaggtgtccactgaaccagtcgttgaagaaggactgctccacgttgcaggtggctgtcagctggctactgaaccagtcacggtaggcctcctggtcaatctccatgacgatgtgattcatctgtgtgacccacacaaaccagtggctctccaggaacctgatgaagttgaggaaaaaggagggctcccaggatgccgtagaaagggatgtaggtgatgaagaaccggatgtagtagctgacggcccaggccaggtccacccagttcttatggacgatcatggtcatgatgatctggtactggaaatacatggggatgagcagcggcggcccaatcaggaagaagtattcgtgctggtgattgtagggcaggtatttcagcttcttcttgccgtactcgatgggctgccattcgcccagaacaaacacgtgcagcatgttcacatcgggatccttgtggaagatgttaggcttggcgtggtgctggaagtggcgatgattccaccagttggcagaggcaccctttaagtggccaatgacgaatttgtggacaaggtggttccacttgggttttctgtagacagacaggtggccataatcatgttgcagccatccagcttgggcctgagaggtagcaaggacaaaggccgtgatgagggtaggaatccagccattgccaaagtaaaagacagtgaaccatgcaatgctctccagggcgatgatgtgggccaggaggaggaggaagaacacgtggttggtcttgaacaggttcatgtcctcagccgtcttcctcagggcccggaagtcctcagtgatctttgagttcttgccgtggtcctggctgggctcctccggggccagttcaccaatcagcaggggtttcaagaacttgcccacgaattccaggtcagggtggaaggcgcggaaggcatccgttgcatcttctccagcgtagtgcccgatgacccgctggccccccgggtgctggatggaccatttggtgatgttgtaaaccttgcggtcaatgaccagccacctgtcggtgcgcaggttatgcttctgaatctcctcccagctgaaggtgggcaccgacacctcgcgctcggcggccccctcggcctggttccctcccttccccatgctgcctgcacgactgtgacgccccgtgcactgcaggcctccccgcgccggctgctcgctgcacagacggctgcctcccagccaggtgtgtgcagcccgggccctcttcgctttcggcttttatcccataaatcccgggcagtaccagcc

SEQ ID NO: 124049 - DNA, 1564 bp, Homo Sapiens
  misc_feature (1225)..(1276): n is a, c, g, or t
  misc_feature (1489)..(1497): n is a, c, g, or t
tttttttgttgtaaatagagttaacataatatatttattttaagtgccattcatgcatatcagttctggcagcaacaatcctaatgacacttggaatatttctttacagcactaaacagttacaaataatggttgccgttcatcatagaggcaaaatatgaaatcgtgcaatagcaaaactgtagaaacattaaaacactgactgtccaacagcagtacagagagcaggttgtatctgcacaaaaagccaatgcattttcatcacatatatacaatatagatatgtacacatcaccctctgaatgaacaatatcaaaatactctattccatttgaaattatccccggattgattccctcccacttcaaaggacatctgagcgacacgtatttacaagaacacacatgaatacatttacatttcaaaaactgccacaaatgccagtcggattattctcctgaacagagtgtccccatttgtttacatgcatttactattctttccccctaaagtcttcagtcaatttaagcccaagacagaacttgttctgcattagcaactaccatacaaaatggccactagagggactctctgcacctcaccaggtaaccctgtctggccagggcccacagaaaaggcctgtcctgggctcctggaccacctggatcacaggagagtgggatgggtctgggtgaaggctttgcctccatggccattcttgctaagtttaaattctcataaaaatattcatcactgcaaatcagtaaatgattgccaaatgggaaattcgcttcacacaatttataaaatcatcatcagtggttctactcaaatcactcagtatgagactgcattccaatatccaaattgtttaaagtgcacattgctacccaagcaattaaaacagtttcaaaacagctattttggtgtctagaaaacagtgacttaagcaaaccattgaaaatcacccctcttttttcaagcatttactctgcaggctgccatctcatcttgcctctgatccttctaagaggcgcaagttggctgcctttccagaatcctctgattttcgttgatccaaggggctggaactgagcttcctttttcatgccaagtagggtccaaacaacagagaaacataaagctcttcctttctccccaacctcaccagcccttaccatggctggcttcccagtgattcattcaaggcaacactccattaaannnnnnnnnnnnnnnnnnnnnnnnnnnnnnnnnnnnnnnnnnnnnnnnnnnngaaacaaaagatgtttgtttagttcaagtagagattactcaaccacagaatcactaaggctaattaaagtgatttagcatggctgataagaccagagatgctaaaaagcaactagtgagcagttattactctttgacttgatggaatatatttccccattagaactgacactttttggggggtctaaagaatcaattcaaaatctattcattnnnnnnnnnccctcatttcttctagttttatcataaaactaagataatcagtccatgcaaactgtgatatgatatg

SEQ ID NO: 124050 - DNA, 1319 bp, Homo Sapiens
  misc_feature (1099)..(1156): n is a, c, g, or t
ttgaacagacgataactttattggagatttacttggctacaattattacaaaaaaaacaactaaaggtaattgtgatccataaggtgcagactgcaaatttctgcagcatgattactgtatgaatgaatgacatcatgttccttaaaaaacagctgcagcatgtgatggtaaatattttattgtcaatcaaataatatgcattagttttacttgattttagtaattttccttcactatttacagcagaaaagccagaaatttacttcctgttcacctttgcatttttgctatgtaacctgctgctgcagtgaattcttagtgcatctataaaatttaaattgtctgtggttgatgtccaaataaaaatggactagaaaaaaagaagtaatgattaaaatatatttacaagttagttgtgaaaaatcattttcactgctagtggaaaatacaatggtctcaatgcaaatttcctagatattgctattggcgtctccaacaactttaaaaatcattttaatagtcttggtcttaaacatatctttaaaacttttcatgtacaatataaaataaagaaatttatctggaaataattaaattcctgaaaagtaatcagtggttggaaaaatataattattcaaatgtaattaaaacaaccatataggtaataaacatgacatgagtttctcttctgcagataatgcaaatgggttaaagactcttaacataatttcagatgcagttaaaaaaaggtatcaaggtctcagtttggtggcttcaatcttgtgtaaagggattagacaccctaacagagcaagatccaatattttaaatcaacggggccttgtgcatgaactgcgctcgatctggattccagtgatcctctgcagtgcccacctgcctccagggagcgactgaagaagccgactgccgggggaacacctggattcatgaaccaaagcagcctcaagtttcatgttgtcaaggcagggtatcagaatctttctgagggcaaagtattattaacaaataaaaatatcagtattttaaaagacaattacaggagtgttagaggtcattctaaatttcatcacttcacgnnnnnnnnnnnnnnnnnnnnnnnnnnnnnnnnnnnnnnnnnnnnnnnnnnnnnnnnnnttcagttaacaaatctgtttcatactttcacaaacagtaaaaatgccacagacaaaaatgacctatttaagttgtgcgagtatatgacacattgcaggcattataattatctttttcaaattccataaatcaaaacagcagcaggccaaaccacatttttttc

SEQ ID NO: 124051 - DNA, 698 bp, Homo Sapiens
tttttgtatttgctgcgaagatacttttattacatttcatgcatacactggattttaacaaccagaacatggtgtaattggtgggggctggagagacagcagtcactcccaaccctgagggtgagtccccaacctgagggtgaagagaaaatgattacagtctctgccatagagcttagaatcatccaaacctgggtttcaaattgaaaggcccaaatagcttgagagggctccaggtatttcagctcaaaatagtctcctggttcaagagaactcctgtgaggtcttccacaggaaaatcagtctgttgtgtgtgaccggaaaagttaccttatcaacatatttcttagaattgtaaaataacaatgttcaccattttcaactgttttttaaactgttggcattcctctggtgtgagtgtgtctgctttggcaataagtggggtgatactcactttttcatgcaaacgcttcataaactcaatatccaatggtttaagtccatgtcctgaaggagccatgaagtatgaacaacactgcaccctgttatcaggcatctgatgtctgttcacgcatgattctgcatttaggtagtcctcaaatttactatcaatgtaatcgataacaggctgccagctgtacagtctttttaattctgtgagaaggacctggatactctggagaatacaaatctatgag

SEQ ID NO: 124052 - DNA, 611 bp, Homo Sapiens
tttcaatattcaattattatttatattaatatgatgtcatgaattcctttcttcactgggttataattctgtgactgtcaccattttattctgatgttcaaattgtcccatatttggcctgttggaatcttttcaagttggcttctctgctttttttgggcatgtctccatcattctttgagcattgccttactttcttgtacaaaaagatattctgggctcatcttatactttctgtgctctagctttgaaattaccgtttcttcaaagagctctgtttccttttagaggaggatggtttttagaaaccaagttctaggtagcaggtgtgcttgttgctgttgaggtgttgcagctcccaggccctttccgtgaacagagccatgtcctgaaggagcaatgaagtataaacaacactgcaccctgttaccaggcatctgacatctgttcactcgcgattctgcatttaggtagtcctcaaatttactatcaatgtaattgatagcaggctgccagcaattactgttatccactgcatctccaaatactggggtatcaactattgtaagcaacaactgaacaccaccttctctgattaaaacttttgattg

SEQ ID NO: 124053 - DNA, 974 bp, Homo Sapiens
  misc_feature (851)..(885): n is a, c, g, or t
  misc_feature (889)..(930): n is a, c, g, or t
tcgtgacccctgtggccattaacttccaattgatagttattactaccttaccacagtcaagagctaaacggtccctttatcttttaaccaagttgacttttccttccttcatcatctggttttcctggaaatttcgtatatcttaactttaatgttcttggatttcgtgtcattatctgttttttaaactgttggcattcctctggtgtgagtgtgtctgctttggcgataagtgggatgatagttcacttttttcatgcacacgcttcatagactcaatatccaatggtttaagtccatgtcctgaaggagcaatgaagtataaacgacactgcaccctgttatcaggcatctgacgtctgttcactcgtgattctgcatttaggtagtcctcaaatttactatcaatgtagtcgataacaggctgccagcaattactattatccactgcatctccaaatcctggggtatcaactattgtgagcagcaactgaacaccaccttctttgattaaaactttggattgttccacctgtacagtctttttaattctatgagaaggacctggatactctggagaatacaaatctgtgaggaataatgagttgattaatgtcgactttcccaatccagattcacccactaccataagcgtgaattcaaaacctctcttcaccgattttctgtatacttgatttgggagattggcaaatcccacatagccttcaaggttcttctgttgagctaccatggtgctgctgttgacgctcctctcctcagcagcagcggatctcgcactccccggccgtaatggccgaattcccgggcatatgtccggtaccgtcgactgnnnnnnnnnnnnnnnnnnnnnnnnnnnnnnnnnnncggnnnnnnnnnnnnnnnnnnnnnnnnnnnnnnnnnnnnnnnnnnaataccgaccgctagcgccctatagtggagtctatacatttcta

SEQ ID NO: 124054 - DNA, 2496 bp, Homo Sapiens
  misc_feature (492)..(502): n is a, c, g, or t
ggtacatcacaacatcgtttattatgtgaattttttacaatacaaacaaaaaatacagaaatgcaatatatgaatacagctaaatgcagaatggtgacttttttctcttcaagaggccatgattcccatttctagtaaaataaagagactgcatataggtagaaacaggttggtcattagcttcacaattttgcctagaaatgatctataaatgcatttccccccctgctacttaccataaagtgtaaaaagggagttaaaggaaagtttccttgttggttcctaccatatgaaagatgctatattctattttagcagtgccaatatatggaaaatatctaaattaaatgttattacaaaaatgaagcagtaatgagattctggctaaagagggcactaaatgagaataatatatatttaaagaatccaaaacaaacaaacaaaaagacgttgttataaaaaagctctaggtgcacagtaagcatatagggnnnnnnnnnnnccatgtgtatttttaaacaatggaagtgtcaaaaaatagggtcaactgtgttagactaaattacattattgtatatgctgcactgaatggaacctttgtattgtaattatcatagagaagcacagtttgcatcatattatggcaatttatcctcaatgaaaatcttccagagtccttttattttggaatatcctgtaaacaatcaaaccaccagaacatgattgtacaacagtaaaatgttctcttgcattaaactgaagatatctgtttaataaaaaaagaaaatgtaggaaaggtacttagagctcttactttctaagtacaggacaccctagacaattcaaggcatcttaatctccatcaagaacccataattaaataatttttgtcatgctgttaaatccatcattatggataaaactggtgcaaattggtcaaacggatccaacaaacactgatgtccaagctggcatattggcaactaatacgttaactggtggtcaatagagagtttaaaagatcttccctttcttcttgttcttttccaaggttcttgaagagttctgttgttctaaaatacgttgttgagcttcccagtttgctttctcatcctcgaactgacgacgtttttcctccaattctttgtgctgtgcttccaaattctttttcatttgctcatggcgccgctggagctcagcttcagagtccttcagtttttgaactttttctttgaccttcatctcaaacacctgctccatctccatctccatcttcttcattttagctacatgctcccttctttcttcttccatttgtgccagagggctcttagtcagctgccctttattcttgttgttatcaactccattataagtcacagctgcaagttttctgcttctgtagttctcatagtggacattattagtaacatctttcaagtcctgcatgtgtgttcttatcaacatatttcttaggattgtaaaatcacaatgttcaccattttcaacttcagcaacaccccaaggatactgccttcctctgacccttttgccattaacttcaatgatagtattactacctaccacagcaagaggtaaacggtcctttatctttttaacaagtttattttcttcttcatcatctgtttctggaaattcgtatattttaattttatgttcttggatttctttcattatctgttttttaaactgttggcattcctctggtgtgagtgtgtctgctttggcaataagtgggatgatattcactttttcatgcaaacgcttcataaactcaatatccaatggtttaagtccatgtcctgaaggagcaatgaagtataaacaacactgcaccctgttatcaggcatctgacgtctgttcactcgtgattctgcatttaggtagtcctcaaatttactatcaatgtagtcgataacaggctgccagcaattactattatccactgcatctccaaatcctggggtatcaactattgtgagcagcaactgaacaccaccttctttgattaaaactttggattgttccacctgtacagtctttttaattctatgagaaggacctggatactctggagaatacaaatctgtgaggaataatgagttgattaatgtcgactttcccaatccagattcacccactaccataagcgtgaattcaaaacctctcttcaccgattttctgtatacttgatttgggagattggcaaatcccacatagccttcaaggttcttctgttgagccatggtgctgctgttgacgctcctctcctcagcagcagcggatctcgcactgaccgacatcccctccccccctccgcgaccagccccagcggagcgcagcccgccgattctccaaaggcgcctacgccgattccgcagcgtagccgcccggcgtagctgccttgcttacgcacgctacagcaggcggactcctccacaggctctcgctcgactcccgctccctcctccccc

SEQ ID NO: 124055 - DNA, 659 bp, Homo Sapiens
  misc_feature (246)..(265): n is a, c, g, or t
tttgtcatttcataccagcaattttatttacacaataagaacatacaggtatcgtcagagatcatctctacatttcagatcttgactcagtttaagggccaacaaaggaaggcttttctctttccgttgtttcttgcctctgttttttgttgtacaaagtgtgtagtactagcaagtgcattaccatagcatgtctttaattttcaatttgaaatctgatgtgctggagaaaagtgcatcgtaagnnnnnnnnnnnnnnnnnnnnccccttacaaattcaaaggactagaataatgatagtcatctggaaaaagtaaatcatgaatggctataattttgaaactgatgcttaatgatggcagtgatttttaagtgtggtaacaaacgttttgggagcatgtatcctctgtcaagatggtactagtaacagattcaaagtagtaccatatcgtatcagactgatgtgggggtttttatgtttgacatcagttggtgagcctgttgttccttagtaaattgatgccataagctaaagttaacatattcatattttccctgccaatagtccttcataaatacctggtcataaactgaaaaaaaagtaatatctgcaatataaatgtgttgtctattagagacggggctagatgtcttaagcc

SEQ ID NO: 124056 - DNA, 387 bp, Homo Sapiens
  misc_feature (356)..(356): n is a, c, g, or t
  misc_feature (374)..(374): n is a, c, g, or t
acaaaataataaattttttaacagcatcagctttggagcatggatgtaagtcctggatcttgcacttattagaggtataaccttgagcgaagtccaaaatctctgctaaggctttattccctccaaggcaaaatgggaaacagagctctctcctaatgttgtgtgaagagtaaataagagcgtgcatgcagggcgctcagcagggagtctgctaatgatgtgtaagtgtccttcattagtagggatatgtctgatcctaaaggggaaaggcctccagtagctcacacagtaccttttggacagttagagggacataagagtttccctttctaggaaacattaatccatctctccanatactacaatctctccanatactaaatcatt

SEQ ID NO: 124057 - DNA, 693 bp, Homo Sapiens
  misc_feature (666)..(666): n is a, c, g, or t
tatcatgtttccactagaaacttttactacttgattatcttaaaaagtcatgttgtaccatcacccaatcctgtttaaaacagcactcaggccgtttatgtagctgatcttggattagcccttgttgcacagggatgatttaccactggattccttggaatccgctttcgacggtctctgaatgctgcacctgattgtagggcttctagaagattatccatcacaccagtctcatcaccctctttgtttatatcaatgagttgtttctttttcttctggcgttctaacttttcttgttcagctttctcttttgcaagttttgccctcctggtcttctcttccatttctcttctcttattgttttctctcactgcttccaaaaacaaagttcggaagttgttgagatcaccaaagaactcttctatgctcactgtctttgagtcaaaaatgaagtattctccaagattctcatagagcttcatcatgttgttgtgcatggtggagagtttttcatactgttctcgggcagtctttgtaaagctggtcatcttttccacaaacttatcgtgttgattttctgcttgggggaatttcttgatgtcacgttccagatgaacaatttgttgttccattgatgcaaggttgctcttgagaatttgagctganactttgcttgcactttctacgtgttcc

SEQ ID NO: 124058 - DNA, 1035 bp, Homo Sapiens
ctggagcttttcttctcctgtgttctggttgcatacttgaatcccaggaaacagtgtgacacggtgccaatttactgccaaacatgcccggtttgtcaacagagccagacaaggaggagaggagagttcatgccccaaccacagtccagctgaggagggccttggtcctccttcctttggcccagatgagggagcgccttcccagaagtcacatgaggaaaaaccgtgctcaggtcagaactggacccagcctgtgcctggctgggtctggctggaagttgatcctgtagatttggtaaagtctccccagatgtcagcagtggcaggattgggctgtggccagggtacaggagcacctcctgaactgggagcaactgctggctggacgagggatccccccacagccaactgctccccagggggagggatcagggtggaggttttcccccctgggggagggggaagcaggctcagccctcctgtgctggcaggccggactcggggattcccagctgctccttccttcttcttcatgtttgcgatgttgagcttgatggtctggccctccttgaagcccaggtccagtttagggccttggtctgggttctgggcttgttttgcaaattcacactgctgtttcacccacttgaaatggtcctgcaatgcaacattgaagtcaaaggcatcacctcggtccccgaagccaattccaataaacgcccgtcgcccatttccatcttcgatgcggatcacgaagtacctgctggaatccgtcacactctccacagctgtgccaggaaactgatccaccggggcctgagcaaagagctcccctgacgtcctgtcctccagcttgatgtaggccatctgtccctttgcagtgatcctcagccggccactccatgatggctggtccagctgccactccgcagccctgtagccacggttggtagcccgcggagggatgcggtagacgtggacgtcaggcttgacacagagcaccgactcgtacccgctctcctccatcgcgacgcc

SEQ ID NO: 124059 - DNA, 1686 bp, Homo Sapiens
cacatacaatgacagaagtaaaaatatttattttatcttaaaaatctggtcccgcaaaaaggccaacacttttttcagttcacggtcttgacctttcaaagaagaaatctttcaactgagaggtgagttaataaaaggaatgtcagaggtgctttcagatttcttataaaccagtaaaccaagcaaccctggacttctagtttactgagctccttcttctagccattcacagttcctgaaggagaaaagaagttgtttgcagataaggcactttagaaaccaccaaagagaaaacccaagtctgccaggagctgcactgtgaacatgtgagccgagagggccaccagcagacagagtgccaactcccacagctccatgacaacagcatccaccttcctgccccaacactgttccgtctggcttccagcacccgccttggctctgtgttgcctacctggcctagaatacatggaaaccagacaactggccagagatgaacactgctgcctgaagctcagggcagctgcccacagtgaggaatcccttcagaggccccagctggggcacgccgagggagcagttccttttgcaaagatgagttagtgcggatcagcacattagcaaagcaaaatatttaaacatttttaaaagctgctaatccttccaatttccctcctgattgtagctcaagctgcagcctctaaacctgctaaaaatcaggaagaagacgctcctctggagggcagatggactgaaggtgggctacagccagtgtgggtacggaaagcctccccgctgaactgtgatcatgtgacacctgcagaccctgggaagggctgatctgattcctggcagcaaactcaacctcttcttttgcttggggggcttgtgtttaatacaggtcattgcgatggaagaagtctcagagtctctctcacatcaagaggacagatggggaccagggatcctggagcttttcttctcctgtgttctggttgcatacttgaatcccaggaaacagtgtgacacggtgccaatttactgccaaacatgcccggtttgtcaacagagccagacaaggaggagaggagagattcatgccccaaacacaggccagctgaggagggcttcgtcctccttcctttggcccagatgagggagcgccttcccagaagtcacatgaggaaaaaccgtgctcaggtcagaactggacccagcctgtgcctggctgggtctggcatggccgtccttatcctgtagatttggtaaagtctccccagatgtcagcagtggcaggattgggctgtggccagggtacaggagcacctcctattgatgttcccgagtccgacccgtaggaagagaagaggggacagagaagtcagagacctttctggttgtttcaatgaccaaatcatgagactcagtgatcagtctcatgacaccaggtagctgggaaagccacaccagacatgcttttgggcaaccaaacaccctgagttgccacacttccagcatcttctcaccagcccttgtgcgctctggagaaaacgcagaaagccacatacaaggtggaacgaggggtgcccgcgggatgggtggttagtctcacgtcatctaacatgcatacctgaagctgactttgttatcaaccatttatgttgaaatctatttaaaatttactat

SEQ ID NO: 124060 - DNA, 983 bp, Homo Sapiens
ttatctgaattccccaggaaaaccagtgtgaccagcggttccaatttttgtgccaaaacatgccccggtttttcaaccggagcccggccaaagggggagggggagagatttcatgcccccaaacccaggcccaggtgaggaggggtttggtcctccttcctttgggcccagatgagggagcgccttcccagaagtcacatgagggaaaaaccgtgctcaggttagaactggacccagcctgtgcttggctgggtctggctggaagttgatctgaactgggagcaactgctggctggacgagggatccccccacagccaactgctccccagggggagggatcagggtggaggttttcccccctgggggagggggaagcaggctcagccctcctgtgctggcaggccggactcggggattcccagctgctccttccttcttcttcatgtttgcgatgttgagcttgatggtctggccctccttgaagcccaggtccagtttagggccttggtctgggttctgggcttgttttgcaaattcacactgctgtttcacccacttgaaatggtcctgcaatgcaacattgaagtcaaaggcatcacctcggtccccgaagccaattccaataaacgcccgtcgcccatttccatcttcgatgcggatcacgaagtacctgctggaatccgtcacactctccacagctgtgccaggaaactgatccaccggggcctgagcaaagagctcccctgacgtcctgtcctccagcttgatgtaggccatctgtccctttgcagtgatcctcagccggccactccatgatggctggtccagctgccactccgcagccctgtagccacggttggtagcccgcggagggatgcggtagacgtggacgtcaggcttgacacagagcaccgactcgtacccgctctcctccatcgcgacgcctggagcccaccgaacttccggcgacttccaccgttcc

SEQ ID NO: 124061 - DNA, 700 bp, Homo Sapiens
  misc_feature (624)..(624): n is a, c, g, or t
  misc_feature (685)..(685): n is a, c, g, or t
cttgagtcgtctttgattcttttatttctgtttcatctacacccaaggcgaatctgatgggttctcccttccaaacagggtggggggtctgacgctcctctgcctggctacagccccggatgtgttaaatgtctgcatctcgcacctcccgttccaaaaaacgtcacggagctctgagccactgcttccctgaaaccatcgttcccacgtcaccgatggcccccaccggccaaatcagagggcctggctggtcggcaccttccagggccttccacaacctcctgccccggctcctgctcaaacactcctcacgttgcctatgagacactgcacacccgactctgcttgttacccagtttggcctccgttcatccctggcccagacaccccctgcctgccccaggcctggggcttcggacaccatctggctgtcacccagggctggtgaggctcgtgggctatctccttccccaggactcccacctgggctggactgagtctgagctcccagccccagctcctgtttggccgggcagtgggctcccctgtcagactcagaggccaggatgtctcggcccagatggagcctgggttctctctgcggcccttggcgttccttcctcnccagccccactgccaccagctccagtggcgacatgggtcagaggtcgtcatccaggctggncagcaactactcctc

SEQ ID NO: 124062 - DNA, 1232 bp, Homo Sapiens
tttttttagtatcttggccagtttattacagaggacgataaatgattccatgtggatagggcataacatacagagaatgagactatgccagaaatgggaggaggcatttgaaacaacatgagtatctcagggacagatggattgattctgctattggtaggcctggaaggcaaggtcagaagtagcaaaaaatggataccaaaagcactattagtcacccaagctaagtggaatagctggcccagtaggagaaatgcaggttttgctctacactaagttctccaactcttgataagcctccaaaaacaaatgttaggggaaaaaaacgcagctggttatgaaaagatatatctcatttcattaaaaaatcaatgtcaatgctgttaatagaatccttttatcttcaggacagaggcaatgccctaaacaaacaccagctcaagagcctctgatgccaacctagagggtacccaaacacaaacttagcatagaggtaagaatctctatgtcttttggtggaggcaaagcaatttggttggtacttcacaggaacatctttctaccaagtcttcatcatatggtatgtgccacgagtctccagttgtttgcaccactgtgtcatagctgagaatacgctgaaaggttagttttgatcctggaaacctatttacaattgccagctgatgtccctgctgccacttaaaaaacaggcgttgggtcttggcatcaggcagacaggccttgtggtcccgcatcaggtctcttgtgataaacctgcagtgattcccggagtgcagtgtggcatacagaaggaatggatcatcctccgagatgtcatcagcaaaaaaacagctggcttgcttttgcacctcttccatctcatcccgactccactgggaactccgtcttagcatgtgcttccggcctaggaccagcagtcgcagattccgtttggctagttgagagacgacattcaagagaagttgagattcacgaactttaggaaacattttggcaacattgagaccatcaatgacaacatcaaaaggaggacgagattttatgaagttctcaaatctcttaagttcctgaggtgttgtctttctgtactggtcacctccatctatcacatccctcatgatttttcccttaagacattccgacgcgtgggtcgacgatatcccgggaattccgaccggtaccagcctgcttttttaacacctggtatctca

SEQ ID NO: 124063 - DNA, 2046 bp, Homo Sapiens
accaggaatgctataaacattttatttattttttaagaaagtagcttcagaaaaagaggaaaatatctagatcatttatttatacatatatatattttttaataaaaacctttacattatcttcatgcataaagacccaggtgtggccatattgcctgagatagccctaacaccagctatctcatgccattacctggggctccctatagctgtcagcagtgtagcaaaggccctctgcctgcccctaacgcccaactccatgcctgcctcagtcatggtttgtttttgcttctggaaggggtagatggagggtgggaaatgctttggagctaacatgggatgaacagggagggttacccaacctgccattttttatccaaactctgcaggcaaatccagacagagtctcagcaagactgaaaaccagggaccaaaccaaactctgggagcttcccacagacatgtcacatgtgaccaagggttcctgcacatagtagtagcaaaggtatggtgttcatggaactctaaaggcaggaacaaaaacagccctgaagatcaatccctccgtgacaggcattcacttctgccctaagtgtgtcagaaagatcccattttgtttcctaactcaggccaaccctcctttgcctccaaaattcagtgttaactaaccaattacttaagagacggatccctcttccttctgtggatagttcatctgttaaggatccattatcacctgtctcactcctcctaaggagtcctagtataaaagggccagggtaggagtagggaagctggttggcatggagggtcacaagatccagaatggctagggatggaaaaagaataccctggttctttgggggattctgccaaaggagctttattgaccatttttttaaaggaaaaacactgaatgatcttgaggatggtaaactgtctcctcttctgggttccagaagcccttatgctacgttcagtattaagaaaagccctgaacaagtggaggatgctgcttctggcagcagggagggagggtagatgccacagccaacccagagaatggcaaacagtgccaatccaaacaaggcagggaacctctgtgtggtgtgaatgggcatgtgactgtgatgcaaagtgcctggggctcacaggctcccaacagccagttctcgcagataggactgggtaaggctgcgcagttcgtccatggcatagtcctcaggcatgggaagccggccaatgtggggagccaagaggcgcaaagggactcgctgagggtctggtgttgagtcggaggttctatcaggaggatgatgcagactcagcaccacgcgcagcaggttggctacacgtttggccatgtctgactgagccaggcgatctttagcactgtaacactgaatctgctctatccgactgcacagtgaagtcactttgatgtgtaactgctccaggtcattacctgagcaatccacctgctgtatatggcggagcatttcaatgactctaatatagtccaggtaaacaagcccagatgtttcccaatcctgaattaggctgctgcgctctggaggtgccaggtcttccaagaaccccttcaggtagtcatagttctcattaatgatggcatcagaagctaagtgtcggatgatgagcttgtggcagcggttccagtgctcagccttaaataagcaaagggcctctaagtgcttgtcagattccatgtgtgctcgcacagctttggcctcgtggatccatttggcaggtacacggagcttctgggtaaggaaagtctctttagcccaagattcaggggtctccaacagctggcagtgccgggtaagcagctctcgaacagccttctcacgtatgcctgagttgtcaatgtgcaggaggacaaagatggcccactcccagagcccctcactttcaagctggccagcgtaactggcctgtagcacaccttcacactgcgctgagagatgggtgtagttaagagccctcagcacttcccacaagtgccagatcccgggaattccggac

SEQ ID NO: 124064 - DNA, 1152 bp, Homo Sapiens
  misc_feature (64)..(64): n is a, c, g, or t
ccggtaacactgaatctgctctatcccgactgcccagtgaagtcactttgatgtgtaactgctnccaggtcattacctgagcaatccaccagaaagctaagtgtcggatgatgagcttgtggcagcggtttccagtgctcagccctaaataagcaaagggcctctaagtgcttgtcagattccatgtgtgctcgcacagctttggcctcgtggatccatttggcaggtacacggagcttctgggtaaggaaagtctctttagccccaagattcaggggtctccaacagctggcagtgccgggtaagcagctctcgaacagccttctcacgtatgcctgagttgtcaatgtgcaggaggacaaagatggcccactcccagagcccctcactttcaagctggccagcgtaactggcctgtagcacaccttcacactgcgctgagagatgggtgtagttaagagccctcagcacttcccacaagtgccagcttaggcggtagtccaaaggatctgctgttatgcttcgaggctccagcagctggttgagatcataatgtctgtcactgtagagttttagaaggtgaaagcagacatctcgaagtggtgtctgtgagttttgctcctccgctatcacacagccagaaccctccagatacgaaggaagtggggagcaggcatatctgtcactgtcagaggtattctgaaatgcttcttcatacatgctgagtgccctagaaatggaggctgttggtggaagcaaataccaaagatggatagccagggagcgtttccaatccaactgggagcacacgtttatttgcttcttttctgagagctgccacaccggttttccagccaacagagcaaagatgcgcagtctctcatcctggatgaaggagtctgcttggagctgatgccagtccaccaactgcatggtgagcagctcccggactgactggctacccacaaactgagataaaagaagagcaagacgatgatcccctgactgctgggccagagagcaggcctcactgatccttttgcctgtgaggtagctgaatacagcctccacagggctgtttttttgggttaaggagacttcctcttccctcgtgccgaattcggcgcgccgtcgacttcatactctctcgcg

SEQ ID NO: 124065 - DNA, 817 bp, Homo Sapiens
  misc_feature (775)..(775): n is a, c, g, or t
  misc_feature (796)..(796): n is a, c, g, or t
ttttaaagttggaaataattttattagttttttaatgcataaatccaaacatatatttgtactgaatattttattagctaatacagtaccattttaaaagttctaccaacttatttaaaatatttcctgtaaaaacatcatccaaaatatactttgttaatttttatgaatgttaggtgttatgtctcttttctttgacgctctccttttttatcctgtgcttacaccaaaaacaaattatttgaaaatgctaaaataaaatgtggcatgttttcttagctgttttgtattctgttataagatattttacaactatgaaagttgaaaaataactttattggttttgctgcatatagctgcctgtctactataagagaactaatccataaaattaaggcattttgttatttcaagtgtagaggggcaagaacataagggaattataaaaaccccaagatgactcatttaaagtagatgcacattaaaatactatagatctggcatatttcatatttataaagcagacaaaaagaatgtttatctttgcatttggcaagagtatcttcaagataactaccacttttcaaagcactattgttgggtaggttttattaggggagaggacttagaaaacatgactttcctcacccaaaaccaaaaataaatgagggcttaaaaatatattatttaagaagatagtggccagaaataaagacatgaccaacaagctttggggccatcaagatgaaaagactttcctttattcaagatctangatctgaaaatctcacttcantaatttaactggattttcttt

SEQ ID NO: 124066 - DNA, 600 bp, Homo Sapiens
ttactgtacaaatgctttatttctattcaatatttagaagacagttataaacaggatgcattcaatagcatggtggcagatgaacatcaggaaggaacatccatgagcttccatccacggaacctcaccatggatacgcttgtgatcaagggcctggtctcccctcaagacacggtcacagatcagaggccacaccatcctagcagtggagcaggaccagctgggacagggtccttctgtgacacctgctgcatcaccaggctgggtgaacggacacaattgccagaactcacagaatagaagtatcagcaccgaaacctcacaggaaaaatggtaagttctaagtttctccattaatagtaactctcagattaatctctgtcatccatcgcttctccaagaaatgactttttagggtgatgtgccaggcgccatgttggagggctggtggtagcggcttggggaggtgctcactctgtcggtctcactctctcacacgcttcccctggctccctttgagaaataaacatccagatgaagatgctgtggaagctgaggggcatgaggtaaaaagactcacgtttgacaaaaaggcgaagt

SEQ ID NO: 124067 - DNA, 696 bp, Homo Sapiens
  misc_feature (481)..(491): n is a, c, g, or t
taaagcttaacattatgcatttattatattgtatagagccatattacacatgcttggtgcttcaaactgagttatcaatgtttttctggatgcaaagccatctgatgctggatgcggatgccttaaatactatatttctgcatctatgacctatgagctaaggaaaaaccaaggacaattccagaaatggcaaagaacacttaagaaaaagatgtacatgagacgaaatgctaagtccttgagccagggcctacagaagttaccagaaagcgaataaaaacagaatttttctcaccacctgttgataatagagcctcacatgtccgggtatggacaatgtagaaaaaagaggttgttccgtttggtactgatgcctttctcccctccgtgatgtgtgcggacattgtgcggcccccagagagagcagcagacagaacagagcacagcaaactgccccctcctcaacacatcccagtgctgnnnnnnnnnnnacagcatctggttgtctcatgaaaagcggtcaatttgatcaaacttgccaccttgtggaaaatcaatcagtgtgcttcagatgaatgtgacgccatcacacgcaccctcctctgacatccagaatgctggcgggggacatggggctgggtgcctgctcggccaggacgaagctctccatgtgtcacctcccaccttacggcaccc

SEQ ID NO: 124068 - DNA, 824 bp, Homo Sapiens
  misc_feature (662)..(662): n is a, c, g, or t
tttttatcatcataaaaaatatttattataaaaaattatcacatttctctgtacatagcataaagacaaaaacacaatgtatacattaataaattaagtgggcctgagtattcagtatccatctactagaatcctaaagctcttccccagatttcacaaaggccaatgtagattatttctattttatcaaagttcatttgcacagttggtgtaattgagatactaacatttcttttttctagtgttttaaagatagttcacagtatttgagttaattaattaatcaactgatttaaatctttggtaaatacaagtatttacatgtaaaaatgtttagctcaaatttcagtaaaaaactgaaatgacaaataacctactgcaaactgttttgtataatcagaaatgcatgagctggactcccaccattaagaaatgtcactgtctaggacttctgatgataaaaactgaaatccacaaaaaaatagttgagcttctattaccattaccagaagcaccacaacactaggccaccatgaaattacacacaaatgtcaaattcgacatataaaccatactgattattttacgatgcagaaaaatcctcctttttttctatatgccagtttaaatgttaattgacacgggtaagtttattatctcanagcctactatcttgtaagagtgagaggcatttaaagaatccatactgctttcaaacaccagttcttcctcttgccatgacatatcccagaaaatacagattttttttgaaatcccggccgtaatggccgaattcccgggcatatgtccggtaccgtcgactg

SEQ ID NO: 124069 - DNA, 780 bp, Homo Sapiens
atagtcaaaatagttcaaagtaaaagttttatttgaaaaatgtaacagtcattttatttcagcagtttaaaaattgtcctttttcttaaagaggaagaaggcattttcacacaaggctggccagatgggaagaatcttcagcttcagcttcagcttggcctcattcatttgaaaataaaatgtttacatgaggccgcgcctgtgtccagctgaaagtgggtccttcagagcgtgtgggggattctctgccggcttgatgggctagctcctctaagccggctgctggagacatcaccggctgagggactcctgcaaacgttcatacatgatttgatccttttttgatatagatgatcttactttcttgaaagcttcttcaaaatgcttatgactaaccttgagttcacctttttcatttccactcttctgtcttgccatttcctgtctcagggcacagatagaagcttctcgtaccaaagcagagagatctgcgcccgtatagcaatcacagcgaaggtcaccagcaattgcttccaaatttacatctgcatccagtggtggtttggtaccattttttgtgatagtttttaagatggcaaggcgatctgcagggggcggtaaacccacaaacagtgttttgtccaggcggcccgggcgcaggattgcagggtcaattatatctggcctgttagtggctgccataataaaacctgctggcgtgcttccagaccatccatctctgttagtagctgattcacactcggacattgccctgtctcc

SEQ ID NO: 124070 - DNA, 635 bp, Homo Sapiens
caaattccacaaactacatgattttatttataaaattcagcacatcacttattattgcctatgtcaattgcaaacagtcctcagttacagctctcatttttcaaaataaaaatctttgaaaatgtcctcaaagtaaaatattactaaatatcttattaagttgatagcccatgggcactgacagttaacactatggaaaaagggttaatataaaacaatataaaactattacagacaatagcttatcaatattaccttcattccattactgggatttttcacgtagtaacttttattcgtgaaatgatttcatttacaaagctattattctttgctattacttcagcttttagctgttttaactttattgtgatgttttcttctgacatttcagtaaagggcatttgtttcaccttggacaggaactcctgaataattttttcaccttgctctctttccagatagcacttctttgctgctggttccatgatatcatatccttgcgattctccaatatactgaaactcctcaagttccagggctttctgtttagcacactctattacatgcttagggaaattagcaagctctgcaacatgaatcccaaaactttgatcacagacacctttcttcac

SEQ ID NO: 124071 - DNA, 681 bp, Homo Sapiens
tttgggggttcacactggtttattgggggccctgccgggccaagagctcttcagtgcataggcagacatgcatgtggggcagtgctaggaactggggtaggccttgggcaggggtcactggcaggtgttgtagatctgcacctgcaagttgatggcttgaagcacgctgcgcatcctggcctccaacccgtccaactgggctgccttactctccagtgcccgctcattttcctcataggtgccttccaattctaggaagggcaggtgtcagtttagggggggtttcccgcagtcttgtgtctctggtgccccatttcttaccctgtagccgctgcagcttgtcctgagcggcttgcaacaggtcccgagcctcatcccgcagttgttctgcccttgcctgtgcagccagcacaccttgggccttgcgctcagctagggccttcaccgtctggtactgatcacccagaggaccgcgtagcagctgctcagcctcctgggcacgaccctgggcactgcctgccgtttcttctgctgtagaggctgccagactatttcctgcccgtttcaatttcagagcctccaggagagcatccaactgccgagccctttcacctgcagagctcagtgcccgctctgcacctgccatcctctcctgtacctggtacagggtctgctctgtgt

SEQ ID NO: 124072 - DNA, 2128 bp, Homo Sapiens
ttttgggggttcacactggtttattgggggccctgccgggccaagagctcttcagtgcataggcagacatgcatgtggggcagtgctaggaactggggtaggccttgggcaggggtcactggcaggtgttgtagatctgcacctgcaagttgatggcttgaagcacgctgcgcatcctggcctccaacccgtccaactgggctgccttactctccagtgcccgctcattttcctcataggtgccttccaattcctgtagccgctgcagcttgtcctgagcggcttgcaacaggtcccgagcctcatcccgcagttgttctgcccttgcctgtgcagccagcacaccttgggccttgcgctcagctagggccttcaccgtctggtactgatcacccagaggaccgcgtagcagctgctcagcctcctgggcacgaccctgggcactgcctgccgtttcttctgctgtagaggctgccagactatttcctgcccgtttcaatttcagagcctccaggagagcatccaactgccgagccctttcacctgcagagctcagtgcccgctctgcacctgccatcctctcctgtacctggtacagggtctgctctgtgtcccgtgtgtcagccactgccccccggatggcaccctgggcaataccctgtgcccgctgggcctcctccagtgctgcctgtactgtctctgccttctgtttctcatcctcagcccagctccttgcccgccgtgcatcctgcagtagctgctcggcacgacgcacatctcctacagtacgtgccaggatcgcatccacatctgccaggctccggactcgctctgcaatcgcacccgccaggtgctggatctgctcagctgaagctgggatggagagctctagcacccgtgtggccaccatttcaatgctatcaggatcagccccctcctggttgaggaagtccttcacactctggataagttcttgaagttcctggttggcctgttccacctgtcccctggaagcattagccttgtccagggctgcctgggcccgctgctgtgcctcgcttgcctgccgacgagtctcagccactctgctgaggatgctaccaccttctgccagtgcccgctgcagctctgcctgtgtgtgccgggcccggcccagtgctaggtctgctgtagccgctgccccattgcagctgaggcccccacagcgcggctgcccatcctcatctcgacagccggcacccccacaagggcttgtagcacagggtgcatcccctggtgccccacacaccagctcatttatgtctgtcaggctcagggtgtgggtatgggcagagagcttgccaagtgcccgctggttggccatgtgtttgctgttgaagtcctccttctgagcatccatcagtgcctctgtccgatgccgagcacttgccgagttgctcacagggctaggtactgccagggctgaggtattggcacgacgttctgcctctgcagactggctatgggcatgccggatgctgtcataggcacccaggaagtttgaatgtttgagcaagtcaagatggtggtcgggctgccgcagtgtgagattaagtgcaagcctatctcgctccagaccacttagtgcatggttggcattgaagttctcatcttgcacatctgtcaggtctgcctcgagctgagtcaggtgctcagtggcctccccaatttcacgccgcagctcctctgtggcctccacaagctgtgcagtggaggcggctgaggtgttgcgggcacctacgatggcctgcacaatgcccagcttctcctgcatgtgccagaagctgctctcaaaggcacccagcacacccgtctgttgcaactcctgcgcccgctgctctaggcgctgtgtacgggctgccaagtcctgcaccactcggtcccaatccccgaagcatgcatggcagggatggcaggcaggaaagattcctgagaagccacgggcacactggtcacagcgcacaccagacacccctgggcggcagctgcagtgaccgtgtgaagcggtgacactgaggtgtatctattccaacgagagtcacaatcacaggcatggcactgcaacccaggatctcctcagtggagatct

SEQ ID NO: 124073 - DNA, 641 bp, Homo Sapiens
caaccaggaacttcaagaacttatccagagtgtgaaggacttcctcaaccgtgagcctcccacgtgtcccaggccatgtggttgtcccctttggcaactcccggtgtctgtatctcccttggttcatacttgagcctcagggactacactggattagtgtttatgatcccttgactggctcctgagttattgcccatatgtggtcccaggtccatgttcttgagtttgagccctttgtatagtccctgtccttgtgattatatccttatgcctggtaacaaacccctatcccatgtacatgtcctgagtccataccccaaaactgtatcctcatgcccatgctggagaatctatgttcttaagttcttgctgtgtccctatagaggagggggctgatcctgatagcattgaaatggtggccacacgggtgctagagctctccatcccagctttagctgagcagatccagcacctggcgggtgcgattgcagagcgagtccggagcctggcagatgtggatgcgatcctggcacgtactgtaggagatgtgcgtcgtgccgagcagctactgcaggatgcacggcgggcaaggtctgaccccatccctggcccctatccctgacacctggttttgatacctc

SEQ ID NO: 124074 - DNA, 1369 bp, Homo Sapiens
agggttgcgttagcctggctctccccattttattcaagcacaaattactaacaagactcttttccagtcttagctttgccaaaactatttttagagcatcatttaggcttaggtgatataaaaattctgctagttttacaaaccagcagccttccaaggcaaaaagcaattcatgccaggaaagtagcaaaggattattcattttctgtccataggctggtaaggagttttgtatctaataggctgccttcaacacaataattgagaggaggaactcataagcaaagctaaagaactcatccttagagaatacaagttcaaactgagaaaggttttacttttaagacaaaacaaatagcattaacacacatccaaatgccagtgcaggagttcactgggtttataaaagagaaaactaaactcaagtgtcaaataaaaactggagccgtcaagaatgactgcttgtggcaacacaggtgtaacatgtgcttgtctaaagtcgttctgtgtttgtggatatgtggaaatgcatgacgagggaaacgatgcaaggcaaaatggcaggtgctcaaagctttaagatccttttcttcacgcttgtgtgctcttgttttgcttttgagaattagggtaattcgcaggtcattttacaaagaactgtaatatcaaagaacacttccaaacggctaaaataggctcaaggtcactattaaagtgataaagggaggtccgtgggggaaaagtttgtgttctcaaaagccagatttcacaccatggcaggcactaaatctagttacatgtgcttgcagtagaaaaagaagacactgatcttaatagaggctggtctttttcatgatgcgcaggaactcttgctcactgacctctccatctccatctcgatcagcttcatcaatcatttcctgcagctcctcatcagtcaggttctcacccaactccttggccacgcgtttcagatttttgaacgaaatcttcccagtttcatcatcatcaaagagcttgaaagctttcaggatttcttctttagtatctttctcagacattttctgggtcatcacagttaaaaagtcaccaaagttcatttttcctgtcccttccttatcaatttcacttatcattttcttaatttcttctttcttgggttcaaagcccagggccctcattgccaccttcagttctttaacatctatggtgccagttccatccgcatcgaaaagatcaaaagcttcccggatctcctgcttttgctcttcagtaagctcaggcttagggctcattctttttcgctgagaacttgatgccatgtttgccttcttaaagttggaggccatagccaaaggagtccgctccc

SEQ ID NO: 124075 - DNA, 747 bp, Homo Sapiens
gatttgggttggtttttatctctgattcttcccagtaactcatccactaagaaccctgcccacaggagggtctgatccaacggggggtttgaggccactcagctcagcctggttcccagggccagtgtcccactccagaggccaagtccatgctcccctcccctcagcaggcctgttcctccagagctgtccagtctctctgccaggctccaaattctccatcttcagtgtattgaccaaacaatgagacaggaggacagctgggagagcgggagtctgaaatcactggtagagtggcccaggacacacacaggagagagtctccaccgctgctgagatgaagggactctccattcttctcaaaaggcttgctgtgtttttggcattcccccacctgactttttttcaagtgagttgttccgatctgacctcagagaaggccaaactgggtgcatggtcatgtaggtggcctctgatttttcacttggttcttcttcctcgatcacctcccgtacaattattggggagtaaatgtgtttctccccttcacatctttcaaaatggcagggtttttcttttatctctggattagtcttcttcgtgttcttcaccaagactgtagaattcactgaactcttatttccacaggtcttcttcacgatcaatatcagaacagggagcagcaggattgtgcacagacaatcccacatgatcaccaactgataccaacagaccaggcctcagatc

SEQ ID NO: 124076 - DNA, 808 bp, Homo Sapiens
tgccagaggaatgatttgggttggtttttatctctgattcttcccagtaactcatccactaagaaccctgcccacaggagggtctgatccaacggggggtttgaggccactcagctcagcctggttcccagggccagtgtcccactccagaggccaagtccatgctcccctcccctcagcaggcctgttcctccagagctgtccagtctctctgccaggctccaaattctccatcttcagtgtattgaccaaacaatgagacaggaggacagctgggagagcgggagtctgaaatcactggtagagtggcccaggacacacacaggagagagtctccaccgctgctgagatgaagggactctccattcttctcaaaaggcttgctgtgtttttggcattcccccacctgactttttttcaagtgagttgttccgatctgacctcagagaaggccaaactgggtgcatggtcatgtaggtggcctctgatttttcacttggttcttcttcctcgatcacctcccgtacaattattggggagtaaatgtgtttctagagggggaaaatggtacaaaaattcctaaaaattagatgaatcttatacaccagagaaaaggccacccactcctatttgctgggcatcgaccacccaaactgctggttcagagggttactgagacctagagaattctcaacaatgactcattcagtcttcagtcttctcgacacttaactgtcaaagaacacagtcttaagaaccaaactctttgcttcaaaagccaaacatcttggtccagatggatgtccag

SEQ ID NO: 124077 - DNA, 847 bp, Homo Sapiens
  misc_feature (811)..(811): n is a, c, g, or t
  misc_feature (825)..(825): n is a, c, g, or t
ttgcagtaagtaactcagaatgactttactcaggaaatatgaccatgactcactggctaggagtgccccatgcccagttcttagagacccttgatagctcctagaagacaggaggctgccgtggtcaagaagggccaagccttgaagtctcacggcaccccctgtggtggaggtataaggctcaggggccaactactgggtcttgcagtccccatcgttgctgtgggctgtcttcaccttctttagttccttctgtagctcagactcggccaccacaacctcctttggcttctggtaagagatgatcagggtgcagttggcgtgggcaaagctcagcaaggcgtcatccagaggtagctggtgtctatctagatcaggaatggagaacttcttgtagtacttcttgttggttgttctgacaatgatgcagcgctccttctggtccacagagacactatagacatccttaggataggggaggtttcgaatccgccactggaaactcatcttggtgtccttgcgcatgaagataggattggcattgctttccttgatgagttcaggccccaggttccctgctcctaggggcgctgggtctcctacttcaagctgccactggcccatggctcccagggcacttttcacacgccactttctcacaagtagttcactcgtcttctcgtcatattcttcagccatttccttgccgtctgggaataaatagtgaaccttccttctcccgtcctgcagcagcgcagtcttctgggctgtccgcagactctccaaccagcccgtcaccgccatctttccncctgctaagcagcnacgcccagccgctgccatgacc

SEQ ID NO: 124078 - DNA, 302 bp, Homo Sapiens
ggtgcactgatttcatattgttcagacacacatgttttacaatcaatttgtacagttaacagaaatatcatagtggtcctgaggtgacacacgtcctcagtttacaaagataacaggattaagagattaaagtaagacaggtgtaagaaattataagagtattatttgggaactgataaatgtccatgaaatcttcacgatttatgtttctctgccttggctccagctggtccctccatttggagtccctgacttcccacaacatgtatctttacatggctgagagagagatcatctttttt

SEQ ID NO: 124079 - DNA, 1657 bp, Homo Sapiens
  misc_feature (1542)..(1576): n is a, c, g, or t
ttcagtagatcagcacttattttaattactgagatagagtcacacttgacagaagcaagccctgcggtatatggcatcatcacaccaccggtgggtattttaatcctaaaactgagacagagtttacttaaacatttaaggcttgagtttcctctgtacagtgtggaggtgattaagaaaattaatcctaacatgaagatttttcatccagttaaaaaaagaaatactttaaaaacgacctgcccttccaaaacatgaagttaacttggagtttttctgtgatatgacaaactaggcataatcctatctcggaattgttgagtagaaaatttatgtactaatactcctgttaaaattcaacagctttattgtgaaagaatccagagatctcacactgaaaaaatactaacacagctcatatataaattacttatctataagaacaattatagaaggaatctaaatggggcaattttaacaaaccaggcaaaatatcacatatacctgaatataaggtaactccaagccatgagtataagattaaggcagttactttattttgaacaaggaagtggcataagcaactcagtgtgtgccccttagggtgggagctcttccccctaccactccccaccccaaggcatcattttggagaaaaaagtgtcttctatctggctagctgtgttatctaggattgcaccttcttacacggcaggcgcggcatcacgtccagatgggcatctaaggaactgcatttcgggagatgaaactttcatttgggactcaactgaatgcatgaactaacacagggccatggacccaccagtcttgattgagttacagaaaatgaaggtgactctttacacttccaagttgctttctagatcctttcattacaaaatattctgatcaaataatcttacaaaggaaagataatctagcctcaaggctatcctctaaaagcaaagagaaagtgattgattttctgctcagtcattacattggggacctttacgaggcacgtgttagttcccaggcagcactgctaggcggtctgtgccagaaatttcacgtactgcccgcgggcttcaaaatggtcagcgggccggttgtacgctgtccacaccggttctcccacaaacagccgcatggccttcgtgtagttcttctcgtccaccgtgaagcggtgatagatccccgcggggagcgtcaccatgtctcccttctccatgaagatccggatccactggtcctccttgtccctcacatcgaagtacccactgccatccaggatgtagcggatctcatcgtccaagtgcaaatgctcctcgtagaacatcttaatcttttcttcataatttggtagtttatctttgcatatggttatgatgtccatccaggagtagttcctctctcttcggatcttttctaattctggatcattctcatatttgtcagcatccagcttccagtagagcaccccgagccgcccccggccgtaatggccgaattcccgggcatatgtccggtaccgtcgactgnnnnnnnnnnnnnnnnnnnnnnnnnnnnnnnnnnncgccgcttcctcgctcaatgactcgctgcgctcgtcgttcggaagtacagccgctagcccctatagtgatctatatactag

SEQ ID NO: 124080 - DNA, 1018 bp, Homo Sapiens
gctagctgtgttatcttagggtttgcccctttcttacacggcagggggcggcatcacgtccagatgggcatttaagaaactgcatttcgggagatgaaactttcatttgggactcagctgaatgcatgaactaacacagggccatggacccaccagttttgattgagttacagaaaatgaaggtgactctttacacttccaagttgctttctagatcctttcattacaaaatattctgatcaaataatcttacaaaggaaagataatctagcctcaaggctatcctctaaaagcaaagagaaagtgattgattttctgctcagtcattacattggggacctttacgaggcacgtgttagttcccaggcagcactgctaggcggtctgtgccagaaatttcacgtactgcccgcgggcttcaaaatggtcagcgggccggttgtacgctgtccacaccggttctcccacaaacagccgcatggccttcgtgtagttcttctcgtccaccgtgaagcggtgatagatccccgcggggagcgtcaccatgtctcccttctccatgaagatccggatccactggtcctccttgtccctcacgtcgaagtacccactgccatccaggatgtagcggatctcatcgtccaagtgcaaatgctcctcgtagaacatcttaatcttttcttcataatttggtagtttatctttgcatatggttatgatgtccatccaggagtagttcctctctcttcggatcttttctaattctggatcattctcatatttgtcagcatccagcttccagtagagcaccccgagccgccgcagctgctccaggcccactgggcggccggggtcggggcggtggggttgccgcgggtcgcccggggcgtcgtccatataccaggcctgcaccatgacgcgcagtgcgggtgccgtgttcgaacccagggccgcgctcggagcccgtccccggccgtaatggccgaattcccgggcatatgtccggtaccgtcgactg

SEQ ID NO: 124081 - DNA, 1111 bp, Homo Sapiens
  misc_feature (995)..(1029): n is a, c, g, or t
gttattaggttcccctttacaggcaggcccgcatcatgtccaatgggcatctaaggaacgcatttcgggaagattgaaactttcatctgggactcactgaaatgcatgacctcacacagggccatggacccaccagtcttgattgagttacagaaatgaaggtgactcttgtcacgttccaagtgcttttctagatcccgtgtcattaccaaatattctgatccaataatcttacaaagggaagataacctagcctcaaggctatcctctaaaagcaaagagaaagtggattgattttctgctcagtcattacattggggacctttacgaggcgcgtgttagttcccaggcagcactgctaggcggtctgtgccagaaatttcacgtactgcccgcgggcttcaaaatggtcagcgggccggttgtacgctgtccacaccggttctcccacaaacaggccgcatggccttcgtgtagttcttctcgtccaccgtgaagcggtgatagatccccgcggggagcgtcaccatgtctcccttctccatgaagatccggatccgctggtcctccttgtccctcacgtcgaagtacccactgccatccaggatgtagcggatctcatcgtccaagtgcaaatgctcctcgtagaacatcttaatcttttcttcataatttggtagtttatctttgcatatggttatgatgtccatccaggagtagttcctctctcttcggatcttttctaattctggatcattctcatatttgtcagcatccagcttccagtagagcaccccgagccgccgcagctgctccaggcccactgggcggccggggtcggggcggtggggttgccgcgggtcgcccggggcgtcgtccatataccaggcctgcaccatgacgcgcagtgcgggtgccgtgttcgaacccaggggccgcgctcccccggccgtaatggccgaattcccgggcatatgtccggtaccgtcgactgnnnnnnnnnnnnnnnnnnnnnnnnnnnnnnnnnnncggccgcttcctcgctcactgacttgctgcgctcgtcgttcgctatgaagaggaggccctatatgatctatcagtacttttt

SEQ ID NO: 124082 - DNA, 1283 bp, Homo Sapiens
catgatgatttatgtcagcattacatggggccttaaagaggcacgtgtaggtccccaggcacaactgctaggcggtctgtcccagaaatgtcacgtatgcccgcggcttacaaagtgatcagcggaccggtttccgctgcccaccccggttctcccacaaacagccgcatggcgttcgtgtagttcttctcgtccccccgtgaagcggtgatagatccccgcggagagcgtcaccatgtctcccttctccatgaagatccggatccactggtcctccttgtccctcacatcgaagtacccactgccatccaggatgtagcggatctcatcgtccaagtgcaaatgctcctcgtagaacatcttaatcttttgttcataatttggtagtttatctttgcatatggttatgatgtccatccaggagtagttcctctctcttcggatcttttctaattctggatcattctcatatttgtcagcatccagtgaacaacaaactccagtgttgcaggaagtcagggaccccgaatggagggaccggctggagccatggcagaggaacataagttttgaagatttcacggacatctatcagttctcaaataatacttttataatttattatgcctgtctttaatctcttaatcctgttatcttcgtaagctgaggatgtatgtcacctcaggaccactgtgataattgtgttaactgtacaaattgattgtaaaacatgtgtgtttgaacaatatgaaatcagtgcaccttgaaaaagaacagaataacagcgatttttagggaacaagggaagacgaccataaggtctgactgcctgcggggttgggcaaaaagagccttatttttcttcttgcagagagcctataaacagacgtgcaagtaggagagatattgctaaattcttttcctagcaaggaatattaagaccctagggaaagaattgcattcctggggggaggtctataaatggccactctgggagtgtctgtcctatgggagtgtctgtcctatgcggttgagataaggactgagatacgccctggtctcctgcagtaccctcaggcttactaggattgggaaaccccagccctggtaaatttgaggtcagactggttctctgctctcgaaccgttttctgttaagatgtttatcaagacaatacgtgcactgctgaacatagacccttatcaggagttctgattttgtccttgccctgtttcctcagaagcatgtgatctttgctctgctttttgccctttaaagcatcc

SEQ ID NO: 124083 - DNA, 921 bp, Homo Sapiens
gggctggtgcgtccaccacgtcctggaggaggtccagcaggtccggcgcagccaccaggacttctcccggcagagggaggagctgggccagggcttgcagggcgtcgagcagaaggtgcagtctttgcaagccacatttggaacttttgagtccatcttgagaagctcccaacataaacaagacctcacagagaaagctgtgaagcaaggggagagtgaggtcagccggatcagcgaagtgctgcagaaactccagaatgagattctcaaagacctctcggatgggatccatgtggtgaaggacgcccgggagcgggacttcacgtccctggagaacacggtggaggagcggctgacggagctcaccaaatccatcaacgacaacatcgccatcttcacagaagtccagaagaggagccagaaggagatcaatgacatgaaggcaaaggttgcctccctggaagaatctgaggggaacaagcaggatttgaaagccttaaaggaagctgtgaaggagatacagacctcagccaagtccagagagtgggacatggaggccctgagaagtacccttcagactatggagtctgacatctacaccgaggtccgcgagctggtgagcctcaagcaggagcagcaggctttcaaggaggcggccgacacggagcggctcgccctgcaggccctcacggagaagcttctcaggtctgaggagtccgtctcccgcctcccggaggagatccggagactggaggaagagctccgcagctgaattcgattccacgggccgaggaggacggagcttagacctcggagccttgagcctccgcaaagatcgggattgatcagctcacactgaggatgggcttcagcagtgctcgccgcaacgaactgatcctcgtcaacagaccacacctgcgc

SEQ ID NO: 124084 - DNA, 2418 bp, Homo Sapiens
  misc_feature (147)..(156): n is a, c, g, or t
  misc_feature (174)..(174): n is a, c, g, or t
  misc_feature (260)..(324): n is a, c, g, or t
  misc_feature (898)..(906): n is a, c, g, or t
  misc_feature (949)..(951): n is a, c, g, or t
  misc_feature (966)..(979): n is a, c, g, or t
aattcacaagcccctagttcatggaccaggaatttcctttggaaaacagcttatggcccatgtttccctttcccttctggggcccgcgccgccaaaacgaaagggcttagaaagctttttgggggggccgaggcggccgaccaaggnnnnnnnnnnggtttgtggtttttggcntaggaacaaagctcaagtgtttattaagaattaaaaatactgtaaataagccatacagttcatttcacagtaaactaaacaaaacnnnnnnnnnnnnnnnnnnnnnnnnnnnnnnnnnnnnnnnnnnnnnnnnnnnnnnnnnnnnnnnnnggaagggcaagacagccattaaagaacaatacagctcagagggaagggagatacagcaaacaattacacaaacgcagtatgcacgctccttgccgacagggctgcccagacggcaaacctcttcatggacatcatgttaaaataaaaggacttggcctgcattccccagggagaccccctattccactgtagacagctctcctcacgaattttttgaaagaacccaaggactcccctttctggtagtcgaaacctgtgcattccttggtgacctccggagagagaacatgggccggcagtggggacagagggcaccgggactctgctgggtgtagtgcttcacattcagaaccgcctggatgctttgcatagttacctctgatatcacaagatgcgtcaggaagagaaacgacacgcacaccatgagggaggcagccctcaagcagcggattcctttcaaagaaagacccaggggcttctcccctcctcattcagagctgacagctatgagctttaaccggttcaaagtggaagacaagtgagagatatctcataaaaatttcggccagaaccnnnnnnnnngtaaaattaattttccttaaagacaactagaaagaaaagggtnnnccccccaacccaccnnnnnnnnnnnnnnacttgaaatctgccagccagacaggatttctgaggttaatctgcttctgttaatcctcaatttaagcctttatcatttttctctgactagagacatccatgaaaagccacctgttattcacaggggctgcgcttcaggaaaccaaccaaatgcagaagcagagaacttaaatattgtaaataagttaactgggcatgaaaatacaatgccttggtgttcaggtggtgacaactgctctttaagaggggacaagaaattggggggtaggggacacatgggaaaaaaccacacattttttggtcatgagaaattggactttaaatccgcgccctgcacacgcaattcatttagaccttttcgtgaatcttctccactttcacaaacaacctatccagatcattcctcaggtcatctagtaaacccttggctgattccagattgttctcgttggtttctattttgaccgagtatgcaaccaaactgtccacagcagtcctgagcattttcaagtccgcctccacttggctgactgaggctttcaggttgtctagagaagaaagtctgtccaggaagtcctgaggaggcagacgggcggcctgggcttggtcctgactgagcagcgtgtgcacctgctcctgcaccttctggagtgattccacggtgctggggagctcgcccacactcctcttcagctcctccacgtcaccgtagagcaccagctgggtctcgcccaggctcctcaccgtgctggccaggccatcctggtctgcctctgaggacccgaggccttccaggcgcccctgcagggcggccaggcgctgctcgtgctcctggctcttggacaggagggactccaggctctcggtctggcgcgcagaagccacctgcatggagagcaccccatcctccacgtgctggagcctggagtccagtccctgactcttttgctggagtgcctcaaaggcttccgagtgtctgaagcctccgtcctccttcggcccgtgggaatcggacttcagctggcggagctcttcctccagtctccggatctcctccgggaggcgggagacggactcctcagacctgagaagcttctccgtgagggcctgcagggcgagccgctccgtgtcggccgcctccttgaaagcctgctgctcctgcttgaggctcaccagctcgcggacctcggtgtagatgtcagactccatagtctgaagggtacttctcagggcctccatgtcccactctctggacttggctgaggtctgtatctccttcacagcttcctttaaggctttcaaatcctgcttgttcccctcagattcttccagggaggcaacctttgccttcatgtcattgatctccttctggctcctcttctggacttccctcgtgccgaattcggcgcgccgtcgacttcatactctctcgcccctagg

SEQ ID NO: 124085 - DNA, 1841 bp, Homo Sapiens
cacaaagcaaaaccaagagtatttattttcattattttaaaaaactgcaacatttatttcacaatccctggaactgtaaaataactattcttttaatttacagaattgagggaagtattttaaatgtcaaaatacacatgctgaatgtgatttagcatataagcaccaaaaatcccaaaagtatacaaagattgtttaaacatataaggtgcatttattcatgaattaattacattcagtttgaaggaagaaacagtactccaaagttcatcaatatttaagaaattatccgaatagcttccaacttggtttacagctaaataacagatactgcttttaggtttttttatacaatgcatctaaactttaggttcgaaatttaagtgctgccttacactgtgaatggcagtttgatcactaaatttatgttccagtttgagatacttcatacacaacatatatttaatgccctgaaaacttctgcttaaaaactgagttatttagtgaacatctgaaggtaacaaaaaaagatagatcttctatatttttatgtagaattgggtataaagtcatttggggtcaaacacaattattttttaaatgttatcagtccgcccagtaataagaacttttgtaaatatgccactatagcttcgggcaataattgctattatgaagttagataaacacaggattaatttcttggtttacaaatcaaaattattgtgatattaaagcatgcctccttccaaaccacttggtcaatgctgattacaattaagaaaaacgtatgctagtattgctctaaatatactgacttagctgtcctgaatgacctaattaggttggggaggggacttggcctggttctccagttctgtgaagctgccacctccagcctcactctaaatagcttatacaaaatcaagttattcccatagctaacacaaatccagcaagctgtggtcctaaatgccatctacatttatatatttacttttttactgtgtacattaagaattttgttgtgctttttacatatccgatgtatgttttcatattaaacattcctcagtttcttgggaaggaaagaaaaagatcatgaaaagaggtacatcaggagagtcggactgtaaagtaacattacacacacaactagccaaatctctttttaatttaaaagataatgtcatcacaacgcaacatatagaaacataaaagaaaataaagtatccaccctaaaatccctattattccatgatattttcatagcaactagtatatatatcaatatatttttcacaaaccattcagttacacattgtgtatgcttttagaatttaaaatatgtattaccatagcagtctaaacattgtacttttagggaaatgtgcggagacatggttcagtgatttgatcattgtgatgattatttacaatgctatctatttacgttagcaataaataatcctgatatcaaaagagacaatactcatgcacacaccaagatggctgcatgctcttaaaatatttacacatagctctgccatttatagctctcccattaagagtgaaagtgcgctttcttcaattctctccacatttccattagtcttgcttctgggggatgcatccttccatttctacaacttcaggccatccttcatatttgtttgtatccttattgttctttatgtgctgttcaaaagggctttttgtcttaatgcccttcccaccacagaagacccagttgtctctaaaaccaagattagtaatagatgtgctccccacatcagcaatgagccgccgtgcctcatcattgagtttggttgctccatcat

SEQ ID NO: 124086 - DNA, 3141 bp, Homo Sapiens
tttaacagtatccaaaatttcatataggagaatggtttattataaaagactgtacataaaatttagacaacaggttatatacaaattaagagaacaatccacttgaaaaatggaaagtagaaggtagctagctgatcactaatgatactttgtttgtttaaaattaacaaaggcaaaatgcatatgaaatagtcacattgatttggtagcaataatggtctttaattttcagaaataactgttttgcactagtcttaccattcactatgctgttataagtctgtagcatccagtacataactgtaatttgaattccaaacaaatcctcaataacacagaaacccacacttgagtgctctactttaatatcctaagcaatagagaattatacacaagacaagaagagaaaacatccctcagccctcccttcaattaagaggagacacacaaagtgcatgtgttgcattttgattatgtcaaaagacaatccaagtctgttggttaggtaaatctctgttcactgattaatacatgacccaccttctttcccaattattttattttaaaattctaatgttgctagtgccaggtaatggattaaagagtgcctactcacaaatcaactgtatccacttttacaatatgtaaaaggtacttttaacttcctttcattgaaccagtgtacaacagttcactgtacaactgaaggactgacatggcaatccttaagaattttacctacagaatgaatgcacacaatttgacacattttcttagtttcaaaagattatttaaaaaaggaattcagtagattgacttgtaaataaccattgcagattttgaatctgcaaaaatccgtcacattgctgttgggccagattaagataaggctaaaatttttttccaagttaacatattgaggaaaataggatcataattgtgcaataaatcattatcttttatttttttaaaagcaaatcagtgaaggaaaggacaaaaacctttggttcacttatgtatttatgaatggaaaaagtttataatgcaaatttcactcattaaaaaacttaggtacaaattacaacattacagataattctctttttgcttgtttcacatggagaccttggagactcaattcacgttaagacacctaagtacgagtcctccaggtaaatattacacaaatgggaagcatcttgaatttttaagtatatttcaatacataaatttttatgcatgctttaaacaaacagtattttttttaaatgagagaatctaacaaaaaaagtctgaccagcaccagcatttaaattttctgattttaatattagtctgacatagcgttagtaaccatgctgcactgaaacatgtaatggtacaatctgaatcatgattcgttaaatattataccccacttcccccagaatatttaggctggtcataaagttaaaaatgtgtaagtaagtacataagcataatcagttatggacagcttcttgtataaattgctattcagcaatacataaactgcctcaaagatttatgcttacaggtagacattcaatttaccaataaaacagcatgttctgaaaatatgggcacattttaaaacatattaagacagttctgttaaccataatagtcccacagtatgactgagtaataagaatctacttcgaaagatcaacaaaattaatcagtatagtgcatgattgattcaacatagttcccagggaacagaccagtcactcgattgcagactccttcataccagccatcatcattcttctttataacataaatgattgcaccctccataaatgacagctcatcatccttgtcttttgtataatcatatattgcaacaactttctcaagtataattcttgggggcccaagcaggatccccatctgcatatggatcattatactgaactactgcagcctcctcatcttcataatccactggtcggtggctcgagtgcggggaggtggagagtcatcaaacatgggaatcgtcatctggtggaggtggtggcggtggagttggactatcagcaattgaattttgagaataaagtggacctccattaacatgaggctgagcagaaaattgagcagtcacagagggagttcgtctgtatccaccagaagatgtcgaagaagtagtagagttgtgtcgagatatctgcctggtcattgtgccatactgggaaccaggagctgagcccggggctggtccaatagtgggtggcgaaggtgtaggcacagcaatgggaatgccaatactactgctaccactgttttctcgacttccacttcctccactacttccactgtgtgtccttggtctctgatttaaagatgctgtcctgcctggactatgctgacttccaagcctagcaggactggtcatatagtcattaggaactgttgggggtttaacaggttccaggttttataaggagtattccgtcccagtgttccccggcctgacatgggaggacttggcggtttctgagtaggaggatttgttctcgacagtgtgccagttcttgcaggctggttatttccatgcttggcttttagccacttgacaccatggcccacatcatccagaactgtgtaatcgataggtttccgaatataccttacagggcgctccatattcgcaggtgctattattttgtgagttcttgatgtattcttatttgttgtcaaaataccaatctctcttcgtgccactttctccttatgaatatccacagtctgtgagatatgattgatggaagactccattctccgaagctgagaggcttggatatccagcaactggagtacattgttggccaatgcatttatttgataagcaacactagctagagattgggttgtataggctttggtctcctctaaagcttttctcttgtctgtagcctgtatgtagttgttttcacagtagtctgccacccgagtcaggttctggtaactctcgatcagcgccctcttgccagacgggatctcctcctctagtaacatctgcagctctgccattttccacccctctgcatcgcttcctctcgcgttccccggccgtaatggccgaattcccgggcatatgtccggtaccgtcgactg

SEQ ID NO: 124087 - DNA, 1037 bp, Homo Sapiens
  misc_feature (962)..(996): n is a, c, g, or t
cgggggaacgggttctgcgccccgtccagtgggacatgccacattgcttggtcgtaccccgcgttttgttgggacttgccaattgcgtcccgcatgttcccccggggggtgcctgaggttcttggaattaacgattgtcgtccgccctggaatagtggtgccttgcccagccctagccggaccggtccatatgtccttacggaacggtggggggtttacccaggtttccggggttttataaggagtatttcggtcccagtgttccccgggcctggcatgggagtacttggcgttttttgagtaggaggatttttttctcgacagtgtggcagttcttggcaggctggttatttccatgcttgacaccatggcccacatcatccagaactgtgtaatcgataggtttccgaatataccttacagggcgctccatattcgcaggtgctattattttgtgagttcttgatgtattcttatttgttgtcaaaataccaatctctcttcgtgccactttctccttatgaatatccacagtctgtgagatatgattgatggaagactccattctccgaagctgagaggcttggatatccagcaactggagtacattgttggccaatgcatttatttgataagcaacactagctagagattgggttgtataggctttggtctcctctaaagcttttctcttgtctgtagcctgtatgtagttgttttcacagtagtctgccacccgagtcaggttctggtaactctcgatcagcgccctcttgccagacgggatctcctcctctagtaacatctgcagctctgccattttccacccctctgcatcgcttcctctcgcgttaaagagacagaggcagcaaggtccgccgaggctccgagcacctcacagcccggatacccccggccgtaatggccgaattcccgggcatatgtccggtaccgtcgactgnnnnnnnnnnnnnnnnnnnnnnnnnnnnnnnnnnncggccgcttcctcgctcaaagactcgggcgctcgtcagttt

SEQ ID NO: 124088 - DNA, 569 bp, Homo Sapiens
  misc_feature (77)..(118): n is a, c, g, or t
  misc_feature (313)..(313): n is a, c, g, or t
ttaaacgacggccaagtgccaagctcaaaattaaccctctctaaagggtcgtaagcttgcggccgcggctgtaggcnnnnnnnnnnnnnnnnnnnnnnnnnnnnnnnnnnnnnnnnnnaattacagtacacctttattaatactggaatcttcacagtgcatctgttacttgtagcagtgactatatttaaatcggggaggatggtgtggagggggcggggaggagaggagaatttttccaaaatctgacggaaagaaaagaaacaaatggttcagatgggacggagggtgtggggagggggggtagggtgangtaggaaccaggagggctgcctggggtggggtaataaattaaaaaaaggaacgagttaacaacagcaccaggaaagttacttcagtcaaaagacgcttttgaaaagaatatttctccgtacaaaatgagaaattaaacgaacgtaaagtcccccaaaccaaagtttgtgatgtgggatggttggctcggatcccgaggtgggtgggcctatgaggtggttgctaagtcgacgcaagggcggcgggggtggtctcag

SEQ ID NO: 124089 - DNA, 542 bp, Homo Sapiens
ccctaccaagaacaaaccctggtcaatgagaaatcaatgcttcctctgaaagccagcaacagccggtgctgtcacacccaagaagtacaggtacctcagtccaaacatcaggtctcgaatattcttctgtggtcaaaactggcattcaacaagttgctggtctgtgtgggctccaattattagcacagacaactgttaccactggatatctcgctgcctatgcccactaccacagcccagccacccccacagcctcaggaaagttacatatcctcaacactccatttgtaggcaagttcctccactgccttcttgctggcaagcctggcaaagcgcttctgttcaaatccattggatctgtccactccgtcccagcgatatccaggccagatattaaatctgttgggaggaggtgctggaccactgtagcgaggtctcacttttttagtcttgttctccttgggcttattcttcttgatgaagttgggcataagggtcccctctctttcctgttctctgtagatccgatccagatcttcggc

SEQ ID NO: 124090 - DNA, 1579 bp, Homo Sapiens
  misc_feature (1495)..(1495): n is a, c, g, or t
tttttttattttatagacacattatatttattcagaaagattaagtatttcaaaggtaaaaaatgaagctaacatttgaagattaggtaagtttcatgttacagaatataaagatgaaaatggataaaaaattattatgaagtacacacattagaatttgacttgcttagtttgcctctttgtgcctctacctttatcaaagataattatgtgactaagtatcataactaagctggtacatggaatggacaagtgaaaataggtgggacattagaattattatatatgagctcttctgacttcagagtaaaatttgtgttgctcattcctagcttccaaaagtgaataaatacataaaagattaaaggaaaataatttcacttaaggtgatcttttcatataaactataatgaaaagaaacaaacttggccaaagtaggattttatatattcttaactgatttttaagataaaaattaaaccatttgctcaagtcaaagtgatcacgttataatgaaatgttccatttgtaacagctaataatttttagactccatctttcaatttattctgaattctctcagtggccataaagcacaactcttagaaacggtaaccttacaagaaactcatcagatcataaaaatgctatccaatctacaaatgttacaaactactgtaatgacacggttttatgtaaaccgacctgggtccatatggaggggaaaaagtgtgaccaaagaagtgtctatatatatattcatccaacttctcaaatactccatcattatctacttcatattccttcatgtttctaagataatctttaacatcattaacaaagtcagtgaagagcttctgatcatgtataaagacaccgtttaggaaaaacttattgatgaactgatcaagttcgttccagtgacaaaaagtatccagttcttttaacatgtacctttgaattatctgtctaaattcatccatccttataggattcaccactgtgttaaaaaggctcatggactcttgttgagcacaatcaaatacaccagaacaagcctttctgaaagaatgagaattttctctacaatcatgcccaggactgcatttctttgaatttgtattttttctgaattctttaaagtgaactggcttttctttccttccatcattttgcatagtagggcctctattatgatggttttctgtaggtgccttatactgtggatgtaaatagtcactaaaaactgttcttggtttttcagctgcttcttttgtagcaccaaatcttttattacccttttcatcaaagatattcttggtggtatctttaaagtgtctgaaagtggatttaactgaatctgagaattttttcagattttccttcacagctctctttagcctgcttaattttctctttatgatgccttacaaactccttggtagaattcttcatggcatcaaatgtttccttaactgaacccaaaaatgtttcnctttgacttatttttagccctgtggcttcctctgccccttttcttttttccatctgttccttgttttccattttgatcttttgg

SEQ ID NO: 124091 - DNA, 1472 bp, Homo Sapiens
ggaagaagtccttggaaagtttacttggagcaactctaaggtcctccaccttcaggaaatttagccaagctcaagtcaacagtttccttcccttctatctacaatagggaggtacttatgacagggacaaggacaatgaatcagaagtagcacccacccaggcaggttcccttcctcaagtttttagctccctggtcttagccagcaggcgacgatcccctcaagtttgccttttcctgtgacattgacagacctcaggacggactatagatcttctctgaccatggaaagacccagaagccatctcagaagattgggccctgctattcctccctgtcaggaacagtcatttcattaccaaccttggaccagagtctgtttgatgatctgaggaagtgtatgcatttttctttaaagctattttgatttagattaatgagatttttgcaaatgccttggcatataataggcaaactggcagctaggattcacagtctgcagaggtgaacaaaagggcccacacacctctgcatgatactactacatcccagggcatgtcctcctctgtagctcagtgaccctggtttccgcccacctccaaatcctgactagataagctcagctctggagcctgcttctccctcagtgcagtaaggatgtggctcgccagcgcaacgtccgaggaggtctctctgctgatacccgtgtctactgcatccacctcctcaccaaaggcagctttggactcttcctgctttgacaagaggctgccctctttctccaaagcctggaggtacagctgcaggagctgcttggactgacgcacttcctctctttggtcaagcacctgttggagtgtgtgctgcagccgctggacggtggcacaactctgacgtagttcctgagccaggtctgagcagggagcgtcaacaagcatctggaggtcctcctctgataggaggatgatgctggacagatcttctttcagctgcctggccacattcttccacttcaaccctgccccgctgtctgtttcatctacatcaaaggactcttgggaaatccaagctgtacctccatctgaattgttgtatgcccatttctcattactagccaatgccacaaacttagtattggaaggtagacacagaaagtaatcgtcatcatccactatggtgccatcctctgccaggaccagggtgactggtgtcagggacttatcaatggccagaatgtcacaggccttgctcctcaggtcttcgaggcaggaggcggccacgccgtgctgttcgcggctgtagttgcggcgcagcagacacggctttagagtccggatctcgccagattctggtaccccggcgtccccggtcacctccatcctccacaaggtgggacctgcccaccttcgagaagtcgcgggaggccggagcggcggtcttctcctcgtccgaatcgccacccaggctcgctct

SEQ ID NO: 124092 - DNA, 1406 bp, Homo Sapiens
  misc_feature (44)..(97): n is a, c, g, or t
  misc_feature (231)..(240): n is a, c, g, or t
agtagagacagggcttcaccacgctagccaggatggtctcgatnnnnnnnnnnnnnnnnnnnnnnnnnnnnnnnnnnnnnnnnnnnnnnnnnnnnnntgagcaccgcgcctggccaatcactgccaattacttttgaacagagaacatcatatgtaattagaggaggcgggatattgttggtgcagctatatcattcaaaattggcagaagtcctgaagctggtggggctnnnnnnnnnnttggtggaacggcgtatgttgagacctggaatagcttctctggaaggtgctctaaggcagggggtagagtagtacataggtagtcaaatgatgaggctgagggtgtctaccaataacacaacgccacagagcttccttggcacacttcccgctgctgctatgtgggatcctgtctggctcgcttaggattctgcaggtcaccaggtggtgaggccttgcttgctgagatgctccggagagaatgcaagctctgcgtctgctgcaggcgcagggcgagctcccgctcacaggcctcctgaacagtctccgtcttctttatgtcccagttcaaggcaacagccagtgctttggggtcttccttggtaaccaactccaaatcctgactagataagctcagctctggagcctgcttctccctcagtgcagtaaggatgtggctcgccagcgcaacgtccgaggaggtctctctgctgatacccgtgtctactgcatccacctcctcaccaaaggcagctttggactcttcctgctttgacaagaggctgccctctttctccaaagcctggaggtacagctgcaggagctgcttggactgacgcacttcctctctttggtcaagcacctgttggagtgtgtgctgcagccgctggacggtggcacaactctgacgtagttcctgagccaggtctgagcagggagcgtcaacaagcatctggaggtcctcctctgataggaggatgatgctggacagatcttctttcagctgcctggccacattcttccacttcaaccctgccccgctgtctgtttcatctacatcaaaggactcttgggaaatccaagctgtacctccatctgaattgttgtatgcccatttctcattactagccaatgccacaaacttagtattggaaggtagacacagaaagtaatcgtcatcatccactatggtgccatcctctgccaggaccagggtgactggtgtcagggacttatcaatggccagaatgtcacaggccttgctcctcaggtcttcgaggcaggaggcggccacgccgtgctgttcgcggctgtagttgcggcgcagcagacacggctttagagtccggatctcgccagattctggtaccccggcgtccccggtcacctccatcctccacaagccc

SEQ ID NO: 124093 - DNA, 783 bp, Homo Sapiens
gtccctccccccgacccgggaattccccgccgacacaagttcgcactcaccccggatgagaacgggaccccggtcgcaaaacaccgcccccctgaccgttggttggcacccctgcatgggccacagatcagaggcatgaaagtgggagactggatcgctgggtaggtctctgccacacacctggtcacaaatgtaagtggccaccaccatcttgggtttgacttcagagacacgagtgacgattccacgcacagttaccaacttccccacagagtcagcccgcacttcccggatcacacgaggcttgttgctgctagggccttgaaaatacagctcaaatctgcgcatgagttcagcagggtactggttctgggggcttcggaccatcccagggtcccgactccgctgctccatcattagccgatgctcaatgtaaacgtccaggacatctttatttaccacttccctctccttgtactgaggcagcagctcttgtacggcatcagcaaagagcttcgcgtagcgccatggcattctcacaaattgagtccaccaactcggggtcatcctcggctacgtcgtccaggtccacatacagagccacctgttcccgatgagccagccgaaccaactggttcccatacttgaactgcttcttcccgagttcatcatcctggtagaactcttgtaagaacttcttaaccttgttcgaagtcatccccaaagttggcaccatcgtgccgaattaaacacccaggcctcgtacctagcctaagtcactta

SEQ ID NO: 124094 - DNA, 1184 bp, Homo Sapiens
ttgtcgggtgtcgcaccgtgcgggagctctgttgcttctcatcctgccattttggcggattatgcccttttgtgtgctcctcctcgctcgttgtgcgttccgctcctcgtgggtggttccccgcccgctagttattccacacccttgtgatctttcaccaatgcctgggggtcccccggtaggttttctggatttaacccccgtgaccacccctgtgcggaccccctgtgccccggtttgtgtcccagtatattccccgtgacctctgacgttgtccccgactgggccatcccctcgttttctccccttggacccgcccattgatactccgagggatattcccacagcccctgatcctatgttcttccatcttcatctcctggaatttgatgaatctggaggccccgtgtctgcagatacagccgccctcctgacgtttgtttggcactcctggcttgggcacatgatcagaggcatgaaagtgggagactggatcgcctggtaggtctctgccccacactggtcacaagtgtaagtggccaccaccatcttgggtttgacttcagagacacgagtgacgattccacgcacagttaccaacttccccacagagtcagcccgcacttcccggatcacacgaggcttgttgctgctagggccttgaaaatacagctcaaatctgcgcatgagttcagcagggtactggttctgggggcttcggaccatcccagggtcccgactccgctgctccatcattagccgatgctcaatgtaaacgtccaggacatctttatttaccacttccctctccttgtactgaggcagcagctcttgtacggcatcagcaaagagcttcgcgtagcgcctggcattctcacaaattgagtccaccaactcggggtcatcctcggctacgtcgtccaggtccacatacagagccacctgttcccgatgagccagccgaaccaactggttcccatacttgaactgcttcttcccgagttcatcatcctggtagaactcttgtaagaacttcttaaccttttccttctctagcgcgtagtccttcagtgccatcgctgccgagggccgtgcggccgcgcttggcgggctcagaggtcatagcctcctggggaagctgagcctcgtgccgataagccacggcctcgctacattgcccgtta

SEQ ID NO: 124095 - DNA, 968 bp, Homo Sapiens
aaaaatccccggtgacgctgacgtgttctcccaggctgggcaatccttggggttcttctcctttttaccagcccccgggatactacgaggggatatttcccacaggcacctgatcactatgttcttgcatcttcatctcctggaatttgatgaatctggagccccgtgtctgcagatacagccgccctcctgagcggttggtttggcactcctggcttgggcacatgatcagaggcatgaaagtgggagactggatcggctggtaggtctctgccccacactggtcacaagtgtaagtggccaccaccatcttgggtttgacttcagagacacgagtgacgattccacgcacagttaccaacttccccacagagtcagcccgcacttcccggatcacacgaggcttgttgctgctagggccttgaaaatacagctcaaatctgcgcatgagttcagcagggtactggttctgggggcttcggaccatcccagggtcccgactccgctgctccatcattagccgatgctcaatgtaaacgtccaggacatctttatttaccacttccctctccttgtactgaggcagcagctcttgtacggcatcagcaaagagcttcgcgtagcgcctggcattctcacaaattgagtccaccaactcggggtcatcctcggctacgtcgtccaggtccacatacagagccacctgttcccgatgagccagccgaaccaactggttcccatacttgaactgcttcttcccgagttcatcatcctggtagaactcttgtaagaacttcttaaccttttccttctctagcgcgtagtccttcagtgccatcgctgccgagggccgtgcggccgcgcttggcgggctcagaggtcttgctcctggggaagctgagaatctccgcgcggtggactgtgccgcctcgtgccgaatttaaacccagcctcgtacctagccgtat

SEQ ID NO: 124096 - DNA, 790 bp, Homo Sapiens
aaacggtctaggtacgaggcctgggtgtgtgaattcggcacgaggctcgtggccgatccagtctcccactttcatgcctctgatcatgtgcccaagccaggagtgccaaaccaaccgctcaggagggcggctgtatctgcagacacggggctccagattcatcaaattccaggagatgaagatgcaagaacatagtgatcaggtgcctgtgggaaatatccctcgtagtatcacggtgctggtagaaggagagaacacaaggattgcccagcctggagaccacgtcagcgtcactggtattttcttgccaatcctgcgcactgggttccgacaggtggtacagggtttactctcagaaacctacctggaagcccatcggattgtgaagatgaacaagagtgaggatgatgagtctggggctggagagctcaccagggaggagctgaggcaaattgcagaggaggatttctacgaaaagctggcagcttcaatcgccccagaaatatacgggcatgaagatgtgaagaaggcactgctgctcctgctagtcgggggtgtggaccagtctcctcgaggcatgaaaatccggggcaacatcaacatctgtctgatgggggatcctggtgtggccaagtctcagctcctgtcatacattgatcgactggcgctcgcagcagtacacaacagggccggggctcctcaggagtgggggcttaccggcagtgtgctgagagactccgtgagtgagaactgaccttaaggtggggccctggtgctggtgacaggtgtg

SEQ ID NO: 124097 - DNA, 1260 bp, Homo Sapiens
ccgggggtgaatggccgagggtccaccggcggagatctcagcttccccaggagcaagacctctgagcccgccaagcgcgggcgcacgggcctcggcagcgatggcactgaaggactacgcgctagagaaggaaaaggttaagaagttcttacaagagttctaccaggatgatgaactcgggaagaagcagttcaagtatgggaaccagttggttcggctggctcatcgggaacaggtggctctgtatgtggacctggacgacgtagccgaggatgaccccgagttggtggactcaatttgtgagaatgccaggcgctacgcgaagctctttgctgatgccgtacaagagctgctgcctcagtacaaggagagggaagtggtaaataaagatgtcctggacgtttacattgagcatcggctaatgatggagcagcggagtcgggaccctgggatggtccgaagcccccagaaccagtaccctgctgaactcatgcgcagatttgagctgtattttcaaggccctagcagcaacaagcctcgtgtgatccgggaagtgcgggctgactctgtggggaagttggtaactgtgcgtggaatcgtcactcgtgtctctgaagtcaaacccaagatggtggtggccacttacacttgtgaccagtgtggggcagagacctaccagccgatccagtctcccactttcatgcctctgatcatgtgcccaagccaggagtgccaaaccaaccgctcaggagggcggctgtatctgcagacacggggctccagattcatcaaattccaggagatgaagatgcaagaacatagtgatcaggtgcctgtgggaaatattccctcgtagtatcacggtgctggtagaaggggggaacaccaggattggccagctggagaccacgtcagcgtcactggtattttctttgccaatcctgggcactgggttcccgacaggtggtaccagggtttactctcagaaaacctactgggaagcccatcgggatggtgcacgatgaccagagtgacgatgatggagtcttgggctggaagctcaccagggaggagctgaggcaatggggagggggattctacaaaaggtggcagtcaatcggccacaaattttcggctgagatgtaaaaggctgtggtccgctaacggggggtgcccccccggtgagacgcggacacacacgcgtggggccgggggcgacacccgctaagggagaggggcaccaaacgggccaaatgtgag

SEQ ID NO: 124098 - DNA, 2058 bp, Homo Sapiens
gaatggtacaatctacaaacacttttattagcaaaaggagtaagtgcagcatgggagaaagaggggctcctccttcccctcaaaggcatcactgccccttcccaaggggcaggccagcagggaacaagaggaccccagggttgcaagcaggctggaatcagacaaaagtgatccgtgtccgggaagcattgacctgccagacattgagctcctcatattcatccagagccgcctggaactgggcgggtgtgaagccacgagatacacagcgctgctctgcctcagagaaccggacacttcggccccctgagaccagttcacggacggtggcaaatatcacatctgctggtctctgagtcctagctgtctgccccttgtctcctagaagagagtcctttgacatctccattagcctgatggcttcattcacatcttctttctccaccacatccaccattctcagacgtgccagagcagtggaaaggcgcaggatagccagcagggtccgggcagaagtataggtggcatccttactagcccaagcctctcgcctcatctccacgtatgctgctgtgatgtagtcagccagagactctggcaccatgggctgcttctcgcggcacatggctatgtaacgcctcatgagcttcatgtccagaggttcaaactgggaggggggctgccggctgtgctggtgcacataggtgatgtgctgggccaaccgtaggtcattgtctcggtcgggccggtcctgaatcagccagaggaggtcaaaccgggagagcagtgcagcaggtagctgtatgttctgctccaggctgcggcgagggttgtagcgcccgtaggcagggttggcggcagccaggatggagcagcgggcattgagtgtggtgagaatgccggccttggcaatggagatggtctgctgctccatgacctcgtggatggctgtgcggtcggcctcagccatcttgtcgaactcatcaatgcagcacacaccctggtcagccagcaccagggccccaccctctaaggtcagttctccactcacggagtctctcagcacagctgccgtaagccccactcctgaggagccccggcctgttgtgtactggctgcgaggcgccagtcgatcaatgtatgacaggagctgagacttggccacaccaggatcccccatcagacagatgttgatgttgccccggattttcatgcctcgaggagactggtccacacccccgactagcaggagcagcagtgccttcttcacatcttcatgcccgtatatttctggggcgattgaagctgccagcttttcgtagaaatcctcctctgcaatttgcctcagctcctccctggtgagctctccagccccagactcatcatcctcactcttgttcatcttcacaatccgatgggcttccaggtaggtttctgagagtaaaccctgtaccacctgtcggaacccagtgcgcaggattggcaagaaaataccagtgacgctgacgtggtctccaggctgggcaatccttgtgttctctccttctaccagcaccgtgatactacgagggatatttcccacaggcacctgatcactatgttcttgcatcttcatctcctggaatttgatgaatctggagccccgtgtctgcagatacagccgccctcctgagcggttggtttggcactcctggcttgggcacatgatcagaggcatgaaagtgggagactggatcggctggtaggtctctgccccacactggtcacaagtgtaagtggccaccaccatcttgggtttgacttcagagacacgagtgacgattccacgcacagttaccaacttccccacagagtcagcccgcacttcccggatcacacgaggcttgttgctgctagggccttgaaaatacagctcactaaggggagaaaacagtcacaaacaagatcctggagaaccaatccctacatctttcccgacagagaccactcacaatctgcgcatgagttcagcagggtactggttctgggggcttcggaccatcccagggtcccgactcc

SEQ ID NO: 124099 - DNA, 554 bp, Homo Sapiens
tttttcattaaaaacaacacaaatttattctcctgcaattctggaggccaggagctcaagatcagtttcaatgggctcaagtcaaggcgtgggcagggctggtttcttttggaggctccaggcaggggaatccattcctttccctttctggcatctgaaggctgcggcattcatggcccctgctcacgtcacacccacgtccacttccatcatcactttgtctctacctctttgaccttctggcctctttcttatgaggacccttgtggtgatattttgggcccacctgaatcagcaagaataacctctctatctcaaagtccttaacttacatacatctgcactgtccctttctgccacagaaggtaacagtcacaagttctgaggattaggacacagatatctttgggggccattattcagcccataacatgtggtaggcaataaataaaggttcattgtattacgataatggtacttcatgataataatgataacatttttctcattatcatcttcatcattcccatgaaagccccagagcatcctcgtgc

SEQ ID NO: 124100 - DNA, 1501 bp, Homo Sapiens
  misc_feature (1243)..(1259): n is a, c, g, or t
  misc_feature (1406)..(1430): n is a, c, g, or t
ccttggggcgcgttttccttgttcaaaggggcggacagtttgacctgggccttttttcctgtgtttgcccccgattagagcctccgggagttgtttgtgttgttgttgtggatcaaaaaatgtttattctgaattctttaatttaaaaaaatcatacctatgaggtgtgctacaggaattcagatacaataagttgcatataaaacccgacctcattgctcattgtggtaaagcaaggatgatgagaaaatgcacctcaggagcaaaaacacgcttcacgggcactccgggacccaagtcccgagacatttccacgtgaccttctggaaagacacaccgcccacctgactgcacgacgggactggtccagcctcccggctcctcaggaaggagatgagtttcctacaaagtgagtggccacaaatgccaggacagcggtgtcctggagctgtggggggaccttggggaagaacacacactcatctgcacttcacacttctagccttcaactgatcaaactactgaaattgaacatgatattttggcaaaaatactacacccccattgacaggaggagggttcctggcggctcacagcagagcaggcactgccttccttcccaaggccgagaggccatgctgtgacatggcacacacaccgccccaggctgcccggtggcccagggaccatatgggtgacagttaagacatcagcctttgtgaaaagccaagcccgacgcagacctcaactgcactgtgcgtcccaatccagagacccgcggggcaggggaggatttcaaggactcagtgacactgcccggcggggacaggagaggctcccagcagccctcccggtgacctgggcatcaggggatgggtagagatgaggacaagccggagtgggcacaggaaaaaaaccagggtctctgctagaagtcacctgatcctgcgggctgtcacggtatgacataggcagatttcccatctgacatggcagctcctgtgctctgggtgacttagctccgggttaacttccatcaggcccagtcctctcctccccagcagtgagactctagaggaagcccctcgtctgggacagtccttcctgcctacccgccacagggccgacctgaggcctcgtgcttgtcctgggaggtcccgactgcacttgatgggcacgagggcaacacgaacacaagagaatgcgagctccctgaagctgccgcgtgacagtcaatttggcnnnnnnnnnnnnnnnnnccatcaatgcataaaaccaattaccaaagtcctcctaaggaatgtgattacaatatattagcaaattctgtggcataaacattttcaaaagcatcagcaaaagtattaaatataaaagcaatgtgtatattcccctccccaccttcnnnnnnnnnnnnnnnnnnnnnnnnngggcagccgctcgcgatctagactagcggacgcgtgggtcgacgatatcccgggaattccggaccggtacc

SEQ ID NO: 124101 - DNA, 1427 bp, Homo Sapiens
  misc_feature (216)..(225): n is a, c, g, or t
  misc_feature (230)..(231): n is a, c, g, or t
  misc_feature (1127)..(1127): n is a, c, g, or t
gggggggaaaattccaaaacccttatgttcatgagcccgggttttttctttgggaaacccggcatgagccaccggtcacctttcctcgacgggggccccgggcgcccaaaggaaattgttttagaaaatttttttagggccgaaggcggccggacaaggttttttggtcaaaggcgggggtcacgttccacagggtgagaggatcaaatttgggtnnnnnnnnnnagggnnaccaccgggacactgttaagtttattctagggtgagtgggtgcccaaggggggcagtgagtatggccgaggtcacctggtggcagggtgctcagggatggccacaggttctatagggccctgcagggcctgagtctctagtcagttgggatgcttcaccttctgccccaccccaagggggttggggcagtcatggatgtagtagttttcgtaattcgcagggatcagtgatgggcactgagcaggcttgattctcacacacatatgcagtggcctggtcttccaaccgtcggagggtactcaggaaaggcagctggcgggacaggaagctcgaggggtccccatcagccagaatcagcaccttgttaggaatgtagacagagtggacgcactgcaccagggccttggtgtccttggcctgacggtctccacagatcacgatctgcttgagggtctgctgctgggctgagagggcgcggaccatctcgggcaacgccaccgggacacgacgcatgcgctcggaaaaggcggtcaataggcacacacacttgtccatccagtccttgtggcccgtgaagccatgcagccggagcaggttgtgggctgacacggaattggcgctgggctctgctccatcctggtcgtccttcagacgcaggggcaggccagcccccagctcagcctcactgcagaagtagccgccaccctgggagtcccaaaagagcctgtcctgtgtgtcctgcagccgcagagcccactcgagccacgcactctcctgtgaggcctcatacaggtccagcaggccccgcacacgaaggcgtatctccaggagcccagcagggtgggtgctggggaccgcataccggagggctggtgtagccccaggtcggcttccanagagcgttgccattgtcactacctcaatactctgtcaggcgcttcagtcacttgtctgcatctggtcaggcatctgttgatcatcttgtcttcaggtccgtgatggccccagtcacagcatagcctgacaccatcaagccattccaggcagccagcatcttgctgtccaggtgcggcttgggccgatgcttccgggcctggaagagcttctccagccctgtattgagcaaggtccgcacggcctccacatccaagccaaagcgggcagcagtcagctccagcgagtaccggacggtcagc

SEQ ID NO: 124102 - DNA, 1393 bp, Homo Sapiens
  misc_feature (513)..(565): n is a, c, g, or t
gtccggggctggcgttaccctggaggctgagggtctcacggatggccccgctgccaggagcagaactggttcggaggccactgcagctctaccgatacttgctgcgctgttgccagcagctgccgaccaagggcatccagcagcattacaagcatgctgtcaggcagagttttcgggttcattcagatgaagacaaccctgagagaatccagcagattattaaaagagccattgaagatgctgactggatcatgaacaaatataaaaaacaaaactgagagctccgagggtgagccttcctggcctctggaagttgagaggcccctcttctggagctcagcagcagcagctggtttggaagatccattggccttgttggctgaaagccagaaatcaggggagaagctgaccttgctccagaggctcctcttgccgcggccatgttgctagcatcctttatgtttgcacttccagccacttacgatgtgaaatttggggagaatgtagtatttnnnnnnnnnnnnnnnnnnnnnnnnnnnnnnnnnnnnnnnnnnnnnnnnnnnnntctgaaagtgattcatttattctggagatctctttatcattctctgagtcccagagcagatgtcccctcaggtagcaacctgtacagaagaaagcacgtgggttttagaaccagacagatctggatttgaatcccagatgcaataacgatgaacggtgaagtgcctcacacaggatgtggcacatgacagtgcctgaagggctcccttcaaggaagccgtcctgccccgccccctcctctgctcctgcagcgccctgcacagctctgctccccgcatgcaccgcatcgggtctcagttttttgtttgcgagcttgccctgtccctgcttgtagcccctgagccctcacagttgtcacacacccagcagtctgccaaggagctgcttttcctgactactgtctctccatgcctagggaagtcaaagccctgggccttgccttcagggagttgacagtgtccttgaagtggtgaagtgcccaccacatgaaccaaggagagacgccaaagcagctgccatggactctggcctgtccaagcctctgtgcacctgcagtctctttccactggcacttccctgctttgctaccatcgtggaagaatggaagggagggggagaaggtgggtgggctcagggagaacggccagagtggccagaagatgcagagagaagccccactgggatctgagtattccccaagggcactcagccacagggatgaactagtgtttgtttgtatccttgcagttatgtgacttaaagtgactcagagatatctatgtatgcgagtgtactccgctggcaatgaagtaaatatatcaatttgtgg

SEQ ID NO: 124103 - DNA, 1223 bp, Homo Sapiens
  misc_feature (274)..(282): n is a, c, g, or t
  misc_feature (1084)..(1084): n is a, c, g, or t
  misc_feature (1153)..(1153): n is a, c, g, or t
  misc_feature (1170)..(1170): n is a, c, g, or t
cgagcctatgaggtcagttttcccaaaaggaaaaagggcagaagggatttgttcatttttacatctcgtttctgtaatacacctttgacttcatggttgatcagactttgaagtctaaacagaacgtaagcacttggtgtatcgattatcatactacacagtagacatgttttcaaggcatatcttgtcactgtgtgtgcttctgacttgtatctttccctagaactaaatattttgaaggtccaaacattatactttgggaaacttgattgannnnnnnnnaatctagcttttcagctgataatggttacacgtggtattatttcaagtccaaggtattatgtattctattttaactgtttcccagttttgtattttttgtattggaatgattatgaaattaatgagaaatctttagaaatcagactacaaaagagtagttcttaaatacagaagtgattgtgaaactttgtgatagcaatgtgtgtagtagcagttttgtctcaaatacatttatcatttgttactcaaaggatgttgaagtattaaaagtcattatgctgtctgtggaatcctactattagtacagaacaccctgcagtgatttttccgcccatgttagcattgaagttgtgagctctacttgcttgtctttatggccctttaattcaagtaattggtcagtatccgtatgggtcttttataccacccgctgggggctaaactaatttagctgctgctgtatacttactaacaaggaataaatgttaagctttcttctcagtattgatggatggtatctaaaagtatttttatgtttctttaacatggcttaaattttgaacttaatgtatcaagttagtatggtcatattaatacctgtgcttttcagattcttcaaacacctaaatgaaagtgataaattcaaaactgatccttttagttcctcattatatgatatgaagggattaactgtagcaggatagtcaacctgaccgtacggcatggtgctttttttcaggataaatcttcagacaaaaaagtgcaaaccaaagggaaaaggggagcaaagggaaaacatgcncgcagtggctaaccaagaaactaaagaagacttacctgcggaaaacgggaaacgaaactgaggagagtncagcctctgatgagcangagaggaagagccaagtctgataataacatatacatgcttatcatggtccctg

SEQ ID NO: 124104 - DNA, 1355 bp, Homo Sapiens
gggggaagattcccaagccccctagttccaatgacccaggattttcctagggaaccaggctttgggccaaggtccatttacctattgggggcccggggcgccaaacgaaagggttctagaaaagcttctgagggggccgagggcggccgaccaaggccctacgtgcgtcggaatgccgtgccgtgtcataactgagattttattggttgaggatcagtacagacatttcaatttgtacacaaatcttaacatacgtaacgaaattctaaaaagccatgtattgtaattcttttttaaagttattccagtgactttccagcttaaaatttggaagcaaattttccttaagaggctatcaagtaccagtatcttcacgttggtcagctgttacatacggcccaccagttcacaactcaacagcacgtacactacatgttcaaatctgtaatctttcacagcacagtaacaaagttattaggaaaacaggactaccacaaagatgttacagagtgcacacaattctggcagagagagccatgatcaaagagtggttttctttaggaaacaattctactaaaaaacaacatggtaatagaagtaatttaaaatgttcaagacattaaatgcaggactgactccatattgccatttaatatgctttgtattataggatataaaaactaaccccccatctgtggaatgttaagctgacacccgagacagtcagagcctcccataattcaatatcccacactattttctggttgtaccaaaaaataaacaaccagcaaatgatttcacctcttaaaaaaaagcatttacacttaaaaaatgggatgaggtgggattccctccttcttaaaaatgtttctagagctactaaaaaacttgcatttacaaaatagttgataaaaatattcctctggattgtacaagaagggagacagggaccactgataagacatggtatatggttattaatcagacttggcttctttctctcctgcttcatcagaggctggactctcctcagtcttcgtttccccgttttccgcaggtaagtcttctttagtttcttggttagccacttcggcctgttttccctttgctccccttttcccttttgtttgcacttttttgtctgaagatttatccttcgctgctgcctttttcggcttcgcttccacttttgcaggaggtttagctgacaaccgcgccgatctcctcttgggctcttccttggcggcgccttcggcggagctgaccttcctcttgggcatcgtggcggcggggaaggcgcgtgccgggtgcctgcggggaaggcgcgtgccgggtgcctgcgggccgcggcgcgc

SEQ ID NO: 124105 - DNA, 1123 bp, Homo Sapiens
acagtttcccccaattttaacccagcccagggtaccctttaccaatgttccaaaattcgggaaaatttttccccaggccccggtaacacaaagtttattaggaaaaaccagggacttacccccaaaggattgtttcaggagtgccaccacaatttctggccagagaggagcccatggatcaaaggaggggtttttctttaggaaaacaatttcttcttaaaaagcaacatggtaatagaagtaatttaaaatgttcaagccattaaatgcaggactgactccatattgccatttaatatgctttgtattataggatataaaaactaacccccccatctgtgaatgttaagctgacacccgagacagtcagagcctcccataattcaatatcccacactattttctggttgtaccaaaaaataaacaaccagcaaatgatttcacctcttaaaaaaaagcatttacacttaaaaaatgggatgaggtgggattccctccttcttaaaaatgtttctagagctactaaaaaacttgcatttacaaaatagttgataaaaatattcctctggattgtacaagaagggagacagggaccactgataagacatggtatatggttattaatcagacttggcttctttctctcctgcttcatcagaggctggactctcctcagtcttcgtttccccgttttccgcaggtaagtcttctttagtttcttggttagccacttcggcctgttttccctttgctccccttttcccttttgtttgcacttttttgtctgaagatttatccttcgctgctgcctttttcggcttcgcttccacttttgcaggaggtttagctgacaaccgcgccgatctcctcttgggctcttccttggcggcgccttcggcggagctgaccttcctcttgggcatcgtggcggcggggaaggcgcgtgccgggtgcctgcggggaaggcgcgtgccgggtgcctgcgggccgcggcgcgccgacagccttcgcgaaactgggctgccttgccgctgccactcctcccgccgcccgagctgctgagacccacagcgggggcggtgggagaaccggatggaaccggattgggagcccgcctcctcct

SEQ ID NO: 124106 - DNA, 1133 bp, Homo Sapiens
ccccttttcggtaattttctttaccaaaaaaagggtaggaaggttaaggaatagaaaaaaacattagttttctgagattctcatactgaataaattgtcatacataaaccagagtcattaacttaagcataaaaatcagtttatcactgtggtaccacaatctctacatacttatgttaaaaatttccattatttgtttgtcctataagttagaagagagaaattacagcaagtgtttgttaaccacagtaacaaagggcagtgataatttattgagtgatgagatgtgtcggatgctgtgttaagtgctttatctacatgaacttaatccttacaatagtcctgtgaggtgttagcaccaatttgccaaaaaggaaactgaggcacagagaggttgcataacttgatagaggtcacacaactagtaaatggttgggctggatttcaaactcaagtgtctcactctaaaactcatgttcttgaccattctcctgctttgtctttttattccttccaaataagttcacctctaatcaataaaacctactgaatatctaaggcattatgtgtgggggatagagggggagggaggttacaacgaagagcaaggacattcatgggattttctatctactgtgatctcctttgggagtaaagaactatatgcaacctagaggaaaggatgggggtaggtatcaggagaggaaagagaacttgactgagtgcctactctgggcagtactttaatcttcttagcaccctatgagataaacggtgttaacaccaattttatagatgacatatctggagctcagagaaaccacatctcttgcctaaggtcaatacaccatatatgagagtaggggctgtccgtatcaacatgctttcttgagaaactacaagtgggccaaagacatacttaatactatggaaaggaagagctgtggggaaattaacaccacttacaggtgagatacagttcacatttataacaacatagataatttggatacatatatcacagataaactagacagttatatcatctgacatatacttatttggaagagtctgatttattggataggatcgattttaaccacctataaatgttttcttttttctggtataaa

SEQ ID NO: 124107 - DNA, 1587 bp, Homo Sapiens
acacgcttgtgttggtttttcttgttctcccttttgccagaaaataaagccattttattatgatttttttctctgccatgtggctgggaatgggaggtgagtggatgggtgtgaatggctgaccctgctggaggccctgcggggctctacttggcctggactgtctcctccagcctgtccaagcgcttctggagctcctgcaccgtggcctggagcttccgcatctcctcctccagccgagacacggcatccgagctgggagtgccactggcctctggtgctgccctcctgcgcccggtgtccaggccccggttgaccctcagctcccggctctttgggggtacgtagccatccttgagggagatgaggaggggcccagcatcccgaccccccagccactcctcagccgtgagggcagggtcgggccctgcggtgggtgggtacaggtcctcctggaacaggtccgactttcgaggcactgtcatggcaatgggctcacacctccgctcgtgcagcttgtagaacctggcgatctcacacttgttcacctccaggccacgtttgggcatgtagcccatgccccgctgggactccttggaactgaacatggagagatagtgcaggaaaggggcctcggaagtgatctcaaagtaccggattgagctgtcacccttgccacagaggtagacgatgttggtgtcagggtcaaagaagggcagcaggacaccgctgctggtgtccagctcctgcaggaacagcggctcctccaggtgctttgtgtcccacagcgccacctgccgctcactcatgcggctgaagcccgtggtcaggatcttcccctccgacacgaacactgcacgcacgggccgggtcccctcgtggggacggtccttctcagctacgacagtgcctttgcggggctcgatgatgcgcacgcgcttgtcacggcaggaggtacaaatgaggcctccatctcggctccagtccacactgtagatcgtgtctgggtgcacctctgggcccagtgtcagcatggccgccccagtgcccacgtcccacaccatgatcacgttgtcacaacctgcactgagcagcacgttctgggctgtggtgtgccaggccacaatgcccacacgcttggtgtggccctccagggtgacgacgggctcccgcaggggcagcatcaggcccccatccgggatctcccacaccatgactgtgcagtcctcggagccactggcaatgacgttgtcattgtgcgggcaccaggcgatgtctagcacaggggctgtgtggccacagaccgtgggcgcattcttgtccacacgtccagtcttgcccaggggcagcaccaggaaggcccctcccccgctggcctcacagatcagggccacaaacttagggttgacagcacagaagccactgtcccaggtggtctgtgagacgcgcacatcttcatagcactggtcggccttggccggctgtccaaacacgtggcggaacttgctggagcggaccacctgccggctcattctgctgccgagagaggacagtgatcccccaaaagccggaggtggaggaggagga

SEQ ID NO: 124108 - DNA, 914 bp, Homo Sapiens
tttttaatgtgcatagagtttatttggtacatctatcaatttctacaataactgaccaaaaacagttcacacagtgtccacctgcactccatgtctaaaatgatttatttagtagggtattttgcaaggctagaaaggagagaaaggatttcacagtatcagtgaaaactgttttatcatgaaacaaatgtaatacattaatatattcattcattctctattagaaaacagcaaaattacattgttagttgtattatttacagtgaaaacttggaagacttgacaaagcatcagttagtttatcaacagacctaggaagctccctgtcccctcctttcagggtcctttccttggaaatgaaataaacttaaatcagattttacataactttaagcaccagcttgacaatttaaagttttatttcagttttataaaatactcctgctttgaaaggcaaagtgaatgtaaaaatgtgaatgtaattaaacaagtcactggcctggaaactttttattgcaatagtctttatgttttactactatattcacttcttggaatgaatttgcttgtaggtttgaaacaaaatatttgccttttgtcttgaaaaattcccttaaaaaattaattatttttggaactgtacaactacattttcattcgatgttaaatatgcaacttggtccttggatatcatgttacaaagtccaacctgttggataacttgttatagaaaacaataaaaaaccttaaactatcataaaatattactgatgttaacagtcatgtatgtataacacatcactgtatctagattttcctgttattggatgtttaaattaccaatgtacaatcaggttttaaaatgtaatacttaaatttccattcactatgtaaaattaaaagctctaaaagac

SEQ ID NO: 124109 - DNA, 1213 bp, Homo Sapiens
  misc_feature (479)..(488): n is a, c, g, or t
ggaaagttcagttcagtttattacagtgtcaagtagatttacaactattgcacttatcattctggtgacagaaggccaaaactgaagattgagattttcctctaataaagataggttttcagaatcttcaatataagatgttaaaattataaaggcaaagatatatacctcatgttccattccatatccttcctgctgttgtacagtttgctgcaaatgataatttaatttggataatgctttaaatcattgatttctcatgaaattacttttgagtgaaatttgacaagaattttctttatactctcttctttaccaaaacgtattagaagtccccatagtccaaaataaaatgtaaccatagaatggggagataactttagtcaaagaccaagtaaatattaccttctttgcagaactccaggttgtagtcacgtaaaagtgtggccacttgttgcttaactttttggacaatgggnnnnnnnnnncaataaaagctaaaatgtggtccagcatatgaaactcttctcaaaaacagaagaaagtcatgaccattgttgggaaagtgttttacatttccaatgaaattctattccattgatctgtttggatgattgtcttcaacctatttggctctagcccataaattgtaattgattcagtcatgtaaagaaccacttttatcttaagcttagaatttataacaatggaaagcaggaaagtggtttttcattcactctaataattgtgcagggataagctagagtatataataaaactaataagtaccagtcttctgtcctcttaaattatttttcattctgattatattacaaagaaatgagctgtggaggtttggcactgttttccatcttaacagttgttctgtattgtaagattttatatgtgattcataatgtactactataacaagacacagtttttatatattactggaataatgcaaagaaaatgaattttcctttgggtccagtaattgtcaaaggaatgattgcagattcagaaaatgtgctttgtaataaccctgttaacataaagtatacactgaggaaaaaaataagtatggcacatatatggaaggattagttgtattagcaaggcatttcagggatggttttggttctttagactaagatacatcccccggccgtaatggccgaattcccgggcatatgtccggtaccgtcgactg

SEQ ID NO: 124110 - DNA, 1517 bp, Homo Sapiens
  misc_feature (164)..(183): n is a, c, g, or t
  misc_feature (186)..(186): n is a, c, g, or t
taaatttggtaaaattggaatttccaggttcaagttaaaaagaaaccccacttttatattcttttaagctttaggaatttttataaaccaattgggaaagccagggaaaagtggttttttcatttcaactcttaataaattgtgcaggggataaagctagaggnnnnnnnnnnnnnnnnnnnngtnccagtcttctgtcttcttaaaattatttttcattctgattatattacaaagaaatgagcggtggaggtttggcactgttttccatcttaacagttgttctgtattgtaagattttatatgtgattcataatgtactactataacaagacacagtttttatatattactggaataatgcaaagaaaatgaattttcctttgggtccagtaattgtcaaaggaatgattgcagattcagaaaatgtgctttgtaataaccctgttaacataaagtatacactgaggaaaaaaataagtatggcacatatatggaaggattagttgtattagcaaggcatttcagggatggttttggttctttagactaagatacatccaatttagacccccttcaaatccttagacaaatgggaatcacttggtaacataaagattattttggtgggcaggggctgatttcaccatgtgcttacaaatgctccaactagtcagtaaactatcccatctgaaggaaggatttgctctggtaataaggctgatatgctcaagctgtaagaattaatttgaatatcaaaaatgaaattgagattgctaaccatgtcctgatagttacagcatgtagaatattaaatgtcctcttttttaactaaagtaaagaaatgaagaagcatggttaattcacttgtgctgattaaaacagatgtccacgtgcaacttctgtgtgtgagcctccccatgctgccatgccaccagatgctttcccttcaccttgctaatcccactagatgttttcctcggtagaatcctagctcatgggtttccatgtgcatgtttctattgtaatgaaaattaactacaaaatctgaacgttttctgctttcagaaaattctagtgtaccatgtacagcttagatatttctttttcagttaaaaaaaatagtgcaaaaacatatctgatagtcaaggtgatagttcaagtgagttcttgtgccaaggaacacagacaagcttctcctctagctgatctgtagaaactgtatgtagtttttgggaaatattccagattttcccataagttctccactcatccagtcatcatctacagattccagctctgttattatatctccagccttgaaggaaagttcatcttcattctcccctcggaaatcatataaggctttggccttcctccccttcggtactatggccaacatactttttgcctcagctgggcagggcctcacaaacactgctgggaagatcccctacctgtcctgcagtctgccctgcaccagtcagaatccagacgttccagaatctggatccggt

SEQ ID NO: 124111 - DNA, 993 bp, Homo Sapiens
aacaactgggtgcggaaaacgtgaaaacactggttacattcatagggtttttctccagtgtgaattctcatctgcagtctaagggatgagggatcactaaatgctttcccacagtgattgcattcatagggtttctccccattatggattctcttatgaatagtaaggtaagatctgctactgaaggacttcccacattgactacagtcatagggtttttctccagaatgaattctcttgtgctgagttaggttagatttcgtgctgaagactttaaaacactgattacattcattgagtttcactccacgatgacttctttccgtttttacacctttagactgttcttttctgaaaacattcttcttaggagttaaccatttggctttaagtagagtctccaaatctggacaggtgcttggtagaattcctctttcctctgtcaccaccttcttgtcttgttccaactgggatatcagactgggtttattaacacgacaccctagtgaggccaggttcctgcagttctccagcatcacgtccctgtacagtgtcctttgggcagggtccagcaatgcccactcttcctgggtgaactccacggccacatcctcaaaggtcaccaagccctttagccagcttttcaggagctcattaaccagctctccgccctgtgtgtgtccttctcgctgagaggctgggaacagggaagacagagcggcagttgggggcaggacgacagccgccatcctgtgactccgacagcaacagggcagccgggaagcaggacgctcctcctttatcccgcagcgctctcaggacagcaccctgatcatacagaagtccacggatcagtgaggataggtgaaacttgaggctggtttcaacacaaatctgagcttgaattatacttttttcgtggaatgaagcacctctcgcggagaccgaaagattctcccagacgctgcaagcgcggctcttctccctcgtgcc

SEQ ID NO: 124112 - DNA, 1365 bp, Homo Sapiens
ggaaagaaacaacaatgcagtatttattttatacagctgacctgggcacattgtgaagtaagctataaaaattccaaataattatctctaaagcaaatcctttgttagttacatggctttacatattaattactctggaaagtttttgaactctgtttagtagcagatctcctttcttgatagtttcttggtactgccagttcttgctatcaggtctgttggtttctactatttcattcactttatctattttgcagtgtagtctcccggcagcaataaacctggacagttcctgatcaatgaattccacaccaacaccaaacgcttctgccatatagccaagggttaatgacctatatgattccagcagctgactgtatgcatgaattctcatttctcttacatagtatcgataatgaggggcaaaaagccagtcctttttcatttcctgttccacaaccgctaatgattggaagaaaacagagtaacggcattcatagagtgaaaacagatactgccgaactgctggaagactgtgcaacacttcaagaatctctgctcctttaatgaccttttccctgagatctggtctttctaaggcaatcatactgacatagacagtataagtcacaaatgttttataatccatgagttcataggatgtaaatgttgaaacagtgtcaaggaagagttcagctgcctgtttgaaatcacgaatagccacacaataaagaccctgatacacttttaggcggtttctcctgtcccagtctcctccttcttctattaagcttttggccttttctgtgtttcgtgtgatgagatcattatccatataaaataagccaatcctaaggagatagaatacaatatccaatcggtgacccagggccacagttttgtcatatgtcttgcgaaaggctgtcagagctccctctttgtcacctatccggcagaggtactcggcctttgccatcattgcatcgcgaatttcgctctctcctagattcttctctgcatcttccagctcctcatccaaacgcttcaactcatcttcatttgccttcttcattttattgagtaggtccacgtctatctgccagtcgagggatttgcacaaggcttcatagtaaggagccatgttgttatcgcggacggccgccatcagctcgtcgcgcacggcagcgtctccgcggtgctcgggcaggctgagcaggaagcgcagctgcgcgatacgcaagtcggggttcttgggcagaccctcctcctccaggttctccagcggcatcgcggcgaaggggacagcggctgacaggacacaacttggttacgaccggccctcgtgccgaattcgccacccaggcc

SEQ ID NO: 124113 - DNA, 874 bp, Homo Sapiens
  misc_feature (379)..(379): n is a, c, g, or t
aaaccacattttccaaagagaaattcttcgtggccttcctttttaaagagagccccttttttccccaggaaggaatcctggtttctttttctaaagggccaattccatttcttggcccataagaccaggtaataggtccacaaaaggtttttataattccaataagtttcataggattgtaaaatgttgaaaaccagtgttcaaggaaggagttcaagctggcctgtttgaaatccacgaatagcccacacaataaaggacccctgatacacttttaggcggtttctcctgtcccagtctcctccttcttctattaagcttttggccttttctgtgtttcgtgtgatgagatcattatccatataaaataagccaatcntaaggagatagaatacaatatccaatcggtgacccagggccacagttttgtcatatgtcttgcgaaaggctgtcagagctccctctttgtcacctatccggcagaggtactcggcctttgccatcattgcatcgcgaatttcgctctctcctagattcttctctgcatcttccagctcctcatccaaacgcttcaactcatcttcatttgccttcttcattttattgagtaggtccacgtctatctgccagtcgagggatttgcacaaggcttcatagtaaggagccatgttgttatcgcggacggccgccatcagctcgtcgcgcacggcagcgtctccgcggtgctcgggcaggctgagcaggaagcgcagctgcgcgatacgcaagtcggggttcttgggcagaccctcctcctccaggttctccagcggcatcgcggcgaaggggacagcggctgacaggacacaacttggttacgaccggctgcggcccc

SEQ ID NO: 124114 - DNA, 885 bp, Homo Sapiens
attggggggggaattatatgtctataagggaagggcccccccaaggaacgggggtgaaaaagggaaggaattgtccccagggaaagtgaaagttggagaaccacttggaagctggggttccccaacccaggcgggggggcaggcctggccaggaggtagggggtgtcacggcttctcccaggctggacattctcctatgttgaggctgcccacatcttgttaggtgccctggaggccccgggagatgtcctcatacatggagcagtcgtccaggttcagggccttcataaaggttttcatcttcatattcatccccggcatccaacccgagcttctcgttctgccatcgtttcctgaacagcagcagcgtcccaggcaccaccgcgcagaacaggaggatgatcccctcggctgtgatgattcggttcttggtgccctcccccatgtccaggaagggcctggggggcggctggcgcacgcggaggtaggtgccgcaggactgctggtatgactcgttgccctcctggacccggcacacgtatatgcccccatggctcttgttcacattctggatgatcagcgtaccattggggtcctcgcccgggcccaagaactcagggggccacgtgtagttgccatggaggacgcgccaccaggtgacgttggcgttgttgctgctattgtgcgggcattggaagtgggcgtcttcccccaggctcaccatcaatgatgctgggaccttgtgcatccacagggcctggcacccagggcccaggtagacagcagacagcaggaagaggaggaagatggtggcaggcagagcttggaggactcctggacccccaggcatcttctcccagtgggttggttagtttgagttgcccc

SEQ ID NO: 124115 - DNA, 993 bp, Homo Sapiens
ttgcagttgggaagaatttattatcactaagtggccctgacagatcagggaggagggggtgacactaacgaggctgctacaatcagctcccctagaggcagcgattaagggctcattacccgctggggtgaggggagcctgggaaaggcagcggggcggggggattaggttaggaggtggggcagtttagagggaagaagagtgggacacccccaggggagtccaaggaggcctggcctggagaagagtgaggttaccctcccaccccccactgggggaatatgactaaggaagcccccagaagggctgaaaggagaatgtcccagggaagtgagctgagacactggagctgggtgcacagcaggcgggggcagcctggcaggagtaggggtgtcacggcttctccagctggacatctcctatgttgaggctgcccacatcctggtaggtgccctggaggccccgggagatgtcctcatacatggagcagtcgtccaggttcaggccttcataaaggttttcatcttcatattcatccccggcatccaacccgagcttttcgttctgccatcgtttcctgaacagctgcagcgtcccaggcactagcgcgcagaacaggaggatgatccccccggctgtgatgattcggttcttggtgccctcccccatgtccaggaagggcctggggggcggctcattggggtcctcgcccgggcccaagaactcagggggccacgtgtagttgccatggaggacgcgccaccaggtgacgttggcgttgttgctgctattgtgcgggcattggaagtgggcgtcttcccccaggctcaccatcaatgatgctgggaccttgtgcatccacagggcctggcacccagggcccaggtagacagcagacagcaggaagaggaggaagatggtggcaggcagagcttggaggactcctggacccccaggcatcttctcccagtgggttggttagtttgagttccc

SEQ ID NO: 124116 - DNA, 728 bp, Homo Sapiens
  misc_feature (623)..(623): n is a, c, g, or t
  misc_feature (651)..(651): n is a, c, g, or t
ttttttcagaaaaggggaaaaatctttaattgatttctcaggtaatttttttccagattgtacataaagtgttcttatgttctctatttggatgtttcaggagacatacaaatgaaatacagtacatagacaaatgaaatgctaataagaagtaggatgatattaaaatatccttactttgcctgtatggaacaaaggcagtctactccatcggggaatcaaagcaaatgtgaataagaggtttccaccttgcaaaactgtgagcttcatttgccctggagagaactactaggcaaggcttcacatgacagtacctgtagggatgtccatggggctgtgaagcaggtgtattgtatcgaacatgcagctgcaatgaaggcgtggagctcaggagaagcagccactgacaatgcccctcctggccgcagggtcttctgtgcagcctcccatggatcaatataccagttagttaaaacacacatcagtattttctgtcctttagcaacgatgatgatatttgccaccagcgagtgtgatctgtgaggcaattttaaaatgcagtcctgggattctactgtattgaaacacctttgattttctatttgaatacttccaagctttgntattatgccaccatgtgctcgtgatcgntagaattaattttaaactaaatattcttcagtatcccttttcatatatattttcacctcatatacatagtttgggat

SEQ ID NO: 124117 - DNA, 713 bp, Homo Sapiens
gccccttttacaggggagacgtaaagctgtcccagttatcaaaaaattcaaatctccttttcttctgtggactggctgtcaatgagctttcatccagggtgtctcccatgttctgggaactacttccagatgttcctgaagcacttcctgggtcaaaggactctgctgcttccaggagctccatatcacttccttctttctcaaaggacttctggaataggtcgtagatcttctgctgctttgggtccttgtagaggtaatcagtggattctgtcatttctgaaaaattggtctcagaaagcccggcttctgccagaactttaatcttctcttgaatcaggggccaaaggtagtcatcagctgtgccctttgccacgaggtagtgaatgcccacggagctggtctgtccaatgcggtgcacgcggtcctcagcctggatcagcacccctgggttccaaaacagctcagcaaacaccaccaggtcagccgaggagaaggtgaggcccatattggcagcggtgatggacagcacggccacagcatgcctctccgacagttggaactgctggcacaggtcctcccgctcagctgatgaggtggagccatcgatgcggatgtgctgcacgcgctttctctcaagctcttgcgtaattgcgtccaggaccaccttatggtgtgcaaatactaaacatctctcttgcactttccagaat

SEQ ID NO: 124118 - DNA, 1127 bp, Homo Sapiens
  misc_feature (30)..(30): n is a, c, g, or t
  misc_feature (116)..(135): n is a, c, g, or t
gtcgcgttgcccacccgcccccccctcccnttatggtgccctctgtataaagacggtcagtgccaagctaaaattaacctcactaaagggaataagcttgcggccgcctgctaggnnnnnnnnnnnnnnnnnnnncctttcacaaaatggatttttattgtggtcatacatggtttctcagtgccacagaaaattgctatgtagggacaaaaaatttttggatggctctgtaaagaaacatggtaggttttcagaaatgagttgtgcaggaatgtggttaatgaaaagcagaaagggttaagggaagagaaaggaagccaaggagtgtggtatgtacatcaaatgattactttttaagcccctctaggctctgataaccctttccccaagtcagatcccaacaaaattcatcagtaactgaagtgattgtgctaacagatacataaagactaccggagaaaagtgggttgagatgggctcagacttattgttaggacaactctgggagtcttgtgtctgtgccaaccacgtatccgtgggctacctggagatgagttctaacaaccagcacagaacccaaagctgctctccaacacctttgtttagtagggaaaacctgtagtggggacaagagaggaagctgtgcccttcccccaaccaccgtttcatcttctgctcgctgaccttgatgtgacttgagagctctccttgcttcggctgtgcagtccagaagccagaacttcctctaggaaacttttcgtgttgtgcactgtggtgcctcccaggacaatcctcactccaggagtggtgcggttcaggttataaactgttagagcctcttcataggtggctcctccaattacaaacacaatgatatcctgaggtaaatggtacagttcttatgagcatttactgcaggaaaaaaggcccatggaaaaggactgctgccttcagcggaaaccagaagaataagcctgtagcaagcgaggattctactacaatttgtataacccatgcaaaagtactttcctttttgaattgactgattctggaattgctgatactataggcccatttgctgcacctaatgagaaagttgcttgcctgtatcagagacaagaaatccg

SEQ ID NO: 124119 - DNA, 936 bp, Homo Sapiens
atcagactgggggttaatttagccagaaaagggggcgggaagggctgtagggtacttgtcaattcgccgccatgaacgtggtttttgctgtgaagcagtacatttccaaaatgatagaggacagcgggcctggtatgaaagtacttctcatggataaagagacgactggcatagtgagtatggtatacacacaatcggagattctacagaaggaagtgtacctctttgaacgcattgattctcaaaatcgagagatcatgaaacacctgaaggcaatttgttttcttcgacctacaaaggagaatgtggattatattattcaggagctccgaagacccaaatacactatatatttcatttatttcagtaatgtgatcagcaagagtgacgtgaagtcattggctgaagctgatgaacaggaagttgtggctgaggttcaggaattttatggtgattacattgctgtgaacccacatttgttttccctcaatattttgggttgctgccagggtcgaaattgggatccagcccagctatctagaacaactcaagggcttacagctctccttttatctctgaagaagtgtcccatgattcgttatcagctctcatcagaggcagcaaagagacttgcagagtgcgttaagcaagtgataactaaagaatatgaactgtttgaattccgtcggacagaggttcctccattgctccttattttagatcgctgtgatgatgccatcaccccattgctaaaccagtggacatatcaggccatggtccacgaactactaggcataaacaacaatcggattgatcttttcagagtgccgggaatcagtaaagactttagagaaagtggtcctatctgctgaaaatgatggaatcctattgctaataatatggtacctgaaacttgcctgaaaatgggtagcaata

SEQ ID NO: 124120 - DNA, 376 bp, Homo Sapiens
atgaaaatacaaatttattttgccttcttaatgctttcagatcaaagtgttctgcatctgcctgggcagatggaagctcagtttatgcagtacctttgtaggtcgaagaaaacaaattgccttcaggtgtttcatgatctctcgattttgagaatcaatgcgttcaaagaggtacacttccttctgtagaatctccgattgtgtgtataccatactcactatggcagtctgcggcctgaagatgcctgaggcccggactctcagacccctattgccctttggtgctggaggcccagcggcaggctgaagcccaagagagtggagcctcgcgaaatgaggaacctggcacaaggtttgcttggaagcaggaacgacg

SEQ ID NO: 124121 - DNA, 386 bp, Homo Sapiens
ttttttatgataatacaaatttattttgccttcttaatgctttcagatcagagtgttctgcatctgcctgggcagatggaagctcagtttatgcagtacctttgtaggtcgaagaaaacaaattgccttcaggtgtttcatgatctctcgattttgagaatcaatgcgttcaaagaggtacacttccttctgtagaatctccgattgtgtgtataccatactcactatgccagtcgtctctttatccatgagaagtactttcataccaggcccgctgtcctctatcattttggaaatgtactgcttcacagcaaaaaccacgttcatggcggcgaattgacaagtaccctacagcccttcccgcccccttttctggctaaattaac

SEQ ID NO: 124122 - DNA, 744 bp, Homo Sapiens
  misc_feature (646)..(664): n is a, c, g, or t
  misc_feature (676)..(696): n is a, c, g, or t
gaggaggctagtaaataaggaaactgagagaaacatggagcattattgatttattagaaaaactagtaaatgggtttcctctggttggtggaagcacggttgagcaggtggaggacaggacccagctggccccagggccagccccagattgcatggtctgtgcccaacagggttgcattcctctgcagccgccgcctcctcatttcctccctgagcttgtttgtccaagccaccaagccatgtggtcccgctggcttcatcctcctctggattcctgcccccctcccatgaagggaggaagaggattcagggtcagcctaggggaccctggctccctccgataggcaggaaggaggagggatgcggaggagaggctgagccttccacgggcctcctgttaggggtgttggtggaggccaggttggggagggaagcctaaggaccctccacacctcccacagccagagtcagttgaggctgggacaaaggggaaggagagagggaaggaggaccgcctgaccttgcccagaaggagcttcctctaaactgccctgggaaggaagcctggtatgctggtgtggactggagctgtgtcaacctcgtttgggaatactgtcaaaagactgtagagtagaataaggagagnnnnnnnnnnnnnnnnnnnctcgagacagtnnnnnnnnnnnnnnnnnnnnngtgccgattcgccacccagcctcgtacctagccgttagtggttggagg

SEQ ID NO: 124123 - DNA, 1568 bp, Homo Sapiens
  misc_feature (73)..(134): n is a, c, g, or t
tgccgcgattgtcgtcgttgtctctcgcgtgaactcgtctgtgtgctgcgcgcttccgttccgcgcgtgtgcnnnnnnnnnnnnnnnnnnnnnnnnnnnnnnnnnnnnnnnnnnnnnnnnnnnnnnnnnnnnnntctgcgacctgcctaggctcgccgcgtctatttccgccccctattgggcccgcgttttctcccctggccagaaagggggcgcggcccccggtgcccgtgcctcttttagccctttgttcgcccccgctctagggcccgccggtctctttcgtgttgtcgttcgttgtccgaagggattggatctctgttttacagcagtgggccggcccgttacagaaattggcgtttcccaatattaaggaaccggttactaaacgtgaaaaagggaaccccagcaaagaggaaggagttggggaggggccaccaaagcccctgggccccatccatagccctgacctgaaccgcgcctagggcctccaacctgggacctgcccggcaggagacggggggtagccgaggggccccagctgggcctgctacttcctttgggccagacaggaaggggtcaaaagaagggcggggagggggtcccagggagccagagcccacgagccatttattgccatgttttaaaattcgtgcaaaatatctgaagccctggacagagaatacaaagtgatattttcccaagaaacataaaactaggaaaagaggtgggggacattttcccaccagagctccccccacgccaggccccaagcagggtgaggcctccaacccggccagctgagcagggaggactaagagctacaatctggaccagggaaggaggggtggaatttgcaacagcgtctcaactaccaacgagaggaaagccagtcaactgtacaagtctcctatcaactttttaaaaaaagagaaaagctgtaaaagtcaggccctgtgggtagggaagcggccaagtccccagccagggccggaatccggagtgggtgccaggcggagctgctgcgaatgcaggcacggcgggccgtctggccagaggctgatgcaggtgggcggccttggcaagggtagcctagggctggcgccaccgctaatcaccaccctcgaagccctcctcctcttctggaactgggtctgcatcccagcatgtgatgtcgatctctggaggcttgttgtagaacacaggaggcggagccttggcacagagctcttccgattgggcaaactcctcctcctgtgattgactgaagtacccctcactggcctgggtcccctccttctgggtggtctcgccattggttagcaggtggggctccggctcctgctcttgctccagctcctcaagggctgagggcagagttggggtctggggggcagccaggggctccccttccacttcctctgggtcacagaaggtggctggcggctcaggcagctcatcaaagttgagaagggtggcacagccttcgcctgctggcagcagtggctccggagccacctcatccagcaggggcacctctgccagggtgacctcagtacccgagggtg

SEQ ID NO: 124124 - DNA, 1046 bp, Homo Sapiens
  misc_feature (159)..(175): n is a, c, g, or t
  misc_feature (702)..(702): n is a, c, g, or t
  misc_feature (724)..(724): n is a, c, g, or t
  misc_feature (774)..(774): n is a, c, g, or t
  misc_feature (781)..(782): n is a, c, g, or t
  misc_feature (844)..(844): n is a, c, g, or t
  misc_feature (868)..(868): n is a, c, g, or t
  misc_feature (970)..(970): n is a, c, g, or t
tttcttaataaatttattcacaaaaagtgatattgcagagggtctgggggctgtacatgggcaggggcttggtgagctttgtacatggggctgggagacaagggagcctccaggtggaagggtattttttaataaaaaaaataatggagctacaaccannnnnnnnnnnnnnnnngattaaaaagacacaaaaatagacgtctctgaggtaaacggggagcctggggcttaagggtgtttaaagggcttcacaggtgccagagcttagaggtgtcacaggcaccggggtggctcctgcatcagttggtagaacagcacgtagccctcgctggatgccacctggttttcactgacaggggagacacgagagtcattgtagacatgccaaccagtctggcaccggcacagggctgtgtagtggccatagtggacgctgcctgagtggttgcaaagggcatacagctggtatacaggacttccggctttgtcactggcaaagtcccctaggctcagtcgctgcagtggaaagtctacacctactgaactttttttgatggagcctcgggaggcagaaaatcgattcagatggagcacgaggattcgagggaatctttgtactgtcaactttttggtacttcgagttttctgccgacatcggtcacacactggggcattctccgactctagctcttcctccttaantgaaaagggttgaaacaatccngcagagacaccttgcccccagcaatcctttcttggggatgggcaggacangtcacannaactcggaggtcgtggagcgataccacaggctggcactgagacactttcactggccacaaangtcacatctgctgtctctcctcangtacgttcacataggtggtcggtcacacactactcaagtctcaaacaaccctctcgcggggggaaggaatggctcctccaatcttgcccaggcaatcccaangagcgataatctacagtcaacgttcctttaatttttcgccaatccaaaacaacggaaaatttacgggggcagatgg

SEQ ID NO: 124125 - DNA, 875 bp, Homo Sapiens
  misc_feature (52)..(98): n is a, c, g, or t
  misc_feature (535)..(578): n is a, c, g, or t
caaacaactttttaacgacattttatagattaagtaaaaataccagtattannnnnnnnnnnnnnnnnnnnnnnnnnnnnnnnnnnnnnnnnnnnnnnacattaacattacatgcttctcaggacagaagaattaggacatgttccctcctatcaatttaaaactcgatcacaatttaaaatcatggaagaaaacttgcttcctttattttctgcttttagacttcaagtacaggaagttatgaaaccaggatctaaatgtggaaaccatctgctatgcaccaattataagggactgccacaaatgatgagtcaggggtcttctgaattcttacataggtctctgtaaccctacaactgtgtcaaccttctacctgagatgagagggaatgatgaagcatgacagtgtgtaggtttcatgtggacgttcacattgacattggaacaaaagcaaacggaaaaatgtcttcctagagcaacaacactgatcataaaatcaccctgggaggaggattcccttctcccctttccttgcnnnnnnnnnnnnnnnnnnnnnnnnnnnnnnnnnnnnnnnnnnnntcagggtgaagcacctctggcgatgatcagcatacagcaagggacagagaggtagcgtttccttggtgacagctcctggctgactccgatgatttcaaacacaccctcttctgcaaaaggcactcacatattgtctgtttataaatcatacagtgggattccatacatgggagtttctcctacaaatataaaagagataagctgaggaaatggtataacaaagaaaagcgtataagaaatacacattttggataaatatgcacttttcttttttaaaggacaatcaatatagtagtt

SEQ ID NO: 124126 - DNA, 674 bp, Homo Sapiens
  misc_feature (51)..(98): n is a, c, g, or t
  misc_feature (534)..(577): n is a, c, g, or t
  misc_feature (609)..(609): n is a, c, g, or t
  misc_feature (653)..(653): n is a, c, g, or t
caaacaactttttaacgacattttatagattaagtaaaaataccagtattnnnnnnnnnnnnnnnnnnnnnnnnnnnnnnnnnnnnnnnnnnnnnnnnacattaacattacatgcttctcaggacagaagaattaggacatgttccctcctatcaatttaaaactcgatcacaatttaaaatcatggaagaaaacttgcttcctttattttctgcttttagacttcaagtacaggaagttatgaaaccaggatctaaatgtggaaaccatctgctatgcaccaattataagggactgccacaaatgatgagtcaggggtcttctgaattcttacataggtctctgtaaccctacaactgtgtcaaccttctacctgagatgagagggaatgatgaagcatgacagtgtgtaggtttcatgtggacgttcacattgacattggaacaaaagcaaacggaaaaatgtcttcctagagcaacaacactgatcataaaatcaccctggaggaggattcccttctcccctttccttgcnnnnnnnnnnnnnnnnnnnnnnnnnnnnnnnnnnnnnnnnnnnntcagggtgaagcacctctggcgatgatttcanacacaccctcttctgcaaaaggcactcacatattgtctgtttantaatcatacagtgggattcca

SEQ ID NO: 124127 - DNA, 577 bp, Homo Sapiens
tttttaaagggagagtgaggctttttattgtgtatgaattcacgtggtatcgacaactccacacaatattaaaacactgcgagaaagtgggtgcggcacacctggaattttaaaaaagtcagaaataaaaacaaccagacatcccaatgcagatggcatagaacctgctagaaccacaggcggcggctggaaacaggagacaggtctttacgaaggttagatgggcagcggttccgtggacagaggaggaggcgcggctggccggcatatggcttctgtgcagagggcctggcctcaggccgtggactttttaataagtgaccccttgaggaagggcgtggtggctccaccttcacccggaagcccccccgggtcactcacgggcggacaggtgtgtgacggccctctcctacctgccccagaacttgggcaggacgggctgttaacttggagatggatgcgtggcctggaggcctaacgttgcgcctcggacacggtggccggcccgtcaaagggaccacgcagaaggagggaaacaggagcaccttccgccctggcccagccgccccgtttatgt

SEQ ID NO: 124128 - DNA, 707 bp, Homo Sapiens
  misc_feature (689)..(689): n is a, c, g, or t
tttttatattttgccttgcacaaaacaaaaatttattgggagaaagatggctgatgggaggcaagatctggattcaggaatcctcaattttagctctcgctctgtcaccaaaaccctccgtccctcccagagcctcgaggagtttccccttgtgtaaaccggtatcgcgtcccttccagctctgacatcctgcggttctagaatacccattgattgaaagagctgtggccaaacaggaaggacagagtaagagccgctgacaaaggattctgccaagacagaatcccaaggtcacaggagagaggcttggggcagtgaaagccctctcgggtcttggctttggaagtgtggactgtaccagcagatgggcccttgggaagccaacagggaacaattcaaggctggagagaaaaaggccacctttgacccagcagaaggcagaggcgggagaggagggtgaggacgtacaaggagcatcgcaggcgaggaaacaacggccaggacctaactgtggtgggaactgcctttgtctccacacactcgcaatcaacatgcgtatttgctattctcaaacaactcccttccacccccttaggctgaaaggacaaactcatcagagttgaggagtacctacctgatgaagctgttcatgcttccagcatcaaactggacgtttactgtctgcccanaagcccctcgtgccgaat

SEQ ID NO: 124129 - DNA, 1284 bp, Homo Sapiens
ttttttcaaagccgcgcaatcatctgcattttatttgcacctcatttgcaagttgttaatttgcaactctgctccttccactccaggttccttctctcccatcacccctcagattccccagtggcccaggaaaaaatatcttggtctttgccaaggtagactcagccttgtcagcaggcctgtcctgtgttctcaggggaggcctttacccaaggccacaacaacagcaggaatcccgagtaagacgccaccttgacggcagggaaggctggatcttttcacagggcagaactgatttgatgaggtgaacagtaaggtgagcagaggtgggaaaggccagtgggtgaatgcaggaacagcaccaggagctagagcccaactctggcctgtgggctgtctcccggtcctcagaggcgggacggggttcctccacccaccaccactgtttccccagtgatgtagctggcatcttcagagcacaggaaagacacgatgccagcacaatcctctggctcgcctaaccttcttatccgcagggtttctttcatgctttcctctttttccttgtccatccagagcatcctgctgaagctagtcttgataagtccaggtgctaggcagttcaccctaatgttccttggggccagctctatggccagggtcttggtcaggcccagcaaggctgttttactgacattgtaaggactgaagccaggagatggactgaaggctgctatggaagacacgatcaccactgagccgcctcctcgtttctccatttctggcaccactgcctttgtcatcagggctggggccttcacattaatgtccagagtcttgtcccacacctcctcagtgacatccattatgcttccaaagaaagggttgacagcagcattggagactaggatatcgatacctccatgaagcttcacagccgtggccaccagccgctcccggtcctccgccttccccacatggcacacggtgcccgtcacgctcagcccctccccctgcagcgtggccaccgcctggtccacattctgctgcttccggctgctgacgaccacatgggccccgtcctgggccaaacgccgggcgatggcgaagccgatcccgtcggtggaggccgttaccagggccaccttatttgcgagcgggtcccggcgggtcatcccggagctggccatccgcaccgaattccaagcccgggcacagaggcctagcagccccgccttgtgcatggatcagaccagcaagttctgggttccactccttccagcg

SEQ ID NO: 124130 - DNA, 545 bp, Homo Sapiens
gggattattctccaactttaatatatggacataatagaaaggcacacaataaaaacgtgctggtgggctggttgggtatgcagaacacactgttatgttttagttaacatcactgcgttggatctcaccaatgctgtccaggaaagcagggaaggaggctcaggctggctcccttttccacctcctggctctgtgcccatttccctgcagctcactgtggccaccagccgctcccagtccttcatcttccccacatggcacacagtgcgcgtcatgctcagcccctccccctgcagcgtggccactgcctggtccacattctgctgcttccggcggctgactaccacgtgggccccgtcttgggccagacgctgggcgacggcgaagccgatccagtcggtggaggccgttaccagggccaccttatttgtgagcgggtcccggcgggtcatcccggagctggccaaccgcaccgacttccctgcccgggcacagtggcctcgtagccgcgccttgtgcatggatcagaccagcaagtctgggtt

SEQ ID NO: 124131 - DNA, 1341 bp, Homo Sapiens
aagtaatcatgtgagtaatttttagtaaaattaaaagcacttggaagagatacttagaatcaaaacaagaaaattctaaaaaatattttaatacttgaaaacttctaaaacaaaaggtaaggtaacatgttctttcaaaagtgaatttcacatgcaaaccattaattatatttattttactgtgagataaaagcaaaacataacattcggagaaagagaccagtaactgacctatttattttatattatattaatgtgaatcctcattagaaatgtgataacgttattgcacaaacaaaaccgtgggcagaaacatcccagcaatgcaggggcgcccataccgggttacaagggatgtccagcatgtgtttccctggaacactcagagtctgcacttttcctgcaaatgggaccatgtctgattatttattatgaaagaacactttaccgaccatttttttctcagttggtataatgtagaaataggcttttttacatccattaaatagtcttgaaaacatttttgcactaaatcaaacgagctgatatcagaaagcaattgccaccttccacctggagtaatgtgtgcatttttaatgctatgattatatgcttctttagggtgacacagtttctcttctggcttctataacacctgcattaatcttccttttttgctgttaaacaaaacttgctggcattatgcatcccatccactgggggtgggctgggaacaaacaggtttcgatggttcttcacaaggagacaaacaatctgaattatcttttacaaacagtgaaaatgacaagatgtttgtctctcagtatgcattttaaaacaacataaatagaatacacttcttttaacaaagcctggccttggtggctttctagcttgcagtctaagtaacgtttggtttgcagaagggattccctgggagacggctgtgtggggcaacctcacttactggttgtgtgttctccatgggaaaagcaccagatggggaagcccaggatcagatgtaagctgcaagcttctttctctcttcaaactgcttgtccactgccagagacagggcctggaggaacccctctatggtgacggtgggggcctggacatacagcgcatgagccagaaaggggagttttctcaggacccggccgctgaggccctcgctcttccttgaaatgtcattcaaaagaaggctcaattttgacacgttgttttcaatgaagccaatcatctctagctctcggagggtcagcagctgctggcgagggtatatgatctgacacgcacatgtcattgtgcccgtggcgacggccctcctatcccgggaat

SEQ ID NO: 124132 - DNA, 798 bp, Homo Sapiens
ggggatttgattttctctggggttttcactagttccggcctttggcgctctatgacgtcaccgaagtgacggagcggaaaagcgcgagaagcggcttggttccttgtacgcagaggcggtagtgacacaggcacaactgagagtggcagaagctcagctgacaaggactggggacggcggtgtccttgtcttgcctttgtcgcccccgcccctctcttccctggctggacttgcggagtccccgccgaagaacccgaggagccatatattgaagaccatgtctggaagcttctactttgtaattgttggtcaccatgataatccagtttttgaaatggagtttttgccagctgggaaggcagaatccaaagacgaccatcgtcatctgaaccagttcatagctcatgctgctctcgacctcgtagatgagaacatgtggctgtcgaacaacatgtacttgaaaactgtggacaagttcaacgagtggtttgtgtcagcatttgtcaccgcggggcatatgaggtttattatgcttcatgacataagacaagaagatggaataaagaacttctttactgatgtttatgatttatatataaaattttcaatgaatccattttatgaacccaattctcctattcgatcaagtgcatttgacagaaaagttcagtttcttgggaagaaacaccttttaagctgaatggagaaaattccaaaataaattatatcaccacaatggtgtatactcaggaatgtgtacattgtaaattacttgattaaatagcctggaaatcttta

SEQ ID NO: 124133 - DNA, 963 bp, Homo Sapiens
  misc_feature (90)..(90): n is a, c, g, or t
  misc_feature (104)..(104): n is a, c, g, or t
  misc_feature (138)..(159): n is a, c, g, or t
  misc_feature (171)..(171): n is a, c, g, or t
ggaaagggcttaaagccacggaagaaatccgccctgaaaccctggggagggccggaagggttgccagtgaagccaaagatttgcgcccantgccactcccaagncttgggcaacagagtggagacttctgtatcaggnnnnnnnnnnnnnnnnnnnnnnccatgattatgnataatgaactctttataaataacactgttcacaaggaaataccaattgatctattgatacgtgacatgagacagaatgtactatttttaaatataaaaggaatttcattaggtttagataacgctgagcataccctaaagttttccaaggctatgttaatcaagtaacttaccatgtacacattcctgagtatacaccatttgtggtgacatcatttattttggaattttctgcattcagcttaaaaggtgtttcttcccaagaaactgaacttttctgtcaaatgcacttgatcgaataggagaattgggcttcataaaatggattcattgaaaactttatatataaatcataaacatcagtaaagaagttctttattccatcttcttgtcttatgtcatgaagcataataaacctcatatgccccgcagtgacaaatgccgacacaaaccactcgttgaacttgtccacagttttcaagtacatgttgttcgatagccacatgttctcatctacgaggtcgagagcagcatgagctatgaactggttcagatgacgatggtcgtctttggattctgccttcccagctggcaaaaactccatttcaaaaactggattatcatggtggccaacaattacaaagtagaagctcccagacatggtcttcaatatatggctcctgcagtgggaggccgacaacggagaacgcaatgtcagtttccgcggaagagacccgcgccccgaacctgtagccagaaccctcgtgccgaattcgccacccaggcctcgcta

SEQ ID NO: 124134 - DNA, 477 bp, Homo Sapiens
tttgacttgcttttgtaatttatttgagttatttccaagcgacagttacaaaagttaatttttataatactcttgataagaaaataaaatttaaataaaaatacattctcaacaatacaacatggttacacaaattcactacattaagttttgataacttacattttcaaactgggtactgtaaaaaccaatatttactagcaacatattaatttccaaattaataaaaatggaagcagataatatcaaccaagattggtaatttaactctagaatgagtcttgtatttttcacatactgtaaaaacacctaaaaggctatgcagaattctgtctttacaggatgtaccgttagagcaaattaaaggtgctttcacttaagaaaaagatctgtttttcaaaacctggcataaatgaaatcaggcttcagaaacagaaacaaaagccatattattcgtcacctttttttgtttcatcc

SEQ ID NO: 124135 - DNA, 836 bp, Homo Sapiens
ttcacccgtcgtagggggttcaggacaagggacacgttgcctgtcgcagtcatgtcacaggctggcaactctgatggtctcgtgccggatacattcagtatagtttgtgcgtgtctcctggatgtctctcctgttcaaaggccgggctcattgtgataggggttctcagtcatcagggactggatagagatgagcactgaggagatgctctgggctgggctccaggcaggtccagtccatgtacctagaatactcaagcagactttcccattgcggtagaagttggggttaaacctcactgtgttattgcccgttgtcatcagtttgacccgaggtgggtggatgggatagtcgggcggacaccgatacacgaacaggaagaaacccccttcataaggagtgtcaaatgggcctgtgatcaatgcatgaatcttagtcatgtcaacagtatcaggtacaacgaacattcctggaggaggctccttataaatggacatgatatcccgcttgatccggagtagacactgcggcgcggtgcgctcgccgtcccagtcggagctgagcgtggggtcccagtggctaagcagcgcggccccgtgggcagcggctgagggcgggagcccgctgccgccgccgccgcccacacatccggcaggaaaggcggcccgaacccgccgccgctgccgctaacgccaacaacaccagcaacgctgctcgccccggggcccgccgccccggcgcccgccgttgccgcctcctcagtcggactctccgccatcgctgcttcgcttcggacgcgtgggtcgacgatatcccgggaattccggaccggtacc

SEQ ID NO: 124136 - DNA, 1055 bp, Homo Sapiens
  misc_feature (66)..(77): n is a, c, g, or t
ctcttgccaggaaagatttcggatttttggaggggagaatacaaaagggccctttccaattccctnnnnnnnnnnnnaaagggattctgctggggactcttgagtgggggaaggggagatgggagcagggtctaaaccctcaggctccccatgaaggtctgtctctgtcccagatgaactgctatcagagtccatttctgcattctcattatggagcctctccagcactttctgacgtatcagtcccaggcgcatcaagagggactggtagtcaaagtggccccgcttctctccaaaagggtcctgcatagtttggccttgaaggtgcaggcgatctttgcaggccacctcgtagaagtcgtaatactccagaaaggacttctccatcacccctcgtaggggttcaggacagggacactttccttccatcatgtcacagactgcaactctgatggtctcgtgccggatacattcattatagtttttgctgtctcctggatgtctctcctgttcaaagccgggctcattgtgataggggttctcagtcatcagggactggatagagatgagcactgaggagatgctctgggctgggctccaggcaggtccagtccatgtacctagaatactcaagcagactttcccattgcggtagaagttggggttaaacctcactgtgttattgcccgttgtcatcagtttgacccgaggtgggtggatgggatagtcgggcggacaccgaaacacgaacaggaagaaacccccttcataaggagtgtcaaatgggcctgtgatcaatgcatgaatcttagtcatgtcaacagtatcaggtacaacgaacattcctggaggaggctccttataaatggacatgatatcccgcttgatccggagtagacactgcggcgcggtgcgctcgccgtcccagtcggagctgagcgtggggtcccagtggctaagcagcgcggccccgtgggcagcggctgagggcgggagcccgggcagcggagccaggcctcgtgccgagttcgccacccaggcctcgctacctagga

SEQ ID NO: 124137 - DNA, 1959 bp, Homo Sapiens
  misc_feature (99)..(156): n is a, c, g, or t
  misc_feature (1298)..(1308): n is a, c, g, or t
gggagaggctccataatgagaatgcagaaatggactctgatagcagttcatctgggacagagacagaccttcatgggagcctgagggtttagaccctgnnnnnnnnnnnnnnnnnnnnnnnnnnnnnnnnnnnnnnnnnnnnnnnnnnnnnnnnnngggatggagaggcactgtgtatctccctccagactcgaagtcatcctgcaagatggcaagaaccaagcaagctccgatcccagggtgtgggagtgggggcctgttcccggtctgacctccttggcactggagcatctggggcttcgttcatccattcatcccgtatcaggggccaaggtacctttacaggagcacctagagcgagggcctttggcaaaaacaaaacaaccaacacacctctccacagggccagctccttagggataagtggaagatggaaattgcaattccaagagggagtgtgcccaaatgatttatggggatacctggaagggagcttggggtgggggctgtctgtgacacttaagcagtctgggtggttgtctatttgtctgtcttcagtcttgaagcagggcttcccaatgcccttttcctccctgccttccttcccccattatttcccacaggccagcataattttgtttttcctaatttatagtcactgttctagacagaccaaagagaaggaacagtggtggagtctaggctgctgatcagtaagctttacctagcacctgagcacctttctcccctcccctctttcctcacccttttctagatgtaagacagaaagtaaatgtgactgggacttaaccaaggtcttggtaaagcctgcatggcaccgtaagaagctgaaaatactgtttgttcccgcaatcactgatttgaaaagttcccaacacaggcagctgctgtgtatatgggattagagccactacatagaatagtctcttacagattttcataaatactagtcacaataagggtatttttcttgggggtggagtaagggggagactgatgctagtccttgttgtattttgttgggctgtccttgtgtattttcaccccagcctgtagtcctcctcacttcaaccccagggatttttggggagcaagggtagccaatggcagagggggttggggctgggactctggaggctcctccccttctttctcttccttccgcctcccccgtgcccccagctgctcttgtcactgtctctgatgggtatttgcctggctttgttgcttctctatctgtatttagctgcagtgatcctttagctggttggctcagnnnnnnnnnnntgtgctttaggtgccctgtaatcctgggcatcaagggaatccatccttcccctttttgatatgttctccccgtacttccagatttattgttatggctcccagtgggtattggcgattcttgtgatgcagggcctcagtcagtgtccagccatgcataagggagaggatagtgtgtacctgccctgccctctgctatgaaggtctctgccttgtggatcatgggactccccttggaggatctgtgcaaaggggggctgggcacaaaggagaatgtcctatttgggagggcaggaagcaaaggaactggacagggattggtgggcttggggaacggaagtttatcttggatacccttgaagaggctgggtctcttcacatgaagatcgaaaagggaccctgcttccaatttccctcttccattcctcgagctactccagggcttagaagaatgctcttggtctgtgggtccagtgttgtctgtcatccatttaagtgttcccactttcaagtgacaatcctctccttggccctgccatagggcagagcatgtctggcatagcagcctgacttttatgccctaatcttgagttgaggaaatatatgcacaggagtcaaagagatgtctttatatctgactgtatataaatgaag

SEQ ID NO: 124138 - DNA, 977 bp, Homo Sapiens
tttttgcacatgcccaaatttatttttattttgcacacataggaaacaggatcctatcaaaagagaacaaaaaagagaaacgagccaattgttgcagaggaaaagcatgcacagatctgcttcaagtttactctgaaccacggacgctccgggaattctacacaccaggagctgtctcactccaggaagtgggcacaacccaccatccacacaatggaaacaagaatggccaggaaatgtcaccgaagtgggacttccatatgcaggatcagcgttcacagtagcacaattctaaccaagttcaagggaaaacaaactctgtctcacacaaacatgggaatacaaaattgttgagccctagccatcactgtctcttaacataatttgctatcaaaaagacaaacgaaatttagtcacggacttttgggtgcctattcagctgcacccgattccaggggcagcttagtgtgctttttcattacaaaaaataaagacattaaaaatgcaaaacaaatgacctggaggaagaggagtgtttggacccacgcagttgtcttggttgtaaacagtgaacattgtgctttgttgtctcatttagatggaggcctgcagcatgggaggtaccacgctggcagtcagcagtcacaccagggtggtcagagacactggtggcagcatctgtgcttgcaactgcattcccagggtgtctgttttgttcccaagtgtctcccacaaaattccccaggaggttctccgattaaatgtcctcagagtgaaaagcatggacaccaaatcactccgtatccacttccatgagatgtcttgatgctccagttccatgagtaacaatttctcaagaggctctgattagttcattaaaaaataagcacccccacctcattccccgtgatacagcacatctagtaatctaggcgcctcagctaagctgcatagctcttagcacacaggatacgtca

SEQ ID NO: 124139 - DNA, 751 bp, Homo Sapiens
ttacagtgcataatgaacagcattttattggggacagccaataatgtccacaatgctcttctcatttacctgttaatattaaaatatgcatagctttgtgaaactgcttttaaaaatttaggggatggtgatcttttagacaaccaaatatttatagaacaagattcacacattttatgtgtaaacattacaccaagtatttggatacaaaaagtatttattttataaactttatatttaaaatagaattgtaatctgtctactcacaaaacctaatttaaaacatgatacatttatctctctagccaatttgatgttactgttttacaaacaacactcattttgtaattgttttatatcaagaacctcaactaaatgtttgttttatcagaaaacatttcccttttattttaaagagtgctttttaaatgaaggcaccaacaagaactactttcagatggtacagaatttcttatttcttgaagactctgtggttgaccacttcttcattagttacctgcagcaagacaccttccattttactaccaacaccactgaaggaaccaagaaaagctttattaatgatcacttggcttgcctcagctgttgaaatgaagcactttacagtctttgtggcagcagaatatacttgtccatggttcatatcaatgctaaaattccggcagggaaaaaaatgatatgttaagcacccaaatcttcacatggagggggagggggtgggaaaagaagg

SEQ ID NO: 124140 - DNA, 1149 bp, Homo Sapiens
  misc_feature (704)..(753): n is a, c, g, or t
atatctgaagaagtttatcatgtttgtccaaaagaacctaacaacttcagtggtggtcttaggatcaaagaagactcattggtgtatagagtaagccctgagtatcacattcctgtaaaggcaataaagccgggcaatcaaactgatcatatctaaggaatgaatttcaacagccaacctacaactttctcttcagggtaagacactgaactagaattaccacatttaacccacctatttagtactggatacataccaggcttcataatgcagacaagacacttcactcaagtatgaactactatctgaaaatagattcaaccatttttgccctaccttctttcagtctcatcctgataagcatgtacagttacaaccataaatacaacaaatgtctttaataaaaacccctagttcactcaaaatgtttgatccaagaaatgtgaatacacaagggtgtaacgatgggaaatctcatgatttattgaacttgcagcctaacttttacctaccattttactaccaacaccactgaaggaaccaagaaaagctttattaatgatcacttggcttgcctcagctgttgaaatgaagcactttacagtctttgtggcagcagaatatacttgtccatggttcatatcaatgctaaaattccggcagggaaaaaaatgatatgttaagcacccaaatcttcacatggnnnnnnnnnnnnnnnnnnnnnnnnnnnnnnnnnnnnnnnnnnnnnnnnnnaatttaagtaaatgacagattggaaaacagggtttataaaaattattctcttgagtttataaattgttaaactcaatttatagctatgttaaactacgtaagaaccactatactgaaagaccatttaagagtattagtttatcttttagggaggaaaattaagaaaggaaaagtaaataagatcttacctaaagaagtttaactgaagcttagaactattttgctctacaccctcagctttcgttggcatccttataaactactgtagttaaagttttgtagaaacagcacagttttttaagactggctgaacttagtagccgtcaagagttctcttgtactagacctgtgtccctgaagagtacctcgctggggttatttcctttccttgcattg

SEQ ID NO: 124141 - DNA, 1756 bp, Homo Sapiens
  misc_feature (961)..(961): n is a, c, g, or t
tttttttgcagtgcagacagactttattagtgatatcaatacagcagaggtgcccatggagcagggggaagggacccatgcctggaccagtcccttcctccttctgcccctgctgggtccaggaggatgaggcctggcctggaccagttcctcctgttccacctgaaacacatggggatggagaaccagggctggccttgcttcctgctcctcttgttaccactccagtgttatcacttccttgaagggattagatctctccctccccagctcctaggcagggaaccgtagctactggggaggggcatatttgggaggcctgaggcctaggaatagcctctagacccctccctgacccacaccctttagttccctggggcccaacacaagcaggtggagggaaggtgggggcttcttcatggggtatgggcccccagccgtttgggcttcagggagccccacagcgactgaacacccctgcggacagtccaccctacacgccgtgccacagactcagcagggggtgctgggaggcaggaggtggaggcctgggaacgggcatccagacacttctggtagcgaagcatgcacgcagcctgcacagcctctgagaggctggcagcattgggctcgcaccagaacatgtggcagcagaaggaggctgggccggcagccatgatgaatgcaaacgtgtggacatctctgcccacggccaggaaggagaggaaacgcacccgacactctcccagcactgcctctgtctgctggtgcaagatggtgagggtagcaggggccacactgacatgacttggggtccattgttcacggctgctggaggacaggactgactcgagggccccattaatcacatctaccccaacaggtttagcaacaggtacattcccccaggtaatagacttggaactttctggaccaactcatttttaggcgctgggaattnccacttggaaagggacatccacaagtttagagtggtccagggagagtccatttaccaagcagcgggcattacgccgttcggccatgatcttagagcagatctcatgcaggctggtggcgatgttcttggcaggtgcctcacagcgaaacacgtggcacttgagcatctgggtcagcttatcacgagctacgtaggcaaagtcccttccactgtcccgcccgacgccccacacgcggatgctgatgatgggttgggcgtgcagcagtgcctggctctgtggctccactagctttagtgtctcatcctccagctgcagtagcagatcctttccttccccccagcccccagacatggggtcatgcaggttgtttttgtggtaagagagctgacggatgcaattgttgactgccacactgctgcgtccaggggccagctcctcctcggtcatctctacccagcctagggagcgcacggcgaaacacttgatccctgggttggtattccgtgggggaagcttctcctcctcttggggcaacggctctgggctgaggctctgagctgggaaggtcaacgtcccctcctcaggttccttcagtcccagctccattggggcctcatcactgggttcatccttccaaaattctccatcctcaaagccttctccatgagcaaaacctgtccaggtgagctgggactcctcttgggggctgctcccctgtgagggggaggcccggccggggggttcccactgggtggtccctgttgggatgtgccagtaataggtccctgaggtgt

SEQ ID NO: 124142 - DNA, 1109 bp, Homo Sapiens
  misc_feature (286)..(286): n is a, c, g, or t
ttagagatgtggtccccccgaggggcccccaccataattattccccttattacccccccaaaccagggtttaggccaaccagggtccatttccccccaggttataatagactttggaatttttggggacccaacttcacttttttaggccgctgggaatttccccttgggaaagggaccttcccccaagttttagagtggttccaggggagagtcccattttcccaaggcagccgggcattacgccggttcggcgcatgatccttagagcagatttcatgcaggcntggtggcgatgtttcttggcaggtgcctccacagcgaaaacacgtggcacttgagcatctgggtcagcttatcacgagctacgtaggcaagtccctctctcttccactgtcccgcccgacgccccacacgcggatgctgatgatgggttgggcgtgcagcagtgcctggctctgtggctccactagctttagtgtctcatcctccagctgcagtagcagatcctttccttccccccagcccccagacatggggtcatgcaggttgtttttgtggtaagagagctgacggatgcaattgttgactgccacactgctgcgtccaggggccagctcctcctcggtcatctctacccagcctagggagcgcacggcgaaacacttgatccctgggttggtattccgtgggggaagcttctcctcctcttggggcaacggctctgggctgaggctctgagctgggaaggtcaacgtcccctcctcaggttccttcagtcccagctccattggggcctcatcactgggttcatccttccaaaattctccatcctcaaagccttctccatgagcaaaacctgtccaggtgagctgggactcctcttgggggctgctcccctgtgagggggaggcccggccggggggttcccactgggtggtccctgttgggatgtgccagtaataggtccctgaggtgtcctggaccctcatccatccagccggcaggtcggaatccgtctcgaaggcgttggggttccagaaggaatctgcgctgctgtcctgcaggataaggccaggaaaaagttcccgggaatccggaccggtccac

SEQ ID NO: 124143 - DNA, 1654 bp, Homo Sapiens
  misc_feature (1439)..(1458): n is a, c, g, or t
ttttatctctattagtgggtttattgacataactggacataacaatgtataacatttattcatctcccactgaaagacttcccagtgaaactaaagtagaacacagatccaggcattaggcattttcagtgatgttctatggctgaaaaggtgggtggtgaggagaaccagaggccttgtccatacttgcaatgggactcaatattaccctgctgggcaaaagaaatagctaggagatgcaatagtgctatgattgaaaaaagccaggagcacaaaaggtgccagatagctccctggttgaaaataagagcaaacaacactactgctctcatgtaccagtatgctctcaatctaaaataagccctggcagcaaactaagaatgacagtctatttcctgtggtttattaagttttggccccgcagacgagactgccagaaaagcagctgtagttttaagtggtctggacatttactcatttgaacataaacaacgatcagctcattcagatggctggttccctactcagctgttgagaagagggcaggcatgggtcaatctaggccaaacataaaaggagtgaactggggtgaaagacccggggctgtgatggattccctgagtcaccaggaccctcaggggcttaaggccctaaacagaagattccactgtcagccttagcaccattgcagtgacctccatggtactccactgccaataaatccataaccactgtgaccataaccacagtgtacattctcttagtgactgcatttttagaccacacataaaattattaatgtaaaccaaaccactacacttagtgataaacatgtacttcataaatagcagggaatgaaagtatcccaaatagttggaaacaactgaacaaataaaggatcctacccctaagtttaaaacaaaaacatttaaaagaaatactgcaactattaactaaaagataagatttaataacacagtaagacactcagttggggagggattaattgcaaaatatatcattatttcacagtgaggtttaagtactcataacaatcttctggttttagtagaacagatacccactggtgtatttttttcacatttgttttctataatttcttcccctctactatttcatataaagacactaatgtggtcaaacattaaactatcaattgacaatcaccttttgcttccctattaggaaataaccttcattgcttaactgcaactcaagagaattagggcacagtcaaccatgtcactgataaaaacataagaagtaatgcatcacatttattccaatctaaacacactgtcacagatgtggtaagtgaactggaacactggtgttccccagtgggtcatcagctacatatacatcacattcttttatcaaatctggcattgaaatttccttttccatatataggtttnnnnnnnnnnnnnnnnnnnngccacaggagcaaccctgacagagaagtcttgcatgcagccttctcctgagaaagtatgtaatcttagttatcctcgaagtcagcaagcgctcttgtactgttaatattaaaaggaacataataaaatggcccagtccaactaaaacagtccttgagtctattggtcagttcgttaaatgtcagagcttttcacat

SEQ ID NO: 124144 - DNA, 1894 bp, Homo Sapiens
  misc_feature (1819)..(1853): n is a, c, g, or t
ttttaagtgaagcaaatattttatttaaatcagtcgtcaaatcacaacttatccaaatgaatgtgttgcaacattgttcttaaaagaatggcacaaatatggcacaaacacaatccagtatctatcaaaataccatttgtaaagaacctgacttatttcatgccatgtgtgaatgcagtccagcatataagagtagaatcaaaaacttacaacaattcttttcttcataacatataaaacatattcactactttgcctcaggattaagcacacttatcggtccaaacaaccataacaagtaggaaaaaggatgtaaagttaatttgctaccagaatataacttctttctaacctccactgggttagaaagaaaaatttcccaatgacaatagaacattctgtatgtttcaaaatgctttttagttttagcacactccgtgtaataggaaagtgaccaatttcagagtaccactaaatatggacctcaatcattagtgaattttaaagaattgtaccttgatcaggaatgttacatctaggaggctctgtttttcgtgggttatataactgaggcttaaagctccccaagcctgcactatggcacatgccccatcatatactgtgtgatacaaaaagcatgtagtatcctgcacatttccttaaacattaagaaaaaaatatacaatagatacaggaggactacttaaaacatacatataaatatgtaaagaatgatactccagtttcagaagcagaactaggtattgccaactccagttccaggttaagaatttaggaccttaaatcagaatttatatggttatcaagggaaaattgtagggttgttcttggaaagagggaaatgttaaatggctctagctcctgatgaagcctcaggattgtcaggggctctctagaaatgagatcagttgatgtgcctgctctccaattctcaaagttctgaaatactggtcttcagtctcagcagcagcattcattttcttctactacttgtcttcacattctggtcttccaaacagaccaatgagtttaactgcatgatgttttaagattctgtaagttctgactttgcagattctctctcttgtttctgtaactcctcctgtgcttggggtgtgatcgctttatctgattcactgtgcacttttccttcctgcaattctacttcctgggcatcctccttctctttttgttttggtccatttgtatctggggactctttggttaagcctcctgaggcatcagtatcagccagggctgagttctggttttcagggtcatcaacatcatcacctttgttcatcttctttcggttcaactagtgacttctctattctttctgctaacaaggcatgaccatcatcttctggcacagactttgttccagctccacctccctcttcctcagatgggaggacgacctcttccagctgctgatcatttacagtggaaccttctacctcaacagtcatggtcttttctgaggcttcactcatgtctttggaaatatcagaatgtgcttgtcccactgcggttgactctgactcctctttggctgaagtaattggtgtttcatcctgtgcagaggcctgaggttcctctccttctttctccgtttcctgtccagcgtcctggctgtcagcttttatcatgtgagcttgtgtctgtaactcagacgtcaacatttcggtggctgtttcttctgtacgtacaactggtcaacggctgtctggatgatgttttggaccccggccgtaatggccgaattcccgggcatatgtccggtaccgtcgactgnnnnnnnnnnnnnnnnnnnnnnnnnnnnnnnnnnncggccgcttcctcgctcaacactcgctgcgctcggtcgttc

SEQ ID NO: 124145 - DNA, 680 bp, Homo Sapiens
caattttgtaagaaacaatatattttatttttctgacaccacagctctggcgagtggttttgtaccaaatttaatggaggttacacagaacgtcttacgcatgggagggggaggaaagggaaggaaccacaaaatttaaaacaaacagaaacaaaatcctggatagcttttagcatctgttccactcccacattaataaaattcacttgggaattcctaataaaaggagaacagaaaacaaggtgggcagggaagggtatgatgggaaagagaaagacttagggggaaaaaagaccagagagcatcccaaggacagacctttccctctcagagccaagaggacgctcggcatggaaggcgaggctttgctagatttatttccccaaaataacactgtgtattgcagctgccaaagggaaagagagagggaagcagagggtcaccagcggggggcacaaaggaaggaaacacttaactgaggagacagagcaaaatcggagagagaaaacaagagaaaaatgtgccagtgggttggtatattgggagacaagacagtgctgaagagcacttgaactgaaaaacaaatgtcctaagagtcattatttttcaaaagaaaaatctcccccctcgccccacccctcgctgaacttagttcctttttttgtgcttttcattaatac

SEQ ID NO: 124146 - DNA, 598 bp, Homo Sapiens
gcctgcactacatcaatttattagcgcaactttttgtttgtttctttaaagatttcataacaactgaagtatgtacaaagtcttacagcatttacaccataaaaagtttcctattagctcatgaagtctaaggtagtgctgctgagaacttcagatgtggcaaaggcaatgaggcaaaccacttgtaggtttccctctctgctgccacatcatggtgtcagctgagtgacagctaactgtaccacctggaagacaggttattgggaaaaaaggggacaagttgataggcagcactagagaccatggggtggaaaagctacatagcattgtatttctacagtttcctagagctgtaacaaagatccacagcctgagagaataacatatgcaagacaacagaatcacgctgctcagatatggttcagctaccaagtgtgttcacttttgaatggaaggctctactgatatggctggtatttgacttctgttcatgtcttcagatagctcaaatctgcacaagcctcactcccttcccccaaatcaaataacaacaaagggagagagaaagaaatagcatgaaattagtagttctcgacca

SEQ ID NO: 124147 - DNA, 1912 bp, Homo Sapiens
  misc_feature (1797)..(1797): n is a, c, g, or t
  misc_feature (1810)..(1810): n is a, c, g, or t
tttgctttctttaaatctttatttaaaagtccatgctaataatgtgtttacatttttacagttacattatgatagaaactgttggattttttaaatatctaaaacaatggcccactgaagaaaggaacaattaactctttaattaattccttaggataaatacccagaaatttaacagctagggcagacttctaatacaataccgaaagtccttccaaaaaccaagtggttgccaacttatgtcccttagcattataacattcttgagccaatagtgtaaaaatacgctgacaattttataggcaaacattactcaaggtatcttactttccacttattactaaagtaattaacccctaaatagatgctcctcaacagtgggactacatcctggtaaacctatcataagttgaaactatcaagttgaaatgcatttagtaccctgataaacctatcataaagttgaaaatttgtaaattgaaccagtgtaaatcagaggccatcttacttcatactcatgaagcaactatagtgggatatttttcaacttacgagatagcctaggcttgttgaaacactgtcctaatttactggctctctggtaattaagtcataaatggtcaaacatcaaattctagaaaagcatatatttaaattctcatcactataattcagaatgactggtttacaaaaatatgttcatagtatttgggtaataactgtggtgattgtctcaactggcaagctaagtggaatgccttaaagaatctatccgagattagttggcaggcatttccagtgttggtaaatcaaaggcccacgaaggtatgctgagccttgatagcacaaccttgcttaggactttgcctcaactaacatactttttagtttggcaagttacctgaccctccaggtaactcatttttctccatagtctgctacttacaagattgtcatatttttgtaatctagaagcaattatagagaatattttattagactttacaaatgacaactgcataaaacagaaaccagtttcatgatctagtttagggagtatgtattttatacaactcataatcctttacaaatagaaaaaaatcagtaatacactgaatcaacttgaagaatcttcagcataaagttcaacaaagtcccttagatgcaatttcttttggatttacagcaacactttttgttatgttgtatgtcttgtaaattccaataagtctatccgaaatctcaaacatattatttcgaagagaaattattatgaactgtgcattttttgtttgttcatatatataaaatgcaacaatggacacatttttaaaaatcaaggggctgcatcaatctcatccatgaagtaaaggggagtgggcttgtagtggtgaagagcaaatactaaagccaatgaactaagtgttttctctcctcccgaaaggttgaagatctttttccaacttttcttaggtggtcgaacactgaacatgattccttcagagaaaggatccaagctgtctacaagctcgagttcggcgtcccctcccaaagtaagcatttggtaattttcctttaatttatttgttattatataaaaacctgccataaattcattaagcctttgtttccgaagatcttcatatgcctgtctaaaactgtctctttcataagtaattttgtccaattctgctacccgttgcaaatacaattcttccttctttttatactctgcgatggcaccgaggtttggtttcatttcataacaccaggcttccaaaaatgcaattgaatttnttatagaatctanattcttaatcccttcaaaatcctcttggcttaaaaccgaaatctctttcattagattatcttctataagatacaagaatatttgtaaaatctgttttttcca

SEQ ID NO: 124148 - DNA, 747 bp, Homo Sapiens
gtctaaaatgacaacgatcgtttggagaagtttattaccacccctaccctccagtgggatctcaatgtcacgatgagtccggggctggctttccgccgggaccctcctgtcctggcacatggcccaccccagcacgaagcctggccgggagggctcaggtgggtggctgctaggccaggcctccccagaacgactgccccatgtccagcctgtatctcctgagtgccatgctgcactggggagggacagggctggctcggggctccaggaaagatgcctcacatgtgcctagaaatgtaggcgtcaagggaaggctgtgtgtgggggcacctgaggggctgggcttcccaggcatctgagttcttacggagccctaataggcacatccccaaatggttgtatgaggatgagcacaaaaatagcagatggggtcaccctcaccctccactgacaatggactgggatccgactcatgcaacattccttctcggccgtaggttccacatccatgggttaggtgtgctggcctggagcccgccggccccggtccccaccgcacaaggaccccatcacaagtgggtgtcatactcttcctccagaaacggattaagcaaccagcatgtgaaccttacgctctgtttacaggctgagtccccacagctcttccagcttcagccaggccagggtcaccttcagattggatgtgcagggccctgaggatcatgtcctgagatggccttcttcctg

SEQ ID NO: 124149 - DNA, 1124 bp, Homo Sapiens
gccgccaagcaaggtgaacgggctcggcagggtggagaggaattttcaggtcgttttttactagtgtctggaagacatttaggagaattccaactgattaccatttacagtgatcacaatgaaactgctcagagttatcactgaacttcagtaagaaaatacaacagagtgccatcaggacaggggagagggcaggagactgctccatcgctctgctcatgtccacactgccaaggtccccaccacgggggtccccagtgcaccccagctccggggcagaagaggcagcctgcagatctctgctgccgggaaagagctcctgaagttgtggggtctggactccgctggggacggggccttccgcgagtctcccacctctcgggggactgcagggagaggcgtctccagtgggcagccttgggtcacttccatagctcccccagcggcttctctgtggcagtgcggatggcgtcctcagagagcacgcggatgtcctcatggacagcttcgatgcttttggaagcatccaccatcttccagttcaaagtcgtgtctttcatgagctggtggaaacaccggagcgcccgctcctggaaagccccgttctcatagcgctcatggccaaacgctccccgcttggcagcatccgccagctgtaactggaggaacaggaccaggtcgggtttgggaaggcccacgtctggctgtttacaccagtctagggaaaaattctccttggcaccggtgaaggccacaccagaaaatgcgtatctgtccacgacgagggtcacgccctggctcaacttttccttaattaacggcacttgttcccagcgatttgcagaaaaaagcaggtgcaccgagtgatcctccacgtcacttttcttttgcaagtaggaactcagaagtttgccgatttcagttgatctttccgggaaccggagcagttcggcgcggtggcccgcggcgcacagcgcttccaccagcttgcggctctgcgtgctcttcccggcgcggtccacgccctccagcactatgagagccccgcgccgggccgccatgactgtccggacgcgtgggtcgacgatatcccgggaataccggaccggtaccagcctgctttt

SEQ ID NO: 124150 - DNA, 1006 bp, Homo Sapiens
  misc_feature (797)..(797): n is a, c, g, or t
  misc_feature (819)..(819): n is a, c, g, or t
tttttgcaaagtggcaaagtggctttatgcgcaggctctgggccgagtaccaggagaaggtgcctccggaggaggccgggatgcggctggggctgtctggcacggggaccttcgtggccagccacgtggccttgggacgcccgcgtccagccagggctgaggacccaggccagagcccctcccgcccagcacccgcgacgccagcctggatgctggggtcactaagtgaggtactcgttggttccctggatgggccaccctttctgccctgggaggaggctctggggtgtgcaggagggagccagctaacaggtcagtgttctgggcagaagtggggcacgaagtaacacaggccctgaggacacagggacacaggtgacacgggccttaaaagtggcttgtgacatgagcaacccaggcccctgaaaaggggtgacctgaagacagaggttccccaggtggggtgagggacacccgacgatgcagcacccccccagggaaacgtgaggcttcaagagactcagtgtggggccctcgctctcctcctgggcgagcagggccgcggcgccccagcactggggctgccaggtatcgacccgcgggtcacacgcagggccgcggccgggtgggcgccagggacttcggggcatgcggggcgttccggccgggcggggtggcagctgcccggctgccgggcctagctctcttccaggtggaggctgatgaactcctggatacacctgcggaactggagctccgtggggctgcccgccagggcgccggggggaccagggcangctccggctcgcgcatttcctngccatgcgcgcagacggagcatgtcagattcagcgtgggcgccgcactgcatggcaacggtccgctgctctggtccaggcgtgcggtcgcctctgccattcctggccgagggcaatcccaaaggagtcgataatcggatctgtctactgttctgtgtgaatgtatcgtcacatcaacacaagagcgg

SEQ ID NO: 124151 - DNA, 2055 bp, Homo Sapiens
  misc_feature (293)..(367): n is a, c, g, or t
aagttaattgttactttattgtagaggaaaaatatcctgaaatatttattaaataacaataattcctgacaaaatcattcttcgggatgtgttagccaaacaatctggtcaaatggagtaagctgtccctcaccccagtaataagctccattcatattgccataaaccacaggaaaatccaaaagattttctaaatggcttccaaatttctgcacagatgcccttattgagcccagaggtaaatataaacaaattgaaattagagagaaattagaaggatagctgagaggaannnnnnnnnnnnnnnnnnnnnnnnnnnnnnnnnnnnnnnnnnnnnnnnnnnnnnnnnnnnnnnnnnnnnnnnnnnagctacttaatttctgagtaacttaatttctgagttacagttgcttttgggtgaccatgttctctttctgacttgcctaaaaaatatgttcagttatttcttttcaaacctgaaatacaaaatcagctctttctcaggtgatgcccccctttctactatctacaaaaacttccaaagctttctagaaagcttaaattaaggggctacagtacactgatatggttttgttgttcttggaaggtgttggactcaaacgctcatcgaaggtctgtgatggtcactgctctgtccacaacagtcacgtggctgcagctacagaacagaggtggattcttgctgtgtggatgaaatcctttctggcgacaggaagaatctcctctagtccatggtcagttagtttaaagaatccagtttcctggaacttgggggagcaaacaatggctactgactctggcaacatcatctggtaagagcagtgagtgtgtaggtcgacactggagagaaacgcggtctgtgtggggtgagtatgaatccagcccagtgtgatgaggccctgctgatcctgtatgaggaaaagttcttcttcgttctctgtgttgcagtaatcagacccagcactttgcttggggatgagaacatgggtgatggtagattcattcctcatcagttttccacagagaattgggacgtgtgtccactccccgggcagtgttggcactggctaactggagaaactgtgggcacagccgcccaggcaccaccacatggcgcaatccatcgattgtgggaatactttctgagttgctcagtgctccaggtttcaaggacctgtccaccacaggtggcttagctggccttacagttgtgtgacagtctgaaggctgtatggatgagactgttaaggtggggaacacatctaaggagggcttctccaagtcaggcactagcgggccacctaggccagggtctaccttcccaaactcctgtacaattttcagtcgctctttttctagctcctggttccggatcatctcctcgaaggcatggaactgttcctgttccgattgctgctgcttctgcttgtgctaccctctgtttttccttttccagctcttgctggatggccatgttccgggccgattcctctgcttccttcgtctcgttcttcattatattctgtatattctttggtatatcgttttaacagctctgccttcagctcttctgctttgggaaatgcaatctcctttaatttctttactgtgtctttcttttcaggaatgacagcagatttgtaatctcgatgttttggtagtttctcaataaagagcgtgatatacttgttatagaggatgaaggcatgttcaatgttgccttcctcagagtaaatggatgccattcggataatctcaactccagagcggaagtaccgacggggtggaatgtcttcattcacctctaccgcactacccagctgggagagagccctcacccggtcttcgggcgggaggctcacatctccatggtcagacatcaggaccaagttctcttgggagaggttcttgtgggttaagaaaggaaccacctcccaaggccaggaagcggcgccggttaccacctggttgagcaattccaaaaaggggatgcagcatggcggccgatccccttcaaagtccaaccacgctcgg

SEQ ID NO: 124152 - DNA, 416 bp, Homo Sapiens
  misc_feature (271)..(271): n is a, c, g, or t
tttccttaggctctttattgagaaactaccaaaacatcgagattacaaatctgctgtcattcctgaaaagaaagacacagtaaaggtgggtcttcactttcattgttgcccatctaaaagcttcagagcagcacagactgacttcaagataaaagtagtagtctctgcatctgagtaccagatctgcctgaagttgggggaatcccagtggcttaatgttgctcctccagggctgctggctgtgaggtctgcttgaggaggcagggctcangtggtcgcagactattctcctttctcctttacagttcccacaatcgatggattgcgccatgtgggtggtgcctggcgggctgtgcccacagtttcttccagttggcccagtgccaacactgcccggggaggtggagacatgtggg

SEQ ID NO: 124153 - DNA, 777 bp, Homo Sapiens
tttttaagttaattgttactttattgtagaggaaaaatatcctgaaatatttattaaataacaataattcctgacaaaatcattcttcgggatgtgttagccaaacaatctggtcaaatggagtaagctgtccctcaccccagtaataagctccattcatattgccataaaccacaggaaaatccaaaagattttctaaatggcttccaaatttctgcacagatgcccttattgagcccagaggtaaatataaacaaattgaaattagagagaaattagaaggatagctgagaggaaaaaaatgttaacaattggtgaatccagaaggaagggtatatgggggttcattataccattctttcttaatttctgagctacttaatttctgagtaacttaatttctgagttacagttgcttttgggtgaccatgttctctttctgacttgcctaaaaaatatgttcagttatttcttttcaaacctgaaatacaaaatcagctctttctcaggtgatgcccccctttctactatctacaaaaacttccaaagctttcgtagaaagcttaaattaaggggctacagtacactgatatggtttttgttgttcttggaaggtgttggactcaaacgctcatcgaaggtctgtgatggtcactgctctgtccacaacagtcacgtggctgcagctacagcacagaggtggatccttgctgtgtggatgaaatcctttcggacgcgtgggtcgacgatatcccgggaaaccggacgcgtaccagc

SEQ ID NO: 124154 - DNA, 847 bp, Homo Sapiens
  misc_feature (61)..(101): n is a, c, g, or t
gtgccaagctaaaattaaccctcaactaaagggaataagcttgcggccgcatacgcggtcnnnnnnnnnnnnnnnnnnnnnnnnnnnnnnnnnnnnnnnnnggcacagacgcgggctttattaacatttggtagtgagcacggcccccagggcatcgcgggggctcgggtcccggtgacgcaacggttaaacctggctcgcgacttagcgcaggcgcctgggggaaagcccggagcctgagggcggggccacggagccacttccggcggctgtgggcggaaaacccaaaacttccgatgggaccaagccttccgtggcttcacacgcaccggaagggaatctgggtcagccctccctccaaaggagacagcacggatcctctttttgcataggcctgagggaagtacttccgcccatattcaagatggctgcccagggcagtgggaacgggtggagtttcgggatgtggagcgaaggtcactgggagggggcggagcttcccctgcccaagttccgatcccaccaggactggaagactcgcgtccagctggagctttgccgcatctgcgttgctgtgcccgcgctcttcgggcgaggaagtcccttcttaaaggagtccacaaactcgtcactcatcctccggagctcgcggccatagcgctgtgctgcccagaggttggggggcgccgagcgcgagcggccccgaaaggggctgggctcctcccccatcccttcgtcgtcctccgtccccgcggggtaggagctgtggcgactccggatctccacagccccagcgcctccatgatggctgctgctggttggctgctcctgctggtgactggcgtcc

SEQ ID NO: 124155 - DNA, 1094 bp, Homo Sapiens
  misc_feature (1017)..(1051): n is a, c, g, or t
ggccggcaccagaacgcgggcctttaattaacaatttggtaggtgagccacggccccccaggggccttcgcggggggttccggttccccggtgaacgcaacggttaaaacctggcttcgcgacttagcgcaggcgcctgggggaaagcccggagcctgagggcggggccacggagccacttccggcggctgtgggcggaaaacccaaaacttccgatgggaccaagccttccgtggcttcacacgcaccggaagggaatctgggtcagccctccctccaaaggagacagcacggatcctctttttgcataggcctgagggaagtacttccgcccatattcaagatggctgcccagggcagtgggaacgggtggagtttcgggatgtggagcgaaggtcactgggagggggcggagcttcccctgcccaagttccgatcccaccaggactggaagactcgcgtccagctggagctttgccgcatctgcgttgctgtgcccgcgctcttcgggcgaggaagtcccttcttaaaggagtccacaaactcgtcactcatcctccggagctcgcggccatagcgctgtgctgcccagaggttggggggcgccgagcgcgagcggccccgaaaggggctgggctcctcccccatcccttcgtcgtcctccgtccccgcggggtaggagctgtggcgactccggatctccacagccccagcgcctccatgatggctgctgctggttggctgctcctgctggtgactggcgtcccacaggaggcctggggcctggcgatgatgcttgccggagcctgagggcccgtcccctgcggggctggggcccaggcccctctctgcagagctggagtcttcctgctcactcggctcaaactctgggatctggaacatgctctgggcccaagcccgatctcgaggcccctgacccgggcctgccgcctccctccagcacccccggccgtaatggccgaattcccagggcatatgtccggtaccgtcgactgnnnnnnnnnnnnnnnnnnnnnnnnnnnnnnnnnnncggccgcttcctcgctcaatgactcgctgcgctcgttctagtt

SEQ ID NO: 124156 - DNA, 943 bp, Homo Sapiens
  misc_feature (511)..(546): n is a, c, g, or t
gggccgcctggacacacaggtcccctggcacaggtaacaacagaggaccctcagggagagaagggctcccaagcttccgtctaacaccttgagacccgctgcccggagagaccccaaagacacctggggcatcagtgctgcagccctaccttggcctccaggtagatgctagtgggagggcgcccgcctggcgacgaggcagaggcaggcagcaagagaccagcgcgcagatgacgaacagggagtcgctcaccaggacgcggacaagcagcagggcccagggctgtgccccggccgccgatgggagagcacagcaacaacagcacgttcaccagcagaaagagcagcgaggcccccacaaaggcccctcggacagcgagcctgcagccacagcacagtcagcgcgggccctcaacagccctcagcactcaccaccgtgccccacctgcctgcaggaaaccccaatgtcgacaaaactcagggcatccagtctgagccctgttcctccacnnnnnnnnnnnnnnnnnnnnnnnnnnnnnnnnnnnngaaggtgactgacagccatggtacttcggaaggtgcaccaactggagtcagaagtctctgtctgagccccagctctgcgaccttgatcctgctgtcttacctggctgggcctcagtttcttcatctctcaagggaggatagtagcctctcagggaaattgtacaaataaaagatggctgggaaagctctttataaaccgtaagacactgtacaaatgacgagggcattgcggccccaggtcacccaggagtgcatatggctttggtgcttccatgggctggagcctccagctcgccctccatggtggatgacactggggccctctccctcacactaccacaagcattcactattcctgtgccttgcagatctgccaggcctctgctgagccatctgc

SEQ ID NO: 124157 - DNA, 1844 bp, Homo Sapiens
  misc_feature (1796)..(1797): n is a, c, g, or t
ttttgtggggcgcagacactgtttattgagtggcaggcacaggagaggtagctggctccggtgtggaagcagaggtggcaggtcatgccagggtgctgtgggcatctggcagccagggccatgccccccatcctagggggacggcacaagctcactatgacaggagcagcaaggagccggccagaggagggggtagccacgacccccaggatcctgggcaagaagcggcagacaaacttggcacaggggcctagggtgagggggactggggcctgggtattctgtgggggagggaaagggatcacgtctggtggggtggagtagagactgtggtggtggccgcctggtcctggcacctgggagaagagcagaggagtggtcttcgtctggctgcccccataccagcccggctcacgcccgatggcaccataccagctcccagagcctagactgcccgacatactggtgctctcaccccggctgtgctcccaggagcagccctcatcttcacagtgcccagcccggtcaaagaagtaggaccgagaggcaaagacctgcccattgaggatgtggctggtgctcaggtcctgtgggggccggtgcacccggaagaagcccaccagcagggtggtgggcagtagctccgtcacacgaagaggtatgaggccgaataccaggtagcctttgttccccaggtcattcaccaggtccgcctggtcagacacattgtaccagtcgtaatcgaaggtgtccagccggctctggggggccaaggccagtgctgtcaggttgtagcaggcccggctggcatagagcaggaccatggcgccacccatcgcggccgcctggcacacactggtccccttggcctccaggtagatgctagtggagggcgcccgcctggcgacgaggcagaggcaggcagcaagagacagcgcgcagatgacgaacagggagtcgctcaccaggacgcggacaagcagcagggcccagggctgtgcccggcgccgatgggagagcacagcacacagcacgttcaccagcagaaagagcagcgaggcccccacaaaggcccctcggacagcgagcaagcctcggctcatctccggccgacgcttcaccttggccttgaacaccacctgggcaaagtagaggttcataagcgtcaaggtgaagaactgcaggcagacggggcagcagtagagaagccagaagggcaagggccccaggcggttggcgcggggagtatctcggaagtagaaggagaagagggtggtacgcaaggcggcccagagcagacagagggccaggaacaccgtctgatagctgagacgcttgtgcccatacagaagcaccagccagagctgggcatagacggagaagaagagcagggcatacagggtggtgtaggcagctgtcagccccagggtcacagcaggtggcagcgcaggcaccagcccggcagcaggcaccaggccagacaggttactctccatgtcagggagggaggcctgaatcccggagacagacaaggagggactgtcggcgggaccagggaaataaatacggaggggtgggaattgcagggtgcagagagggagatggggcgctcaggaggaaagaagttgtggctgacaggcccctcctcctcaacagagagacccttgcccttggggaacacaggcagcctgggccccaggcccctcactcaggggcatggaagggcagtctcttttctccaggacagaccggataggggttgggggtgtctcctccctgggcctaccccagagccnnaaggatggggggatgcagaggcccaaggagaggactccctggcctcg

SEQ ID NO: 124158 - DNA, 697 bp, Homo Sapiens
cagggtcacagcaggtggcagcgcaggcaccagcccggcagcaggcaccaggccagacagtttactctccatgtcagggatgggaggccatcgctcccggcccctttgattctcgaattgcggtctcatcttctggttgctaggtctccagctctgtcctttccattgtagggccctaggcatcctctcttcccgtcttccggcacggagttcctgggatctaaccagttcccattcctggggtgcccatgcgtcctcgcgagcgtccctgaccgcccggcgttggagcctcctgggagttgtggccttcattatctcccccccgatctcacttagaggaaggctcacggaagtggagagcctggctcgagctgccatggtaatctaactcatgtaacccttttctccctccaccagaagggacttcctcgcccgaagagcgcgggcacagcaacgcagatgcggcaaagctccagctggacgcgagtcttccagtcctgtgtgggatcggaacttgggcaggggaagctccgccccctcccagtgaccttcgctccacatcccgaaactccacccgttcccactgccctgggcagccatccttgaatatgggcgcgaagtacttccactcaggcctatgcaaaaagaggatccgtgctgtctcctttggagggagggctgacccagattcccttcc

SEQ ID NO: 124159 - DNA, 927 bp, Homo Sapiens
tttctagttcttgactttaatgcccttggagtgtactgaggctcaatacaccaaagcactcacagacaggtacatgaactcacacaggaagtgttatagtgtgtacataaacccaacaccatacagaaggaagacgacggacccaggtgacctcccacactcgaggtgactgcctgttcccatactcactgtttgttcccacctccctcaacccctgccaacccccatccttccccactcagtatgtatatacacagatatgattctttcagaattccaaaaagtgcctctcccaccccagttcccaacactacagctttggatgaaaaaagcctctctcttttaaggatcatgagacaggtaccaccttcacgcaagagccccagcaaaatagtacccaagaaagcttaataatgtatattggaatcaaatatggatagaacatatgcagaaggacaatatttgaaatattactaggatcaaaacgctcagcatcagtagtttttgttttgttattgctgtttgctttaacctgttcaagagctggtttagaccaagaccacacatggatgctcacaccgcctgtgtcttataaatgtcacttcctattcctccagcaagcagcccagaacaggaagattatatcacctgataagccttaggcacaaggctcagacagctcccagaatatcctaagccccaggaaagaagaacagaacttccagagtacagctgactgctttctgcatggtaagcactgggcagcctggtgaacaaggcaggggtaaaataaggaaggtgatgattccttccatttatttagagtgttacgctaagaattcctctcctggagtgggatgcatttcagtgtgcggacgcgtgggtcgacgatatcccgggaattccggaccggtaccagcctgcttt

SEQ ID NO: 124160 - DNA, 641 bp, Homo Sapiens
atcaaatgaaaaatttataaaattgcagttttattacaaagataccgatctccttgctctctccccctccccctgggggccataaaaagaaagctgggtgggggaaggagaggaaataaattcagagaatgccaaatactacattcagcaggaagctaatgctgggattccggcagtccagggaagggctggctcagggtgactctccccagttcagtcctccgtttgctggagacctgggtgagcctcagtccctttcaaactgtttcgctccgcgtgcagatttttggagcaattctttcctcctgacgcgataacagaccgcgaagcatccccagaggagaccaggagtccgattgctcccggaaagtgctcggcatcctctgcgcggctggctaataccgaggtttaggcgttagttggtccgctttgacccgaggaagagcatggagcagaagaccgccctgcgttatcccccggctgggccgcggggcacctgtgcgctcccgctgcgccttgggccgggatgtctttgtttcttccgtgcacagcactcggcaggccctgcgccctcagcctgcctccgcagcagctgggaaccgggcagcccagctggcccgccgcacggcgttaccagagct

SEQ ID NO: 124161 - DNA, 589 bp, Homo Sapiens
atttttattttttgcatttatttaaaaaatcccatcatgaccctggaagcctttagaacagttttatcctttgaaacacaggacacatttctcccagtgcgcagaatttcaagtttacgtggttcagcttaagaagtgtatgtttcacgttccttagaggacaacagacccaagttatcactatgagaaaggaacagctgtcccagcttcaatgggataatccaacaccaccagctaccagaagaccctctcactccagtctcagaggggagcacgctcagtagggcttgctgtcattcttcgaacgtttgagctgcactttaagccgcttcatgccaatctgaaagccgttcatggactggatggcagcttgggccgaaacaggattgtcgtaacttacaaaaccaaaacacttgctcaggtttgtctgcttgtctatgaaaaccttggcagacacgacattcccaaagggcataaacatctgcagcaggtcctgatcaccaaactcctggggcaggtggtagatgaacatgttggctcccttctgaccttccttctgggcttcagcagcaccaatactctgctgtgt

SEQ ID NO: 124162 - DNA, 1228 bp, Homo Sapiens
tatttttattttttgcatttatttaaaaaatcccatcatgaccctggaagcctttagaacagttttatcctttgaaacacaggacacatttctcccagtgcgcagaatttcaagtttacgtggttcagcttaagaagtgtatgtttcacgttccttagaggacaacagacccaagttatcactatgagaaaggaacagctgtcccagcttcaatgggataatccaacaccaccagctacctgtacaacagtaagatggtcaatccctgtctgttacccacagggacagcatgacaaggagagagcccccatctgacttaatagcaaaccaacccctttattcttatctctgctgctaggggtcaagactggtatttgttgaggtttcagattccagagacccagggatcccatccctggctgtggctacagtcacatcttaacagggccacctctgcccaggtgtacattcccaacagcatgtccttcctggttctctacccccacagcacttcttagagcagaggcagagcccagaagctgtgtgggtcacaggcaagagctgaagtaagacctgcaagaggcggcagggagctaactgtagcacgaggacaaaaatgaacacggtaatactgaggtaaatgaacactcaattcatgtggaggctgtaaacgtcctgatgtcacctctgcctcaagagcagaaaatgtgactggagtggttacaggaggggcctgccagacccctgtgggaatactacatctgggacacctcaatcaaggaggcaagggagaatttctggccactggcaaatgaagcatactggcttgcagggaccttctgattcaagtacaccaagaaataagctcctcctcccccaactagatggtattgatcactctgcccacaaatggtacccccttcagcaagaactgcaagcccttcttggatttgccttcatgagaaaatggtggcttgggatggaggtgacattccttgctgtggtgaactgcaaagaaggaaaccaggcaatgtattccatagaggcctttaaagagacccgttggaaatgggccatggtctaatttggtgttgaaataaactaacctctttggctgtttctcccaacctgccaccagccaggcaaggccgatccaatactgactgctggctgggggagctcgtaatggtatgccgcctgctttttgccctcgccgactacctcgggg

SEQ ID NO: 124163 - DNA, 848 bp, Homo Sapiens
  misc_feature (56)..(67): n is a, c, g, or t
  misc_feature (86)..(96): n is a, c, g, or t
  misc_feature (99)..(100): n is a, c, g, or t
  misc_feature (103)..(106): n is a, c, g, or t
  misc_feature (112)..(112): n is a, c, g, or t
  misc_feature (116)..(117): n is a, c, g, or t
  misc_feature (125)..(125): n is a, c, g, or t
  misc_feature (127)..(269): n is a, c, g, or t
  misc_feature (277)..(277): n is a, c, g, or t
ggggggcgcgcgcgggcgcccacaagaagagggtttttgtagaaaaatcttttctnnnnnnnnnnnnaggcggcgcccacaagggnnnnnnnnnnnggnnggnnnngttggngggnngggggggngnnnnnnnnnnnnnnnnnnnnnnnnnnnnnnnnnnnnnnnnnnnnnnnnnnnnnnnnnnnnnnnnnnnnnnnnnnnnnnnnnnnnnnnnnnnnnnnnnnnnnnnnnnnnnnnnnnnnnnnnnnnnnnnnnnnnnnnnnnnnnnnttttttgnaacattctacaagtatttatttcattgctgaccattaggttgcagcatgcaactctcaacaatgagctgcccctctccactcctatagaagctccaaatactatggtaccactatgtaggttttcagcctttcaaaggcttttattattaacatcatcattacttcagcaggagccttttagggacttaaaagcactgattatctataaaaagtaacttcatatttcatgcacaaaattcccaattggcagatttaggtccataaaagaaaggaaaaaaattattctagttatataaattatcaggaataaaatagcatttctccttgccttgttataaggaaataatatatttttccttaccaggaatcaggatagtatctttgatgatccctcagggttataaaattgcttactggttaaagttttttgccaaagatattaagaaataaaaagttcgctcattttcctgtgcaatttaaagaaatatttgcagtatgtacaggaattttaagttatattgcagaccctggcaataatatttaaaaggcctattttccccattaaaaaat

SEQ ID NO: 124164 - DNA, 1012 bp, Homo Sapiens
tgagggtgccaaggaatcaaaggcattgggccatgaaaagggcaaagggggcttcccacagcaggcattgtttcttgcctccccccctggggctacgcgacccagcccagcagggctgtgacctaggagagctgctccagcctggggcatgaggggccctagagcaggatgccggggctaggagtggactgccctgctgatgggtcgtttttctgtgaagaagcttttcaacagtagcacctgactgaagctgaccacgaacagggcaatcgtctcgccaacagaccagtaagagactcggctattaaggtcttccgctcgggcccggtcctgggcctcccgcagccggtaatgcgtctgggagtcaatcaccgttttcagagcctcatggatggtcacgcaggcggactccatctgggtgagagctgtgaccctgttccccatgtctgggagaatgggaggctcatcgcccacttgaaagtcaaagtagacggtcttgtgagagaaggtggaaaactcattactgaagcaaaactgataaacgcccttgacttcagcccggtacgtgaagctgtcgtactgcttcttcgtttctctgtagatggtgttcccctgggggtcctctacatagcagtcaacatcgtagtggcctccagtgatgacctggtaatccagggagaacttcacgccctgctccacctcctcgtggaagcactgcttggcgttgtccggcagctcgaaggtgagctcggccccgcagggctgctcggcccggcgcaggagcagcagcagaagcagcacggaggcggagcgcgggacagtgctgcccatgatgctctcggtcccgtctcgagggccgcggctcgggcgctgcgcccccggcgggctggggcgacgactaccgaccgggtcctaggaggatgtaaggggataaacgtggcaccagcggagctctgcgcttccgctgtacgctgtggtcgtacgatatcccggaaaaccgacgtgtacctag

SEQ ID NO: 124165 - DNA, 1397 bp, Homo Sapiens
ttttatgtatgttttttccaggacgctcacacttagtttttattagccacagtttcccacagttttctacctcctaggaaatacacagctcaccaagggcacccagtcaccattctgtcctgcttgcatggctgacactgttgctcaccgagggtgagcagatctgcaaagtcacccagggcctggtttcctcaggtacagagaaccccaaagaaagaagagccagaacttagagcccctttcttctccatatgggataggacacccaagacaaatgacccatgcatcatgaaacagaggcagggccctaagctgcccaagaggcctgggcacttggagttcctgccaacagccaggccactgaaccattgcctgtccaccctcccacagtggctaatccctggcctagttgtaaatgtcttttcagcgctgcacacttaatgcagtcggatgccttctgattactggtctctgagaccttcagctgctgaggtgcaagaatcaagcatgggcatgaaaggcaaagggctaccacagcagcatcgttctgcctccaccctgggctacgcgacccagcccagcaggctgtgacctaggagagctgctccagcctggggcatgaggggccctagagcaggatgccggggctaggagtggactgccctgctgatgggtcgtttttctgtgaagaagcttttcaacagtagcacctgactgaagctgaccacgaacagggcaatcgtctcgccaacagaccagtaagagactcggctattaaggtcttccgctcgggcccggtcctgggcctcccgcagccggtaatgcgtctgggagtcaatcaccgttttcagagcctcatggatggtcacgcaggcggactccatctgggtgagagctgtgaccctgttccccatgtctgggagaatgggaggctcatcgcccacttgaaagtcaaagtagacggtcttgtgagagaaggtggaaaactcattactgaagcaaaactgataaacgcccttgacttcagcccggtacgtgaagctgtcgtactgcttcttcgtttctctgtagatggtgttcccctgggggtcctctacatagcagtcaacatcgtagtggcctccagtgatgacctggtaatccagggagaacttcacgccctgctccacctcctcgtggaagcactgcttggcgttgtccggcagctcgaaggtgagctcggccccgcagggctgctcggcccggcgcaggagcagcagcagaagcagcacggaggcggagcgcgggacagtgctgcccatgatgctctcggtcccgtctcgagggccgcggctcgggcgctgcgcccccggcgggctggggcgacgactaccgaccatcccgggaattccggaccc

SEQ ID NO: 124166 - DNA, 654 bp, Homo Sapiens
ttttggttagcctcactagtggtttatcaattttggttgggttttcatataaaaccaacttttatcttgttgattctttgcatttcttttttgtctctgttgcatttggttctgctatgttatttattattttttctttctactaattgtgtgtttggtttgttcttgctttttgagttccttgaggtgcatcattaggttgtttatttgaaatctttctacttttttggtgtaggcatttattgctataaactttcctcctagtactgcttttgctgtatcccataggttttgcatgatgtgtttccattttctgtttaaaaaaattttttgatatccatcttaatttcttcattgatccaatgatcattcaatagcacgtttaatgtccatgtatttgtacagtttccaaatttcttcttcttattgatttcaagttttattccattgtggtctgagaagatacttgatatgattttaatttttaaaattttgttgagccttgttttgtgtcctaacatatggtctatcctggagaatgttccatgtgttgatgagatgattgtgtattctgctgctgctggatgaaatattctgaaaatatctgttaggtccatttggtctaaagtgcagcttaaatctaatgtttctgtg

SEQ ID NO: 124167 - DNA, 2889 bp, Homo Sapiens
  misc_feature (71)..(82): n is a, c, g, or t
  misc_feature (991)..(991): n is a, c, g, or t
  misc_feature (1078)..(1162): n is a, c, g, or t
  misc_feature (2762)..(2825): n is a, c, g, or t
gcctttaaagaaaaggttttatatgaaaggttccattttgtttctgtataaaggcttttatcctgtaaggnnnnnnnnnnnncacaaaaccctagacataataaatgcctgttttctacaaaaacaatgtctaactctgggtggactgatctcttctcaacagcccagggcagggctggtccctcattcacctgtgtccacagggccgaagacactgcacacactaggacaggatttgattgaatttaaatcctgccacccaccaaggagacctcgggatatttaatgtttgagggccacactaaacgatcactgcagagaaccacctcttttctttactgtagtttaagtatgataagtgggctttgctattacttattggaaaaaccagtaagaaaagctaattttcaggcttcaatgtgatttgacatgcaaacgggaagttttgccaggggttaataaaggttgtgaattccaaattcctagccgaatatggctttgctggtaagccccctggaagggaggttgggagggctgaccagatggtcatcggggcactgggatggaggcacgctggggcctgactgcctgctctgctggagactgcagaatggatggcagatccacagtgcatccccctttcaaaccccaggaggcatctgtcgccttctctttgttagacagtctggagacagcagaaaccctctgctctatttttttgccactctaaatatagcagaaaacaaaataaaataaataagataatctttgctgcctccaggtgccctctgagggacagacagctgctccagagttgttcatgaggacaaaaagcccaggcagcctggagacccagctgctctgggtgagccttagctcacttcctgtggttcctgggacttaccaggcccacccccatgcgcatttctccaggcaggttctgaggactctttggacaatttctctttcttctcaacccttcaatctcctnaatccacccccctacccccaatattttcatagaaactaagggaattttggaggtgaaagaagtcatctagtttccagtgtccacccnnnnnnnnnnnnnnnnnnnnnnnnnnnnnnnnnnnnnnnnnnnnnnnnnnnnnnnnnnnnnnnnnnnnnnnnnnnnnnnnnnnnncctgaggcccaggtcccccagttcccaccccgttctgcagcccacccctcagtcggccttgggcagggacttcctgtgcgaggggggcacgaggtgggggggcaggctgctgggcagctcgtagccgtcgagcttgatcttgatgaggtgcttggccagcgcgaactcctcctcatcaagcatgccgtcgcagtcgcagtcggccagcttccagatcttgcccaggacgctgttgggcagcttggaggtcaccatctccttcttggcgttgacacctgatatcttgccattgatgggcgacagagtgtagaagagctcgtcgtagacgggcttgtctttggccacgacccactcctcctcgtcggcgccctccttggcaccctccccgtagccctggttgaaggggccctcggtggtgccatcgaaggcgccgccctgcaccagctgcgtgggcgtgctcgtctcctcctggctgatgaggttcatgaggggcgagatcttgttgctcagcatgttgtccactgcctcgatcagcttgggcttcagcgagtggaatttggtgaagtcatagttctcaagctgttcctgcatagccttgaccttcagggaagtcccctgcagtaatctggtattctcgctgtagctgaatgtagatttccggtagcctgctgataagctctctcttcttgttgtccgtgtccgaatacacttggcatctccttcttcaggtagctgatgatgtaggcatgcaccttggccagcctcgctcgcttgatgaggtcgttgagcttgcgcaccgctgccttctgggggaggctctggatgtctctaaagaggtcctgggcctcagcctcgaagagccggcggttgtccgtgttctgcaggggctgcgcccagaaggagccaatgtagacgcgcagtacctcgggcgtgttgatgaccttgcctagggaccacatgagggccccgtagacccgcatcagctgctgcgtgtccacttggtcggccttgttcagcacgacacggatcttgtcgtcctgggccccggaaaggccttgatggcctctgagaattcatctgagatgtccagcttgtgagcgtcaaagagcaggatgatcctgtccaccctctcggcaaaccactgcaggacctggcagaagtcatagcctcggctgatgcgctgcttctccccagaaaggatgccggggctgtcgatgacgctgatgctcttcaggacctgattggggagctgtgagcacatgaatcgattcaggaaagcgtttccaaagcgactgagctttgtaaacggctttttggggtccacgactaaagcattccctggggtgctgccctcagtctctccatacatcacggcgatgaaggagtctgtggtgggctccggaccaatcctcatgcctgggaaatcctgctccagtaggtatctgatgaaggtggtcttgccggtgctgtactggcccaccagcaggatcatgggcttgttctcgaagtcggcgtcctccagcgcaggcgagtggaactcgtggaagcggtacgcctcctccagcggcagcaccttgcgcaggtagagcgagcgcagccnnnnnnnnnnnnnnnnnnnnnnnnnnnnnnnnnnnnnnnnnnnnnnnnnnnnnnnnnnnnnnnncatccagctgaacatcctgccgccagtccacgctcggatgggacatcccggaaattccggaccc

SEQ ID NO: 124168 - DNA, 568 bp, Homo Sapiens
  misc_feature (402)..(428): n is a, c, g, or t
gattatttacagacttctgaaaagctggtgaagtttcttcatatcagtagtaaaaagtgcattacagtgcttagaagattttgttttttgcttttaagttattttagactttaattcaattgccaataatctatttagattttttcaaactaggcatgcagttaataattcatccatttcttcctgattcatagtcatttggagtcattttccagcacatggtggtacctcaggagtttttgaggcacacggggctatttgcttcagttctgtagtaatatttatttagtgtttttgtgcttggaattgtatggggcagtggagggaaataccaggatgactaaagaggatattttcatcagcagggagctcactgcgttaattcgtttccttaagtttccnnnnnnnnnnnnnnnnnnnnnnnnnnnccctgaaagcacacattggtatcttgagtttttgaagccaaataatgggtataatgaaatggctcattagagcttatgtttgtaaccaaaccctgaggagaattttgtttttgacattgaccctgttgatattgcctgaa

SEQ ID NO: 124169 - DNA, 1160 bp, Homo Sapiens
  misc_feature (1043)..(1077): n is a, c, g, or t
  misc_feature (1095)..(1095): n is a, c, g, or t
  misc_feature (1135)..(1135): n is a, c, g, or t
ttttatttattttcttcagcattgtgttttactttttgggagagaggctaggaggaggaaggggtgaaaacagcgtctcactggagtctcaaaagtgtatgaatcttctggtagtgcaaggatgggataagatggccagggaagtcagatggaaaatccccaagattctttttgctactgatttctataattaaaatatgacatatgtaagggactagtgcatgatattcaataaatgtcagttgtctttcctaactaggttcctcacaggctaggttatgcctagatatcatcatcctcctttcagggaatgaagctcacctagaaaactagggaactaaaagtgcaatatggtttgggtaatgcagttggttagctgtctccccatcctcccaactcactattccagggaggggctgaaaacagaagtggctcccctgaagtctagttagcatgtcatgacagagtccacatgaagggctgtgggctgcaactttctagtgcacagtcctctctttttggcgatgataattgtagggaaagaagcgcacacgcatgctgatttcacgagctgtcttcaggatctcaacagccttgctgtgctcaatatcttggaaatccacatcattcacagctagaacttggtccccttcctgcagtcctgctctatgtgcatcagagtcaggaatcaccttggagatgaagatgcctagctgggaggcctttcctcctcggatgttaaatcccaactgagctccaggaggcttcttcagtgtgatggttcggggcagaaactgggtcaactcattgttgtagtccgggtggtgtaccctctcatgaggaggaatccatgctggaggattctcataggcaggcaagaaaaccaccgggtagtcatcataaggaatccggctgtccatctcgggcaaggcccagtgggcagtccacagcgacctcagactccgctcactgacaattcagtctgggaaccccccggccgtaatggccgaattcccgggcatatgtccggtaccgtcgactgnnnnnnnnnnnnnnnnnnnnnnnnnnnnnnnnnnncggccgcttcctcgctcnatactgcgctgcgctcggtcgttcggctgcacagcggatnggcccatatgaggtatatagtcctt

SEQ ID NO: 124170 - DNA, 899 bp, Homo Sapiens
  misc_feature (741)..(741): n is a, c, g, or t
  misc_feature (799)..(799): n is a, c, g, or t
  misc_feature (848)..(848): n is a, c, g, or t
tttctgggaacaatcaagctttatttttacaaaaatgaaaattgtagcatgtctcaacagccagcctgaggtagggctggctcagaactcactcagaactgctgggttccctttgctctttcttggtttcaaagcaaaaccaggccacagtgccccaggaatgaacccccagccccgagaggttggtcaagggtgaggtctggctggtgccaggaggctattggcagcctcacctttccttccaggaaggggcagaaaggaaccatctgggaaggtgggagcacctcacctcactctgtaggctgtcatggctctaataaggggtataggatgggcctctccaggccagatccttgctctggccaaacagggacgcaaggcccgggttcagccgcactctaaagcagcaggtcctgcctctccaacaggttcctgggagggactgcatctctggtaagctccaaagtcccaggagtcagaagcctctagtgcaaggtgcctgagcactggggtcacaggcccaggagcacagtggggcagtgaggaggagctatcactgcaccctccaggcaagagaagtccctgagtagctggtttccctggcccagaggcaggggtggccctgacggtcatgggtttttgaaatccaggacgtggagggttgtagacagggcagcatagagatgcttggtggtgagacgcaggcagtacacaggggctgctgaggggagtccacgtcancgggaaagcgtgcaggcaggcccttttgagccgggtcccacgccgtacaacaccgtantaggagggaacctgtggccaacaggtggttgccatctgtctgcaggcantacaggggtggttgtccggggggctccttccacttccatgaccaattttcg

SEQ ID NO: 124171 - DNA, 1477 bp, Homo Sapiens
  misc_feature (1179)..(1179): n is a, c, g, or t
  misc_feature (1201)..(1201): n is a, c, g, or t
  misc_feature (1301)..(1301): n is a, c, g, or t
  misc_feature (1337)..(1337): n is a, c, g, or t
  misc_feature (1365)..(1365): n is a, c, g, or t
  misc_feature (1396)..(1396): n is a, c, g, or t
  misc_feature (1452)..(1452): n is a, c, g, or t
caaggtatagctaattttattattatcaaacaaaactagtagatataacttccaggaaataagttacataaatataacagaataaattcattttcttaagtttcaaattaaagatgattaagaaatacagctttatgtaaagtttctgctttttctcaaccacgcctaaagaggaaagaactggcagcaggaacacttgctcctaggaaacaaatacaacaaaattataattaaaaagatcttcaagctatcaaaatttgtgagagaaggatggtaagaatgcagtagaaattaccaaatgacaaacaaaatcctatcagttttcaggttggtcaaaagtaacttcatgaatatagcctgtgatcagcatatgtcccatagcttatatgccctctatacctccagagttgcataataaacttttaacaataaaacaacaacgaatatcaggttgtaaatatttatatttctctcacatacaatgttgtatgagacacttgttttaatatgtatccataggattaatactcatatggagtataatgtggaaaagtgcagaactaaagaaataagtctatccgaaaacaaaagcacacatttctcaggatttaaaaatattgcacatagtaaggttgcacagaaattactggctggttttacaaacagaatgaggtatcagtcaatctctagataaagatgagagagaggataaactacacacacacaaacacataaatccatactaagacctaagagtgccaacaactaagaaagaaatatgaaaaagctatgtaagtagctatgatttcaacactacaaaatcatttttaggctggaaccaaacacataacaatctcttggcaatatttcgttaagttttcaacttttttccagcctaaatgactatgggcaataaaaccatttcctttaccccagttctactgtagaaaggcacagcgctgtggtaaatatcaaaccattcctttctcaacctttcagtagcaattaaccaagatactgttctcctttactgaatgactcaattatacagtttcatgtacactctgcaacgcaagtcacagatgtcatagaacatgcaactttgaattagtaaaggtttcactgcaaaaatcattaggttcacacaatttaaatctacaattaacttttaaagtttanatcaggtaaactcaatattttncttggtaattatactggtgatattagtgagcccaagggcaggtagagaaaaagcactaggcaaaattacgtgttttttaaagaaacttcttatcaggaantattagcattttgctcggcgaatcttggctcgaggncaattcctatatgagtcgtttaattcgnatcagtcaaagtgtttctgggtgaattgtanccgcgcaaatctcacaaaaacgagcggagcattatggaaccctgggtggctagatnatctatctattattggttgcccagg

SEQ ID NO: 124172 - DNA, 710 bp, Homo Sapiens
  misc_feature (259)..(303): n is a, c, g, or t
gagaaaataactagaaaggtttatttaaatcagagagcctctgaaggcacctggtttctgtcaaatatatttttaaaaaaggcagtaacgtggcaactgtacagggtgcatgatgggtaagaactgggcatggggagttgggagggggacatggagagaacacagaggaggaggcgcaggggagaatggagtatatcaggtcaaaccatacaacggtcagacccagctcctagccaccccaggacaggcagacagtctnnnnnnnnnnnnnnnnnnnnnnnnnnnnnnnnnnnnnnnnnnnnngtgttctccaagcccaagagcctccactggcctgcacaagcagggatcagtcagagccaagagtggagaaactcaagcaaatgccgaggctacaccccgtccctcgactctgagccccaaacccacaatgtccccactgtccgtccagaggctccctccccagggcctggagatccgggcccagcacacgccgtggaaagcagaagtcagttagaagaaaaaaaccgccagaccactcaggatcacccctggcagaaggaaggggcaggaggcagacagggagggaggcaggcagtccttctgtccattctttgtcacacaattgccctgaacatgaatgagaaaacagcccccagtgccataccccgacacaggaagaaagccatgattggtcctgcggtctctgc

SEQ ID NO: 124173 - DNA, 517 bp, Homo Sapiens
  misc_feature (262)..(305): n is a, c, g, or t
tttttaaaaaaacaagaaaggtttatttaaatcagagagcctctgaaggcacctggtttctgtcaaatatatttttaaaaaaggcagtaacgtggcaactgtacagggtgcatgatgggtaagaactgggcatggggagttgggagggggacatggagagaacacagaggaggaggcgcaggggagaatggagtatatcaggtcaaaccatacaacggtcagacccagctcctagccaccccaggacaggcagacagtctgnnnnnnnnnnnnnnnnnnnnnnnnnnnnnnnnnnnnnnnnnnnngtgttctccaagcccaagagcctccactggcctgcacaagcagggatcagtcagagccaagagtggagaaactcaagcaaatgccgaggctacaccccgtccctcgaagctgagccccaaacccacaatgtccccactgtccgtccagaggctccctccccagggcctggagatccgggcccagcacacgccgtggaaagcagaagtcagtt

SEQ ID NO: 124174 - DNA, 447 bp, Homo Sapiens
  misc_feature (257)..(308): n is a, c, g, or t
gccatggagaaaaaaacaagaaaggtttatttaaatcagagagcctctgaaggcacctggtttctgtcaaatatatttttaaaaaaggcagtaacgtggcaactgtacagggtgcatgatgggtaagaactgggcatggggagttgggagggggacatggagagaacacagaggaggaggcgcaggggagaatggagtatatcaggtcaaaccatacaacggtcagacccagctcctagccaccccaggacaggcannnnnnnnnnnnnnnnnnnnnnnnnnnnnnnnnnnnnnnnnnnnnnnnnnnncgtgttctccaagcccaagagcctccactggcctgcacaagcagtgatcagtcagagccaagagtggagaaactcaagcaaatgccgaggctacaccccgtccctcgactctgagccccaaaccacaatgtcccactgt

SEQ ID NO: 124175 - DNA, 657 bp, Homo Sapiens
tacttgtttgtaaaaaatcctttacgtcttgtgtaattaccccattattaaattcaagtccttgaaaatcaactagagattataaagtctctaaagaaggcaataacaaaatttatcaagatatagtacttttcagtttttgtttagtgtcttcagcatcactgtgtctgtatttcaagtacaaatgtttttaaaaaggattctttatacatatgtgctgaattgattttaagaaagttgcatgatccctgtaggagccaccatttttacctaaaaaatgctaactttatagtatttctaattgttcaaggattttaaaattctatttcagggagtatatcttctgtggttttgaaggaggtgagttctgtatgtgccttgcagtactgtaattcaaaaataggaatctttggctgcaaaattttaatgaaatgttaggaagtaattttcgtgctaacattaaaattataactttttgaaaggtaatagattttccagaagtaaaatctgatggttctaaatcaatcaatgtgatagttcatttttaactcttagaagaattcagaggaaattaacccagctaagtaaaaaatctgtcttgattttgttacttattcctcagaatattaaacattgatcacatatttttagagtttt

SEQ ID NO: 124176 - DNA, 1031 bp, Homo Sapiens
tttgtttacacatctgcagcagatttttattagatggaagataacaagcattacctcataggtaagtggtaagaaatggcaagtacagccaagccacagaggagtgaggacattactggctatgggaatgggtacttatgaaatctaagggttgggtctcctgatgaactctaactacccagtaagctcttctctttggcactcaatatgaccactgctggcatgaaagggtctacagtagctacttcaacttggccaacagttcttccagttctggtcgagctttgaatcgtcccttgaagtcttcttcagtgtgctccttcactgacagtctgactccttcaggaagactgctttggattatttccaagaaaatttctgcaaacgtagcactcaaaccgctgatctgaaccactcgctcatgggtggtaagcactgagtccaggagcattttgctgccttggtcctgcaactgcaacacttctatggttttggttggcattgcataactttcctcgactttaatggagagagagttgcagaggttgtgaacatactgggcataactctctgccagggtcatatcatatgcagtcagatgaatatttaaaaccccatattcataatctgtccccaaattaatggctctcacttccacttttcccttcttcttcttgggctcttctgctttaattaagtgcttgtactttccaatgccgtgggtgggctttgtcttgtagggccgactgatacttagtagaattccacctacagaatagatgggcttctctcctgaagttctaaaccttaagagagaaaaggcttgcttaaaaatggtattgttcctcaggcacagcaccttttccaaggttccgctcatcctttgctgctgcgcggcctctagctgtgcaaaccgaagaccggaccctgcagccgcgttcccagggcgtctgaaaacactgaaggaacggccttgacccccggccgtaatggccgaattcccgggcatatgtccggctcaccgtcgactg

SEQ ID NO: 124177 - DNA, 655 bp, Homo Sapiens
aaacaacttctgtcactatttatttaaaatgttaaattgtacatttttcataatttctttaagagaatcttctttgggtgagtttaaagtgagagtagacaaataacttagtggctaaatgatttaatgtcagatgacttaatgaccagtttttgcccttgatccagccccactctgatattctacctcctgtgtgcttgtcttcattgtccccatattaaaatggtgactgatacggaattctggaaaaatctgatcgattaattaatgtgaatatgcatgttttccttagattctaatatggtctttcttgtgtaagaatgtggatttctaatagccatataactcaatgtttctcagtttgagccctattggcatttggggctggataattccttgtttgggggctgtcctgtacactgcgggatgctcagcagcatccctggcctctacccaccaaatgtctgcagcataccttcctacccgacccagtgtgacaatcaaaattgtctgtagatgttgccaaatgacttttgggtggaaaaattgctctcgttaggaaccacttatgttaattatggaagaatcttttttttctaatgttatttgcatctaaatttgcataactcatttctaataggtactcggatttcat

SEQ ID NO: 124178 - DNA, 1026 bp, Homo Sapiens
ctgggttcaggtcaattcgcaaggccacaggagttcccaaaccacacaggggctttcgggaacccagcccttcagaacttcgcgaagctttatcccagcgctggccggttactccagtcgtaccagacctcgccgtgcattgaggtacataatgtctgttaccagcacaaaccgagtcaatattcagccacaatcacccggccttcctgatcatgctccgtcatcgcctatgccgtaagaaactttgagtgggcactggcgggaaagcaggcccacgccactgtacccttccttgtccgaaggagctgaccactattgatgagagagtccaggcagctctctgaagttcagctggtagtttgttctcatgaacatgtggtctcttgaaggcacagtatatctggggcttcgttcctgttacccaatctaatcctcgttcatgtcactaattccaggctcgaagcccatccacattctcaaagagcagatcttgagtgtgtcgccatggtttcggacccatctggcgtgaggttttctgatactggggggtccatcatacaggagctgggccctctcctgcgtgcctctttcgtcattttttcctttgctggccgtcttactcttccttggcctactgggctactgtcctgagctcatacccctgtcttccgcacgaccgctcaccttctattcccacagcttcgggcaattcccgttacacggacgccaccttctggtgcaggcatgtacgctgccgtcacaccagcgcgacgcaactattcttttcaccgcgttgcccacgaaagctagatcttttcatagtcgacctaggtaccctactcgcgagatgtgtcctccagccaacttgaggatcttaattaagggtcctgactcaagcttgccgtgctagaatgcacatgcgagtcccctcttatgatgcaaagagcaaacccgtgatctgcaccggcccgcatggcagctagctcatcctcgtgccgaattcaacacccaggcctcgtacctagg

SEQ ID NO: 124179 - DNA, 989 bp, Homo Sapiens
gtgattcccgaagccttgcgcttcttgtggcgtgagccagcatctgtgtgtgccccttgggttcgaaaggtcaatgtcgtcaggggccacattgaggttctccacacagcacaaggggctttcgggaagccaggccttcaggaacttgcgaagggcttcatcccagcgctgccggtactccagtcgtaccagacctcggcctgcattaggtacatatgctgttaccagcacaaacgagtcaaattcagccacaatcacccggccttcctgatcatgctcctcctcgcctatgccgtaagaaactttgagtgggcactggcgggaaagcaggcccacgccactgtacccttccttgtccgaaggagctgaccagtattgatgagagagtccaggcagctcctgaagttcagctggtagtttgttctctgaacatttggtctcttgaaggcacagtatatctggggcttcttcctttacccaatctaatcctttcttcttaatccaggctcgaagcccatccacattccaagagcagatcttgagtgtggcaggtttgccactgggtgaggttttctgatctggggggtcctcatacagggctgggccctctcctgctgcctctttgtcatttttctttgcggccgtcttactcttcttggcctctggctctgtcctgagctcatccccgtcttccgccaccgctccctttttcccacgcttcggcattcccgttacgaacgcccttgggcagctgtaccgcgtcacccaccgaagcaatatttttaccgcgttgccctactcgcgagatctgccctccagccaattgaggatcttaattaagggtcctgactcaagcttgccgttcagactgccagcgaagcccctcttatgagcaaaagagcaaccccgtatctgcaccggcccgatggcagcctagctcctccctcgtgccgattcaacacccaggcctcgtacctagccgtaagttt

SEQ ID NO: 124180 - DNA, 1762 bp, Homo Sapiens
cgcttcgttataacaacattccgacaatcgtgtcccaaccctattatttccagcctaatctgaggggccattgtgccccccagagaggtcctcccaaacccagaccgtttccacccaccttgaaacccgccatgcgttctaacaatcacccctatagggccaccctttaaaacaaaccgggttctctaatctcggccccccgcaaactttttagccgcccccccctttggatttaaagtgaaatattatttgaaactatgctcttaattatcatgtggataactcaaacaaagtcattagttagtctttctctcaattttcttttaaaacccataccctcaatgaaaaatcttgggcttaaaagaactctatcacaggagcctggttggaggattcctagttttatacatgagaaatagaatgcagatttctctgaagagtgtttaaagaaggaatggtagttgagggggcttatttcccaggctcaaagtgatttaggggtggtgtcacagtgctaggtatagggtgataggacagtgatcactgccgagggccttggaacggatcttgctgtcacacaatgcaggtaacagagagtgggacaacaaaaagtaatcaaggcgccaaccaacattcttggatcgagcattcatcatataagtccaaaaggtgtaggcatagggtgtgttggggtagaggtgcctaaagctgtcagccagtggcacagcctgcagtaattccccgaagccttggcgctcttgtggcgtgaagccagcattctttttgttccccttggggttgcgaaggtcaatttcttcatgtgccacattgaggtctccacacagcacaaggggctttcgggaagccaggcccttcaggaacttgcgaaaggcttcatcccagcgctgccggtactccagtcgtaccagacctcggcctgcattaggtacatatgctgttaccagcacaaacgagtcaaattcagccacaatcacccggccttcctgatcatgctcctcctcgcctatgccgtaagaaactttgagtgggcactggcgggaaagcaggcccacgccactgtacccttccttgtccgaaggagctgaccagtattgatgagagagtccaggcagctcctgaagttcagctggtagtttgttctctgaacatttggtctcttgaaggcacagtatatctggggcttcttcctttacccaatctaatcctttcttcttaatccaggctcgaagcccatccacattccaagagcagatcttgagtgtggcaggtttgccactgggtgaggttttctgatctggggggtcctcatacagggctgggccctctcctgctgcctctttgtcatttttctttgcggccgtcttactcttcttggcctctggctctgtcctgagctcatccccgtcttccgccaccgctccctttttcccacgcttcggcattcccgttacgaacgcccttgggcagctgtaccgcgtcacccaccgaagcaatatttttaccgcgttgccctactcgcgagatctgccctccagccaattgaggatcttaattaagggtcctgactcaagcttgccgttcagactgccagcgaagcccctcttatgagcaaaagagcaaccccgtatctgcaccggcccgatggcagcctagctcctcgacgcgtgggtcgacgatatcccgggaaattccggaccggtaccagcctgctttttgtaacaactggttctatattcatcat

SEQ ID NO: 124181 - DNA, 2388 bp, Homo Sapiens
  misc_feature (898)..(906): n is a, c, g, or t
  misc_feature (1028)..(1082): n is a, c, g, or t
  misc_feature (2270)..(2304): n is a, c, g, or t
  misc_feature (2308)..(2346): n is a, c, g, or t
tccttttgggatcggacttttatttgcaatgtagcgttgctgtatcaatagtacatggttaactctaatatgcgtgcaattttcataaatatttatattttttaatgaaatacacaccaaaaaaaagcacacatgcagataattcacaaacaatcaaatccttgggaaaggctctgccatttgttcaacaaggtcaagtgtcattaggagcacagaacaaccgaatgtaaaatttctttccaggagctttccacgtggttggaataaacacaatttagaccatgcaaaactcttaatgtatattggtctgggaacttaaagatggaaacagagaatacatagggagctatgcaacacaccaagggccagtatccacaataataataacagtgacaacagcaataataatatacaatgctataagattattaaaatctattctataatgcacagagaagtacctgcttgaagccattaaatatatgacagggtctgtcttcagtgcaacatatcaaatttggcaattgaagggtatatcaaatatatattttttgctttcaaaatgtggaacaaactaaaatataaggcttttctgataaactataaaaatttaatcagcactttggaatctaatgacatatctttataatacttcctctgcagatacattcacttagttcaaaccttaacatacaaagttagtctcaggaggatcatatttccttccattcatttcttataaatattgttatccacttgaagtcgttctgatgaaggaatttcctccctattttttcagcctttttttcctcctcttagctaagaagacatcaggaagatactgcccaaagtattcattccccatgacttgctttcagtttccatttttgagccattnnnnnnnnnttctcaatgttgcactgagtgattatattagatcattaacatggaaatcttacaatatggcccttaatgttgtttgtctttatttgttcctattttcatctgtctctttgtcttctttttcnnnnnnnnnnnnnnnnnnnnnnnnnnnnnnnnnnnnnnnnnnnnnnnnnnnnnnnagaattcactgaagtatttcctaggtagccttttacttactactttaatcaaagcttatctttgtgcccaatgtgtaaaaagtgaaaatgtctcttcgaaattctatattacaatatagacagagaagttgggccttgagggcttgagtttcacttaaatactatacacatgtggtatcacacaagggggagggggagggaacaaacagaaacataacaattatttttattctgtctttacaaaagaaagcctcttctctatgaaaaagtctttttggcatctgctcccggaaacctgccccgagaacacgttccccattgctttgcaagcatctctttttaaaagcacagccactgtccccgggaggtcacgtaggttggattatcctgtcttagttgaccaacgaagaagcactggatgagttttccagggatgagctggttgcttctggggtggaaacattatacgttcctgttttaccaaaccaattgttaaatctccttgatattggagaactcatagaaaacacaggtgtggatgaacccagggatgttgactttgagtgctgtgaagaccatctcgacaatgaaaacttattcagcaaagcttcctgtaccttcagatcccagaggcatccaaagagtaaaatgaataatccctggaagacattgaggatggcaaatatgatatggaacacaaggttggtccctgggaacacagtggtgagaccaaaaccccaagtgaggcccaagagtggtgtgaggaccccaatgctcttgctgatctgaaacaggctgctcttctcctgcttgcatggcttgtctccaatggaaggcctcaggatcttggtgatgaccacaatagtgatggttatgttcaccaccacaatgatcagtgctgggatggcgaaagccagcagggccttggtgtcctcccagttgagccaacagacattcttcctcgtatagacttcccggggctgggtggctcccagcgtgatgaccgagatggcaagtgggcagccatagccaagacagaaggcaatggctttctgagtggacctgcttgtttcatgcagaatgaaaaccaggcgatagaacagcatgaggcccagtgtcagcatccagaagaagacgcccggccgtaatggccgaattcccgggcatatgtccggtaccgtcgactgnnnnnnnnnnnnnnnnnnnnnnnnnnnnnnnnnnncggnnnnnnnnnnnnnnnnnnnnnnnnnnnnnnnnnnnnnnnctagctacgcgtgacgccctatagtgagtcgatacatctttt

SEQ ID NO: 124182 - DNA, 976 bp, Homo Sapiens
  misc_feature (677)..(686): n is a, c, g, or t
  misc_feature (820)..(820): n is a, c, g, or t
  misc_feature (862)..(862): n is a, c, g, or t
  misc_feature (949)..(949): n is a, c, g, or t
  misc_feature (951)..(951): n is a, c, g, or t
aatttaaatcagtagttttattacaatacgcactgacacacaattggaaaaggaatgtcctgacattttctgagcatttcacggaaagcaaatgtaaccatccacgcagtagagtcatccacaccttttcctaacaaaaagcaaaagctttcacatgtgataactgaagaaagcaaagttttcttattcttgtctaaaaaacttcagtctcagaaaatagttattgaagtgagctgagaaggagcacatttccttcacaatgtccaaaatcctgcctctagattatccccctgaccttctaaatgacttttataatactgcagatggtattatgttcaggggctaaatgggatctacttataaggccaactactctatgtcactataattgaaaggaaagaataaattaagaaaattaagtcctgctaaaatgcacaaagacttgaagaaaatatctgggtgtattaaaagtgagatgctcttttcacgtaactcatttgaaaggttacaattaccataaacattttaactccattaaagatcattggcaaaagcttgctttcgtatctgcaaaagggctctgcctttccacaggctcggagggaaagcagcacaccgtggaagagtcactcgtcctggggaagcaggcatcagactatttgaagttgcataggcannnnnnnnnnaatccattttgtaaaagatactatggaaccttgagaattttccctccttcaatagtcattgtggcatcagttgttttaatccctttagcgcccaaatgtgcaaaacactctagtaaaaacgttacatggcgttnttggataatcactatacatacatgacttgggaacacgaaganaagccaagctgactcactattcatatagaaagactgcaggagaacttggttaaaacctcgtgcgatcttggctcgaggcaatcctanangagtcgataattcgatcagtcaagt

SEQ ID NO: 124183 - DNA, 1335 bp, Homo Sapiens
  misc_feature (332)..(340): n is a, c, g, or t
  misc_feature (454)..(466): n is a, c, g, or t
  misc_feature (475)..(562): n is a, c, g, or t
  misc_feature (835)..(845): n is a, c, g, or t
ggagtgccgccacgtttttttgtatcccacgtggggtcccagacaacgcgtaggcagtggccgcaggggccgggcaagggagcgtgccgggataaccgcgcgtgcgggaaaaagagggggtggcgtgaagacacggtttttaggaggggggtttcctatttctggcaaaaatggtttggagagagtgtcaaccccactctttggcttaatgtcccaggggcgggggtaaatagtaattgcggcgccgcctggcttcccgttggtagatgccccggacggcccctcggaacaccctatggggttttttcaagagctccggttccccccggcgnnnnnnnnnggtgggaagcccagcccttatctagcgccggggttttcttgggaacaactatggccaagttccctttctttctggggccgccgcccccaaggatggttttgaaaaatttttgannnnnnnnnnnnncggcaaagnnnnnnnnnnnnnnnnnnnnnnnnnnnnnnnnnnnnnnnnnnnnnnnnnnnnnnnnnnnnnnnnnnnnnnnnnnnnnnnnnnnnnnnnaagtttcacctatttttattagaaggaatcttgaattcaacatggctttttaaacttctttatttcaaatacacatgaacggtcgtggcacagagaaacagtgatgaaggcacaatcaacaggaccagttactaggttttcaattatagcagcaaatctgaaaataaataatcttcctttaaaaatccaacaagtacctaaaatattactacggataggaatcattcagccaatgaagacattttaaggaaaatatatacaatacatttaagnnnnnnnnnnntctggtacaacctggcaaggagattcctcaggcagcttctctaagggatgcttccagaaacatcccctaatgcagacaacctttccaaagtgttctgaatgggacacttcagtttttccattccataaatgaaacacaattgttacactttgctgatttctaaatctttcttagaaaacattactgcctacactgaaatgaaaagtatcaaatctactggcagtgcatcttacagtactgtcgatagcagccatttttaaggctcagagaatatgtcttcaaaagatattttcaccaaatttgagcaaacactgagcatttcaaataaataatggaatgctaatcaggcaaaagtaccaaacccttggttccaggacagtttgctaattactaatacaatgaaacaactaggagcaagtgacacataaaatagcctccctaaagtccaagagtattaaaatattccccacagcaaacaatcttcatttca

SEQ ID NO: 124184 - DNA, 938 bp, Homo Sapiens
tttttacactcttgtcaccagcacttttattaagacgtgaaaagacaaagacaacagaggagagcagagaataatatctctgtttcagctattccaggatgttatgccaattatccagagtccttgatctgatgtagtaaagagctagggacattttccctgaaggctttgattgctggcaaaatctcattaaacgtgtatacattcataggttggccataggatggataaaagaagagcctctggcctacatctgccacgatacatgtgcaaaaatgctctctgcagcattatttttcattgtaaaatagcagaacgaatttattattcaataattataaaatggtcaaatgtatgtgactatatttggacaatgaaaaatgcagctgttaaaagcagacaatactgatgattcagatgatgttactgatgaaaataataacagatgacaattattgagcatttatggcattcttacaggcattaccttatttaaagttcagaactaccaaggaaaagagtaacttgtggcaggcgtgagaggttccgaggcacaaaaggaagataggcattcaaggaacaccaggatagaagacccagagtaggagaagagagaggaagaggagtccgccagatgggatgctggaaaccgcgggatagctcggtggagagagggcgctcctgctccgcaagcctccctacgacggcaggcctacccggtcctgctcctgccggctctgggcatctggtttctgccgctccatctccagggagatggtggccaggctgtgccgtgtacccatcaacttctctgacagcgccgtcttctcagactccttcagagacaaggcctgctgcttctcgctctcggccaggaggaggccctcgtcatgctcctgctgcagggcagcaatctccgcactcagctgttccttctc

SEQ ID NO: 124185 - DNA, 1789 bp, Homo Sapiens
ggagacaatgacaacggcagccgccattttattgccaatcagccatgagccccgccttccatacacaatgacatttcatccccacaatcgattaacacaaccatgatagccatgaactcccaactcctccagctgctagtgctcaacgggagagtcccctccaggtctgtctcattgcagagcccatattctttctgcctggccagcagttactctcctcaatgagcaggcactggtgcagtcttgggtgggcaccagtcacccctatggaaatccttgatggatgttacaggacaggattggatgtgaggggtcttggaaatggggctcaagaatcttcatcatgaggcgtttctgcgcctactgacctgagatacagagaggaagttccatggacaccaacacccagttccaaggaggcacacattaaccttcccatgatgtggatgtgtgggaacacatgggcttttaatcacacgccatgcaatccacagaagagctgacccagcctgggggcatacacgcactcatgtgtactcaacgttcacatgcactcacaccctgggctcggctctggggacgctgaggccgctgtgagaagaaggacggctctggctccgtcagatgaggctggcaatgctggatgtggtctcgtgacgccggccagcagacaactgtcctgagatgctgaagatgctgccatggccgccatggccactgtgggtggagggagtggccatacagatggaggggcagtgtccgctcacacccacttgatacagcagcaggcccagcagcaaaagcgagcccaaggcagccagagcaatgcccacagacagcatggcggccagcggccgagcaggggcaggggcggcggccagcccggccagggtcaggccggtgaccagcagcacgaggccactgagcagcaccacgagggcgtcggcccctccaccactgcgcagcagggccacatggtgggcctggcggatgcagttcatgtcctgcacagccgagctcatcagctgtttcaccagaaccagcagagccagcaaacagagcacagtgcccgttgctagccgccattcacctgagcggctgctggtggttgacagcagtgccacgccgcccgcgccacagcctgccacgaggcccacggccacgacgaagcagagcgccgagcgccgcggctgctgggaccaccacagctccacctgctctgccagcatgtccgggggcagcccccggccccctggggcttgagcctcctgttcagacatggcttggtcaggcaggggtcagggtaggaggtcaatgtcaggggtcagagggtgcagatcacagcctggagcacctgccacctgcttggcagctacaggcccagagtcccattcctctcacagtccaggatatggtcaccctcacctctctgcctctggctctctcagtcgctggtcccatcctggctggctgagggagctggtgccacggtggacgatgggacgaacagccagagataaagcctcattcaggatcctactcacatggcctcagctgtcaccactggttcctcgggaggaggagaagcctggatgtgctggatccgatccgagaaggcagggccgagcaggtggggcactctagcttggtttccggggagacacttcacctgcctaacctgcactcaggtgagcctccatcccttggccctaggctgcagcctccaaaagccccgtgctcattctccctcaaatgcctggcttgccccacagactggatcctactgggg

SEQ ID NO: 124186 - DNA, 202 bp, Homo Sapiens
gcagacaatgacaacggcagccgccattttattgccaatcagccatgagccccgccttccatacacaatgacatttcatccccacaatcgattaacacaaccatgatagccatgaactcccaactcctccagctgctagtgctcaacgggagagtccccttctgtcgtcttctcgcagccgtatagtagtagtaggcgccgc

SEQ ID NO: 124187 - DNA, 1469 bp, Homo Sapiens
  misc_feature (305)..(331): n is a, c, g, or t
  misc_feature (334)..(344): n is a, c, g, or t
  misc_feature (346)..(369): n is a, c, g, or t
  misc_feature (1356)..(1390): n is a, c, g, or t
taaattggattattgagggctctcggtttgggactctcccggtggagtaaaatccccagttaaaggacccccaggaaatttccatatttgggatttgtttccagaaccggcttgggtttccccccccgggcggtttttttatttgggtggggaattccaagcccttaagtccatggctccgggatttccctttgggaaccaggtatgggcccatgttccccttaccctactggggcccccgcgggcccaaacggaatggttttaggaaaggtttttcgaggggccgagggcggccgaacatgttnnnnnnnnnnnnnnnnnnnnnnnnnnnaannnnnnnnnnntnnnnnnnnnnnnnnnnnnnnnnnnttagaaagccaaggtcttttattaaaggtcccgactggttttcccactgtatttccatgccagccagggtccagggacagcctctcgggaggtaccgggtggctgggcctggggcccggtagcacagcgcttaacggtatctgcctgctccactccacggggccagaggcaccagcacgatgccgccccgactcggctctgcggtggcccctgtgggcctgcccttcctttagctccagctgctgcccgcggcatccccgctcattcccgctgcgcagctccgcgcttgctatctaagatctccctccagttgtcactccaggagagcagccgtctccttgtcgggggcaggaccaggtgccgattgtggcagcaggtgaacaagatgtgctcccagcttggggtctcctcctggcctcgaactgtgtccttgtcatcaatgagcaggtcccccaagaccaccgtcttgtcccttgtcaggataattcgttctacgaactggggccccaggtgctgctccacccagcggtacttctcacccacacagtggtggtacttcagcagggggctggtgcagatgaagacctgcgtgtccggtaggtcgttcatctcccgcacagcgtcacaaggctcccgggatgggactccaggtccaggaaaaatgcccagggcttcagtacacacctgcccaccttaatccgcacagctcagggtccgcagtggacgcggttactgactcgacggcgcccacggaagccctgcgtgcagctagcttccaggcaggcactgtgaggactcctacagggaagcgacggcggaagccccgcatggaggccgccctcagaagtccgaccaggacgcccgtccatagtccaccagcacgcgcacgctccgcgccatcgccgccgggccggagctgcgagctctcggggtctccccggccgtaatggccgaattcccgggcatatgtccggtaccgtcgactgnnnnnnnnnnnnnnnnnnnnnnnnnnnnnnnnnnncggccgcttcctcgctcactgacttcgctgcgctcgtcgttcgctgtaagccgtggcgcccatatgatctataagtctt

SEQ ID NO: 124188 - DNA, 451 bp, Homo Sapiens
agccccgggttttttcctggacctggagcccatcccgggagccttggacgctgtgcgggagatgaacgacctaccggacacgcaggtcttcatctgcaccagccccctgctgaagtaccaccactgtgtgggtgagaaggccaggaggagaccccaagctgggagcacatcttgttcacctgctgccacaatcggcacctggtcctgcccccgacaaggagacggctgctctcttggagtgacaactggaggggagatcttagatagcaagcgcggagctgcgcagcgggaatgagcggggatgccgcgggcagcagctggagctaaaggaagggcaggcccacaggggccaccgcagagccgagtcggggcggcatcgtgctggtgcctctggccccgtggagtggagcaggcagataccgttaagcgctgtgctaccgggccccaggcc

SEQ ID NO: 124189 - DNA, 1251 bp, Homo Sapiens
  misc_feature (281)..(316): n is a, c, g, or t
  misc_feature (831)..(886): n is a, c, g, or t
gtgagtgtggcgggtgactttgggtctcggagatgaggttgcgcgtgtgaaagccgaggggacacccggcgggtatgtgggtgccgtgttgcgaaaggtgattggccgaagctttcggaggttggctgtccggaggggccgggggttatcggctggcctcggatggtcggccaagggatacccgggttgattgaccagaagggtgaaagaagttcggttaatgcatggtcaagagttccccccccttcgtgcgcattttttattccatgccctaggttggnnnnnnnnnnnnnnnnnnnnnnnnnnnnnnnnnnnntgattcccgggtgggagtgagccatgttttaccctttgtcaaacgagcccagctgggcatggcttttctggagtgcgaggggcccagtgtcctctcccccggggggagactccagacacaaacgcgggggcctgaggcgctgggaggcccctgtgcgagccggatggcggccagagaggacgtgtcagctcctcgtgggactgaagagcgcgaccaggcagagggtgggcggggagcctagggtcctacacaccaagcacagcgacgatcgtggcggggaggggtctgcacacctactggccgaaatgactttgtacatcgtggacccttgggactgggagaacggatggcagcagagtcttcgaaagcagaatccgaggtggccgggggcacgggtcagtagctgagggtggagtcatcccactccagctgctgctgccgggttgcgttctgggggtcgccctgctccccctcctcctcctcgctgctctccgactcggcgctggtgatgtcannnnnnnnnnnnnnnnnnnnnnnnnnnnnnnnnnnnnnnnnnnnnnnnnnnnnnnnactgctgtgctggtcctcataggtctccatggggttgacggtgatggtcagggcagagtcgtcccagtccatctcgttctccttcccggtgtcctgatcccgcatggtccgccgatgtgcggcccggatccgaaatacccccaggataatcatgaacaccaggaagctgacgcacaccacgatcacaactgtcgcagtgctggggacgactgcgaacgggtgggggttggccaggttgtggcctgacaggtcaacaaaggagcggtgttccgggtgcacgaactgtggctgggcagccatgtggttggcgtgttccatggggttggccgtgtggattacattctctctccactcccgggtaccga

SEQ ID NO: 124190 - DNA, 1170 bp, Homo Sapiens
  misc_feature (1088)..(1110): n is a, c, g, or t
ccggctggagttagttagaaccagaactttattgtagcggatacactttctgacctatcatgagtatacacatctgcgaagggaaaccgcgcggcgacagcgtgaggacatcccctgggcgtgagcgtctgtccgctgtctaaacagagcagctacagggacgggacatggaggatggccacacatagcacagccaccagtgtcctcagaactagcagtcagggtcacagaacagtattcaaaatgattgcccacctgttttagaaatctaaaattttacatgtaactaagagcaaagtgctatgtgggttttagaccatgactgtttgtttgctctcctgccctaccaccaagcaaagcagcagggctcctgggggagagggatttcaacccccctgatggcagggggtgctctggggaggagagaggagagaacaggctgttttggaaaattccagcactttgacttcgggccatgcgtctctcctggacgttctgagtacggatcgctcaggcctcctgccgtctccaaaaggagtggtcagccggtctgcaggacacctctcagtttctccttttaccagcaggaaaatgtacatttaagcataaaccacaaggctgcacacggtgagaccaggccactgcccagggagctgctgtcggaggaggagtgtggaaaaggggccagggaccccgcaccccacaccaaattaggaacaggtagaatcccaaaggcaaggcccggccacttgtagctaccctgatccagtctcttgagcagcacagctagaggcctgtggcccccgactcccagccatactcagacctgagcaggggctggggcggggctgggcggggtgggcctctccctctggggtctggggagggaggacccggcgggaagagcccgtgctcagagctccgaacttcactttacattccagtcccgggttacactagcacaaaggacacaaggaatccgatttatttacaaaatattaaaaagtcagttaatcatctacacagtaccccccatcctgccattatttatacatgcactagtttggaaaaaataaaaactttttttnnnnnnnnnnnnnnnnnnnnnnngaccgcgtaagcggccgcaagcttattccctttagttgagggttaattttagcttggcac

SEQ ID NO: 124191 - DNA, 986 bp, Homo Sapiens
  misc_feature (21)..(21): n is a, c, g, or t
  misc_feature (80)..(80): n is a, c, g, or t
  misc_feature (186)..(186): n is a, c, g, or t
  misc_feature (214)..(214): n is a, c, g, or t
  misc_feature (256)..(256): n is a, c, g, or t
  misc_feature (258)..(258): n is a, c, g, or t
  misc_feature (289)..(289): n is a, c, g, or t
  misc_feature (314)..(314): n is a, c, g, or t
  misc_feature (753)..(807): n is a, c, g, or t
ccagatcgcagaggtacattntgcttcatgattaacttgcgaggaacgcgcgcgacagctgagaatccctggcggaggtngccgtgttaaacgagcagtacaggacggacatgagatgccacacatgcacaccccagtgtcctcagaatgcagtcaggtcacagacagtatcaaatgatgcccacntttttagaatctaaattttacatgtaantagagcaaagtgctattggttttagaccatgatgttgtttgntntcttgcctaccaccaagcaaagcagcagggntcttggggagagggatttcaacccncctgatggcaggggtgctctggggaggagagaggagagaacagactgttttggaaaattccagcactttgacttcgggccatgcgtctctcctggacgttctgagtacggatcgctcaggcctcctgccgtctccaaaaggagtggtcagccggtctgcaggacacctctcagtttctccttttaccagcaggaaaatgtacatttaagcataaaccacaaggctgcacacggtgagaccaggccactgcccagggagctgctgtcggaggaggagtgtggaaaaggggccagggaccccgcaccccacaccaaattaggaacaggtagaatcccaaaggcaaggcccggccacttgtagctaccctgatccagtctcttgagcagcacagctagaggcctgtggcccccgactcccagccatactcagacctgagcannnnnnnnnnnnnnnnnnnnnnnnnnnnnnnnnnnnnnnnnnnnnnnnnnnnnnnaggacccggcgggaagagcccgtgctcagagctccgaacttcactttacattccagtcccgggttacactagcacaaaggacacaaggaatccgatttatttacaaaatattaaaaagtcagttaatcatttacacagtaccccccatcctgccattatttatacatgcactagtttgg

SEQ ID NO: 124192 - DNA, 1168 bp, Homo Sapiens
  misc_feature (577)..(616): n is a, c, g, or t
  misc_feature (721)..(733): n is a, c, g, or t
  misc_feature (1074)..(1101): n is a, c, g, or t
tgaacctcaaacaaaaggcactggtgagaatagtacttgtagagaaccccatgccccttacccgccagggtatcaaagacacttcgaggcgcccgctgtcgagagcatgcccatgtctgtgtacgcctccaccgcctcctgctctgacgtgtcagcctgctgcgaagtggagtccgaggtcatgatgagtgactatgagagcggggacgacggccacttcgaagaggtgacgatcccgcccctggattcccagcagcacacggaagtctgactctcaactccccccaaagtgcttgactttagtgaacctaggggtggtgtgagtaatccgcgctgttctttgcagcagtgtttccaagctttttttggtgagccgaatgggcatggctgcgctggatcctgcgcctctgggcgtgctagccatttccagtgtcccaactattgtcatcgtgaggttttcatcggctgtgccatttcccaacgtcttttgggatttacatctgtctgtgttaaaataatcaaacgaaaaatcagtcctgtgttgtcagcatgattcatgtatttatatagatttgannnnnnnnnnnnnnnnnnnnnnnnnnnnnnnnnnnnnnnngtacagacttgatttttcatagttttaactagatttccaagatattttgtgcatttgtttcaactgaattttggtggtggtagtgccattatctagcaccctgannnnnnnnnnnnnactataaccagggtttcattctgtctttttccactgaagtgtgacattttgttagtacatttcagtgtagtcattcatttctagctgtacataggatgaaggagagatcagatacatgaacatgtcttacatgggttgctgtatttagaattataaacatttttcattattggaaagtgtaacggggaccttctgcatacctgtttagaaccaaaaccaccatgacacagtttttatagtgtctgtatatttgtgatgcaatggtcttgtaaaggtttttaatgaaaactaccattagccagtctttcttactgacaataaattattaataaaatacttgnnnnnnnnnnnnnnnnnnnnnnnnnnnngccaacagccgcggccgcaagctttttccctttagtgagggttaatttcgagcatggcacttggccg

SEQ ID NO: 124193 - DNA, 720 bp, Homo Sapiens
  misc_feature (42)..(42): n is a, c, g, or t
  misc_feature (88)..(143): n is a, c, g, or t
tcagggtgctagataatggcactaccaccaccaaaattcagntgaaacaaatgcacaaaatatcttggaaatctagttaaaactatgnnnnnnnnnnnnnnnnnnnnnnnnnnnnnnnnnnnnnnnnnnnnnnnnnnnnnnnnatcaaatctatataaatacatgaatcatgctgacaaccacaggactggtttttcgtttgattatttttacacagacagatgtaaatcccaaaagacgttgggaaattgcacagccgatgaaaacctcacgatgacagtagttgggacactggaaatggctagcacgtccagaggcgcaggatccagcgcagccatgcccattcggctcaccaaaaaaagcttggaagcactgctgcaaagaacagcgcggattactcacatcacctctaggttcactaaagtcaggcactttggggggagttgagagtcagacttccgtgtgctgctgggaatccaggggcgggatcgtcacctcttcgaagtggccgtcgtccccgctctcatagtcactcatcatgacctcggactccacttcgcagcaggctgacacgtcagagcaggaggcggtggaggcgtacacagacatgggcatgctctcgacagcgggcgcctcgaagtgtctttgataccctggcgggtaaggggcatggggttctctacaagtactattctcaccagtgccttttgtttgagttca

SEQ ID NO: 124194 - DNA, 545 bp, Homo Sapiens
  misc_feature (193)..(254): n is a, c, g, or t
  misc_feature (332)..(342): n is a, c, g, or t
tgcgctggatcctgcgcctctggacgtgctagccatttccagtgtcccaactactgtcatcgtgaggttttcatcggctgtgccatttcccaacgtcttttgggatttacatctgtctgtgttaaaataatcaaacgaaaaatcagtcctgtgttgtcagcatgattcatgtatttatatagatttgattatnnnnnnnnnnnnnnnnnnnnnnnnnnnnnnnnnnnnnnnnnnnnnnnnnnnnnnnnnnnnnnaactagatttccaagatattttgggcattttgttcaactgaatttgggtgtggtagtgccattatctagcaccctgannnnnnnnnnnactataaccagggtttcattctgtctttttccactgaagtgtgacattttgttagtacatttcagtgtagtcattcatttctagctgtacataggatgaaggagagatcagatacatgaacatgtcttacatgggttgctgtatttagaattataaacatttttcattattggaaagtgtaacggggaccttctgcatacctg

SEQ ID NO: 124195 - DNA, 794 bp, Homo Sapiens
tcacatgattattcttgtttattgaggtctctttattctccacgggtgcttttttcttcaagtaaacagagcaggcgcaaatatctataatgaataaatttattgtcttacaaaaatcattgtctagaaatatgggaatacaagaaaagatatttgcggtcaggtgtctggtggtcaacagccagtacagttcataaagggggaaaatccaagattccaaacccacaggacaaattcttcctaatagatgttaaagcttttaacccaaaaggtttgtgttttcaagcacattgcagaggatcaaggatttagaattaacactgattcattgtcactgaatgtctgtaataccactttgactagagaggtacatgatatgaagcacagtcaaaactgaatacattaaattgttatagaggcgaatgatatattcaacattgtcttagtactgtagtgtctaaggcactttccgtaatgtcagtttgcttaactaccaaccaaaaacaggatgctaagtgttcactgtaacactgtccaaagggaagggagaaggaaaaatgaaggagtcacacccactggcatgtcaacattcaggaagatggcatctgttctggaggctccataaacctcattgacaaacttggaacaagcctcggacacaaaaccaatattcccattttgggctcaaagcagcggctgaatttgcaaggtcagcatgagggcccggctggcgacaggggaggggccttccccagctcggcttaggggtccacggctgcttgctcctgacgtga

SEQ ID NO: 124196 - DNA, 882 bp, Homo Sapiens
agccaaatgatatggtcagacatggtgagtcctgccaacctcataggaggggtcttagacactaacagagagtgaggagaaaacaccagtagtgttactcttatgacagacccagctgattaaagatttcatcagcgtaaaagattttgctatggcttatgccccccagtggtcatctttaagtttaaaaggaaacaaaacaagtatctactatgagccaagcgaggcaatttactcatctcatttattcttcacaaaaaggtgagattattcctttttttaaagaaaagaaaactgaagagaggttacataaggctatggagctagtgactaaattcaacagaatttaaagcgagttcactgggaggcctgttttctttccattccttgaaaatttggcctcccttgtcaatggttggcttttagtactcctgcactcacttgcacactgcacacttgacaagtaggtcaaaacttaattccctgcatgacaggcaggtacagcacttaaacactcctaacaatgagtgctgacaaagaaaaactgagcaaaagtggaattcgagagaactctaaattacacattatttgttgagcccacaacccagaaaaaaggtgagcattgcaatgagcccttacaggatgggtctatgaaactattgccagactccgttattcatgatcttgaaagactgcccagggcctgataagggggtctgtggcagaagtgggtgcaagttgggaaaaagggaaggaagaagcagggaacactcctcacctctttgtgtttctccaacaggctctccagccgctcaggtgccctctgccctggccccttgtttctttcagcctcatactgacgctgattgatatcttggtgca

SEQ ID NO: 124197 - DNA, 1015 bp, Homo Sapiens
cattctttcatggacatctgttgcccatggtcaagtaaatttttaatgacacatagtcactacacacctttcagccttctggagaggtaagtgtacattgatctgtcctaattagccttgcagagtacttcagacatccctgcaggaacactattatttaataaaatagaagctgttttttcacaagctcagcacttgctccttggatagctgtattgtttttttgctcttctctccttttaaaactcatatcgcatgtctcatgttcgtctttgtctttgacaatgtagtattaatgcagctctttgtgtttctccaacaggctctccagccgctcaggtgccctctgccctggccccttgtttctttcagcctcatactgacgctgattgatatcttcgtgcagactcagttggagggcaactcttaccagggaggtcatcagtttcatagcagccagggtgctagtgtgacagaaggcgcagacttgtgagtctgagaagccagtgagcagggagatgaggttgtccatagggaagtcatcatggaggaggatgtactggcaccgacagaccaatgtccccacaaactcacagaagctgccctggaacttcttccaggatagacctggagctgtcagaggatagtcccccgagtcctttacatccacaagatcagatgaaaaagttaacaagctccagaaatcctgcatcctggtcttgcttgtagctatccagccactcatctaccaaagactgtaggtggccaacgccgggcgctgggccgccgctcctgccttgcacgttagagagccggtacatgcaggtgggaagctccacacggagaggcgcgccgcgcccgtgataaggttttacctggtacatcggcatggcggaaccaaagcaagagagggtggcgcgtgccaaacaccaacgctcagaaaccgtccgaggctacgactgggggcggaccctcgtgccgattcaccacccaggcctcgtacctagcctattgt

SEQ ID NO: 124198 - DNA, 1271 bp, Homo Sapiens
ttttttttatgcaagtctttacaaaagattattttattaattcaatttttgcataaaagactgttaaaagaacttgctaacttgaaaacaattttgagtatttatgatctttccaacttgaaaacacctgaaccttatagaacagattgtgtaaagcagccagggccacaggagtgaaagaagatggagacccgccgtctggtcatgatatgagaggcctggacagtgacctcacgaacaaaaagaaatgatcctcttcagtccaaagtgtgtttgtgagactaatgactccatgccctcacatggccactcctcttacagcagacagcttcactccgctccagccccggtactgcggtctgtggtaatttacatgggaatgggatgagatctagtagttttagatccaacgcaattctgggaagggttggtaataaaccaaaactcaatctatgcagtatttaaaaaataattgagagttgtgacaacttcgattcttttcaggaggtgctgtcttaagatagaagaaagggatcaagctcttatcttagaaagcacagacacgtttagctcagggtagtgcaattcaatgctaagtggctgctccatgaaatctaagggccgggtaaggggaagaggcccagggacttcttccttgtctgacactctcgggactagcattctggcaggtcttacaagttataatacaaaaccatcagataaattctaatcacgactgtgtagttcctccccaaaataattttcctcttagaagtaaaatcaggaaaggggctgagttctgaaaagaaacatcggggctgtggcccaggccctctgagtgtggacgctgtcccccgtgtctccatgtttactgccttatcgtctcctttgtatgaaagtataatttacgtaattcgtccttggagaatcacagtggtgttcaagaaccttttgaggccatccaagtttttgtccttcagtaccttgaaatcagataatctcaacatccagaaatagcctttgatttgttctttctctgatgtcttgtgtccttgggatcaaagcctctttcactggcaccaaataatgcccagtgaggagttctggccatataatcctttgcgctgaacgtttttgatccaccactatcttcatattcctggatgagctcctggaagcggttataatcgatccatgtccaccattcaccaccaattttaaactggaaagaaaaaaatgtgtcaagtcagaagtaaaaacatccctagaaa

SEQ ID NO: 124199 - DNA, 460 bp, Homo Sapiens
tttttttaaaacttaaagaaaaatttattcttagaatttgggaatgtttgttccatatagattgtttaattaaaatgtatttgtttcttgattctgttacagattgtttaattaaaatttgtttcttgattctgttatatacatggagaaaccatgtgaaaagggatgctaggatctgagtaaaagacaagggtttatagtaaaaactaatcttttatataacttttgggaccaccttgaaccctactgaaatgttatagttcttcaacaattctaaatttcataaagaatgtcaggccaggtgcaaagcttcacccccgagtggctcccaatcaactgataaccttgtttagtaagggcttctcggagagcaggagttatcatagctcttctttcaccatcttcattcctccccatgttcctgaacaaaccagacttctcttcctgctgttccttttct

SEQ ID NO: 124200 - DNA, 3438 bp, Homo Sapiens
cagtcgacggtaccggacatatgcccgggaattcggccattacggccgggggggttttcccgaacgcccgcagcagggtcagaagggaggtggccggtctccgtcgtgacctctgacggtttctgagcgttggcctttggcacgcgctacccccttttgctttggttctgccatgccgatgtaccaggtaaagccctatcacgggggcggcgcgcctctccgtgtggagcttcccacctgcatgtaccggctccccaacgtgcacggcaggagctacggcccagcgccgggcgctggccacgtgcaggaagagtctaacctgtctctgcaagctcttgagtcccgccaagatgatattttaaaacgtctgtatgagttgaaagctgcagttgatggcctctccaagatgattcaaacaccagatgcagacttggatgtaaccaacataatccaagcggatgagcccacgactttaaccaccaatgcgctggacttgaattcagtgcttgggaaggattacggggcgctgaaagacatcgtgatcaacgcaaacccggcctcccctcccctctccctgcttgtgctgcacaggctgctctgtgagcacttcagggtcctgtccacggtgcacacgcactcctcggtcaagagcgtgcctgaaaaccttctcaagtgctttggagaacagaataaaaaacagccccgccaagactatcagctgggattcactttaatttggaagaatgtgccgaagacgcagatgaaattcagcatccagacgatgtgccccatcgaaggcgaagggaacattgcacgtttcttgttctctctgtttggccagaagcataatgctgtcaacgcaacccttatagatagctgggtagatattgcgatttttcagttaaaagagggaagcagtaaagaaaaagccgctgttttccgctccatgaactctgctcttgggaagagcccttggctcgctgggaatgaactcaccgtagcagacgtggtgctgtggtctgtactccagcagatcggaggctgcagtgtgacagtgccagccaatgtgcagaggtggatgaggtcttgtgaaaatctggctccttttaacacggccctcaagctccttaagtgaattgccgtaactgattttaaagggtttagattttaagaatggtgctctttcatgcctattatcagtaaggggacttgtattagagtcagagtctttttatttaggccagttgtcaagtgtcaataaaagcatcatgtaatttatggttttcattttatttaaaattcagcaaaatcatacgccatctaccgtgatgactgccaactccatggcagaccctttctgggattcaaaaaccaattcatcagatcgctgcctctgagggatgtacagattggctggggagctgagtgctacaataaaggaggaagtaccggggaacagtgcagggcaaaggcaggaaagagatctgagctgcctggagatcatctggggtgcggagtacaaagctttgcaagggtgtggttttggaatgacgctaaactgaaggtggagagaacagataaaaaggttggaagttgcacactgtacactgttaagaagttgagcttttatcttagaggcagcagaaggtttggagccaaggaatgaaatgatgaggcgtccttcaggtaatgaacttcagctgcagtgtgaaaggggcaggaagactggcagctgtcaaaactggaacagtccagtgagtatgtgcaggcccgggcttgggcagtgacgagggcagggagcacacatcaatttctgcggtagaaccttctagaggaagaccagacagagggtcaacagagttgaaaggagaaaataattgaggatgaggtccaagtttttagtttcagagactaggcatatggttaatatttaggtaggaaattcaggaaaaggagcttgtggggcaggaagggaaggaacggcagcttggggcactctgacatctttaacaagtcttgtaaaggcttactaaatacaacgaagcattgtaccaactataccctaataaagattaaaaatttacattccagttaactaccttaaaagttaagtccactttcatcccacgcccccatcctttccgtcatccctcacccctttgtcttgagaaaggaggtttagctgcttctttagttctgcaatttctttttcttgctctattatcttcatctgtagggtgaggttaacatttccagaattttggaaaagttcactctgcagcagctgaatggcagatggtctctgcgatgagttccttctcgttaagtgctggatatacttggcttgcactggacaccttttacggagggattccggcaactgaccagttcttaaacctgttagaacttctgctcgctccatttctgttccaaacggctgaaagagctctagcaggaccacacccaagctgtacatatctgacttggcatcatactcagatccttccaactgttcgggtgaagcgtacagacaagtacccactctggacgtatgtgttggtgttctcttcccgtttctgttggtccagtctgtgttcttctgtaggatgtctgtgcaggccagaccaaagtctcctatttttacttgctgatcagggccatgaagaaaaatatttcttggcttcagatctcggtgcacaattcccatgttatgtatgtaaaacacaccttctaccaattcttgaaaaatttttgttgcaacattggccataacataaggacaggcagactcgtccacatactcccggccccgcttgtttctctcgactatccaatcccacagcgagagctcacacagctgcatctggatgtgcagcatcaggtggtactgtgcctctgtctgacccaaaaagttgacattttcttcggaagattcttcggtggatgtgaaactctcctctaggtgggaattacgcctgagtggcagctgctgttccacaattgaactggcagacaaaccagccaagccattttcctggagctccagggtcgactcaagttcaccagattctcttatgactaaattggtggtgtacttcaccgacttgttattctgattttcagtgtcagattctccaaagcgtttttctttttctggggtgggctcagcaaagataatggatgagctgctactttcatcatttttaacaccacattgctctctgtcctcttcctggtcggagagcacttccagagatggcaactcaatggcagctctgtctgctcgtggctgaatcacatgaacatgttctatccacgcggtgtgatagccaacaatattggggtgctgaagacctgccagcaccttcacttcccgtaggaccttcatgcaaactgttcctcgtgccgaattcgccacccaggcctcgctacctagga

SEQ ID NO: 124201 - DNA, 1384 bp, Homo Sapiens
ttttacaaaagattattttattaattcaatttttgcataaaagactgttaaaagaacttgctaacttgaaaacaattttgagtatttatgatcgttccaacttgaaaacacctgaaccttatagaacagattgtgtaaagcagccagggccacaggagtgaaagaagatggagacccgccgtctggtcatgatatgagaggcctggacagtgacctcacgaacaaaaagaaatgatcctcttcagtccaaagtgtgtttgtgagactaatgactccatgccctcacatggccactcctctcacagcagacagcttcactccgctccagccccggtactgcggtctttctgtgtgctatcaggaggcaattagagtgttcgtgttcacatgcaatttcatattcggggatcagatccaccagctcgcggacaaactgtaccactttctcatgccagggcacgtgggccatggtaagactgcttgctgaactttcttcgcagtaggtaacgcccttcacttcgatgaagttcaggattctcccagggacacgagctgcgcgtaggcctggagctcgtccacgttccatgctttcacgagcgtcagtctgtagacagttcgttgttgcttgactgccaaggcttttaaactgtcaatgaatctctgccagaaatccttgaagagtgggcggtcgattttcttcaggctgtctttggtactggcatccacactgacatacagctgagtaaccggctcgaggttcctgatttccgcaggaaattgtgcgtttgtgaccaggaagctggaaattttacactggtggagtagcttcaaaaacctgttgatctctgggtacattattggttctcccacgagggacaatgcacagtgctttaccgtcattccttcttcaaagcgttctgctttgacgcccggtactcctttaaactgcttaatcatgttctgatggttttcaatggcttccttcaagatcatttcaggctggtccatcttccaccgccactcagtgcccacggggttggtgtggtgcctttacatccacaagatcagatgaaaaagttaacaagctccagaaatcctgcatcctggtcttgcttgtagctatccagccactcatctaccaaagactgtaggtggccaacgccgggcgctgggccgccgctcctgccttgcacgttagagagccggtacatgcaggtgggaagctccacacggagaggcgcgccgcgcccgtgataaggttttacctggtacatcggcatggcggaaccaaagcaagagagggtggcgcgtgccaaacaccaacgctcagaaaccgtccgaggctacgactgggggcgatcccgagaattccggaccggtccag

SEQ ID NO: 124202 - DNA, 1476 bp, Homo Sapiens
ctctcggcttcagatctagggtgctcaatttcccatgttacgtatgtaaatcacacgttctacccacttctgaaaaaattattgttgcaacattggccatagcataaggacaggcagagtcgtccacatactcccggcgccgcttgtttctctcgactatccaatcctcacagcgagagctcacacagctgcatctggatgtgcagcatcaggtggtactgtgcctctgtctgacccaaaaagttgacattttcttcggaagattcttcggtggatgtgaaactctcctctaggtgggaattacgcctgagtggcagctgctgttccacaattgaactggcagacaaaccagccaagccattttcctggagctccagggtcgactcaagttcaccagattctcttatgactaaattggtggtgtacttcaccgacttgttattctgattttcagtgtcagattctccaaagcgtttttctttttctggggtgggctcagcaaagataatggatgagctgctactttcatcatttttaacaccacattgctctctgtcctcttcctggtcggagagcacttccagagatggcaactcaatggcagctctgtctgctcgtggctgaatcacatgaacatgttctatccacgcggtgtgatagccaacaatattggggtgctgaagacctgccagcaccttcacttcccgtaggaccttcatgcaaactgttttagttgcacccttaatcaggattttttttattgcataatactgaccatctaatttattcctgaccttgtatactcttccgtatccaccttttcctaagatggcaagttcttcaaattcatttaagtaacgtgaagtttgtgcttccaaggctacttcccttgatctgattttctggatacgagaaatatcctcacaaggatcctgacgaactctctctttagcagacctcattaagtgagtaatagctctgttgtgatgtagtctcaatgagctaaactcgtcactacaagtgaaagaagacagcagccccattttgataaacgtctggcaaagtagcttaaacacctgtcttgaacgaagtgggtttggttcatgcacgtggctcaagtgctccagcaaagaaaccagcaagagttggtttgcaactgcaaaagggaaggttggctgttgtaggggttcttttaacacctggatttctgctggaacatcagattcgtcatattcggggtccgggccctcggcgggaaagtcgatggccggcggcgcagccacagccccagccccgtcgccctcctcttcgcgcttgcggaccccggagttgcccccctgcatcgccggccgcgcgcgggccgcagcccagcccgccggccagcccagcactgccacactccgatgctgcagctagcgccctcgtgccgaattcgccacccaggcctcgctaccttaaaccgttagggttactgca

SEQ ID NO: 124203 - DNA, 508 bp, Homo Sapiens
  misc_feature (424)..(424): n is a, c, g, or t
aaaatgataaatgatcaatagatagtttatttatcacagcagtgattatattttacatcaaaaatgacaaattaaaaatgaaatatatcactatctatataagtataacctactgatctcccatattttaatccattttatgacccagagacattttaatagatactacaagatatatcataacattaattatttcttagaattttaaatatggcttatgtatcaggcttaacgagtcagctaaagtctttatcagctccctcaaaactgattccagggtaaattggaaagatttgaaatctgaatagcatataaaagcataatgtctatgttttccatagttaatttatttgctgttaggcagttcttcagccaacatcctctgtttctgaccaaagtagtgtatctcaagcaggaatagtanggacaagcagggtcatagatctttattgtttcatcccaacaacagtcaggcacctgagtggggctctgaagactgaagtctaaa

SEQ ID NO: 124204 - DNA, 926 bp, Homo Sapiens
  misc_feature (209)..(264): n is a, c, g, or t
cggacttcctaaccaagaaacctagattttagatctctagcctctctgatctcctctagtctagggtgtcaaaccaggtgttctgagtcctcttggtgctattttgagtttccttcacggttgcaaaggacttctcatcaggcttcatctgataccctggtaagtgggcagtcttgggtccttggcctcatttaatagataaagaaacnnnnnnnnnnnnnnnnnnnnnnnnnnnnnnnnnnnnnnnnnnnnnnnnnnnnnnnntttccagtgttcccctctaggctggctcacttggctggcactcttgcaagcaggtagtggaaagagcttctcctgattggctcacctgacatagaccccaaagatgcccagctctgaaatgcactggaccactcgggcagggctgccaggccgtagcaggcaattctcaaaaggctcaggttcgatcttctccatgaggatgtaggaggccctctcctcactgtccttcagctgtttcagggcctgtaccatttcctccccatataggttgttacctccaccctctctctggggctttagcacaaaccggctaggggcagcaagggcctcggcgatggcctggtccccttcttcacccacatccagtgagtagaggccagcaaaggtggcgcggaggcgggccacagcctcaggctggccagggagcaacatctccagcatgcccggcctgcttagctcctgctgcaccttcttagtcccagccagctgggtggcaatgtctgggcacttggcagcatgtgacctctccagcagtagaagcttcccaattctgtagactgtactgacgaggcatgtagccatcccggaagtaaaccacagcaatttcctggccatcccctcgtgccgaattcaaaacccaggcctcgtacctagacctaatt

SEQ ID NO: 124205 - DNA, 2037 bp, Homo Sapiens
aagaattcggcacgggggtatatattagaatggagagaaacttactgaatcagcaatgcagttttatttaaggcagaattagggaaaggctatgcccctccactccccctcctcctaccactcagtcctatcccaagtcaggcactggaacctgctgaaaaggctgatgaggggctgacaggagtggggcagggttcatggacctttacctcagagcagcttaccctgagctatacccacatctcaaggatttgggggcgtctagatctcatctaagggagacacaacttttctggtcctcagatggaaagctgggggaaggtaccagtatttacccttccataaaaactttggaggtctttaggaggatacccctcaggagggctaggagaggaatgacaaatacagaggatagaaggtcccgtggcctggttgtgccctcacacagggtatgggttgtccaggactgccactcccgctgccacaccaccatctgcatgctcgatggctttggttcgaagtagatgccccacgtgcttgttcatcacgagtgtcttttcctgcctgacatagaccccaaagatgcccagctctgaaatgcactggaccactcgggcagggctgccaggccgtagcaggcaattctcaaaaggctcaggttcgatcttctccatgaggatgtaggaggccctctcctcactgtccttcagctgtttcagggcctgtaccatttcctccccatataggttgttacctccaccctctctctggggctttagcacaaaccggctaggggcagcaagggcctcggcgatggcctggtccccttcttcacccacatccagtgagtagaggccagcaaaggtggcgcggaggcgggccacagcctcaggctggccagggagcaacatctccagcatgcccggcctgcttagctcctgctgcaccttcttagtcccagccagctgggtggcaatgtctgggcacttggcagcatgtgacctctccagcagtagacgtgcttcccaattctgtagactgtactgacgaggcatgtagccatcccggaagtaaaccacagcaattttcctggccatccacaaacagccttcggtcttggtccagagaccccttttcagagatatcttcaaatgttcgtcggatcacatggatgttcctggccagtagctcattctctatggcacgctggtcaaatatgtttctttccttctcttgagcaatcagtagcaccagagcattgggtgagccgtagagctcccaggctttggcaattcccagggccagtcccttgctgggattattagagaggatcttgccagcttctttggtcttactcaggacactgagaacatgtcggtgcacagctggggtccgggaggccaggcccccaaagctggcagagatggtgttgatttcgatctgtttcagggctggggagccatctgcgctgcgctggaacatgtagtctgagcgattcaggcccaggaacacagtctgggcaatgccctcttttaggacttgcttgtggatgtcaaagagacgagcggtaaagtcatcctgtttgatggtgctggaaagagtttgctccaggaaggcagcgttctggctgacagcatccactagcaggttgaagtccatctgcacagcataggcttgctccagcagggcactggggaccagtgaggggaagagcgtgaatggggcatagctcaccacctccgaggaagtgggctcctgtgaggtcctcagcaatactccctcagccagggcccggtccacggcctgccgtgccagctcctctagctgctgtttatcctgcaagaggctcccccagttggtggccatcccaacactagttcgcctttcctccgcgaacggttctcccggccctcgcgccgctacccaggccctcgtgccgaattcgccacccaggcctcgctaccttaggaccgttgtagttactgccgtcgtttataacagcctgctttgttgacaacgagggtggggagtgggggg

SEQ ID NO: 124206 - DNA, 1044 bp, Homo Sapiens
ttctttccttctcttgagcaatcagtagcaccagagcattgggtgaccgtagagctcccaggctttggcaattcccagggccagtcccttgctgggattattagagaggatcttgccagcttctttggtcttactcaggacactgagaacatgtcggtgcacagctggggtccgggaggccaggcccccaaagctggcagagatggtgttgatttcgatctgtttcagggctgggggagccatctgcgctgcgcttggaacatgtagttctgatcgattcaggcaccaggtacacagtctgtggggaaaactgaaggctgacagtacctgcccagggactgactctgaggacctagccacagagcacacaggtaccatgaactctacacagagattagaggtaccagcaaacactcccaagcccagtggaatcattcttctggtcatcctagaattggtcactgggataaacccagtgaggaccagtgagaggcagattcccatgagctgagggcctggaccaaattcttcaagcaacaacagaaaacaaacagagatgggagggacaggttacagactggagtagggctgggaatggttacctgggcaatgccctcttttaggacttgcttgtggatgtcaaagagacgagcggtaaagtcatcctgtttgatggtgctggaaagagtttgctccaggaaggcagcgttctggctgacagcatccactagcaggttgaagtccatctgcacagcataggcttagcgtccagcagggcactggggaccagtgaggggaaagagcgctgaactaggggcatagcatcaccacctccgaggaagtgggctccatcgtcgaggtcctcaagctaagtactccgctcagccagggcccaggtccacaggcctgcacgtgccagctcctctagctgctgtttatcctgcaagaggctcccccagttggtggccatcccaacactagttcgctctttcctgcgcgaacggttctcgcggccctcgcgccgctaacccaggctcagggggc

SEQ ID NO: 124207 - DNA, 933 bp, Homo Sapiens
  misc_feature (86)..(104): n is a, c, g, or t
  misc_feature (110)..(124): n is a, c, g, or t
  misc_feature (134)..(243): n is a, c, g, or t
  misc_feature (859)..(878): n is a, c, g, or t
ggggggattccaacccttttttatgcccgggttttcttgggaacaagttttgccccgtttcctttccttttggggccccgggcccnnnnnnnnnnnnnnnnnnntttttnnnnnnnnnnnnnnnccgccaaggnnnnnnnnnnnnnnnnnnnnnnnnnnnnnnnnnnnnnnnnnnnnnnnnnnnnnnnnnnnnnnnnnnnnnnnnnnnnnnnnnnnnnnnnnnnnnnnnnnnnnnnnnnnnnnagaagggagcacctttatttggaaaacagtaatttcaaaatcatctcccgaactcagaatcgatgggtctgggtagataccctaagtaaacaggtgaaatcttcattacttgttcacttattaagtaaaattttaaattaaccgattatgtacaggagtgtttttcacacttcctgataagaatcacttggaatgccctgtaaacacagcttcactggagattaatcctatcaaattgattcagcaagtccgagatgggccagtaattggtggagatttttatttttacaaatgcttcctgatgatgaccaagtctaagaaaatttggtaaacaacggaaagttatctggaacataactttcagttttctctgcagtttttaagtgctcaactactgatcatcctagagataacccattgaaaagtcttctctaatccagttttacaaaaggaaagtctttttaacatttggtttgataaaatgttttccgaagaaatactttacttgcctgttttcatttctggcccacccgttctacttcacgttttcttgaagggttcatcttctatgagttgaggcatagcaatctaatcatttttaaaataaatggtttcnnnnnnnnnnnnnnnnnnnngagacggagtctcgctgttgcccaggagtacagtggcgcaatctcagctcactgt

SEQ ID NO: 124208 - DNA, 1198 bp, Homo Sapiens
tgagtgtggggtcagtttattgggcatgcgtcagtcagaggctgggctggccagggtcgggtagggcagcagtttgtctggaccccgagaaacccaactggaatccagggcctcatctgcttcaaagccaaagtcttcctcaaccttaatctgcaccggggccagctctggagtcagcgcatttcctgctcggcgtccatcccgtggcactcgccgcctcttccgcccactgggcccctcaccgggggctgggctgccgggttctgggggtgcaggagtccttctgggcggggacagtgtctctttctctggaggctcattctccgcattgcctggggtgggggcatccgtgccctggctgccctcatcctccagcacaatggtgaactggctggcccggtagtcatccccgtaggagtccagcactctcatgaggaacctccgttcctgctgcagcctccgagttatcctctgcacctgatggagcctgttcaggacccgctcgttcacctgctcgatctcccggcagcgccgacctagtgcctggtactttctgcgatttaattcccgctggcgccgccgccgaccccgggctgcctcttcctcttcatctcgctcccggagccctgagccgcccagaccacctgacacaaactccacttccgtctccagctcgctctccaggatgtggccaccaaataggggaggcaacgccaactctgagcctggcggcgctgagaactcctcaaagcccacggctgccatggtcccttctctctgctccaattccatctccgcgacctccggaagccccgggcctcagagcttccgacctcttcaatctgtaggttaagccgttcgcaaaactacttgtcccatcaggctcagcagccgaggacggcgggacgtggccctaggccttgtgggagttgtagtttcctgtttccggcttcgcttcggcccacccccacgtccaccccgaatccctgcttaaaggccttgctttcttgtctaacgccgcaaccagtcctctgagttgccaacgtctttcttcttgtctcgacgccccgtcgtccggccacagcgattctctgcttagcaggatcggtccacagcgggacgtgagtccctttcctcctcgcggcttaccgcctctctccgcctagtgccaggtgctaataaagttgttgtttcaaat

SEQ ID NO: 124209 - DNA, 1035 bp, Homo Sapiens
  misc_feature (845)..(845): n is a, c, g, or t
  misc_feature (947)..(948): n is a, c, g, or t
  misc_feature (956)..(956): n is a, c, g, or t
  misc_feature (959)..(959): n is a, c, g, or t
  misc_feature (975)..(976): n is a, c, g, or t
  misc_feature (979)..(980): n is a, c, g, or t
  misc_feature (1010)..(1011): n is a, c, g, or t
gggggggtgaattatacgaatatggggattcaaggggtttatggcaagtccgcggtgtggagaaggtctttccgaggttcggccgagagaatatttatatgggaattggcagacggttatatggcggaggaaggggccaggcggaagggaatgtaaggttggatatttagagggggcgggtggggaaccggggttaagtgggaggccagtaaatggtccttcaggaaattcgcatttgggggtttggtcgggaaaaaggttttgggttgcaccagcgagggggtgttgttggttaagtggggagatcccaaggcccttaagttaaaggaaccaagggattctccttatggaagacggcataattggccaaggttccgggtgaacattggtgggccgcggggggcccaacagaatgggtcttgaaaaacttctagataggcctaaagcggccgacaaaatttgtgtttattttagaataaatgcgggaggggttctagagaatctaatgcaggagtgtcaaaaatcaatggcaaaggaaaaaatgaataaaattaaaatggggtcaggagaaaagggccatgggcacacacaggaggggcagtcagtggctgagctaggagctgaagcaggggaattccttaggtgtcatatctcgtccaacccgtagtcctcctccgggaagtcccccaccgtcacgactgctggcttgacaaaggcgccatacttggcctggcattcgaagtagcgtttcccattcacactgccatcatttttccccagtggctcatcatagcggacaccaatccagtagccaggcttgaaatctgtgagacctacatacatgnacggtgccccggcgagggggattgtcccgccgcccgcacctcacagcggctgcccacgggatgggagctgggctgggccttctccctcggcaggcgctgggnncggctcgnctnctgctgagcccgtctnnctnncgttgtaccggcccgagctgctgcgcttanngaagacgggaaccggtgtctgcct

SEQ ID NO: 124210 - DNA, 2108 bp, Homo Sapiens
tttcatggaatctggtgtttattacactcgggggagagaggaggtcactcggtccagcggtggccgcagtgtggggctgtgcacacgtagtaaaggcgcatggcgtcctcggcccgcgcactgtgtgactggaagaacacagcctccttgtggccgcacttttggcacgggtggtcctcggtccgcggcaacgtggggtcctgggacacgtcggcgataatctgggtcagttcgtccacttcgtgcgtgatcttgttgacatagatgcagctgttgtcggcctcctgctggtaatcacagttccggcacgcgtagagcagaatgcggttctccttgtcttccttggggtacagcatgttgttactgtggggagggggaggtgccaggggttagttctggagccattcctcgcccgccttctaacatcacccgctccctccgcctcaccattcctggcagaagcgaatacccacgaagcccggctcgtaagtcccgtcgggctccatggcgacgcgcagcccgcgcagccctcccagccttctgcgcttggtccgccgcgctacaggtcgcgggaggggccaggcctaggtgcttcgccaaaagagggcggagctgcgcacacgtgctggctccccgccgcgtcggggtcggctctctccgcgcagaggtttcatggcttgcttcaatcttttgatatcttagagtaattgcttccaatttttgggcatcgccgcctcagtttacagaatagtatggatctggtgccagagccgggaaaacgatgcgcatcgtaaaccgcaaaacactgagcatccaggacagaagccaaggcgcttggcttggttgaaggccagtgcgcatgcgcgagtttacccttcgcggactgggcgagctcttgccactcctacctccgggcttcagtcttcgccgcctgttctggtccttttccgggccgctattggaagaaccgtgaactatggaaggcccctctggattggctgggctggcccaagagtaaggagagccctcttcctggcggtggggaagggacggcggcgattggcggacgctcctggcaggagagcgcggattggtcaggcacggagcaggaggcggggctgatagcccagcagcagcagcagcggcggcggcggctgcggagcgggtgtgaggcggctggaccgcgctgcaggcatccgcagggcgcggcaagatggaggtgacgggggtgtcggcacccacggtgaccgttttcatcagcagctccctcaacaccttccgctccgagaagcgatacagccgcagcctcaccatcgctgagttcaagtgtaaactggagttgctggtgggcagccctgcttcctgcatggaactggagctgtatggagttgacgacaagttctacagcaagctggatcaagaggatgcgctcctgggctcctaccctgtagatgacggctgccgcatccacgtcattgaccacagtggcgcccgccttggtgagtatgaggacgtgtcccgggtggagaagtacacgatctcacaagaagcctacgaccagaggcaagacacggtccgctctttcctgaagcgcagcaagctcggccggtacaacgaggaggagcgggctcagcaggaggccgaggccgcccagcgcctggccgaggagaaggcccaggccagctccatccccgtgggcagccgctgtgaggtgcgggcggcgggacaatcccctcgccggggcaccgtcatgtatgtaggtctcacagatttcaagcctggctactggattggtgtccgctatgatgagccactggggaaaaatgatggcagtgtgaatgggaaacgctacttcgaatgccaggccaagtatggcgcctttgtcaagccagcagtcgtgacggtgggggacttcccggaggaggactacgggttggacgagatatgacacctaaggaattcccctgcttcagctcctagctcagccactgactgcccctcctgtgtgtgcccatggcccttttctcctgaccccattttaattttattcattttttcctttgccattgatttttgagactcatgcattaaattcactagaaacccaa

SEQ ID NO: 124211 - DNA, 1208 bp, Homo Sapiens
  misc_feature (455)..(471): n is a, c, g, or t
  misc_feature (476)..(488): n is a, c, g, or t
gggtatatccaccccaatagtgagggtgacagagaaacggcgcgataaagtgcgaggaagaaacacacccacctatcgcccgggatagacgatgggcgtccagggcgggcgggggaccattgatatttggaatattcagaaaggctccggccttgggacttcccctggtgggtatggaatccccggtgagagaggccctcccgggacctctccctttgtggggatttttttccaggaaccgcttccggggttcccccccgcgggcggtttttttatttggtagagaaaatcccaagcccactagtgccatgacccagggattttccttgggaaagcagggtattgacccatgtttccctttacctttctggggccccgcgcggccaaaacgaaatggttttgaaaagcttcttcgagggcgcgaggcggcccgacaaggtttgttgttgtctgtnnnnnnnnnnnnnnnnntgtannnnnnnnnnnnnggaatctggtgtttattacactcgggggagagaggaggtcactcggtccagcggtggccgcagtgtggggctgtgcacacgtagtaaaggcgcatggcgtcctcggcccgcgcactgtgtgactggaagaacacagcctccttgtggccgcacttttggcacgggtggtcctcggtccgcggcaacgtggggtcctgggacacgtcggcgataatctgggtcagttcgtccacttcgtgcgtgatcttgttgacatagatgcagctgttgtcggcctcctgctggtaatcacagttccggcacgcgtagagcagaatgcggttctccttgtcttccttggggtacagcatgttgttacattcctggcagaagcgaatacccacgaagcccggctcgtaagtcccgtcgggctccatggcgacgcgcagcccgcgcagccctcccagccttccgcgcttgctccgccgcgctacaggtcgcgggaggggccaggcctaggtgcttcgccaaaagagggcggagctgcgcacacttgctggctccccgccgcctcgggctcggctctctccgcgcagaggtttcatggcttgcttcaatcttttgatatcttagagtaattgcttccaatttttgggcatcgccgacgcgtggtcgacgatatcccggattccgaccggtaccagccttgctttttgtcacacgggtctatagtactatgcg

SEQ ID NO: 124212 - DNA, 773 bp, Homo Sapiens
  misc_feature (159)..(184): n is a, c, g, or t
taaattgtattattgatgatatctaaaaaaattacccaatgtgaagtcacaaatattttgtcttttgttttcttccagaagttttaaaatcttagggtttctataaatgtataatatccttcttgagttttaaaacttgtatgaagtatgggtcaaagnnnnnnnnnnnnnnnnnnnnnnnnnngcatatgtgtattcgaatgtttttgaagagttgatcttttctctatcaaattttctttgtgccttagaataaaataaaaggacatatatcttctctttctgtctctatgtgtgtgtgttcatctatttcttcactgtcttttcttaaacataaatctacatgtctttaattttgccattactacattgtctgaactgctgtacactttataataagtttggaaatcaggtagttgagtcttccaactgtgttgtttcctaaattgtattggctattccggctcatttgcctttttcatacatttagaattagcttgttcatttcgataacaatctgtctaaatatttgggaagaaatacacgtcttaaaattactaagtcttctgacatacaaacacattatattgctgcatttatgtggatcttctttgacatctttcatcagtatcttgtattttaatcatatagtagttgaacatatgttgttggatttatattattctataattgtactgctattatatatgatatgagtttgtttcattttcaactgtttctcactaggttatataaatatatttttgtattct

SEQ ID NO: 124213 - DNA, 921 bp, Homo Sapiens
  misc_feature (497)..(509): n is a, c, g, or t
taaattaaggcttttaaaatagaaagctgatgcttgatcttgcacaatttttatgtctagtatgtatgcttgagtgaatgtgcgagtatgaatgattagagaaaatttgagtcagtgtactttatagtgtgaatcctgtgagctaatacagtctatacttatttcttccctacctgtttcacatccgtaagatttaagatatacattttttgagaggtagtctgtctgatacaatgtaaatgacaaaacataattcctgagaggcccagaacaaactggagtctagcctggagttaaattgagacttctaaaatgattggaacaaagactaagttgtgccagatgtaaatcaacccctcttttagtttactttagactttgtattagctcatcttttttgtagtaaatctatagttttaaggtttctcaagatgtggctctacctactatgatgaaaattgaagtgggtcaaaagaattagatgtacagtgaagggnnnnnnnnnnnnntgggcgaagagagggtggaaaataaaaggattcttttttcttcctttctgtttctcgtatccctgctccctttttcctccccttccctcattctttgcctctatccttagctgaagacaaactagaggagcagcatcccaggtagtttggcttttgactgcaaggtagttaagaaaggtgtagatataatgaggtagaagtagaaaggaagaaaaactcaaagaattcttaaaaggattcatagcaacataatgtgtccctgagtagaggatgctgctatgcgtgagttcatggacacaagttgattacatggtttttagaattataattatggattcttcttatttcatggtaggttgtctttaaagatataaaaattaggatgcctttatgaagcactgattataccaaa

SEQ ID NO: 124214 - DNA, 927 bp, Homo Sapiens
  misc_feature (808)..(842): n is a, c, g, or t
  misc_feature (847)..(885): n is a, c, g, or t
caatataagatatcgtctgggggggaggccttcgaagatcataggtttttaatttttacacagccctttttcacgctccgggtaagaatcttaatgaccgcagttttcaaaaattaaaaatttgcccatttactgttttattcacatttttaatttgaggattggtttgttaaacagggggcatcatcatttcttcacataaggccaggttgggaccataggcacccagctcaggcctggatactttcgctgacagttgacaggtgattaaacaacttgctgcctcggttcttctcccgaaaggttatcacttctttgatctgctctgagatgggtggcaacaaatcggaaagcttattttctgctggctgttgacactgagaagctgtaaccaacagagctcgctccaacttcaaacctgtgtggaccatctccgcatgtttctgcacgtctcccccaatctctgtactgatcttcaagtactctgccacaggaccagcaagcagcgagtcaaatgcctgcacatatggagctgctcctgcttttgaaggactgtctgcatacccacggtgcatgtcagaggtatgagatactgcctccaggcggcccactgccctctccaatctttctaccagattttgcatgtcagccataatggaccacctgctcagagttccgcctcacctccggactgcgatcagccgctctccgcttccggcaagaaccgcgttccggcaagaaccgcccagcaatctcccccggccgtaatggccgaattcccgggcatatgtccggtaccgtcgactgnnnnnnnnnnnnnnnnnnnnnnnnnnnnnnnnnnncgcannnnnnnnnnnnnnnnnnnnnnnnnnnnnnnnnnnnnnnctataaagagctagcgccctatagtgagtctatagatcttac

SEQ ID NO: 124215 - DNA, 788 bp, Homo Sapiens
cccttaatccgggcagaagggttcccagattggcaggtcccgcttcaagttctttttgcccacaggggccccgttttggtttccagggccaagtccggttggtatgggaactccttaaatgtaagcctggcaggttttggtccatatacttaaaataaagctttgggcccattctacaatgtttttttatccccatctttgtattttttgggggactcggtttgtataaaaacatggcgggcatcattcatttcttttcacataaaggggccaggcttgggagccatagccacccagcccagggcctggatactttcgctgacaagctgagcaggtgattaaacaacttggtgcctcggttctttctccggaaagggttatcacttctttgatctgctctgagatgggtgccaacaaatcggaaagcttattttctgctgggctgttgacactgagaagctggtaaccaaacagagctcgctccaactttcaaaacctgtgtggaccatctccgcatgtttctgcacgtctcccccaatctctttactgatcttcaagtactctgccacaggaccagcaagcagcgagtcaaatgcctgcacatatggagctgctcctgcttttgaaggactgtctgcatacccacggtgcatgtcagaggtatgagatactgcctccaggcggcccactgccctctccaatctttgtaccagattttgcatgtcagccataatggaccacctcagagttccgcctcacctccggactgcgatcagccgctctccccc

SEQ ID NO: 124216 - DNA, 2707 bp, Homo Sapiens
  misc_feature (281)..(281): n is a, c, g, or t
  misc_feature (338)..(338): n is a, c, g, or t
  misc_feature (343)..(344): n is a, c, g, or t
  misc_feature (348)..(349): n is a, c, g, or t
  misc_feature (356)..(356): n is a, c, g, or t
  misc_feature (360)..(360): n is a, c, g, or t
  misc_feature (362)..(362): n is a, c, g, or t
  misc_feature (365)..(365): n is a, c, g, or t
  misc_feature (412)..(412): n is a, c, g, or t
  misc_feature (601)..(601): n is a, c, g, or t
  misc_feature (604)..(604): n is a, c, g, or t
  misc_feature (772)..(784): n is a, c, g, or t
  misc_feature (814)..(920): n is a, c, g, or t
  misc_feature (925)..(926): n is a, c, g, or t
  misc_feature (928)..(929): n is a, c, g, or t
  misc_feature (932)..(932): n is a, c, g, or t
  misc_feature (934)..(934): n is a, c, g, or t
  misc_feature (936)..(936): n is a, c, g, or t
  misc_feature (939)..(945): n is a, c, g, or t
  misc_feature (956)..(1006): n is a, c, g, or t
  misc_feature (1008)..(1013): n is a, c, g, or t
  misc_feature (1399)..(1414): n is a, c, g, or t
gtggctgaggctgtgattgagtaggcggtgtgcaataaatctgtgtcggggagaggagggtggtaacatggtcgcctacgtcggtagtcgagtgtagatagatcgtcttgcgtaggggtgacgggagatcgtcattgtgtccgagtgatgggcgaggtgatattttcgcatctctgtgtggggtgtgatcgagagtaagaagggttggcgatcatagttatatgtgcggataaatcgtgcggggccgtcgcgcggggtgtagacgataaaagtgcaacgtntcggccgagcgggcgactcgtctatgacggagggcggagcaggggggagtgatatancgtgnnatannaccgagntggntntgngagtcgggtgtagtacatctggtggcgcatcgtcttaggagagagangtgtcactacgtacagcggcgagagaagtagcggtgtggcgacaagacaccaataatgcgggtcggctcgtcatgatgtggggcggcgggtcggaataccacactaggcagtagcatgagcgtgtattcggtgtgagcgcggcagcgcgtgtgtatgtacctctaaacgtggtgtgcgggggtgggggncanatggcacgagaatacctttgtcgcaggatcttggctaattagagagtggtctaatagggggcggaggaggttgattgagccctctgggcgaggtgggggtacccgggcgtgtggtagcccgcctgccccaccctcgggtttttattagaaaaagtgacgttcggatannnnnnnnnnnnnaagcgaaaaataggagtaatggatagtttnnnnnnnnnnnnnnnnnnnnnnnnnnnnnnnnnnnnnnnnnnnnnnnnnnnnnnnnnnnnnnnnnnnnnnnnnnnnnnnnnnnnnnnnnnnnnnnnnnnnnnnnnnngagtnngnnttngntnttnnnnnnngggggtgtttnnnnnnnnnnnnnnnnnnnnnnnnnnnnnnnnnnnnnnnnnnnnnnnnnnntnnnnnnttttcaagtttggtattaactttattctattttctgtataactttaagtacataaaggtttatttccacaggcctcaggaaatgggtagaaatcacaggacaatctctcttcccaccaaaaaaaagttgcatattttggtaagtgtttgtcctagagggaaaaacaactgaaatttacattagcagtgctgtgcaagattcttacataattcaagacctaaaaccagcctgcagtggaggtttcagtcctctgttcaggtgcttagacagaagccataagctgatgagcatgacagggaaaaggaggcagtgaagacaggtgacaggcacctggcagggaagaaggattcaggaatgccagactccttgaaatcatgtgggtttgnnnnnnnnnnnnnnnnccttttaaagtcatctctataggaaggtgctgggcagggatcccagagaaagaaagggtccaagactccattaactgccctggatgaagggcactgctacagcagctagtaccagagactctcctatctcacggttgaggcagacccaggatagaatagagaataaaaggaatgcttataggaaacaattttgtatggaatgctagatggccaagcctcagcctttggtccagtgcaacccttgcctcgcttgtcaacagtgaaaaattagtttggttagaagaaccatctggaaacacaccagcttctgctaccttcatgctcattgttaaaaaaagattaaccagtgtgaacattctgatctgttaattccagggactgttttctttccaatggactgtttgttggtagaataacccccaaaagctcaaagctaaaatgcatcatcagtcctagtcggcagttccttaagaatggactggcggcgtggttgagctgatatggaaaagctgcaccttcctgcagaagatcaactgacctgctatcccaccccaaatttcagcctgaggtatatttcagtgaaggcaggtagctgtgcttctcagagcagagaagcagttttaagagcaaaaaggtagaggaaatctagaaaagaaccgtcttgatacagatttatcccatggtgtgaagggagggcaaagaacccagtggcacttcgcttatccagcaatttctgtcactgtggtgaccaacttctgcccgttccatagggtcttgaactgctcaggaactgggaattcattaaagtcaccgccttctgtaggaatgaggacattcatctcggaagatttggcactgactatttcacaatccagggaattcttgctcaggtaagcatggcagccatctgttttgttgatggatatggttggcactttacccattacctgaactttgacatccttactgttgattatctccacaatgcccaccacgtcatcgaataccaggccaagtttcttacagttatctactgtaatggagttaattttgcccttgatttgcaatgtcgtgttgacacacttgtatatgtaagccacctgctttcagctctgtgtcctcaatcaccaggttggaaacattttcactgattttccactctccacttcttgccctccagttcaagtacagctggctccttctttgtggctcgtttgggggatgggctggtttggggtttaggcctcgtgccgaattcggcgcgccgtcgacttcataccctctcgcccatag

SEQ ID NO: 124217 - DNA, 889 bp, Homo Sapiens
  misc_feature (41)..(41): n is a, c, g, or t
ggacgcctgaaactgtaagagactggggggagaaggggggnccttgtggagggggaaggaggacctgatcgggcagagggttccagatgcagtccgctcagttcttttgccacagccccgttttgctccaggccagtccggtggtatggaactccttaatgtaagcctgcagctctgtccatatacttaaataagctttgacccagtctacatgcttcttatccacatctttgtactctttgaggactcggtttgtataaaacatggcggcatcattcatttctttcacataagggccaggcttgggagccatagccacccagcccagggcctggatactttcgctgacagctgacaggtgattaaacaacttgctgcctcggttcttctcccgaaaggttatcacttctttgatctgctctgagatgggtgccaacaaatcggaaagcttattttctgctggctgttgacactgagaagctgtaaccaacagagctcgctccaacttcaaacctgtgtggaccatctccgcatgtttctgcacgtctcccccaatctctttactgatcttcaagtactctgccacaggaccagcaagcagcgagtcaaatgcctgcacatatggagctgctcctgcttttgaaggactgtctgcatacccacggtgcatgtcagaggtatgagatactgcctccaggcggcccactgccctctccaatctttctaccagattttgcatgtcagccataatggaccacctccggactgcgatcagccgctctccgcttccggcaagaaccgcccagcaatctccgcgcgacccacttccgggccctcactgggccctcgtgccgaattcggcgcgccgtcgacttcatactctctcgcc

SEQ ID NO: 124218 - DNA, 1733 bp, Homo Sapiens
  misc_feature (928)..(963): n is a, c, g, or t
gccacaaatttttcaaaccctcgaggggttattgttctccaggtgaaaggggccaggttagccttttggtttttttcagagcccagaagaaggccgtttttaaggagcaaaaaaaggttagaagggaattctagaaaaaggaacccgttcttgatccaggattttatccccattggggtgaagggagggccaaagaaccccagtgggcactttggtttatcccagcaaatttactgtccactgtggtgaccaacttctgcccgttccatagggtcttgaactgctcaggacttgggaattcattaaagtccccgccttctgtaggaaatgaggacattcatctcggaagatttggcactgactatttcacaatccagggaattcttgctcaggtaagcatggcagccatctgttttgttgatggatatggttggcactttacccattacctgaactttgacatccttactgttgattatctccacaatgcccaccacgtcatcgaataccaggccaagtttcttacagttatctactgtaatggagttaattttgcccttgatttgcaatgtcgtgttgacacacttgtatatgtaagccacctgtttcagctctgtgtcctcaatcaccaggttggaaacattttcctgattttccactctccacttcttgccctccagttcaagtacagctggctccttctttgtggctcgtttgggggatgggctggtttggggtttaggtgcagagaatggtttggggccactgcgtactggaccactctgagccttcagggcagggttcttgtgagtcttcatgtcatcagatacatgtttcagggcatgtgtaatgctctccccctgattaatctgcgcgaacagtgctgagcgggaagcagactcatctgagcctgaactggtagagactnnnnnnnnnnnnnnnnnnnnnnnnnnnnnnnnnnnncctgatccggcagagggtccagatggcagtccgctcagttcttttgccacaggccccgttttgctccaggccagtccggtggtatggaactccttaatgtaagcctgcagctctgtccatatacttaaataagctttgacccagtctacatgcttcttatccacatctttgtactctttgaggactcggtttgtataaaacatggcggcatcattcatttctttcacataagggccaggcttgggagccatagccacccagcccagggcctggatactttcgctgacagctgacaggtgattaaacaacttgctgcctcggttcttctcccgaaaggttatcacttctttgatctgctctgagatgggtgccaacaaatcggaaagcttattttctgctggctgttgacactgagaagctgtaaccaacagagctcgctccaacttcaaacctgtgtggaccatctccgcatgtttctgcacgtctcccccaatctctttactgatcttcaagtactctgccacaggaccagcaagcagcgagtcaaatgcctgcacatatggagctgctcctgcttttgaaggactgtctgcatacccacggtgcatgtcagaggtatgagatactgcctccaggcggcccactgccctctccaatctttctaccagattttgcatgtcagccataatggaccacctcagagttccgcctcacctccggactgcgatcagccgctctccgcttccggcacgaaccgcccagcaatcccc

SEQ ID NO: 124219 - DNA, 866 bp, Homo Sapiens
  misc_feature (88)..(88): n is a, c, g, or t
tggtatctagaggatccctgctccacttggttgctaaggaggggtaactggcccagtttgaaatggagcaggtcaaaactcccgtgcntgatcaatagtgggattgcacttgtgaatagccactagactgagcctgtgcaacatagtgagaacccatctctttaaaaaaattaagacaaaaattactccagaggcagggtcagtgtgtttgatctcacctatatgagggataagtttgggagttatgaaaagacaatcgttatgaaaagaagattggagcttagggaataggccataggcagtgctctcaggtgaataggagtaccccaccctggctctcctgatatttcttcttatcccttctgtagccatcgtcaggcagtggcagcaggagtccaaagagaaggtggtgtccctcctgctgtcccaccttcccctgcttcagccaggcaacacagaggccaagtcggagtacatgaggctactgcagaaagtgctggcctactcaatcgagagcaatgctttcatcgaggagagtcgccagctgctttcctatgccctcatccacccagccaccacactggaggaccgcaacgcactggccctctggctgagccacctggaagagcggttggctagtggcttccgctcccggccagagccctcctaccattcacgtcaaggctcagatgagtgggggggccctgcagagctaggccctggggaggcagggccaggctggcaggacaagccaccccgggaaaatggacacgtgcccttccacccatccagctcagtgccgccagccatcaacagtattgggagcaatgcaaacacaggtctcccctgccaaatccaccctagcc

SEQ ID NO: 124220 - DNA, 1615 bp, Homo Sapiens
  misc_feature (187)..(199): n is a, c, g, or t
  misc_feature (1125)..(1154): n is a, c, g, or t
ttttttttcgttataaaatgtcacgtttattgctacagtgctgttatatacaggacaggtctctgaatccacctgaaagagggtcgttttaaagtcccaatcatccagccagctgtgttgacacgtatacaattattttctttaaaaaaatttttttgaaaaccatcttgaggcactcagatcacannnnnnnnnnnnnataattgtggttcccaggaactgctgtttcttcctcctcgcgctgggtgaatctcgtttgaattctatgcagaacgcacagttccagaggctatggggccactgcccacccagacctaggggcagggccaggagcaaaacaagagggagaggcaagttcccttaagagatcaaactcccagggcgtaggggaagccaccgagaagggagaggcagccggacagcccctcccctccgcctggcctggactgggggcagataccaggcattgagctggccttgaggtttcccttgcatctaccatggggcccaggctcccaagccagtctggggaggggagtcaggcagtccaggatctcctgggggtaacggtgggagtctcaggagtggcacggggggagacgcccgacctgcagcggggatgaacacagccagcccaggggtccacaaggcctcaatgcagggaggggcatgaagggcacatgaaggcccccagctagccaggcccacacctgggtgccacagtgaccactgccctagttcgtgtggaactggatgggatcccagggtaggagacttgcagttttaaacccaagacagtccccagccagctgggaagagctggttaccctcatggcaaaagaccagaaaaggagacctggagagaggcctgggtgctgggacatgggacacagatgggcccgaggggacaccctgctggttctgcagcagggtcggacgcacagcccaaggccttcgtggggctcagaccagcacagtcccccggctccagccactcttgcccttggaccacacagagggagggcagcaggtgtggccccaggcccagggatgctccccagcattgggggaggctggccaggcccctggcatcctgtctacgtcacgatggccctctggtgtaannnnnnnnnnnnnnnnnnnnnnnnnnnnnntcctgtgctggctcctgagcagcatcctctcagccagagttcagagcatgagcctgggtccctggggcaaaggagtgaaggacagggtgtccaggaggtccccagcaccagggctccagggtgtggtccccatgccaggggtcactggtcccaacaaaatgccccatttcagagagctgtgcaggttccaagggagagcagcttaggggggcctggggagggcgttgtgtagggtagccctgggggccacagctgcttggcagagtcacctgggagggtcagagccaccttgctgacgtcccttcccccaagcccaggtcagtccccttcctgaggggagaggatgcggcagggaagccccaaggtgcctttatgcagggaacgcccacgcatcactttccacatgacggaaaccacctcgtgccgatttcaaacccaggcctcgtacctagccgtaagtt

SEQ ID NO: 124221 - DNA, 1537 bp, Homo Sapiens
aagtcaaaaataatctttaagcactcaataattcatcttttaatgcactaatgtacaaactgcatgcaattactacctgctcaatctacacacttaatggaagtttccaagaatttcattgaatttcattgactgggttttcttcctccttaaccaagttgagaacactgtctggtagccccctgaaggtataacctctccttctcctccccttaactgactgacttaaacttgatccactgattggcaccacgaacttcaaaaggtgggtcgctggagtagatgtggtagcccagctcttccaaaggtggctcaggatcggccgtggcaaactgggcagcatcctcaatctccttcctcacttccacatcaatttcctttagttcttccacactggcaagattgctgttcaccatcctgtccttgagaagcataatagggtcactcttacttcttacttcctgaatttcttctcgtgtacggtaactgactccagggtcactcatactgtgtccgtggtaacggtaagtctgcagctccatcaggatgggccccttcccagatctacaataggcagcagcaaaccttgttgcctctcggacgcacaggatatccattccatccactctcagcccaggaatgaaatcgcctctcttgtagtaatcagtgctggctgccgctctctcaacagacgttcccattccatagcgattattctcacagatgaaaatacaaggtaatttccacaaagctgccatgttgtaagcttcgaatatctggccctggttagcagcaccatcgccatataaagtcaggcagacctcatcttttccattatacttacaggctagagcaatcccagcgcccaggggcacctgcgctcccacgatgccattgcccccgtagaagttcttggcatacatgtgcatcgatcctcctttccctttagcacaacctccttttcgtcctgtaagctctgcgagaatttctcggacggaaaggccccgggtgaaagtaaagccgtgagcccggtaggctgtgatgagatggtctgtggggttgatgccggcctccaggcccacacagcaagcttcctgaccatcacacaagtgacagaaaccacgaataattttctgtttatacagctgatctgctttcaactccattcggcgtacagtctgcatcatcctgtagtatttgagcccatcctccctggtgagcactgttgtgacaggagggccttcttccagccggtgaaggtcacatttcttaatttcaaatgtagcatcatttgcaaaattacgggatgctaccagcactctgcttgccggcttctgagaagcgccagacagcacgcgggagacggcggcgagcatcttcctcatgaagcacaggcagtggcggcagcggcgactcctcacaacccaggaggcacgacgcgggtgcccccaagtctccttcaggtgccccagcagaccctcgtgccgaattcgccacccaggcctcgctaccttaaggaccgtgatagttactgccc

SEQ ID NO: 124222 - DNA, 1293 bp, Homo Sapiens
  misc_feature (59)..(81): n is a, c, g, or t
  misc_feature (467)..(539): n is a, c, g, or t
gtgccaagctaaaattaaccctcaactaaagggaataagcttgcggccgcctctcaggnnnnnnnnnnnnnnnnnnnnnnnggcagcaattttttttaaaaccaatttgtacaagtttatagtttactttgtttccaagttctcaaacctttcaagatctgaaaagtgagatactgtgtctaagggaatgtttcttttaattcacgccgaagaagttgggggtttgatttctttcgccggggtttcgatcgagtcaacagctcactctgctgggctgctgtttgcacacgaagtccgtcataaaatcaaactcgttttgccccagccagagttcgggcagctccttgatgcggtccaaacccatttctatcaccaaggacataagaacttcctcgtcgatgaaatcagtgtctatgacattgggcggcagcattgcagcggggacgtgggccacggaggcgggcatnnnnnnnnnnnnnnnnnnnnnnnnnnnnnnnnnnnnnnnnnnnnnnnnnnnnnnnnnnnnnnnnnnnnnnnnnggggtgctgctgccgcccgagccgccgggggtgctgctgccgccgctgtgcttggggttgcaatctcggaagtgctggtttgtcccgttcatctggtggcctgcagcagggtgcaaatccggcatgtagtggttgtgggggtaggggtgatggttgaaatactggttgttgagcttctgcagctgcatgctggccggcagggagcctccctggctggccaccgggggacccatgaactgggagttgttaaacctggccgcgggggccagcgcgctcggggggtgccctccgttcacagtccccggccccatcgcatgcctgatgccgctcgtggcattcatgttgcccgcgccgtagtgtatgtgctcgcccattagggcgttgaaggcgtgctggggctgctgctgctggtggtgatgggggctcgggaactgccccatgcccatgcggtgggcagggtgatggtgcagcccattggtgccgtcggggaagcgcccgtggttcattgccatcatatggtctgccatttccagtccttccgtttttgcgaattctgctccgaagaccgagggcgggctcgtcgcgtccaggaccggctcagcagcacatagaggggaccttcctggcgtgcaaagcgcttcgctgtcgcgatgtcggcgccgaggtctcgcagcggccgctggggcagattcggagccgttcccttttatttcccctccgttgccctcacagctcggcaggaccgcccggcagc

SEQ ID NO: 124223 - DNA, 684 bp, Homo Sapiens
  misc_feature (256)..(256): n is a, c, g, or t
  misc_feature (260)..(278): n is a, c, g, or t
ttttatttcttaactttttattgacattggcaaattaaaatagaataaattaacaagtattttttcaaaaaaatgttttgtacaaaaatactgtcaaaatttcctaaaaagctttcaacacagtagtatcttttcatgtactgaatataactattagcacagtgtcaaaaatgttgaagacagaaacaaaataaaaatctgtgaaatgtttgccactgacgacattccacaccctattatcatctgtacatatggnggtnnnnnnnnnnnnnnnnnnnacagccaacttgaaagtgaacagtatgactttcctgatccagaacagtttggcccacatctgtttaatcttccagtttagcatattttaaaaattagtctgtactcaaatgcatagttaaaaaaatgaagcgagatggcagtttgtgcagtaatatctgcccttcgaagttcatgcaaccaactaatgcaatttttcctttcactcgtaaatctgaatgcagttcagtcatttgaaaccatctacaaaatccacaagattaagcagtttgccaagattaatatctaacagttgagcactggagaaagtgagggaaaggagtaaaaacaaacaacgaaaaagaccaagttagctagatatttcaactacataagggaggtgggtgaatgtcaaggctacaaaaacga

SEQ ID NO: 124224 - DNA, 1184 bp, Homo Sapiens
  misc_feature (365)..(415): n is a, c, g, or t
  misc_feature (417)..(480): n is a, c, g, or t
  misc_feature (738)..(738): n is a, c, g, or t
gagaattgtacaagtttatagtttactctgtttccaagttctcaaacctttcaagatctgaaaagtgagatactgtgtctaagggaatgtttcttttaattcacgccgaagaagtagggggttgatttctttcgccggggtttcgatcgagtcaacagctcactctgctgggctgctgttggcacacgaagtccgtcataaaatcaaactcgtttgccccagccagagttcgggcagctccttgatgcggtccaaacccatttctatcaccaaggacataagaacttcctcgtcgatgaaatcagtgtctatgacattgggcggcagcattgcagcggggacgtgggccacggaggcgggcatgnnnnnnnnnnnnnnnnnnnnnnnnnnnnnnnnnnnnnnnnnnnnnnnnnnnannnnnnnnnnnnnnnnnnnnnnnnnnnnnnnnnnnnnnnnnnnnnnnnnnnnnnnnnnnnnnnntgtgcttggggttgcaatctcggaagtgctggtttgtcccgttcatctggtggcctgcagcagggtgcaaatccggcatgtagtggtagtgggggtaggggtgatggttgaaatactggttgttgagcttctgcagctgcatgctggccggcagggagcctccctggctggccaccgggggaccccatgaactgggagttgttaatcctggccgctgggggccagcgccgctcggggggtgccctccgttcacagtcnccggccccatcgcatgcctgatgccgctcgtggcattcatgttgcccgcgccgtagtgtatgtgctcgcccattagggcgttgaaggcgtgctggggctgctgctgctggtggtgatgggggctcgggaactgccccatgcccatgcggtgggcagggtgatggtgcagcccattggtgccgtcggggaagcgcccgtggttcatggccatcatatggtctgccatttccagtcctggaagtgaaaagggcagataatgagacccgcgccacacgtgtcgcccaccacagcgcaccccacttttgctcgcctctgccccccaggattcccgggcgcacgtcggctgcgaaccaccacccccaagatcccactaacagcctgtgcacccgggctagccaccacggaagagctaccactcataacacagccggacgctgcacaaacag

SEQ ID NO: 124225 - DNA, 1234 bp, Homo Sapiens
tttaatgttggaaaaatgtaaattatttatggcacctgtgacaactgggcactttggaatcacaaagtttatggttgaagaccacttggggtgattatcctccaaaatgtttatttggcttcttgaagttctgcagaggttgaggcagctgtctcaaaactagaggacagagccctgtgggcaggtgggtgtgagaaactcaaacaccgcagtcttcacagacccacaagctattggcaggtgcaatgtgtttcttggggcagcagctatcctgagacaggatatcacagggtcacatcaaggaccccagtcatctcacaactcttagaccacagctgctgctgcagtttctggttgtaggtgacgtggagggacttggtctctttctcgttgtataggtaacggccaccaactccttccagctctggggtgactgctgcgtagatggaagtccacgctccttcatcgggggtcttgaaaagcaaccagccgagaagcttcttcgccagacgggtggcccagaacacgtgcttgtagaggtccgtgttgaccaccccggggtccaccacgttggcggtcacgtggcttccctcagccgccagcagccgctggaggtggtaggtgaacaggacaagggccagcttgctctgggcgtaggctgcgtggggtgagtagcaggcactgctctgaaggtcatccatgttcagctcagcgacgtaatgggtggcagaggagacggtgaccaccctcgcactgtggccaggggacccagactctttcagcgtatccaagagaaggttggtcagcaggaagtgccctaggtagttcaggccgaaatgttcttcgaatccatctctggttttcctctgagggaccatcatcaccccagcattgttgatcaggacatggagaggaatcttcttcatcttgaacttctgcacaaactgccggatggaagtcatggaagccaagtcacagtataaaaattccactttgtcgttcaaggtttcttcttttattttgcttacaacttgtttggctttgctgtcattatttccagctatgataacatgcatgccaagtctcgccagatgcttcgctgtagaatagccaatgccatctgtccctcccgtcactatagcgacacggtcaggtcgtggggggaaaactggctccaggaagcccccgcggcagcgccgcagcagctgcgccaggatcaccgcggcgcctaccg

SEQ ID NO: 124226 - DNA, 1090 bp, Homo Sapiens
  misc_feature (50)..(50): n is a, c, g, or t
  misc_feature (288)..(288): n is a, c, g, or t
gggaccccccagttcattttccacaaatttttaagacccacagctgccgnctgcagtttctggtttgtaggtgacgtggagggaccttggtctctttctcgtggtataggtaacggccaccaactctttccagctctggggtgactgctgcgtagatggaagtccacgctccttcatcgggggtcttgaaaagcaaccagccgagaagcttcttcgccagacgggtggcccagaacacgtgctcgtagaggtccgtgttgaccactccagggggtccaccacgttggncgttcacgtggcttcccttcagccgcccagcagccgctggaggtggtaggtgaacaggacaagggccagcttgctctgggcgtaggctgcgtggggtgagtagcaggcactgctctgaaggtcatccatgttcagctcagcgacgtaatgggtggcagaggagacggtgaccaccctcgcactgtggccaggggacccagactctttcagcgtatccaagagaaggttggtcagcaggaagtgccctaggtagttcaggccgaaatgttcttcgaatccatctctggttttcctctgagggaccatcatcaccccagcattgttgatcaggacatggagaggaatcttcttcatcttgaacttctgcacaaactgccggatggaagtcatggaagccaagtcacagtataaaaattccaaattttaggaggaaatgatggtgcacgcctgtagtcccagctcctcgagaggctgaggtgggaggatcgcttgagttccagaggcaaagccagcccgggcaacacagcaagactcacgtctctttgtcgttcaaggtttcttcttttattttgcttacaacttgtttggctttgctgtcattatttccagctatgataacatgcatgccaagtctcgccagatgcttcgctgtagaatagccaatgccatctgtccctcccgtcactatagcgacacggtcaggtcgtggggggaaaactggctccaggaagcccccgcggcagcgccgcagcagctgcgccaggatcaccgcggcgcctaccgcgtagacccgcagggccgc

SEQ ID NO: 124227 - DNA, 1511 bp, Homo Sapiens
  misc_feature (415)..(484): n is a, c, g, or t
  misc_feature (1212)..(1216): n is a, c, g, or t
  misc_feature (1219)..(1237): n is a, c, g, or t
  misc_feature (1239)..(1252): n is a, c, g, or t
  misc_feature (1254)..(1254): n is a, c, g, or t
  misc_feature (1256)..(1256): n is a, c, g, or t
  misc_feature (1258)..(1259): n is a, c, g, or t
  misc_feature (1261)..(1264): n is a, c, g, or t
  misc_feature (1266)..(1274): n is a, c, g, or t
  misc_feature (1276)..(1277): n is a, c, g, or t
  misc_feature (1279)..(1281): n is a, c, g, or t
  misc_feature (1288)..(1288): n is a, c, g, or t
  misc_feature (1291)..(1291): n is a, c, g, or t
  misc_feature (1303)..(1307): n is a, c, g, or t
  misc_feature (1329)..(1330): n is a, c, g, or t
  misc_feature (1339)..(1340): n is a, c, g, or t
  misc_feature (1343)..(1348): n is a, c, g, or t
  misc_feature (1350)..(1351): n is a, c, g, or t
ctgtaaaaattgtttctctgatatattattttcgtgatgcacaatattgtcttcggcggcgccagagtattattaccgtgtgtgttttaaccactgattaagctcttcaacgttgttattttgcccttctggaggcgttaatatatttctttcggggaggtgttggttccccccatattgtttctccccccgccccagaagtgtggggtgttctttcacaagatggtccgccgctgtacacagtttttcccatggtagaacagtgtgtttaatatatgcgcgcctgatgtctcgttgttattataacggcctcttattggggggcaccccttttttaaaaaaactgcggggtcggcccaatattttgggcgcccccccgcgggggtattttatttgagggcgcgcccccccctcnnnnnnnnnnnnnnnnnnnnnnnnnnnnnnnnnnnnnnnnnnnnnnnnnnnnnnnnnnnnnnnnnnnnnngagtttgccggcatttgctttaaaaataacaggctggtccaagatcttagaagaaaattatattcttttaaagaaaatgaaaatatcctcaagggaaaaacttaatttaagtcaaatcttgtccttttgtcgtggagccccttgccccgcgcgcagacacaggctttcctgaagcgtggccagggcgcccctctcatcgctcctgagcgtgacccggggctggagccgcacggggattttcccgagctgagcaggggggtcggggggcccaagccaggagccctggaagagggagcagggcggcaactggggccgcaaacacccatcaaagtccccaggaccaattcccacagacaccacgtggccacaggcagtgccctttgcaggccccctccccaagggtgtcacccctcaccccctcctgggaccccgcctaaaccaggcacccttccacccaccagcaggaactgcgctaggagatgcaggaacacccatgtccccgccagccccgccttccagaccacaccctgcctgggagtgcgctttgcgaggtcggggtcgggggggagggcgggtggccaggcccctgaacaacagacagcagctcccacccagcaatgcagccgggtcacctcgcacccctggccaaggcaggggccctctccagcctggtgacccacggcctaccctgaggctgcagggcacagggggctccagtggactggggnnnnnggnnnnnnnnnnnnnnnnnnncnnnnnnnnnnnnnngntncnncnnnncnnnnnnnnncnntnnnccccccnctnggtccctccccnnnnnccccctccctgtttttgcttcnnggctccctnnccnnnnnngnncgctcggccgcgcgctcaccctcggccgttctggctcgggcatttccagtgatcgttattcggtcagcaactgtccggtaatgttcgtcaatcaacaaagacggacaaattaactgggggcagagacacaaaatggtgtcagccttcatggaactctcag

SEQ ID NO: 124228 - DNA, 1409 bp, Homo Sapiens
  misc_feature (1360)..(1360): n is a, c, g, or t
ccttcttaaaatctaaatagtataaaaaaatggaatcattttatttaaatcccccaaataccagagatgaagtaaatcatcttttattttcatcttacatttggttatcatgagacatgcaaactcctccaattttaatgagaacagtgtttttgtgtctttttatcacatatccgcttaatattaggtgtaatattgctaagtcggattcgcatatgaggtgcagcatcaagtcttttcctatattttgtttttgttgcagcgtaatatgaaaaccccgtttcacacaggtgcattgtagcaaaaggaagaagtacacgcactgcacgccttgcaatgcttgggtattcctgaattaggctactccaaaaatcatttagtgaaagttcactaaaattttgcttcacttgagaatcagatgttaaatcaatcaggctctcatagtcccgtgctactaatgaagctggtttaacagtaactgtaaatggatttctaacccaagcattattgtcatttgttacaggaaagtattttaacagagtagcgcgcaaaccccttaggtgctgcacaatggcactgcaaatatctttatcaactgtagaattaatttcagtcaaaaaatcactgagtgtaggaaaacaatcaaagttttcttcttctacagatgaggcccaaaattccaattttcttaacaatgacgacattttatcaaatactgtaaaaacggtcacattttttccttgcattgacaaattaacttcatttaatttagtaaaaatatctgcaagatatgcaagtcttagcagccaagatgaatttgttaaacaatcagatagtcgaaaagcagaatccatgaaaaccaaaagttcacgacgaagttcaaaaagtcttacaagaactttacctcgagaaagccacctcacctctgtatttagaagaagtgctgtgtgctgagcacccatttcctcacataaaatttttaatagtctggattgatgtggtcgagctttaatataattgatgatttgtactgcctggtctagcacattttttagagatgtaggcattattttaactgccagtgcatgtctgtataataggcagtgactactggtgctttcgggagccacatattttattaaggtgacagcttcggcaattttcccatccactgccctagaagcatcactacaaacatcaacacatttttcccattcaatttcatgtttctgcataaaactgttgatacagttgaatatttcttcaccggtagcattactttgcaaagattcacacaggagtaggtcttcctcaatagacttattaaacctataacgaacaaacacaagcagcacagcangtcctgaaacatcagctgattcatctagttgcagtgaaaaccatcgcaa

SEQ ID NO: 124229 - DNA, 1224 bp, Homo Sapiens
tttgtctccaaaaatcaccacctttaatactccccggcctgcacacacccacagtctcactgggctccaccctcacttactgcccgccgtgatggccttgaggctgcctgcccgcgccaggatgtttggcacaaagagcagccccgaagcccgctcaatgctctcgatgggcaccaggaagcgctccagtgggatggcctcatccacaggtgcgttgggcatcacgtaggtgcggagctcaatttgcccacctgctgcctccaggatcagcaccttgaagaagtgtgtgggcactgccacgtggttcttgccgatgacctggtactttacgtaggatttcccatcagcctctgtcctgggcaggaagagtggccctgtgcagacatagacgttttggtagctgcgggtcaagctgcggctatatttctccaggttgttccaggcattctggttgaggtggggcacctggggcgcgacgttgctcaggtagaacgtgtcgtccatggccttctggctccagcggtggttggcggcggcggccaggtgaccgcggtcgaagccactgccgcggtagtcggcgttggtggcacggtggtacgcgtgcaccgagtcgtcctcgcggaagtcgcactcgcgccggtcgccgtcgccgcggagacgctcgggtcgcagctgctccaccacccagagcgcgccgcgggtgcgcgggtcgtagcacagcacgtacgactcgcggctcttgagctgcgccagccccggcagcccgtacttggccagctcgcccggcacgcggggtcccccgggcacagggggcaactcggctgccgccgccacgggcagcacgggcagccggcccagcagtcccggcgccgcccgcgcgtcctcccgccgccgccgccagccctcgacgaccgcacccagccccgcgcccaacgccagggtcaggccggcccgcagcgcccgcatggccggggagcgacctagcggcgggcgacccgcgaggctcttaaaggagccgcgtcgcgggatccaacgagggcacagggctgctggggccgcggacgatagcgtgacctcccttccactcacaaacactgccaagggcttgggcctcggaacccagaagggagcacgcagagcccaaccgggtgtccccggcgtcccctcgtgccgaattcgccacccaggcctcgctaccaaaggaccgtatagtactgcctcgta

SEQ ID NO: 124230 - DNA, 2170 bp, Homo Sapiens
  misc_feature (2028)..(2036): n is a, c, g, or t
gggggcctgatcagtgggggcagctttctttctgggtggaaaactgtcctttgaaactgactttgtattacatgtcccagctgtccagtaagctgatagctgccagcggtgtggcctatcaattcatagcagtgctctagggctgtgaaggagagatttgtgaagggagccccgtcggtgtctggcactgtgctgggctggatgtcaccgtcatgtcccttgccacttgttgctcacctctgtgggagagatggacagtcgtaaagtctcccttcagacgaatgtgaatattcagaaggctcgattctcctagcagcgtttattgtcgcccactctgcctgacccagtgttgggcataaggaaaacagagggaaagagttaaccaccctggagagagttccagcctcaaggaggagccaggcaggctacagaagtctcacagtgagggcgtggtcctgcaggttgacagaagttagaggacagatcagggaaggctgcctggaagaggtggctttgggttcatccaggccccctgcccacgtgtgcctgggtctgcccacaggacagaggctgatgggaaatcctacgtaaagtaccaggtcatcggcaagaaccacgtggcagtgcccacacacttcttcaaggtgctgatcctggaggcagcaggtgggcaaattgagctccgcacctacgtgatgcccaacgcacctgtggatgaggccatcccactggagcgcttcctggtgcccatcgagagcattgagcgggcttcggggctgctctttgtgccaaacatcctggcgcgggcaggcagcctcaaggccatcacggcgggcagtaagtgagggtggagcccagtgagactgtgggtgtgtgcaggccggggagtattaaaggtggtgattttttggagacaattctggtggcgtccgtcccaagtgacctgcagagcccctggtttcactgctgcttcactgatgtcctcggccccttagaactttcaggtgtgccgggcacccgcctgggtgaggccaggctgcagggcggccagggagatgaggatggcttcctccgtgcggatggtacggctaccctggccaggacaggtattgacgtacaggtcaaagaggacactgggttcagccacctccaggttggggtcagcatccgctccagcttccagaccctggaggcccccgaacaccacaagagcatgcctgaagttgggaagctgggcagaggccacatctgagccgcgctctgacgtcccgatggtcaggtcatacccatcttggaaggggcctcagcaacacagcactgaggcaggaagccactcggacggtgtagccccagtagagaccagctttggtgcgagggtcctgcgatgataccactttgccatggtaggtcttgccagtctgggtgctgctgctggttcagtcgcacagtcacccgaagcccgggctccaggttcttgtcaatcttcacctcctttttcatgccacagttgacaaaggagccgtggcctggccgggtggccgatccaccacgatgccctctcggaactcggattcctcatcctgacgcatgtggtgggggctgtccagggggttcaggagccctgcaaactgtagatcctggtgcttggggaagaacgccttcctcaggtactgtggacactccaggtactgcaggatccgggccagctgtacgcacgcctgccccttcttcccaactcctgtgaattccccctccacagtcttggcatcctggccctcctcatcaaacaccacgatctcatccacacagaagatggcacaggctctggcaatctgaccggccaagtaggtgcgaagctccggcgactgagcattgtccaggatggagcccggcagggctacgctcagtgtgtagggccgcccgcggtcctccttctctgccgctgcctcctcctcttccaggcgctttgcctgttcctcctgtgcccgctgccgctccagttttttcatcagcttgagatccttccannnnnnnnnctcctctttcttctgttgcttccattttcgccactcaatcctttggccgtgttcacccgggccgcacggccgcttcctgccgcgctccgccatgtcctcgtgccgaattaaacacgaggcctcgtacctagcgc

SEQ ID NO: 124231 - DNA, 902 bp, Homo Sapiens
aaatataggctaggtacgaggctgggtgtggaattcggcacgaggcacagcacaaggaactaggtgatgaggcctggactccatcccgagcctgtggattccagagtgagctgctcagcctggacctgttgcctctcagccccagccctctgcaggccagaaaaaccacggagcacacccagaggtgctcagttgcttccacctgagaggcagggctgcacaggagcaagagtggaggccctgggtcaggcagatctagattcaaactcccgagaagggtggagggaagtgctccaagcagagcagagactgaaggcgggagagcctggtgcaccgcggacctgcagggggaaggcgtgagagctcggtgcactggggacctgcatggggaaggcgggagagctcggtgcactggggacctgcatggggaaggcgtgagagctcggtgcactggggacctgcatggggaaggcgggagagctcggtgcacctcggacctgcagagggaaggtgggagagcttggtgcaccgcagacctgcagggggaaggcgggagagcttggtgcactgcagacctgcggggggaaggtgggagagcttggtgcactgcagacctgcggggggttccatattggcagaacaagattgggtgggcatgccaagaggtgacagcagggagaagcgggggcagattcagggcctgctgctgcccatgggcagaggacgagatggtcaggggtacccgacaggtctttggctgtggaggtggaatgaggggactcgaggcagggaagctgacaaggcttgccaagaaaccagatgagtagggaaactggtattgaccagagctggggcagctggcctgtaatgcagaagggctcggtgagggaggtttgcgcccc

SEQ ID NO: 124232 - DNA, 1344 bp, Homo Sapiens
  misc_feature (1157)..(1179): n is a, c, g, or t
aggctgacagaatgattaggctgaccattaaaaggactggcaactttatcctcagagtttagaggtaagtttgtaagaattcaggatgtttgtctaagattgcttgatactagggcaacaagactgagagcagagggcactaaaaagactgtctaggggttagacatcaattgtgtttaagtctgagatctgccccttaggtaccatatgaccctgcacaagtcatcgacccctccacactccagtgtgtcatctgtaatgaggatggggcactcccttccacactgcagcactgcgggaaccgagacaatgccatcgcagaggacctgcaggggacaggctacttcactcactcctctccttcccactcttcagagaacaaggacttgtgctactgtattctcattgtctaattttacagaataaatacttctattctatcgcagctcacatgtaaatccaggtaggtatgtccctatcccacttagaataaaatgaacagccaagtggccaaagtttccataactttcctccttgctgacaaatccaacccgaagtctgtgcctcctagggaaaggacaggacaaaggtacaattcagttcctaaagttatttctccctctgggagagaaaggcactgtcaaagtacaaacccaagtcagcgtgctttgaaagatcatgtcacttgtttgtaataggaaatcatgtcatccagagttttgaaagtaactgtgggggcttgtggtgggttgtcgggggcaggagtgggtgacgtatgttcagggctaggtccgtggctctggtcagggcactgccctgggtcactctgtgctggcccaggtctgctccatgcctggctgctggaaaaaccagttctcttctgacccacaaagtaatctgacggcggggcaaactcaggatctctctcagcccggagatctgactgcctcttcgaccagtatccaaaggaaaattcttttccgcggtcccactcccggatgtgtggcactccaggcttggtgtccttcctctcctggacaatgacttctactttgctactctgggcagcaggacgtggggttggcacagcctctggctccggtggcaaaggcccaataacatctccatctctattttcttcttctgttccaccttcnnnnnnnnnnnnnnnnnnnnnnngtcgaagtttggcaagtcttgcctctaagatagcctttcgcttttcctttatgttttctccctcgtgccgaattcggcacgaggggcatttgtctttattgtctcttttctatttaattcatttctttttatgctttctttgactataatttgcacttgctttag

SEQ ID NO: 124233 - DNA, 804 bp, Homo Sapiens
  misc_feature (560)..(560): n is a, c, g, or t
  misc_feature (632)..(632): n is a, c, g, or t
  misc_feature (684)..(684): n is a, c, g, or t
  misc_feature (759)..(759): n is a, c, g, or t
tttttgtggtttttatgtgtatttattaaaaaaagcaattacccgattaggctgacagaatgattaggctgaccattaaaaggactggcaactttatcctcagagtttagaggtaagtttgtaagaattcaggatgtttgtctaagattgcttgatactagggcaacaagactgagagcagagggcactaaaaagactgtctaggggttagacatcaattgtgtttaagtctgagatctgccccttaggtaccatatgaccctgcacaagtcatcgacccctccacactccagtgtgtcatctgtaatgaggatggggcactcccttccacactgcagcactgcgggaaccgagacaatgccatcgcagaggacctgcaggggacaggctacttcactcactcctctccttcccactcttcagagaacaaggacttgtgctactgtattctcacagcactcactggcctgggaaccagctgtgggagccctatgggcctggtcatcaactctcaactgcttgtgtgcagctgtaggaaccctctgaggtgtggcaggtanaggaggggtgggggttgcccaggcacactgctgactttctgggagcctgcccacccccaaccctctccttantactaatgacatgggaacccactgctccactgtgcagccccagtctgatcangtcaggctcctgatgtgaggaagcgagcatggggcgaagggaggtgggatgcactgaaactctaacaatgccgcnagcaatcatctctgacagtccacagctccagtactcccatcctca

SEQ ID NO: 124234 - DNA, 1065 bp, Homo Sapiens
tacaatgtgtttattggacacacaaaaaaactttgcaaccatcataatacatcaatatttaacctagataattctgaaataatttggattctttcatttttcaggatttgagctcatcaattatgttaaatttcctatattctgttacaaatataatacagatttcataagtctgccttgattcactgctccctaatccagagcagttaaatttcaaaatcacatagttatatagcctacctgccaaaaaagaataacccatccctgtcttcttaaagtggtagggttttaaaattcatgatacaagtaacaaagtaagttgataacaaatactattttgaactgggcaaaatctagcccaatatgtaattgtgttccccttgtatctgagaggcctgtgttggacaaccatagtactctgctttcactgtgctcaaataacctgaaatatatagttgtttctgagtagttctgagtaggaaagaaccaaatgtaaatttccttagagaccatcctggagaagacagttctaaatcggggcttgatttttcatctatgatcctagatgttctcctgaaagaatgactagcctttttataacgatacaaagttttttaaaaatacataaatgtcataaagtttattcctgtgtatacacactctgggttcaggaggttttgtgcttacatttcactactcaaatgccttcgcaaatctcagaacattcctcaccatcactgcaggcctgtgaacagataactttcatcaattaggatggctggctagtggcagggacttcatataaagaaatctttcccagaattgtttttccacattgccttctaatttgatcactccctataacagatgttcaaaattcggccacagctctcttatgaagacagagtcagataaaatgatattctgcaattatctagatcataagcataaaataaatattacaaaaatgattgtatttaaagaaattttttaaaatccagaaagtcatttaaaatagaacctcatatagtatgaacaaactataaaaatattttacatttcatg

SEQ ID NO: 124235 - DNA, 811 bp, Homo Sapiens
  misc_feature (11)..(11): n is a, c, g, or t
  misc_feature (148)..(188): n is a, c, g, or t
  misc_feature (736)..(736): n is a, c, g, or t
  misc_feature (756)..(756): n is a, c, g, or t
taaagagaaangatgacttcactaaatatttcatagaggttacctaggaggaggttgacacagcacactgctcagcagatgacttaaaattttcccttagccatttttgttctctcaagtccctttcatccataccaccactgctgannnnnnnnnnnnnnnnnnnnnnnnnnnnnnnnnnnnnnnnncttctgacaaactttgctggagtcctactccttttctctccttcttgagaaaaatgcaaattttgctccatgttttggtatagcagggaagcttccatctttttttactgaagcataacatcagggcctacattccatctcaaacggcttgtcaaggtccttccacaaataagatgttcctccaaagatgatgtacagatgccaagttggatatagctagagaaatctcatggctaccccaatcaggagagaggttgctgtttctcagaagtcctcctccccacttccagggtcatcattgtctctcaacaactttgtggggatataaaaaccctcgcggaactggttttctgagaggtgtttgaagcaggaatatattatgcaggggatggagcagccattccctggctagatgaccacatcactgttgcacactgattgtttgctaaaggcacaatgctttcctgaccagaaatgaaaaatgcctgctgctcaattattgtcaatctaactggaatagagtcaggcctcgtcagatggtttcccanacacccagatggtctcttanattctggatggtcagtgtggtagttctttccattacatccttgagattctgctgt

SEQ ID NO: 124236 - DNA, 728 bp, Homo Sapiens
  misc_feature (689)..(689): n is a, c, g, or t
  misc_feature (695)..(695): n is a, c, g, or t
ttttaataataacaaattatttactgttttataatgttaaagtatttcaccaagacaagttgcagtcaaattaaagtgagttatggaaaatgaaatacataaagatgtatttatacaagtgcagactaaatattttccatacaagtatgtaaatgaaaagatatacagtaagtgcacactcgatatgactatgcaggcaacagttagtttcagatactcttgtatagttcatgcacaaaccttcccaaagtacgagttcagtcagtcttgggggatatggagggatgattaaaaaaggattgagttccttgcaaaaatatcagtatggactggatgagggtgagcgtggtcagttatatatattacttactgtaatttgtgattgtcgaggaagaggtgtggctgttggtgtgatagtaatactgctggtgactttattggttgttttgtttagtgccccgttaattaagccttgagttcggttatcctgcagtggtgctgaagggctggcaggtctcacagggctggctacagcttgcatgtaaggacttcctaagtgaatgtggattttattatcctcagtagttatcacacttgagctattgctgtttgaacgctgaaactgccatgatgactgccggtctggggagactctgaatatcgcatgcttggcactgatttctgttggntctggngagcgtcctgctcaggagagctagctgaacagt

SEQ ID NO: 124237 - DNA, 1330 bp, Homo Sapiens
  misc_feature (1287)..(1287): n is a, c, g, or t
aagtgtttgatcaataaatcaatttatttaaaagaatatgttacaattaattacactaagtgacattaccaaacaattttagagtggttagctctagaacaaggaatgaaagaaacaatgttagccattattgtgtctgtgtattttctcttcacatttcttaaatcacaaataaaaaatacaagatactgcagtgaaaatacaattagagtttctctgaaataaattaaatgtgcatggcctgggaaaaactgaagcccagctcactggcttaaaagggggtcatgatataaaattaatgtccaagtttagcaggcggccaagtgcccccaccccgtatcactcccctctttgattctattccttaccacagccctgaccttcccacataccctagattattgctgaggagtgagctgatgctgtcctggcagcaaagaggcctggcgtgatgtgctcaggtttaggggaacaggaagtcaagaggtggacctggaagatggggagctagagaagcatacccactatctctcttctccctccctctctctgagtgttctatcacatcatcctcccaaaggaagctactgtgacacaatgaagctggtgaagaaacagcagtatgctggggtcaacagatcaaacagcttctactgctgaatgaatctagccaaacagtatgatggcgagaagggagagcacagcagtccctcctggtctggaaaattcaggtcaactaggatgcagtccccttcaagaaaactacctcctaggagcccagcccagaagttggcaaattctgagataggagagagtttcatctcctgtcagtgccctattttgctgctccaagtgctggttttggagctacaggaagggttaccccaaagctactggcctgggtaactaaaggatgaaactaaatgggccaggcatgaggatgttggaatatttatctaattcccccctgagagcttcagtccaggcctaggagctgcccttgagcatgcacatatctgtacctgtgtttaggcctagggtaaggacggggtggaaaaatggagaatagaataaacatataaagagcagagggcccaaagcatggcccaagggaacctttctgcagggacaggtttctcagggtctacattttctcctgggccataaaaagctctgagcttctacccctgaggatagaaaccaagtgtggaggaaggccagtgagagaccaggaggatcctgctggttctgctgggatgaagctgggggcactgggagaccccctcntcccagggacaaattgcaaaagaagtctgggcctgtgccgaat

SEQ ID NO: 124238 - DNA, 1868 bp, Homo Sapiens
  misc_feature (82)..(82): n is a, c, g, or t
cggcgggattggcgccatgaggtggggtttcgataagaggcgagtttccacaaaatgtcggccgcagaagaatggtcagatnggacatctatcaacacaggctcttttgcactgagaggcggcccagcgcgccgtgggtcgttaatatttatatgtgtgaggcttgaaccgtgggaagggcccttgttgaagagatccccagtgaatgggccttcaggggattcacatttcggaatttttttacaaagcgcgtgcggttgtccggcccgggacgttattttttgtggggaaaaatccccaggccttagttcatggcccaggttttcagttgggaaacaaagtatgtgccagtgtcccttacgtaagcgggcaccgcgggcccaaatgaaagggtttaaggagtttttcgaggaccgagggcggccggcaagtagtgtgatgggtggggctgtggaggagagggctgttaatgctttattgggattgcaagcgttacaaggttaaagacaaaacccaagcatgggattttgccggaaatattagcgttaaaggagctgagttgagtcaaacacgggccgcaaggtggaccgaggcggcaggcacaggtgacattcagtgtttggcgtgggggtcttcaggtgatggcagaggaggggacccaagagggggccccccactgaagacattggggacacggggaggagacaagatggagagccacgactaggcacggaggtcagacaggcagcccgggccaggatggttagtggcccaggggagagctgcaaacctggggacgcaaggggctggtcggcaagtgcccccgggaacacccactccggcgaggcagaatataacactgggtgggtgggtgtcctgacgaatgggcaggtaatttggggtgcctcgaagcgttttggatctcaggccaatgtgggttccacaattgtgacaatttggctctttgggcttctgtccaatgttccgaatggcccactcacagggcgcttgccgagggaccctctgcgactgaggcggactggcatggacgacccccggggtcatgccagccccgtcaccaggacccagaagcctcaggcctctagactgctagtcgggctgcgtgcagggggctgagctgggggcacaagtgggggcgaggtaaacctcccagaggccgagtccctgccgcagccctaggcgccgcggtggtggctgctatggcatcaccagacccgtgggctccggggcccaagcaacctggtcgatgggcagacctggcagctctcctgctctgtgggctcagacccgcctgacctccgtactccccggcctcaccccaccttgcccccaagaggtcccacagagcttcggacctcctggagacaaggcagggtgctgaggggcgggcaagatgtcaccgagggagaggggagggttcctcaagtgtgcggaaggcggccaccctgccccagcctgatggaaccctctgtttacacacctgctagccccttcccctccggccagcctcaggccagccaggagccccctcctgtggcctccgagcaccctcctgacacctgaggagaccctgcccaacccccccctccgccctcaggacttctggggaccagccactgtccccagaagccaggccggacagtggccttctccactcccctctgacttctccaagggggctcagtggccagtgccccccaggaggctccaccctcaactcaacccaagcaacagggacagatgaaaaacaaaatccaatcagggcgataaatggcggggggcaggacgtggtggtctccaggctggcttcgtgcgttcttgcttttgtcactgcccccctgttacat

SEQ ID NO: 124239 - DNA, 794 bp, Homo Sapiens
ttttttttatggtaaaaagctttaataacagacaatgtgatttcataggcaaccaattagcagattaatggatcatttaactttctttacttaaaaccaatactccactcaagaaagatgaacccaaaatgcatcctctaacactgaccaacataactaagtacaaatgaagtcaatggtgtaccccattagcatgctgcgttgtatgtcaataaaacaagccctcccccaccccgagccctggcccctggcaaaacatagataaatgattgtgcactgcgtgatgataccattaggtgagaactttggttcatgcagtcggctgccgcagaggttgcacccaaaacccgcagccccggcacccaaagtcagtcagcggtggtggctcatggtgtcagccgtgctccttccacaacaccaggtgaatactgtggtcaggcatgctggtggcaaagaccaagcccgtgtcattgtgcccatccagtccattcagccaggatgcttcgcctgccaggaagcttgagcctctctttgatttcctgtactctggcagaggccagcgactaatcaggctctctgtccgcaagtccatgatgtacaggtagcggttgtcaaacagcagggcaaagatatctccaaagccaagcaaggccaagtttgctatctcaggagtcttgatgaccctgagaatatcataactggcaaagtcccactggtagagaccaagtgctgaactacagacaatgtatttgccatcaaaatgaagtcttggctgcaggcagatacttctatcc

SEQ ID NO: 124240 - DNA, 1632 bp, Homo Sapiens
atgctcgtttattccaaatgtctttattgaaacagaatgatagagcaagaaataatgaggtctgggtggatgtctttgggcgcaggatggagcccagacccagtggttacagtgtggagctctctccctgtcccctgactctggccaaggaagtgaatgcaaagcagcagggaggaggcagggtggggacggccctctgagctctccgcgatggctggcgtgaggtgcctctgagacttctgggcagccctgccttccctactcagtcttcccgatcttcttgccacctttctgtgtgggccagcctcccgccagggtactcagaggccgctcagagggcagggttgggggtggcaagcagcgggacgtggtcacagcgggtagggggtggctgccgcagcagggaaggccggcgacacagctccccgtcccggagcacctcgggcaggagcttgcgcttggtctccggcagcagcataatgctgagaatgcagaggagggcgcaggccgccagcaccacgtgctgcaggaaggctccatggcccatgtggaggcgctgggccgggccgctcagtcctccaagcgcccctagagccatgatcaggcccaggccacggccccggacagtggtggggatgacctcagcagcaaggagggtgctgaggatggcggcagcttgggaggagaagagcccaaggacagagaaagtggtgatggcagcctcgttcagatctctgttggggttcccttgttgagcccacactgtggggaagataggatgctcacaatcccacaggcccagcaggaccagggaagcaatgccggtaagggtcatggagaagaagataggatgccccggcggcccaattcgttccacggtgacccccccaggaagaccacaggccagggttgcggttgccgcgtggccagcacgagagcaacaaggtagaagtccgatgggctccctcctcctcccacaggcctggtagcagtggcgacatggcatgggcaatgaagtctcggtgaagcccaggatacagcagatttttccagatgttgcggtagttgacggacgggaagcaaagggcaaaaggaggatgttgcagggagagggcaggtattctccaggtcctgcagggcctcctgggcctcctcccccagcatctcgcccatggggccggtttcgctactagtccaggatcctcagcacagactgagcctcctcaatctgccgcttcactatcagccaccgtgcggactccaggaacaaaccaggccagccatataaacaggaagaggatgcagggattcggtgatcattccgctcgtacggaatccgccaatccttagagacaagggccaggcccaggaacaggaagtgccctcccacccccacctactcccctgccagggccacccgaagcctctggcattgggtcgcacagctccaggcgcatcaggtagacacaccaggtcaacaccggcaagcagaaagcccaagaggaatcggagggccatgacgcctgtggaggagcctgcagcagcccctcctactccacaggggcccaccagccccaaggctcagcagcacaatcccgcgacggccaaatctgtctgcggggtaacccagga

SEQ ID NO: 124241 - DNA, 994 bp, Homo Sapiens
ttttaaagcattgcaatggtttattcaattttatgagtctaaaaggtaccaacacttactgatctgagttttaagtgtgtaaaacttttgagtagctatggtgtaacctgatttttaagatttcaaaataagcttgaaaaaaaatcacatccattttacatgcatccattcattacttctaattgattatactacagataacttaagccttagttctttctctttaaggttccccccagttttacgagaggcatggacataattagcttttttcctttagtaaaaatgtgttatgtgctgtagcatacaccagagcttctactttccaatcaggcaacacagactccgagctgcttttgtttttggtccctggaggtgtatatgacaagttgacagaaacaaaaaggtgaagaccctgctccacccagtatagagtcctcttttctttggtgtctcatggaaacctattaacatgccttccacataagtctctatatataaaactatcaggcattatgaattaatttgcagtacagtcactttgataaagttgctatttatcttcaaagtggaaaagtcctgctaatcaaaatggaattgtgaattaaagtaggccactggcttaagtatcaggtagaaaatcaacagcttattttttctgctcagtttgtgctaacactgatggtctttttgaggaatgctgagtatgccaagggtagaactttcgtacctaggtaggtaccaatctcttaagagatccaggtttctggcatggtcctagctgcattgagaccacttgtcatgtgttaactgacacaaggctttgatttgattgtttcacagcagaataaaggtgaaaactatcaccagagtaactgcaatccatacagaagtcttttacctgtaaatgcctttcccaatggagaatcaacagattgggtgatggtggagtcggtcaggaagactcaggtcttctagaggaaaggatgcctca

SEQ ID NO: 124242 - DNA, 136 bp, Homo Sapiens
gttgttggtgttgtcaaagtttgttttttctaaagttgtgtgattatatatttgacattttacatttcaaagaaaggtatgttgtctaacaggggaccaacagaaggtagtattgacaactgttcctgcttctact

SEQ ID NO: 124243 - DNA, 766 bp, Homo Sapiens
tttttccagagtctccaaaatctttatctttagaatccaaccttgttttaagaagtagtaaaatgaaggagcattgttagtagtcacctgacaaaagctgtccattattcttgacattaaaaattgaatgcaatgatttaaaaaacataatacattaacatttacataatatatttagaatcacatggtttccagtgattagatttcagtcatgcctggaaaggagaagacagtggctaggagcacattccttataaaggatacataaatggtatacttaggatgactaatattaagaatttaaacacggtgcatttttttcctcaaaggaagcaattttagtttctaaagagcatttacttctgacatctcgattcctgatttcagtggctgcagactgtgtacttctgtgccacacttaggacaagtaaagtacacgtcaaataagaaactactcttagcacagaaataacagaaaatatgctcacatcctatggtgtgaggcatggtgggccactctccacatagagcgcattctttgccactggtggctaatgtattgtcactattaggtgcaccagtaagaggaatacaccatgaagacagcttggctttcaacttctggacattgataagtggtaagagaaaaatcagaaattcagcaaaaccatgccagagaagttccctattcatgtattcaaagccaacttcacgtatgttttgaggcttgcaaaatacagaatgaatacctaggagacgttctgtc

SEQ ID NO: 124244 - DNA, 620 bp, Homo Sapiens
cacgtgttgacaaagcccagtggagaggcacttgtttttattgagcctttactatgtgccaggttttggtgccaagtggtcttacatacatttaatctaatctccacactaaccccaagattctattcttaatccccattttgcagatgcgataatggatggctaacaagttaagtgactggtgtaaggtcacatagctttgtgagttcctgaatcaggatttgaactcaggacactaaagtcctcatacttcctgtgcagtgacaccacctccctgggcacatctgtgtcctaagatatggtcattagacccactggaatgtaagcgccatcagggcagcgaccctgtctgctgtgatcacagctatgtgcccagcacagggcctggccttacgagtctccctaattgttagctaagtaatgtgcatggatgggcttggggagggtctagctcccaggcctttacatccctactgtctaggcagcagcacaagcccactttcccactcccctgctggactccatccgctggttcatgtcccacccctgctcagcagctgggctcgcagctctccttaaccaccgaccccagattgagatctccatctacgaggaccggt

SEQ ID NO: 124245 - DNA, 1049 bp, Homo Sapiens
tttttataacagcaaaaatgtcttaagacctactgtattataacatttgcaaacacacattaatttacatactaaaatagtaaatgaaatttcttggaagttcaaaaaaagatctttcaaatcttttcatcacaatagagtggaaatccgtctgtcttcagagttgtcgaacttttctttctgtgctttttatgttgacatctaacttgtccactttggttgtcagccggtcaagaatgtcatcttgctcctcaatttctgtctgcatccccagggctatgtccttcagacgacccagtcccatggacagctcatctaggttgctgtcgatcttctggtgataggctcgaaggtgtgggttctttgggtaagcatcagtactcatggcagaaccagcccctctggggacagggtctgtatcatccagctttctaaggtttgggtggctggcctggtactttgcttcctgttctttacttgtacttatagcttctttcaatctgttgttgggctgggaggtgagggtgccattctgttcaggtggggtctctactggtttggatttgaagtaattgaccagccccccaaacacgctcttaatgctattgatgtgtttctggctgatcttcaaatcttggtccatcttgtccaccatcttctctgtgcgctccaggactcctcgctgacgggcgagctcctcggaagaggcgaccccaaccttctcggactcgtacatgagggccagggacctgctggtgctggcggccgtggcctcagccctgcggaggacctcctgccgcaagtactgctgcctgtccgcgggcgcgtcgggcccgtcggggaggtctcgggcgtccctccaaggggccggccgggcgccttcgtcctccccgtcgtcgtcgaacggattgtagcttttagggtaagctgacatggtgccggcgcggctctcggtctgggaaacagaaggaggagccccactgccgccgccgtccagggcctcgccggacgcgtgggtcgacgatatcccgggaattccggaccggacc

SEQ ID NO: 124246 - DNA, 2054 bp, Homo Sapiens
cttacgagacgatttgtgatcatttcgtccctagggcggtgttaaatctttgtttagcggtaaggttcggcccaaatgttttcgccccggcgccaggagttagtggtttccttctccgaaacgtttccccaggttaggcgggtttttccccgttccacaaaggggtgaaatgtcggccggccaagtgtcttagtttaataatatagacttccttaatggggccctccttttttaacaagaaagcctaggtaccgggttaaggttggggccctcccgagaggatattcttagggcagccccccctgttgttgatttcttgcctttcccagggggttgttatctgaattggcaagttgaagttcaaaggcttttttgagctgcacagtgtatttttctcagcagccaccagaggcacattcaccggtggcgcgtcctggtgggcctccgggtgccgtcaccaggcagcagccgcccctccctcccgccacagtaggtctgtgcggcctgtccggccccgctgcgtggcgcaggcaattctcccaaacggctccactgggcgcctggtgctgggggcggagccagtgaccacgggagggcgggacctcgcccggggcccaggacccctgaacacaagtcctccgagctggaggctactccagaaccacggtgccgcccaccgcctccagggccgccttgatcttctccgcctcagctttggcgacattggctttgatttcctggggcagggactccaccagcttctttgcctggacgaggttgatgccttggatgtagttcttgatttccttgatcagcttcactttgtccacgggcttcgcctcggtcaggcggacggtgaaatgtgtccgttctttcgctatggggatatcttcttccaccgcctcctgggctgctgcagcagggacagccccagacatcacaccacccatcggcacaagcccgacatcctggatcttcaacgttttcttcaggagctcgttgaggtctgagatttccaagagagtgaggctggcgatgtcctggaccagctgctgtatcttgggggggtactccttgggggcgttatccaggggtgcaccagcgagggcctcacacctctgatggccgctgctcctcatatgtcgcacggcacagacacatggcacctgtcgcctggcaaggcggaacgcagcggcccgaagcccaaggcaaggcccccacagggggcgagcggccgccggcagcatcggtccgcgggctggaaggtcacacgcggttccccgggaggaggcgacgctctagccgcctcggccgccgggcattcgagctggggaggaacgctctagccgccacggctgccgggcattcgagccggaaatgacgctctagccgtacctcgcgctagcctcgtctcaccctgagattacccacaaggcggcgcgctgcgcagacgcaaaagcgtcgtctgtggcggcagctagacatcgggcgaccctcgtcccgccaggttttggggtcgcgcaaacgagcgacgggggctggggctccggattcaggtgttctttcttcagcgctcacgggtttctgtccgtacgcgatgcgagcgaacgtcgcggtcgaggctagggccccgaagcccgcagtaatccacgtctcccgcccgctccgggccctcagtgccgccgtcgcgggcggaggcgcgaggtctgggctttggcgccttcgcagccgcaggcgacatcctctttcctagctaaagccccaaacgcccaggtggcttcctgggagagcacggctgagcctccgccttcagatcagaacaggcagagcctccaagggcggcttgggcccagtgcctgcttatcctgcccgtctctccacacttcttctttccctgtccgttggagtccattccttcctggaaaagccaaagccgcgctcccctaagaggcctggatgtgaaggtgagtgagacgccctggcctcttggtgcaacaggccggcgcctgccggtttcaacactcaggaggcgcgtttcagccccgctgggcccc

SEQ ID NO: 124247 - DNA, 785 bp, Homo Sapiens
gtgcgcaggcaattctcccaaacggctccactgggcgcctggtgctgggggcggagccagtgaccacgggagggcggggacctcgcccggggcccaggaccacctgaacacaagtcctccgagctggaggctactccagaaccacggtgccgcccaccgcctccaggccgccttgatcttctccgcctcagctttggcgacattggctttgatttcctggggcagggactccaccagcttctttgcctggacgaggttgatgccttggatgtagttcttgatttccttgatcagcttcactttgtccacgggcttcgcctcggtcaggcggacggtgaaatgtgtccgttctttcgctatggggatatcttcttccaccgcctcctgggctgctgcagcagggacagccccagacatcacaccacccatcggcacaagcccgacatcctggatcttcaacgttttcttcaggagctcgttgaggtctgagatttccaagagagtgaggctggcgatgtcctggaccagctgctgtatcttgggggggtactccttgggggcgttatccaggggtgcaccagcgagggcctcacacctctgatggccgctgctcctcatatgtcgcacggcacagacacatggcacctgtcgcctggcaaggcggaacgcagcggcccgaagcccaaggcaaggcccccacagggggcgagcggccgccggcagcatcgtccgcggctgcctcgtgccgaatttaacacccaggcctcgctacctagccgtaagtt

SEQ ID NO: 124248 - DNA, 823 bp, Homo Sapiens
tttttggaaaatcactcctttgtctttattaaagaaacttagaccagacctggcaatcaaggggtgaggtactggccaggaaggtggagtaggtttcaggccctggggatttcaagtgcagactgatggcctgggaggggccaaagagaccagatcctggcagcagctgaggaggtgcccaagggcactttcaggcactggggccatcagctggttctgtgggcaggggttgggggttgggatgcagggtagtttgggctggcctggaatctccctgaggccaccctgccttgtctacctagatcatccactggtcctgatcctgttcgttgccttccatgtccacctcattgacctctccatcatccggtgactcattgtagtcattcatctcgtccatgtcctgcatatcctcatcatcctctgagtcctcttcactatcctcatcatcttcatcatcctcttcttcctcgtcatcatagtgctctgaggctggcttgccaataggaaccaggttgttgtctttctccgcgatgctttggagccaggcctgatgctgctgttcctgctgctgcagctctgtctcttccacacagggtcgatccagattaaaccacagagtctcagtcacacgagggaagagtgaggggaacaaagtggacatggctcctagatagctgtttgaccttggctgagtcacttaacctctctgagcctcagtgtcttcatcgcgccgggaggctgctgccggcggcgacccggaagcgcttcacccagcctgagcggaagaacccaccagaatccgggactcaccaaacgcccc

SEQ ID NO: 124249 - DNA, 923 bp, Homo Sapiens
ttttaaagagaaactttggccccggactcgggcaatccaaggggtggagggtactggcccaggaaagggggagtaggttttcaggccctggggatttcaagtgcagactgatggcctgggagggggccaaagagaccagatcctggcagcagctgaggaggtgcccaagggcactttcaggcactggggccatcagctggttctgtgggcaggggttgggggttgggatgcagggtagtttgggctggcctggaatctccctgaggccaccctgccttgtctacctagatcatccactggtcctgatcctgttcgttgccttccatgtccacctcattgacctctccatcatccggtgactcattgtagtcattcatctcgtccatgtcctgcatatcctcatcatcctctgagtcctcttcactatcctcatcatcttcatcatcctcttcttcctcgtcatcatagtgctctgaggctggcttgccaataggaaccaggttgttgtctttctccgcgatgctttggagccaggcctgatgctgctgttcctgctgctgcagctctgtctcttccacacagggtcgatccagattaaaccacagagtctcagtcacacgagggaagagtgaggggaacaaagtggacatggctcctagactggctttgagtcctggctccaccacttactagctgtttgaccttggctgagtcacttaacctctctgagcctcagtgtcttcatcgcgccgggaggctgctgccggcggcgacccggaagcgcttcacccagcctgagcggaagaacccaccagaatccgggactcaccaaacgcatgcgtccttcgtctccttttgttttccccgctcccccccggccgtaatggccgaattcccgggcatatgtccggtaccgtcgactg

SEQ ID NO: 124250 - DNA, 728 bp, Homo Sapiens
  misc_feature (658)..(658): n is a, c, g, or t
tttaaagattctatatttaattataaaaacataaaattatcacatcaatttaattcttataagtttatacatactgcataatgactttgaaaacagtataactcaaaataatagaaaacaaaattaattgaatgaagtactactgaatttcaggtatttctgtgacaacacaaatttaaaatttaataaaatattaccttttcttagcaaaaagtttcttaagtcagattatcctttcatgttttaaatgaagcttcttctaaagaagtccttttattcacagttgcaaatttctttttaacacatacaatgtatactacatgctggaatcaaacacctgaaggagctggaatcttatgaatacagccagggcaacagtgtagagaatcatgaacaaaaacatcacagtccacacagaaaacattttggcacacagcacaaacataaacatgttggtctttcaattccccctgacatccataacaaaatctttctccattatattcttctaggggaatttcttgaaaagcatccaaaggaaacaaatgatggtaagaccgtgccaagtggggagcagacaccaaagtaagaccacagattttacatttcacaggtagctcacagtactttgcccgacactgtgggcagaaatagcctnctaatgtagcccctgctcagtattgccatcaaatgcgcatgctgaaagaggttttgcatctgtcagataa

SEQ ID NO: 124251 - DNA, 1817 bp, Homo Sapiens
ttttcagcttttataacctgtatttaagcggctaattccagagatgagtagtggagagagcaaatgagcctggttagagctcactctgggaggagtatgtggacgacacttggctgtctcttcagggggccaggctgggcccccagcactcccggcagtggaaaggcagagctggctgccagctctggcctccgcctgggattcactcccatcctggctcagatctgtggctgtgcttcacccagtgggtcctccctcaaggagccaggcgggatctggaagggtctgcttatccccaccacagaacgcagactgttgctgtagtaacagaggagaaactcatcttcagtggtagggatattgctgatgtcgatgtaaacctggttcaggttgtcgctgcaggagaccttgctgtccccgacccaggcataggacacgtagtcattaacgtcccgcagccccaccttgtacagtccaatccagtcccacgggctgctggggaagtccgaggttgaagagtagctgaccatcatgtcattttccacggtccacaggtcctcgggcatcaggacgatcagcggagcagacaccaatggcttcagctccaagtcgaacgtgccggagacaggcttgtggtcgctgatgccgtacgtcatgtggctgctgtagcccctcagagacaaggagaagtgtgacgccggcggtatgggagtgtcggggccagcacagggctgccgcttcagcctccacaggatgcgatcggtccatgcaggcttgcgttttttctcactggtgtcatagtcgttggagttcctatcaaacttgtaggtgggcgggaagagtaggcggccctcctggaactcccggagcagcgggtcatgtttcttggcaatgctgagctggtccttctcccacaggccacggtagcaccgatttttaatggattcccgaccaaagtgcaccccaaagtcctcgatccgaagtttcatgtctccaaaccagataatgaggtcgtggtccaggatgtttgggatgtctcgcccctcacaattctgcatctccaggatccggtcaaagtgctccagccgctggtaattgttggaaatgtggggaggcaggtggcagttgatgatgctgacatagtagccataaagcttcaggcagatgttgactccacctttgttcccccagtacccaaacaggccagtgggggtggatttagtagacagaatctggatatagggcaaatgctgatacttggcaaagaccagtaagaggatcccctgcatacggacatgggagaccttgatgaagctcagaggggaaagcacatccatgaggaaactgctccacgagtcattaaaggcagcatcggaaaggaggcttatgatcccagagttcaattcctgcaaaccaataacatatatgtcaagattgaggttccggttgttcagctgaagcaggtcactgagatctagagggggcgctgccgaagccacgttccaagtcacgacgtgtatgctgagcctcctgcctttcggcccgctcagcttccgcgagctcatggccgccgtcgtccccgcgcggtggtccggcaggttcgcgtctcccggccagcgggtccaggccagagcagccctgcgggcggccggtctcacgcgcctagctgtcgcggactgtttttcttccggactccgaccgtccgccccggcttccgtcagagacgccgccctccgcgcaccccgggatctgggtggtgcggttcgccctcgtgccgaattcggcgcgccgtcgacttcatactctctccccagaca

SEQ ID NO: 124252 - DNA, 1242 bp, Homo Sapiens
ttttttttacagagcaggacccacggctgctgctgggtcgggttttatttcaaatgcagccacagaggcggtttctgcacaggtacgtgatccgactccacaagctcccaccaggggctccccatgacccgcaatgacgctgtgtggggtcaaaggaaaacaggccacagccaggcccctcgatggacgcaggcaggggaccaggaatgcggcccacgcagggggatcgggaatcaggcggaaggtgcaggtttgcagctggcgggaggagccagcatgccccaatctctaaaatattcccggtagaaaaatagacatttccctccaaagcagattcctggggctggagggtccctccaaggccaggggtccgggtgattccagagcatccacgctctgcgctgaaggcactgaacctgccatcactgtcacagccgtcaccggccaaggagggtctggaggagggaaggggcccttgcgaggctctggtgctggtgatcccggcccccaccaccggaggagctgaaagcccttgctcagccgctgccctgctggtgaacccggcccccaccgccggaggagctgcaccctgtgtggtctgaggcagccctgcactgggcagcggccccgccccgcgctgaacccactaggagagcagctgcagcacctgtcggatgcgctgggccctccccggcagggggggatcagagccctcctcatccagctcccgcatcagggcttccgccttctgcaccgtcagctctcgggcccggccctgcagcccctccaggtaggccagcagggtggagaagtgctcatcgggaaccttgtcactgtcatacatgtgcagcaggagccacgtctgcctcgtcttctgaaacctccagttcttgtgcttttgggcccatctgcagaggtagtccagggccagttcggcccccgagcgcctggcaggcgggtgctgggccacaaggcctgcctcccgcagacgctgcctctcctctttcttccgttcctttttcagcttcctttccaggaccctctgctcctctggggacagctctggctctgcgtccagcccgggcctgagcacagcttcgccctctgacccggctgtcaggtcccgcgggcacggacggcgccggggcagggatgcgcccgcagtgcgcaccgcccggcccgcgcctccagcagcctcagcgcctccacacgcatgcagggaatccggaccggtccagcctc

SEQ ID NO: 124253 - DNA, 919 bp, Homo Sapiens
gcactgacctgcccatcactggtcacaaccgtcacggccaaagagggtctgaagaggaaagggccccttgcgaggctctgtgctggtgaatcccggcccccaccaccggaggagcctgaaagcccttgctcagccgctgcactgctggtgaacccggcccccaccgccggaggagcctgcaccctgtgtggtctagaggcagccctgcactgggcagcggccccgccccgcgctgaacccactaggagagcagctgcagcacctgtcggatgcgctgggccctccccggcagggggggatcagagccctcctcatccagctcccgcatcagggcttccgccttctgcaccgtcagctctcgggcccggccctgcagcccctccaggtaggccagcagggtggagaagtgctcatcgggaaccttgtcactgtcatacatgtgcagcaggagccacgtctgcctcgtcttctgaaacctccagttcttgtgcttttgggcccatctgcagaggtagtccagggccagttcggcccccgagcgcctggcaggcgggtgctgggccacaaggcctgcctcccgcagacgctgcctctcctctttcttccgttcctttttcagcttcctttccaggaccctctgctcctctggggacagctctggctctgcgtccagcccgggcctgagcacagcttcgcccttggagccggctccttcgccacttggtgcagcctcagggcccagcagtggcccctctgctgacgccttcttcagctttttgttctttttctctgtcacttcaggaacttttctcttctgttttgccatcctgcgcccacctaagcgtgaacagctgcgtcgccctcgtgccgaattcgccacccaggcctcgctacctagagaccgtagtagtactgccag

SEQ ID NO: 124254 - DNA, 1106 bp, Homo Sapiens
aacagtgggaaaccgaagacacccccgcaagacgggagacccccgcctatcgcgcaaacccccggggacgcgaccgctaccgcgggccacacccacttaaatccggaaaaataagtccccaacaatctggctgaggtcaccaagcagggccgggaattccagaaatcaacgcttgcccgagccacgaacctccatactgtcacacccgtaccgccaagaggctctgagaggaaaggcccattgcgagctctggtgttggtgatcccggcccccaccaccggaggagctgaagcccttgctcaccgctgccctgctggtgaacccggcccccaccgccggaggagctgcaccctgtgtggtctgaggcagccctgcactgggcagcggccccgccccgcgctgaacccactaggagagcagctgcagcacctgtcggatgcgctgggccctccccggcagggggggatcagagccctcctcatccagctcccgcatcagggcttccgccttctgcaccgtcagctctcgggcccggccctgcagcccctccaggtaggccagcagggtggagaagtgctcatcgggaaccttgtcactgtcatacatgtgcagcaggagccacgtctgcctcgtcttctgaaacctccagttcttgtgcttttgggcccatctgcagaggtagtccagggccagttcggcccccgagcgcctggcaggcgggtgctgggccacaaggcctgcctcccgcagacgctgcctctcctctttcttccgttcctttttcagcttcctttccaggaccctctgctcctctggggacagctctggctctgcgtccagcccgggcctgagcacagcttcgcccttggagccggctccttcgccacttggtgcagcctcagggcccagcagtggcccctctgctgacgccttcttcagctttttgttctttttctctgtcacttcaggaacttttctcttctgttttgccatcctgcgcccacctgcgcccacgtcgcccacctaagcgtgaacagctgcgtcgcggacgccgccttccggccctcggtgccgaattcgacccccagcctcgtactagccgaata

SEQ ID NO: 124255 - DNA, 905 bp, Homo Sapiens
caaggtagcgaggcctgggtggcgaattcggcacgagggcgggtccctgccggaaggcggcgtccgcgacgcagctgttcacgcttaggtgggcgacgtgggcgcaggtgggcgcaggatggcaaaacagaagagaaaagttcctgaagtgacagagaaaaagaacaaaaagctgaagaaggcgtcagcagaggggccactgctgggccctgaggctgcaccaagtggcgaaggagccggctccaagggcgaagctgtgctcaggcccgggctggacgcagagccagagctgtccccagaggagcagagggtcctggaaaggaagctgaaaaaggaacggaagaaagaggagaggcagcgtctgcgggaggcaggccttgtggcccagcacccgcctgccaggcgctcgggggccgaactggccctggactacctctgcagatgggcccaaaagcacaagaactggaggtttcagaagacgaggcagacgtggctcctgctgcacatgtatgacagtgacaaggttcccgatgagcacttctccaccctgctggcctacctggaggggctgcagggccgggcccgagagctgacggtgcagaaggcggaagccctgatgcgggagctggatgaggagggctctgatccccccctgccggggagggcccagcgcatccgacaggtgctgcagctgctctcctagtgggttcagcgcggggcggggctgtgcccagtgcagggctgcctcagaccacacaggtgcagctcctccggcggtggggccgggttcaccagcaggcagcggtgagcaagggctttcagtcctccggtgtgggggccggatcacagacagagctcgaagggcccttcctcctccaaactcttggcgtgacgtgtgacaggtg

SEQ ID NO: 124256 - DNA, 1071 bp, Homo Sapiens
  misc_feature (960)..(960): n is a, c, g, or t
  misc_feature (988)..(989): n is a, c, g, or t
  misc_feature (1003)..(1003): n is a, c, g, or t
  misc_feature (1027)..(1027): n is a, c, g, or t
  misc_feature (1031)..(1031): n is a, c, g, or t
  misc_feature (1034)..(1035): n is a, c, g, or t
gattgacagtgtgatttatttgggaaacgcctttgagggagggaatgaaacaggatagagaagggagagagcttagcacggatgaaggctcagaaaaagtctagcttggcctgatccaagggtgccagagcagtcatagcaccctggagttttctccgctttaatcaaatgaaccaggtgttggggtgtagagaggaagtgactcctgggtgaggtgagatggctctcatctcctgagggcaattctccagtttctggagaacaagagctgtgagcacttgcagcccaaactcagagcagctggggatgggggtctcagcttggtagaggggactggacagggcaccacagtgtacaacacatatggtcaacaaatatttattgggcatttattgtaagccaggcaagtcagcagaaacggcctgagcagtgcccaagagcactcactcactctccctagcaaacaggctcagaactctctcacacatgtcatcctctttcccactcaaaactcccaccccaaccttcctggaaggcagggctaacaggacctcctgcctgcctgctcacgactgattactttcaatcccagctgcaatgcaaactgaaactcattctgtatatcaccactctacaggagaggtctatttctggggcacccagaagtcagcacacatactgctgggaccaggactcgtaattcgccttggtccaactccttctatgggtttagctgccctcattcctgtgggtaatacaagatcaaacagtccacaactttgcctgtcttctctgctcccctaaggtccctctcccttcgccgtaagatgtgactgaccagtacagtttctcctgaattgacaaactgaactactccttctaccggctaaaccctgacatcagtagaatcaaaccaaaaacaaggtagagtgtttcacagagacgtggtggatttgatanggagcagaacacatacatccatccctgnnactgattttgccanacagagaactttagtccattcttncaanggnntatgtcaagtggactatgacaggtatcagtggtgaa

SEQ ID NO: 124257 - DNA, 357 bp, Homo Sapiens
  misc_feature (241)..(302): n is a, c, g, or t
ttttgaacagtttataaaaatggcacatttattgctacagaacggtcatgtacatgacttcatcgaataactacagatgggaaacaggtaatggccttgaccaagctgggtttgtttttgtcttgaaggaactccagcacacaacctgtttggacacttctacaaatcagaaatacaccaaaaacatgaaaaaatcgaggcactcagccacacattgaaaacaaggtgtaactgtttatcnnnnnnnnnnnnnnnnnnnnnnnnnnnnnnnnnnnnnnnnnnnnnnnnnnnnnnnnnnnnnnaatgctgcagctatgtgtacagtcgcaaaaaatttccccgctgcgacctacaact

SEQ ID NO: 124258 - DNA, 355 bp, Homo Sapiens
  misc_feature (1)..(1): n is a, c, g, or t
ngtatgagccacaacgcccagccatcatttatctttttcactcattttttcatgagtatgcagaggagttttcaagaggctatctggtgtgatattgtaataggctgaatgcaaaagcagatacaagattccagctttcgtctgtcatcagacattgaagagatttggagaaatgtaaagcagcagtactcttctcactaatttttgttgtggttagttagaaaaatggttatttttagtgggttttaatatgtgaaaaaaataaaattagctatttgcccaaaatgtttttatgtgtttatatatacttggttcttgttacttgccaatgattaatcaaaattttaagaaattt

SEQ ID NO: 124259 - DNA, 714 bp, Homo Sapiens
  misc_feature (536)..(536): n is a, c, g, or t
  misc_feature (592)..(641): n is a, c, g, or t
  misc_feature (659)..(659): n is a, c, g, or t
aacagtcttcaagtatgtatttattctaccagccctcttgtaaaatccaaggccccccaaaacacacaaaaacacctcctggaaaggttagaaaatattctccaaagacagtggttcctgataatttagtaatttgagagcttgtttggaggttctggcaggggagcgcagctactcatataccgttgaccaaagaccggtcctccttcatcggggatggtcattctctttggccaagtgcacagcttcgggagcgatgcacatggagcagggaggaaggaaggggacacccgcctagccagccagatcagctgaatcaaccctggcgatcaaagggttgacaaatgtcgcagccagatcgccctcacgtccacaatctcacgatttggagaaagaataaacatatcatttccttttccttctctgtctcttctctcctagctcatagctcaatgtctcaggtgacctcttctcgtgtctgagttcctcttcaattcaggattgagtcttcttgcaaacacctgaatttatttttntggtctgttctttactcccccaccatccccccaccaacgattatgtaatttttatnnnnnnnnnnnnnnnnnnnnnnnnnnnnnnnnnnnnnnnnnnnnnnnnnnagttttgaaacagtttanaggctgccaaagcaaaatagaaaaagatcactcaacttagagtaagatctgagtc

SEQ ID NO: 124260 - DNA, 877 bp, Homo Sapiens
  misc_feature (28)..(28): n is a, c, g, or t
caaactcctcttctttataccccccttnggaggagctcatgatggagggggacctgctcgaggtgaccctggatgagaaccacagcatatggcagctgctgcaggctggacagcccccagacctggagaggatccgcacacttctggaggaaaccaaccatcaggcctcccagagagaatcgaggaactgaaatctcccatatcaccacatccagacaatgagacagtggatataaggagatggacaaactgtgcgtgcgaccatggaacgggagactggaggaacctatggtggccaaccatgagcccggtccctccggtacgagccatgagccagctgagcctgagtgcaaagatggagagagggccgataggagtcacgacacagctctaatgctacattttctgtaaaattcgatggaccaccaattggatagtaagagctgcccagcctggacttacattctttcaattaatacataaaacaaaaagggggatatgcagggagccgaaggcccgtgggacgtgaccagctcagcatttcgctggaggctatatgatcaaacagcaaactgtttatcatgaatgcaggatgtgggcaaactcacattgtcctgccaccaaaacgtttgctgagggacatcattccctgatggctccttgaagttatctacggagaaaattagcgcctattgttcaaagcatgtagttcaaagcctgctgtgaaccaaacagctgactgacaattacccgacaatcaccgcccccaaccccgctttttcgctatctcttttgcctaataaatatggagggctgtgtaaaccagggcccttgtccactagaggcaaggttccccctgaccccttcttccaaatat

SEQ ID NO: 124261 - DNA, 197 bp, Homo Sapiens
tggagctgctgtcctcgctgttgcccacagttgactggccctgtgttggaacttcctgaggcaacccgggccccctttgaggagctcatgatggagggggacctgctcgaggttgaccctggatgagaaccacagcatatggcagctgctgcaggctggacagcccccagacctggagaggatccgcacacttctgg

SEQ ID NO: 124262 - DNA, 901 bp, Homo Sapiens
  misc_feature (880)..(880): n is a, c, g, or t
gttcaaattgtgaattctttttcctaatttctttgaattgtgtgtgttttcttgtacctcattgagttttcttaaggtcattattttgaattccctttctgtaatttgttgatctccttttcactgggctctagttactagccagagttcctttggtgcttttttggtgttatatttccttccttttttgtgtttcttgtgtcctcatgttaagtgtccatgcttctggtggaaagatcacctcttccagactttctggagtggatttcttagagaaagactttcacctgcagttgggttttagtgttccagttgagaaggatgtgatgactgtgtttccacttaggtgcaatggtatagtctccatgcagcttctttgcctatgttcaacatcaacaataactgggagtgcctcagtggcctagactatagaagtttgtgcagcagcggtggtagcataggttgttaatatccttagcgtaaagggctttttgggtctttctcttctcattttccccaaatgaggagactcagtcagggggatccctcttagtgtcaggtctggcatggcctacaagtagctgcagcagtgctgggttctaggtactggtgcttggagcttatgtggcgttgggtttctaagctcagagtctcatgaacctattgtggcagctgggtcttggggtgcaggttcactctccgtagcatggttggatgtggactgccctccgggccaggatctatgatatgactctgttgaaccctctatcagctcaggtcagggaggaggatacaactagaatttgggaacctgagtcaataaggctcaatggcaacttgggtcccagggattgatacaccatgtagcagtgactctacnatggtccctctttaggcttag

SEQ ID NO: 124263 - DNA, 784 bp, Homo Sapiens
  misc_feature (733)..(733): n is a, c, g, or t
tacagctatgaagaaatacctgagtctgagcaatttataaagaacaaaggggtttaatgggctgacagttccacatggctgcaggggcctcacaatcatggcagaaggggaagcaaagctatccctcttcacatggcagcaacaagaagtgctgacccaaaggggaaaagccccttataaaaccatcagatcatgagaactcactcactgtcatgagaacagcatggcggtaaccaccaccatgattcagtcacctcccattgggtccctcccacgacatgtaggtattacaggaactacaattcaagatgagatctgggtggggacacagccaaaccatatcagtgcccatccacattgggtcatggttatctcagtgtcttccagaaacaccctcatagatatgcccagaaatcgtgtttgaccagctgtgtgtgtctctcaatccagtcaagtagacgtctacgattaaccatcagaatatttatgcctgattcatggctgaaatcgtgtttgaccagctatgtgtgtctctcaatccagtcaagtagatgtctacgattaaccatcagaatatttatgcctgattcatggctgaaatcgtgtttgaccagctatgtgtgtctctcaatccagttaagtagatgtctacgattaaccatcagaatatttatgcctgattcatggctgacatcgtgtttgaccagctatgtgtgtctctcaatccagttangtagatgtctacgattaaccatcagaatatttatgcctgattcatggctga

SEQ ID NO: 124264 - DNA, 641 bp, Homo Sapiens
  misc_feature (206)..(216): n is a, c, g, or t
  misc_feature (420)..(437): n is a, c, g, or t
cctgacacaggtgcttcacctcccctccctcaaatcttaccttcacctcaggggccatctgcccactttggggtacccctagcgggcccgagaagctccatgggttcgaatcaggggcgccaggttccctgggacccagagcaggggttgaagggaaggcagtttcgtgcatgggggacccaggccccgcttctcggcggcgcgannnnnnnnnnncctgccacaggtgcctcacatcccctccctcaaacctaaccttcccctcaggggccttctgcccactttgcgatacccctagctggcccgaggcgctccctgggttggaatcaggaacgccagggtccccgggtcccagcgcagggattgaagggaaggaactttcgtgcgtgcaggacccaggaacgctttctggtggcgagnnnnnnnnnnnnnnnnnncctccctcaggtgctgcactttccctccctcaaaccccaccttcccctcaggggccttctgcccgcactggggaaaccctagcgggccgagattctccctgggttcgaaacagggacgccagggtcccggggccatgcgctggggctgatgggaaggcactttcctccgagtagcgtacctgggtccttctcggaggcgcactg

SEQ ID NO: 124265 - DNA, 699 bp, Homo Sapiens
tgagacagagctgtgctctatgtggccctgtgtagcacaatcattttaggattctctgactttgaagttcctgttaggcaataggctttatttacaacttaatttttacaattctacccaaaagttggccagttatttggtagaattttacaagtaccagtaatttggtagaattttgggcagaattttataattctacccaaaggttggccagtaatttgcatctggatagctaaaaagctttcaatagggctttattcaacaaatagtgggtacctactcttcgtggattggaaatgactacaaattctttgaagctccttccatcaaaaggtggggtttatttccctcgattctgggctagctttcaagtcaaaagaagatcttgtactttctgttctcaccctcttcaatctcagatctcagcctgggctggccatggggaaaggccatgtggagtagaactaaggaatttcagccgacagccccagccaactttgagacacatacatgaggccagtcaaggtcaatcagcctccaaccaatctgctcactaaccacaaaggtgtgtggagtcccaactggcacccatggagcagtggtggatcacgccagcagagctctgcccagactgccagagcataggattataagcaaataaagggtgttgctataagccgtgatttgaggtgggttttc

SEQ ID NO: 124266 - DNA, 1223 bp, Homo Sapiens
  misc_feature (59)..(67): n is a, c, g, or t
  misc_feature (164)..(172): n is a, c, g, or t
  misc_feature (658)..(687): n is a, c, g, or t
gggaggtccccctggaacttttgggaatgggggggagagggtttcccaaagcacttttnnnnnnnnncccggcacctctccaaggtttccccctccagggttggtccagggccccccatccaggttggttcccagccccgggggttgtggccaagccgggtttnnnnnnnnnttccccggtttttgggacaagccttgttagagggggtttctgccagggggggccaaccccccatcatctcctccttcggggccagccaattctcctccaagcagcaggtcccccccggggcctgttcatacagctgtggtcagcccgcccggggttctgtctgggattccaaatcgaagaaagctgtagtacttgaagcgcagccagagtgcgtcccccggccttaatgccctgctgcatgagacacccgcgacgagtccagccacctgctgtggagctgggtcttgtctgacagggagcctgggccgtggcagacgctggagcaggagggggtcgggtggcggctggggccggctcagcatgtggtagcaggcctcagtctgggcgctgtccgagaagtgagctggcatcccccggaacagtgcaggtgccacgcccccagccaagacaaccttgctcaagtcatagagctcttcctctggctcnnnnnnnnnnnnnnnnnnnnnnnnnnnnnnaggagcccggagcagggacagctcctcggggtgccggatgctgaggaggcggcagatggcagccacagcctggaagaggggctgggagaagctggcacggaggcgcagtgcgcggcggttgggcaaccgaaggatgacgggccggtgctggggcccaaagaagaggcgtgcgtcggccaggatcccgtacttgtccagtgtccagtgggtctgcagcagccactgcctcttctgttcccaccaaatagcatggtctgaccagtcctgcttgcgattgatctgctccacaatcttcaggagcaccccgccgatgtgcgactccccagtgacccgcagggtgaccgactcggcctctgggtcctcctctcccacaaacacccgcagctcccatgacgagtcgatgtagtccccggaggctgtcttcatccccgccatggctgcggctgctgctttcctggcaagggctgggggctgcaggtgggtctcgggctacacccctgtgggccgtgggcttccatcccgggaattccggaccc

SEQ ID NO: 124267 - DNA, 743 bp, Homo Sapiens
  misc_feature (127)..(136): n is a, c, g, or t
  misc_feature (617)..(682): n is a, c, g, or t
  misc_feature (689)..(690): n is a, c, g, or t
tttttgaaacaaccacattttgctttattaggcgttccatggtaatataacacagagttcttaaggaataataaacacgagacttgttttttaccataattattttgccatcaagacagtggttacnnnnnnnnnngtactcttctggctacacactttatcagctttagaactgaaagttcctccactcatgggtcacaatcacaatttccaggattaaaaaccatctattcttaagtcctacactgttttagagcatcaagtcactgcagttattcagttctgagacactgtcgatttattttagcatttacatatgacattcatttaacagacacacaaagcaagccaacaggtaaacatgcttacacagcctgcagaaatcgtcaggttttaacttgttttttaagaaaacaaccaaaacaaccaaaaattaccatgacccggtacaggaaaaacaggaagactcaagtgaatactagagctgcaagtgtttcttagaattgaaacaaaaattgtttttttccaacttgttcaaatttcctctaagtgcaggtgagaaaaaaagcaaatatattaagtcaaccaattatttttttaaaagtgcaatttacctnnnnnnnnnnnnnnnnnnnnnnnnnnnnnnnnnnnnnnnnnnnnnnnnnnnnnnnnnnnnnnnnnntgtgtannagagacaagggtggtgatggaatgacctactttgtgatgtttttacgctttac

SEQ ID NO: 124268 - DNA, 1129 bp, Homo Sapiens
  misc_feature (796)..(842): n is a, c, g, or t
cagtcgacggtaccggacatatgcccgggaattcggccattacggccggggggccatgccgtctcacccacagtatcacacgtggaaccgcagacagggcccagaagctttagaggtatgaggctgcagaaccggagagattttcctctgtgcagtgctctctggctaaagtcacggtcaaacctaaacaccgagcctcattaacccaagtgaaccaaccaaagtcaccagttcagaagtgctaagctaataggagtctgacccgagggcctgctgcttcctggttaagtatcttttgagattctagaacacatgggagctttttattttcggggaaaaaccgtatttttttcttgtccaattatttctaaagacacactacatagaaagaggccctataaactcaaaaagtcattgggaaacttaaagtctattctactttgcaagaggagaaatgtgttttatgaacgatagatcacatcagaactcctgtggggaggaaaccttataaattaaacacatggcccccttagagaccacaggcgatgtctgtctccatccttccctctccttttctgtcacctttccccctagctggctcctttggacctacccctgtccttgctgacttgtgttgcattgtattccaaacgtgtttacaggttctcttaagcaatgttgtatttgcaggcttttctgaataccaaatctgctttttgtaaagcgtaaaaacatcacaaagtaggtcattccatcaccacccttgtctctctacacattttgcctttggggatcnnnnnnnnnnnnnnnnnnnnnnnnnnnnnnnnnnnnnnnnnnnnnnnaaaggtaaattgcacttttaaaaaaataattggttgacttaatatatttgctttttttctcacctgcacttagaggaaatttgaacaagttggaaaaaaacaatttttgtttcaattctaagaaacacttgcagctctagtattcacttgagtcttcctgtttttcctgtaccgggtcatggtaatttttggttgttttggttgttttcttaaaaaacaagttaaaacctgacgatttctgcaggctgtgtaagcatgtttacctgttggcttgctttgtgtgtctg

SEQ ID NO: 124269 - DNA, 338 bp, Homo Sapiens
ggggaaaaaccgtatttttttcttgtccaattatttctaaagacacactacatagaaagaggccctataaactcaaaaagtcattgggaaacttaaagtctattctactttgcaagaggagaaatgtgttttatgaacgatagatcacatcagaactcctgtggggaggaaaccttataaattaaacacatggcccccttagagaccagacctgagcaagccaggcctggcttgctcaggtctacttctcccaaaactgcctgcttccagggacctgagctgaagctgcacatcgcctcctgaggaaagatgccattggcgaagtctcacctaccctc

SEQ ID NO: 124270 - DNA, 482 bp, Homo Sapiens
gcccggccccatacaattttaatagcagaaaagagaaactgtgaaccccacagaccaaagctcttcccattcatgaacccgcaccgcgagtcaggattctcccctgaagaccctccggtggtccctgcacaatctgggagagacacggcactgcgggtgcagagctgcccacagagcgctccaggccaggggcacagtcactgcgcggggaagcgacaggacgcccgggggccaggctgtcagcgtagccgccatcttatggctgaatgggactgaggcagagctgggtaaggagaattcggggtgcagattgtggagctgactgaggggaggcctgagtctcgccacagacacttcacctctctcgggatgctggaccggcactctcaccatttctaggcttccagggggtcctggcgtcttagctgtggatctcccaatacctgcaggacacagggccacagaggctgggcctcgtaggc

SEQ ID NO: 124271 - DNA, 1002 bp, Homo Sapiens
  misc_feature (904)..(904): n is a, c, g, or t
  misc_feature (991)..(991): n is a, c, g, or t
tttttgatttatatataaggttttattaaaattagctttagtattgataatacactattaccaaagtaaaagttgattttctaacaaaaattttatgtattattaatatgacagcaaaatacttctgttcaccttttgaatacatgcaaaaagagagagagtaaaaaagagatagaattttcccttgctctagggtgggcctggctcagctcagggaggaagccctgcctgaaaaggctgcagcttaggctgttactctttcatcactcagcccagcatctgatcacatcctctgtcactcagggactgagtgggcggggccttaagcattatccaatcagagacgctgggctggaaaccgtccaatcaggcaggcagctggagcaaagaggacggcttccgggtttggcgcggcctttgtctctcgctgcatccggagctctaggtcgcctcttcgctactctgtgtcctctgctcctagaggcccaccctctgtggccctgtgtcctgcaggtattgggagatccacagccaagatgccgggaccccttagaagcctagaaatgggatcattgcaatttagagatgtggctgtagagttctctctggaggagtggcattgcctggacgctgcacagcggaatttatatagggatgtgatgttagagaactacagacacctggtcttccttggtattgttgtctctaagccagacctgatcacctgtctggagcaaggaataaaacctttgactatgaagaggcatgagatgattgccaaacccccagttgtgtgttctcattttgcccaagacctttggccagagcagagcataaaagattcttaccaaaaagtgatactgagaaaatttgaaaaatgtggacatggcaatttacactttanaaaaggctgtgaaagtgtggatgagtgtaagttacacaaaagaggttataatggacttaaccaatgtttgacaactacccagagcanaatatttcaat

SEQ ID NO: 124272 - DNA, 538 bp, Homo Sapiens
cctttttggtgtcccgggatttttaaaaatgttttaatttcttattgaaaggaataaagtatttatggaaatgcccatattatcccaaaggaccctgtaagatttaaagaactccttatcaaaattccagtgtttttcttcacagtaatgaaaaatccaatcctgggggttcatccaccatctcatgtcgcttcatattccagggctctttttctttttccagacaggtgatgaggtctggcttagagacagcaatacccaggaaggccaggtttctgtagttctctaacatcacatttctatataaattcttctgtgcagtgtccaggtgttgccactcctccagagagaattctatggccacatccctaaatgtcaacagtcccatttctaggcttctagggggtcctggcatcttagctgtggatctccaatacctgctggtaacagcgccacagaggctgggcctctaggagcagaggacacagagcagtgaagacagacctgggactccggcgacagcgagagacaaaggccc

SEQ ID NO: 124273 - DNA, 800 bp, Homo Sapiens
  misc_feature (58)..(58): n is a, c, g, or t
  misc_feature (171)..(411): n is a, c, g, or t
tttccacatatgtggtccatatgaagagtccatttttcatacccattaatttattatnaccatgttactgaaagccaataggtaaaagcaatgcaaatttctgtcaccaaatccattccagtagatatgatctgaaatataaaaatacttggccgggcactgtggctcatnnnnnnnnnnnnnnnnnnnnnnnnnnnnnnnnnnnnnnnnnnnnnnnnnnnnnnnnnnnnnnnnnnnnnnnnnnnnnnnnnnnnnnnnnnnnnnnnnnnnnnnnnnnnnnnnnnnnnnnnnnnnnnnnnnnnnnnnnnnnnnnnnnnnnnnnnnnnnnnnnnnnnnnnnnnnnnnnnnnnnnnnnnnnnnnnnnnnnnnnnnnnnnnnnnnnnnnnnnnnnnnnnnnnnnnnnnnnnnnnnggtttggctaccatcgcatgtctcttcatattgcagggctcttttccttgctccagacaagtgatcaggtctggcttagagacagtaatacccaggaagaccaggtttctgtagttctctaaccatcacatttctatataaattctgctgtgcagtgtccaggcatttgccactccttcagagaggattctatggccacatccctaaatgtcagtggtcccatttctaggcttccagggggtcctggcgtcttagctgtggatctcccaatacctgcaggtcacggggccacagaaggtggacctctaggagcagaggacatagagcagtgaagacgagacctggagctgcgactgcagcgagagacaaaggccccgccaaatcccccc

SEQ ID NO: 124274 - DNA, 367 bp, Homo Sapiens
cttcagcgctctgtgtcctctgctcctagaggtccaggctctgtggccctgtgacctgcaggtattgggagatctacagctaagacgccaggaacctctggaagcctagaaatggagaacctgaagtctggagtgtatcctctcaaggaagcaagtggatgccctggggctgacaggaatcttctggtgtactctttttatgaaaaggggccattgacatttagggatgtggccatagaattttctctggaggagtggcaatgcctgggacactgctcagcaggatttgtataggaaagtgatgttagagaactacagaaacctggtcttcttggcaggtattgctgttctaagccagacctgatca

SEQ ID NO: 124275 - DNA, 946 bp, Homo Sapiens
  misc_feature (70)..(70): n is a, c, g, or t
  misc_feature (415)..(424): n is a, c, g, or t
  misc_feature (754)..(763): n is a, c, g, or t
cttattctttgtagactaccattgaataaaggcctcaatcaaccatccatacctactgcagattcttctnagatgctgatgtatgcggaacccagaattctattcttggcacccatataagtaaattttatttgttctgcattatgttctagttttcttgatatagcactttaaaaaatcattttcatacaaattcatatggtttctgcaaatataaattaactgtctcttgcaactgttttgatatgtaagcaatgacacccaaattcagatttcattgttgtcccttaggggtatcctagtatctgactctagttagggggttagaattagttatactggctatgagacttctgttgaattgacattcttttaggagctgtctcaagtaagagctttctagtatcttcaaacnnnnnnnnnnggactcacctactcagacagaaagtctattttttaaaggacgcttagagagatttgtggggttcaaggttattatatttataaagatatacccaaatttacccctttgatttcagagtcccattacttgctaatcaatcccattgcttatacataaaagatatggtaaaggtgaattcaccatatatatataaaatttagagacagagtctcaatatattctctaggctggctttgaactcacttccagcaatcctcctctggcctcagccttttgagtaggtgagacaacaggtatgtgccaccctgcttggccttcaccttatattgnnnnnnnnnngagacggagtctcactctgtctggtacattctgtgctcttctctggtctgacatccgcccaggttcatccagaaaaagatggaaatgatttgaacaggataagctagggtgaggattagacaccatgagttcagctggagacactcatggtagagtctggaggtctctttgggggatcacttc

SEQ ID NO: 124276 - DNA, 824 bp, Homo Sapiens
  misc_feature (573)..(617): n is a, c, g, or t
  misc_feature (708)..(708): n is a, c, g, or t
cacttcttttgcttagaataaaattagacttttagtgcctttaataattccatgttctgctagctgtgcttggaagtttgcttggaaactagcagcttacctcccacagctctccagccactcctttcttccacagtacatgcagccatgaacccgagctatagtgaatcctttcttgtactcacattcatgagtgctacaggagcaattataccactctgcagatttatggtgttctaatctgaggtagcccctcaatagcattcactaatcctttcattctgactgtggtcggccactatttcaaaagttcattaccccactcaagccacacaatctctccctttcacgattagtgcacctgctattttaacaagaaaattgaggtcattgtgtggaaactacttgtgaatctttgcaatcccctcagcatcaaaccaactaggtctataaacattttttctttccttcaatctctaagagggctcaggagtccttcctgctattcaaggcaaagcctatgtttgattttacttcccatcactgaggctgagaccttttgccattaattgnnnnnnnnnnnnnnnnnnnnnnnnnnnnnnnnnnnnnnnnnnnnngcttagaataaattagactttagtgcctttaataatccatgttctgctagctgtgcttgggagtttgcttggaaactagcagcttacctcncacagctctccagccactcctttcttccacagtacatgcagccatgaacccgagctatagtgaatcctttcctgtactcacattcatgagtgctacaggagcattatacactctgc

SEQ ID NO: 124277 - DNA, 701 bp, Homo Sapiens
taagggtgtggagtgggaaatcaggggtctcacggccttcagagctgagagccttgaacagagatttacccacatatttattgacagcaagccagtgataagcattatttctatagattatagattaactaaaaacatttcttacaggaaataaagggatgggctgaaataaagggatgggtctggctagttatctgcagcaggagcatgtcgttaaggcacagatcacttatgctattgtttgtggtttaggaacgcctttaagcggttttccgccctgggtgggccaggtgttccttgccctcgttctggtaaaccgacaatcttccagcatgggcgtcatggccatcacgagcatgtcacagtgctgcagagattttgtttatggccagttttggagccagtttatggccacattggggggcctgttcccaacatgtcccctttgttttgcaaagcgataaaagcaaaggcagctttgtcatggtgggctacttcttgcagagtcaggatccacatctgcagactcaggttttcttctgccatctgtgacagcttcttgatctgacctcaggtggatggctgtgtttgacgggtgttgctcgtgacagttggggtcctcctcagcatcagtcttgacatggctgcaactgggggggtcctcgggatcctcccggaatctcttcctccctcgtgccgaa

SEQ ID NO: 124278 - DNA, 1128 bp, Homo Sapiens
cctgggtcggggattttccctcgggaatccaatttccctcattgggtccagatggtcaattcaaggaatatgcgaacagctcacttcgcaggatacccagccctgcaaaaggaccatgaatgtcatgtactcttgctgtgcttttggctggaaggagaatttcttggattgagactcatatactttgggggctaacactggggccaaaatgtaaaagaaaccctttgtggcttagtaaagttaaatggccttgtggtttgtaacaggccataaagtctaacagcttgatctggatacccatcaagacacgtgaaatcattatcatgagcctagatgctgagcgaagagacctccgggaggatcccgaggactggcccatgttgctagccatgttgagactgtacggctgaggaggacccctaactgtcacgagcaacacctgtcgaacacagccacccacctggggacagatcaagaagtctgtcacagatggcagatagcatacctgaggaaagcgggactaaccgagtcacacatgagtgaattgtcatggtagctatgatagcagttatcaccacttgcttctgcagatgtggatcctaactcctgcgagaagtaactcacagtgacaaagctgcctttgcttgttatcgagcttgcaaatcaaagaaggggggacatgttgggaacaggccccccaagatctggccataaactggccccaaaactggctataaacaaaatctgcagcactgtgacacgttcatgatggccgtgacgcccacgctggaaggttgtgggtttaccggaatgagggcaagggacacctggcccaccagggcggaaaaccgcttaaggcgtcttaaaccacaaacaatagctgagtgatctgtgccttaaagacacactcctgcttgcagataactaaccagaaccaccacttttacttcggggccatccccttcatttgcccataagaggatactttcagttaactctattatcctattgaaacaattgcttatgactggacttaactattaatacatatggtggtaaacctctgtggggcctctcagtctgaaggctggcagaaccctgattcgcacttcgcactttgtaaaacaa

SEQ ID NO: 124279 - DNA, 899 bp, Homo Sapiens
tataggagcagatctatggtaaatactgagatcagaaacgcactgtgtaactgtgtcatagacgtgattacatctaggcacttattgccaagcccaggttgataaatatgccccaataagtatacttgttctctgtgtcagcccttgttgaaggaatactcacagcagtggtgataactgctatcatagctaccatgaaattactcacttgtgactggttgtcccgctttcctcaggttttcttctggccatctgtgacagcttcttgatctgtccccaggctgggtggctgtgttcgacaggctgttcgctcgtgacagcttcggggtcctcctcagcgtcagtctcaacatggctgcaactgcgaggtgtccctcgggatcctcccggagtctcattcctcagcatctggctcatgataagatttcaggtcgtcttgatggtatcacagatcacgctgttcgatctttggccatggggattgctttaagaatactcgggtgtcctccagccccttccacattctccaaccatcgctccggcgacccttcgacctggattcgagcctcggtcggggagaccctaacccatgcggcgcatttctgaggccacgcatcaacgggcccggcagatggctcccgtcttcgcgtccactacgcgtgccatccgctgactcacacagaccaccctcccccattcaggggaggcattgggagccagcagcagccggtgagataaagatggggctgggggccctgtcctgttctgttccgtcctttcctggggttccatgactcctgcctgtggctgagcaggaaggaggaaggggaaatggccacagcctggggaggagcaaacacccacaggggaggctccgtgagcaagctctcctagggctg

SEQ ID NO: 124280 - DNA, 961 bp, Homo Sapiens
cacatttccccccttggggcaagagcagctataatctacttatttagcataaatcctgaataccactatcattaactatagccctcatgttgtacattaggtcttcccatttgttcatcctacgtgtttgtaactttgtatacttttacctaaatttccccatttctcctgaccccactccaacctggatgaccctggataaaccagtggtccccagcctttttggcaccagggaccagtttcacggaagaggatttttccatggaccagggccgggtggcagacggtttcaggatgattcaagcacattacgtgtattgtgcattttatttctattattattacattgtaatatataataaaatagttatacaactcactgtaatgtggaatcagtgggagccctgggatttttttttcctgcaattagattgtcccatctgggggtggtgggagacagtgacaccagaagtgtgttgcttatgtccagtctactccgtaatcttgttttggttgctgtcactgcagaaaatcctgcttcacaaagatagcctgttggaaatggaagcagactcttcagtgcttttgtggcaatctcaggatatcccaccttgagtttaatccagaacatgggatttgaagctgtctcaaacatacttttaaggccaccatcatttgtgatctcaagcaattgatcctcttctagtacggacaaaatcgattcacctgacttactcacaaatgggtcatggatacattcattcccagttcagggttcttttgtggttgggtagtaatgctcgaactcttttgaaagctaagataggtgatcatgcatcagctgagagaaagaagctgctggctcagtcttcttcaaaatctctgctaatgtttgaaacatgtcaaaaatctcaatgttcattcgttgcccccataattccagtttggctttcaatgcaac

SEQ ID NO: 124281 - DNA, 739 bp, Homo Sapiens
  misc_feature (467)..(508): n is a, c, g, or t
caagatggctaactagggatgtcagatgccagttctcctcagaaataagatcaaaattataggtgaatggtcaaaatctgaatgaaaaaatgaaggaagacaaccaggatctgtcagagagtccagagaatgaagctgtagtgcagaaaaggaaagcagcaggagtgcagcagagatcaacccctgagaaacccatagccctacggaaagggtagggcttctctgctcctcttacccctgtaacaatttgctgaccaccaaatttttgaggagtccctgtgctctcatgaccccaggaaatgctgttggtggcaatctgggaacttccagggatagagaaccaggtaccaactcacacagaagtgcctgcataccccttaggcctgaactgagacagcaggtgccatattggttgttcaccgattgtggcccactgccctccccagggaacctcagcctttgaattnnnnnnnnnnnnnnnnnnnnnnnnnnnnnnnnnnnnnnnnnntttgactttcacaaccacaggggccagcaggtctctagggaactgcagaatctctggagatccagcactcagtatgggctgcccctagggaagggaagaattcagcccaccaaagccccacttaggacaaagaaaacatgggcatggcaccaactgctaaaggggaaggtaccagtggtcagaaatggacatggacagggggtcatctcctgctcccccatctactcttgc

SEQ ID NO: 124282 - DNA, 322 bp, Homo Sapiens
ccctccagatcataaaagaaagtaaaagaagaataaaggaagaaaggatattcagaacaatcagaaaacaacaaaatgacaggaagtcctcacctattaataacaagctggaatgtcaaagtttaagctcccccaactaaaagatatagactggctgaatggctaacaaaaataagacccagatatatgctgtctacatgaaactcatctcacctataaagacacatagactgaaaatgaagggatggaaaaaaatacctcatgcaaacaaaacaaaagcatgcaggagtagctacacttatatcaaaggagagtttaagtc

SEQ ID NO: 124283 - DNA, 603 bp, Homo Sapiens
  misc_feature (1)..(1): n is a, c, g, or t
  misc_feature (263)..(271): n is a, c, g, or t
  misc_feature (399)..(407): n is a, c, g, or t
ntgccgtttattattgtagattattcttttcttgatataaccagaattgaaaatgaaagaaaagcacataggaacaacacgcgtggttagttagtaactcaagatataaaacaattttgcacagcaaaatatgtaaaagaaaagtaactgacaagatttttttatatttattgtggtaagatttacttttcatttctttttaaagacaggatgtcagtccctgaaaataacatttactgattattgcctttaaaactgtggannnnnnnnnaagttacagaaaatccagttctgcaccacaatacaactgtaaaaaaatctgcatcatcttaaaactgtgcagtaatgccatttttataactgcataaattttattagcgttctaaacagttttgcaannnnnnnnngtattatatgcttgcaggttatatcttagtgcaattcagtcccaaatactttaattttgaaaagaaacaaaaaacactacatttttgaatgtaaaatacccctacagatataaacaggggcgtttcccctcttaatactttggttccccggccgtaatggccgaattcccgggcatatgtccggtaccgtcgactg

SEQ ID NO: 124284 - DNA, 1405 bp, Homo Sapiens
caattagaagcaattttagagaattttatttaactgtcaacttatcaccaacatctaacattttttagttcaggtacatttgggtaagaacattagggagaaatgtaaattaaatactatgaaactatgcttttaatgaaacatggtctcagtaaaatatggacacaaaagtttagtggttttattgcattgttagaaaattatattatgaaagatataaaaaaatcaatgtttttctgcttcttttataatcagtatgccatcttttaccattatggctttaattttcattctacccaacaagtttcaaagaatagtttattacatgccttaataaaacatttaaaatatttacagattcaaaatagatgttttataactgaaaaaagttcacctgagaattcaccgtaacattgccatttttttcccaagttgttaatgtgactgagtgtccacatgcaacctgtatcgtctactgcatctaacatacttatttccttatttaaaattagttaagcagtaagctatagcaaactgttaaaaaaaattacagatggagaaccaagactgtatccacatttgttttgaatatgacaatttaacgaattatttgctatagttccagaatttgaataagaaaaaaattaaggtaatgttattttactgaattcaacataacagcttttaaaaaatcatcaaacattgagaaggccagttcataaaatagtgagcaatgatcatgtgaatatgcaatatacaaactgaaaacatttcaaaattctgcatgaaggaaaagggcatacactgtatactcataatcctgtcatttgtcttcggcagcctcaaaaaaaatattgccttgaaacattttcttagaaaaaacttctttagaagttaatgttaaaataggcataaatgtgtaatgctatgcaatatacagaaaactttcccacttatggccaaaagacaaacgtaaaatcttttttatctgtccatctgcattacaacttgaaaatcatgtagatatgaggtagtgtagttacttgtattacatgctggctatttaaagtaatgctaaattttaagaaattacacttggccaataattctgtgtcattaatagaaacccttaatgctaaactgtttataggtagagagaaatttaaaccaagtgctttacaaattatatttaagctctggagacaactacattttatcataaaatagtaggtaatctttcaaagcaagtacagtagcaattaaagcaaaagattatttgacatttgcacatacacaaactgatacaaccaatagttgggtgtacactgaggtaggaaatcaagggttccattggcttaagattttacattttgtaaaccagaagttcttatattattttatatcc

SEQ ID NO: 124285 - DNA, 1565 bp, Homo Sapiens
  misc_feature (746)..(771): n is a, c, g, or t
  misc_feature (1009)..(1018): n is a, c, g, or t
  misc_feature (1095)..(1104): n is a, c, g, or t
tccttacaagacatgattgtatatcctcacatgttttactactgctgggccttccttcatcctttgagggctatttttactttctgcagcaatcagcttaataacaacacttattgcccctgtctctctctgagaacacggtgtgtctcgacacgtcccacgtacgtggaaacacaagagcccaccacttgaatttctaagacccatttcattctgaaacttcttatcaattacctaaatctcaacgaaaaacaatttactgaagccgactcccctccccatctccctctcaacctcaacccacctgcatgcatctcccccagaggaaacactgagggtaggggacaggaggctcaggacgcgccctctgaatcgagtgtttcttcttcacaagtcaccaagagaggacatgagggggaaagtccttttttgcccttctccaaaaaataaccttccacagagacaaactgtccttctatccacttttatcttttaataaatatcaaaaggaaaaagctgcaagggtgcaaagggcctgtgccagaagaaaacacacacagggaaaccgctttttttaatcaattgtagagaatagtcatttttaatctaaattagagaattgtgatacaatggcagtcctcaaaggcgtaacgagttcatctttctttcaccataggggttatagttggcttgtgctactctggaatcattttactgtttgtttttattatcttaagtgctaattnnnnnnnnnnnnnnnnnnnnnnnnnncctgtagtttcattacctttttgaataatgtcatacaaaaaatgtatttgtttttttgtgctgtgagaattgatgtttgtagattaataatcattttgtttagaattacaaaatagtttttaaatattgtctgagaaaagccaaagttaatgcaacctagtggaaactgtaagaccatttgagtattgtttgttttattgatgcatttggattttgttgtttgatggaatttgagccnnnnnnnnnntacgcaggctttcctatttctacaactgattgtacttatgcattttgtaccagtggaactttttatactggagattnnnnnnnnnntggaaatttttgtggcttgctctggtgggcccctgacaatgactgatttcaagtttgatttcgggttgattgattgattgattgatagaaagaaagttgcttttcttttgagaattaaaaactttggcttgatttcttttttccctttgcttatatctagcattagaattttgtcttaaaataacagcggtaagtttcactttttattctgtattgtgcagttacacaataaggtaattagatttagaagtactcagtcactttaagtggataaatgtattagttaaaactttagggtttgcttttttgctgtttagatcaaagttttttctgattcttctgtcctcattgtgaacataaccgtgtagttgaaacagtcaaacttatttttgtaatgtatgttattgtgtgatgcagttttttgcttctgtctccaatattaaaccatttatactaataaa

SEQ ID NO: 124286 - DNA, 1094 bp, Homo Sapiens
  misc_feature (831)..(831): n is a, c, g, or t
  misc_feature (861)..(861): n is a, c, g, or t
  misc_feature (1072)..(1072): n is a, c, g, or t
acaggtagtaactaggttctaaagaaattatctcctaagtggattttaatataaattttgaacagttatagaaaataaagatggcctttgggtcaataacagaacataacaaaaacactaaaaatttctgtacataaacacacgcatatcacaagtctagtcagaaagaaatacatagaaaaacaagatagaattttaaaaataatttgcaagggaagttctcaatgcttcagttctaaaatattgtcttcttttagaaaaatttaagactggaataacagattgtttttcctgcaatgctgtaattactgcaaatttatcagcaaagaggtaaacagcaatgcaatttttccttaagcttgaatacataagggaacaataaagaaacctgattagacctgaactaattaaaagtcacaccagtaattttcaggccagctctggtctccaggtagaattccaggacaggtttgtatcactgggtccattcccaacaggctggataggagagtctggagtaattataaggataccaccttcttctatcctgggctgcccgactggcattgggcttcacattccaagaatacctcctgtgtgaatagtcctctccagggggaccatgaggagggagatggtgtctctggtaaacatgtggattctctgaaaattttctgactgattgttgcaactttgggtctgggtgtggaaatgtcgaggagctgagtgaccctggatcttgatgtagattatacctaggtccttgtcttaacaggcttattgtggactggctgcatgagatgtgctgagtcttcaaatcacttgacctgngtacactggaattccaattctttctgatangacaatctgaaggtctcaatgtagtttgtctttctagcatgtcccggcacctatgatattcaatgcatatctggctcacgcctctacacatcaatatcgcaatgggtagcagtctggttaactcgtgcgattcttggctgagggcaaatcctaagtgagtcgataatctatcatgtcaactgtcctggtgaatgtatcgtccaatccaaanatagagcggagataaggtaagg

SEQ ID NO: 124287 - DNA, 1565 bp, Homo Sapiens
ttttactatcagacaatgttgtttattatttcacacaaaagttagaccaaggccacagtgccgttaaacacctccctccccacccacgcatggctcaaaaaccaccccaaccctgctataaaaacaacagaacacaacaaaaatactgcatttgaggctgagccaggaacagagtggctccaacaaaaataagacaaaaacacaagacacaacatcttttcaggtttgtgtaaaaattgccatggcccacggggaaagtggtcatggccgtgtcaacaaggatacttgaaactcagggcttttggaggtttgagacagctgccacattagggtgtcttccaggctctgctgcaggaactgaggatgctgaagggcagggctgatcccttcgccccctctgaagtttaggccattgcctggatgtgcttttcgttggggaagatgccataggctccttcctcctttccagagagagggacacagtgagagggctggaggccctgaaagccttcagtgcccacggtaaggaagccagccaagagaattccctctctagaaagaaggccttccaccggacaaagttcatggccctgggagccagcatgcctgcattcacatggcataaagccctacagcaactgtcgccaccagaaagctgagtgtaaggccccttcggagaagcggagccttgggagcgggtgttgagtgggggcttccctctgggagtctccacgggggcagaatcttgcactttgttgctggcccgctggcgaagccctggtgcccgtgaggggctctggtccttggtgtcatgggtcagcagctcctgcaactcctcaaagagctggatgttgagcaggaacgcagtcttggcctcttctatcaccctctgcctgactgcgggagtcatctccagggagttcatgcgggagcggtagagctgcttgaacttggtggcactggcaatgttggggaaggtgaagaaggccaggccctcgccagagctgggcaggtccagggctttctgggcaatctttttgagcacctggcccccagacaggtcacccaggtagcgggtgtaggcgtgggccaccagcagctcgggctctgtgcgccccacctcgtggagccgcttcacatagcgctgcatggctggtgtgtaggggatgacctcctgccagcggggcccgtaccagaaggccaggtcctgctccagggcagccttgcggtgcagctcttctgggaagtagacaggggcgaagactgggctctccttgttgcgctcaatctcctcctccagggccacatagatgtggtacagggaggccatcaccagcttgaagccgtctcgggtcacctggcccttctgaaagttcctcatgaactcagcattctctgcctgggtgtgcacctccttggtggcctccttcagggcctctgacaaatcctggggcatgctgtcgggttgcggacgctccatccggccggtgctgggctcgttcgtgctggctccgcgggcggcggctgcgctgaggacgctcgagaggaggcaggcgttgactccc

SEQ ID NO: 124288 - DNA, 1091 bp, Homo Sapiens
cattcattccttccttggacaaataatatttattgagagcccactttgtggcaagcactgtgctaggtgcagggaatcagcagtgggtccagtccaagctcacgccctcacggatctacattctagaagccggctacctaagcaaacctatgccaacaaaacttctctctccctgctcaggggctgggatcggagcaagggatgggaggaggatgtgtggcttggggaaggtgaggacgctatggactaagttaaggcctatctaccctcgacctttgcccctccaggcagctgggggagagcggaggcagggtcgctcagggttctacccacacgctgctgttggtcacccgggccccgaaccagcccttccagtagacggagtcctgccccccgtgctcgaagcggacgaagcggacgcccggcccgtagtcggtgaaggtgtgggagatctccatccagcccccgccgtcactgtcttggggcactgccacctgcccgctgctgaactcagccagcacgttctcgtgctcggacagtagcttaacggtgagctcgtagaggcaaccagcgtcgctgcggcccgagtaccagtccttcaccacgatggccggctgagtcgtgtccagcagctcctcccagtagccctcagcctgcaggtcaatgacctgtgctttgcgacaccactcaaaggaggaggcgaagtacttcttgacgctctcatcgtgggtgaactccaccccactgtctccaggcagctcctccaccctccagccgtccccaccatgctccacgtcacaccagccttccaagtcctcttccccacacgggttacgcagaaggttgcggcgccgcttgctcaggaagtagaactgctgccagtggtcgcgctcctcctccacgccgccctcgggcaccagcccctcctgctggcacttgagcagccacagcggggcgccgtccaccagctccttccagcgcaggcacaccaggcggcaggcctgcaccagctcggcggccggcagtgcggccagcacgcgcagcagcagcggctcgggcagctcgtccaggtacgcggcggcggcggccgc

SEQ ID NO: 124289 - DNA, 865 bp, Homo Sapiens
  misc_feature (620)..(640): n is a, c, g, or t
  misc_feature (720)..(728): n is a, c, g, or t
tttggttttccaagtgttagccatttataaataagtacatttgctttcatacatacagttccttgtacagatgacaatctgtatacatggggcaggaaaatgcattcatttgaacttttcacatctatctcacacagctcacatgtacagacaataaaactgctcaagcaagtacagcaaaggaaaatgtctttccttatacacaggggtagatgcctctgtggggtgtggggcatccccactgcacggcttcacaactgtgtggtgttcaatatatcaggagagagaacaaacatgcattggataatatactgtacagagaaagtcctttacatctgagtcatagaaaacctaaaggaaaactaagtgcattaaagctttttccagcaagtgtcttgaaaggacagcaaagaggaggaagaatcaaaatcatattagtacaaatcactctttaattgtagactgtacatgtctgtactaattaaaatcatcttggatttggaggagacagaacagagacaaagatgctgtgctagatggaaaggaggccacgcctgaaaaggcacctgccctgagcctgatgaggaactggcctcactcagcaggaatcagccaaaggnnnnnnnnnnnnnnnnnnnnncagaacaggaagtgtaacttacaggatttccaaaatcacctgtgaatgaagtggagatctggagccggcatctcttaacnnnnnnnnnccccccagtaaattggtatgcaataaggcaggtacattcaagtactgaattttccagaattaactcttgtctggcgctggggaccaaagggattgagttgagccccctctaaccagactttctggttagcgattagc

SEQ ID NO: 124290 - DNA, 2173 bp, Homo Sapiens
aaaagccaagtttaaaaccctttttccaaaattgttgttattggcccgcattttgagatcccccgaccccagcccttgtgtagggccctgaagggggccccgcaaaaagaaccccttggggacccggggtaatttttaaaaattccccccaacccatttttgaatccccccaggttcccgcggtttaaaaaaatttttcgaaaaagtcatatttccggttcaggcaaacatttctcaaggccgccaagccgtatcccagaaaaggtttcaccgcctttttccactttaaaaaattttctaattcacccttgagagctttaaaatcctcggtaggtagtttttcacaattttgtccccccctcagaagtaaggttccttccccaaggcatccccagttagcagttttccccagtcccgggcgttgtaaattagacggccccgagcctagcttataatacgactcactatagggcccactttgtacaagaaagatgggtgcgcgtaagcttgggcccccagagggatacttttgaccggccgcccgttgtaaaacgacggccagtgcctagcttataatacgactcactatagggaccttcagacttcaatcaacattttaattaccaagtctatatttagcaagacaatgtgggagagataaagaggaaggaaggggtaggtggggaggggttctcaaaggagctgacccattttctgcattggctgcagagccttgcagtcctggccaggagttcttggccttgtgcctttcagaagtgccgacaggcatcaaggaggtacttacgcagctacagctcagtggcagctgcaaaccccatctacgaaacatgtcatcaggactgtcctttaatagtcttcctcctctctgcagctgcgggaaagaggactggccaagaatttcaggtggggtcagtgtgactgcagggtcaccgcaacagctttggctgtggcgttgaggacggtggtgggaagccgagcagcagggagcatggcagggatgtctctggggaccctctggatgggcgggatgttggggccctccagtgtgtccaggatcccctctaccactttgtggtaggcaaaatgcagatagagcaggaagagcatgtgtagggcagccagggtgccacagaggagcagccgctgtgtggggcccacggtccgagacaccaacactgctaccatgcgcagtgtggacagtccacccaccaacagccagaagaggtagaagagggcgtggaggtggatattataggtgatgaacaggacaatgcaatgcccaaagaggccatagcccagcagtgccaacatctgcagcatggtgatctgggcgttgcacaggtaggcaaggaagtaaatgaaggatgagactcccagccagtagccgaagcaggtgccaatggctgtgcccatcagggtgccctcccggataatagtgtcagacgtcttcatcccatggagtaggatagcaaccagagtgaagaccagcatgagaggtccatagagttcacctgcaattttctgggggaagttgaccatcttgatagggatcatggactccaggagcctgcttcgcacctgagcaggctccacatcaaagtagggtctgaggatgtcgatgttggcgtacaagctgaaggccctggaggcttgtcttttcccagcctgccacatctgatctgccacctgccggctcagctgtcccttaaagcccttcatgcccaggaactctccatcctcctcttcagcagcagctgcatcagctgcatcagcgtctacttcttcctcgcgcaggcgctgatgcagctcacccatatcctcgaagctagagcctgaggtatcatccatgttctccatgtcaatcacagctgagcctccgccctggatgttttcttcgaaccctccccattccgggccagctccatttcgggcgccgcccgccggcgccgctgtagttgccatgtcccttgagggctcccgtcgctgaaacccgcgctagccccgcgcgcggagtgggcaagatgtgggcctccggaaggtagacgtccagggtcgaggagaggtgggatcggccggaacacaaaagcgacgcgtggtcgcatatcccggaatccgaccgtaccagcctcttttttaacactgtctatattca

SEQ ID NO: 124291 - DNA, 971 bp, Homo Sapiens
ctcctttttgtgttccggccgatcccacctctcctcgaccctggacgtctaccttccggaggcccacatcttgcccactccgcgcgcggggctagcgcgggtttcagcgacgggagccctcaagggacatggcaactacagcggcgccggcgggcggcgcccgaaatggagctggcccggaatggggagggttcgaagaaaacatccagtggaagaacaaagccctaaaccctgggatgagcagaggacttaatggatggaacagaaaagtcctgcactctaggagccattgtcttcacagggcggaggctcagctgtgattgacatggagaacatggatgatacctcaggctctagcttcgaggatatgggtgagctgcatcagcgcctgcgcgaggcaagaagtagacgctgatgcagctgatgcagctgctgctgaagaggaggatggacgagttcctgggcatgaagggctttaagggacagctgagccggcaggtggcagatcagatgttggcaggctgggaaaagacaagcctccagggccttcagcttgtaacgccaacatcgacatcctcagaccctactttgatgtggagcctgctcaggtgcgaagcaggctcctggagtccatgatccctatcaagatggtcaacttcccccagaaaattgcaggtgaaactctatggacctctcatgctggtcttccactctggttgctatcctactccatgggatggagacgtctgacaactattatcccgggaggggcaccctgatgggggacagccattgggcaccctgcttccggctactgggctgggaagccccctcccttcatttactttcccttgccctacctgggggcaacggccccagaatccaccatggcttgccaaaaggttggccccctggctgggggcttattgggccctccttctggggggcatttggcgcattgggccccgggt

SEQ ID NO: 124292 - DNA, 1253 bp, Homo Sapiens
gcttcaactcaacagtttattagaaaggccatggacagatgaaccctgagtaaccagctgaggaagaaatgaaaaaagaccctgtccctcatggcccgcccactggcctcctgtgaactctgtcctgttgccaaccccagatgaagtcagccaaaaagtgctttccacatcctctctctggggctgcccagcctgaccgtaggggatccactggcagagccaaggtggatgctggtgcctgaagctggaagccagcaggacatgagacccctcctgtagcaggaagtggttctagaactcccagcagaacagaacggaaaaggagctgattggggatagaatgagttctgctaaacagccagatgctctgagagaggtgacactggactgtctcggaggtgtgtgcagatggctacaggtggccaatcgtgggggtccccagggtgggatcccaaagctgctctaaagagtctcagagagccccagcgtgactcagttcccctcctggggccgcaatggctgtttctgctcccagaaaggcaaatggatcttgtaaaaatccatggtggttgatgccatttttttcataaaaaaaagtttatacagtgaatcgctttccaccagcagagcctgagccgagaagagtccatcctggggaaggagaaggcacttctcacaccctcattaggggtgttctgggctggcagcttccccggcccctcgggttccagctccctctggccctgtggttccggcctgctccctctgggaagcatgctgactctgtcaagctagcaccgccctgtggcccgaatgccctggtgcctcacagggtggtggatggcaacttcctcactcgccgctgggccaggatggatgactcgatgggcttcagctggggggtgggcttggagctgttgagtgcggagtacgtggcagccatggctcccttcacaagctgtaggtcctggtgggacagctggctttggggaagcttgtctttctgggtgacccatggatgctgcagaacctgcttagctgtgaggcgctggtggggatccacgtgtagcatcttggacaccaggtccttggctgtctctgaaactgtgttccaatttcccccactgagggtaaacttcccactgccgatccgggttaggatttcctctggtgtgtcactgggaccgttggcaaatggagtatatccctcgtgccgaattcacaacacccagcctcgtacctagaccgtaagt

SEQ ID NO: 124293 - DNA, 1064 bp, Homo Sapiens
cacagtgcttgatatttattgttaatttctcttcccactaaagaactgtgcaaagagtatttggctgccttattccctgactccagcaacaaaccttctcagtcactatttagaactgtttttagagtttggcagtgacaatttttcagacagccagcaagtagtgtactagagataatcccttcctccaccccctgtgatacccttaacgtctttactgcttcatcagacaagtgtctgatacatggggctgacagtattacattccacttaggaagatgataacaggagaagcaaaagcacagtgaccagttggcatttattagtgtagttacaatttgtcactgtagtaaaagtagtagaggaaccaagactctttgttatcacaaagaaataaataaagcttatttttaggaaaattctaactgagtaagtgatatctagcagtagcactagaggtgcccagccttgtgtgacagataaagctggggcagaagtcatgttaaattctacctaaaaggagctcccacccactgcctgctcctccagctcctggccagaactggtcatggctgcaaggtacagaataaaaggaaacctaatgaaaaaaacagctaaaacactgagaagatgtggacttattagggtgtgagctgaccatgatcaggtaatctattcccctcactccagagaggtttagacggcagcttccccggaccgcttccgggtgatgtgctccaggtgggcatggtctgaagtgtccaagtcaatctcgtacttggctaggattttgaggatgggcctcagtttcagccaccactgttccttggggattcgatgctcaaaatctgtctggtccttcagctcagccactggttggaagaccagagccctcttacgcatccccagaacacagcccgaatctggagtattggcaaagatccgcccattacggtaactctctttgattttcccagacatccagttcatagccttggcgcccatcttagtggcaaattcctatcaaatggggttgggctccaccctgctgcatgtgaccaagc

SEQ ID NO: 124294 - DNA, 868 bp, Homo Sapiens
ctttttttagatttcttcttcgccacttcatccactccatccacctcatcgccttttctctttccttcactcttgactcctgggagctgcttcttcagggcttctttatcctctgtagcaaggaggctgaagcccttgagctgactcgcactgtactcgggccggaaacccagctcctccctgttcttgacaaagcagcctggatggtaccagcggtcaatcatgcctagctgtggcttctccgggtccaccatcttcttggacaggcgcacctggcccttttctatcttctccatacaccccttgcacgtacttctgttggacttggcatactctgctgcaaagtcacccagagtcttctctgccttgctaccaattccatcctggcctttgcctgtcactcctccagcttccgctgtcttcttgactttctgctggtcatcccaccgaagctcagagaacccatccacctcaacgtcagggtgccggatggagtggcccaccttccagaagcaggagaagtggtaccagtgtgggacttttccatcaaacatgggcgactgcaccatgatggccatccggagcgagtccttggggatgctctcgctgcatttcttgcaagaggcgcgcccgctcttggcgtactcgactcgatagagcttatccgaagactccgccatcctcccctagctgccgccaaagctccggaagcccgacgccacgacctagaaacacgctgccgcctcgccgcctcgcgtgcgctcacccagccgcaggcgcctgagcggccagagccgccaccgaacacgccgctcgtgccgaattcgccacccaggcctcgctacctaaggaccgtatagtactggcc

SEQ ID NO: 124295 - DNA, 450 bp, Homo Sapiens
agatttcttcttcgccacttcatccactccatccacctcatcgccttttctctttccttcactcttgactcctgggagctgcttcttcagggcttctttatcctctgtagcaaggaggctgaagcccttgagctgactcgcactgtactcgggccggaaacccagctcctccctgttcttgacaaagcagcctggatggtaccagcggtcaatcatgcctagctgtggcttctccgggtccaccatcttcttggacaggcgcacctggcccttttctatctcaaaaatacaaacaaacaaaaaatgatgcaatggaaagctaagtagccattaaaaataataagatgaatatttgatgaaccaaaggatgctatgagttattgtcaggtatccaaaagttacaaattagtgaatgcagcaattctataaaaatacacctactggccaggt

SEQ ID NO: 124296 - DNA, 815 bp, Homo Sapiens
  misc_feature (77)..(87): n is a, c, g, or t
  misc_feature (89)..(105): n is a, c, g, or t
  misc_feature (113)..(113): n is a, c, g, or t
  misc_feature (143)..(143): n is a, c, g, or t
  misc_feature (182)..(182): n is a, c, g, or t
tgggggcccggcgccgccaaaacggaaatgtttttagaaaggcttctcgaggggccggaggccgcccgaacattttnnnnnnnnnnntnnnnnnnnnnnnnnnnnggttccanccaaggggagctgtttattgaccagggaanggaatttgaggagcccgtgttagtcctggcccagacagnccagtggaaggtggtggcggggggtctctgatgggggcctcaaagactgcctctcccctcataggcggactccccgcggggccacgcttgtgctgcaccttcaggtctcatcgaagtccacgccaccagctggtttcttactcttgaacccggggttgatgagcgactctcctggacaccgcctcctgactccaggtccagggccacctctctggggatctgggtctgccagtcgccgctccaggctccacacgcgttttgccaggcccagtgtcagcgcccgcagcctgggggctgcctctgggcctggtaccttggagaggtcaaaggccagtgccgagggcccccctgaaagcgtcagggatgctctgtcctcctgcagagtcagagccacagcttgctgctcacaggctgccctgaaccggggggtgatgtcctcagccgcactcaggccaaaacgggctttctagagagcacaggggcttgtcacgagctgcctggaacccgaggcccactgggggcacccgaaacctgcccgaccccaagagccctagccaatgggaggactacagctacagggcgggcagagggtgtcagagccttctggggaatcccagatgtctgtcgcccccc

SEQ ID NO: 124297 - DNA, 836 bp, Homo Sapiens
cccctgttttttattgtttttgcatttgtgttccaaccaagggactgtttatttgacaggaaggaattttgaggacccgtgttagtcctggcccaggacaggcagttggagttgttgcgggggtctctgatgggggcctcaaagactgcctctcccctcatagcggactccccgcgggccacgcttgtgctgcaccttcaggtctcatcgaagtccacgccaccagctggtttcttactcttgaacccggggttgatgagcgactctcctggacaccgcctcctgactccaggtccagggccacctctctggggatctgggtctggtaagaagagctgaggccctgcaggccgggggctcttcctcgggctgacagctgtctcttctgcagctgccagtcgccgctccaggctccacacgcgttttgccaggcccagtgtcagcgcccgcagcctgggggctgcctctgggcctggtaccttggagaggtcaaaggccagtgccgagggcccccctgaaagcgtcagggatgctctgtcctcctgcagagtcagagccacagcttgctgctcacaggctgccctgaaccggggggtgatgtcctcagccgcactcaggccaaacgggctttgagggccgccaggctgtccggcgtgaagcaggtgctccaaagctccgcggcgtcggtcacgtagaggttgaagccgccgcggtccccctccccgctttcctccccttcgcagtagcacacgaagcggggcggctcggggcccggcgccagcgtgcagagcggcggcgacagcggatccatggcgccgggcgagcgggaacccggc

SEQ ID NO: 124298 - DNA, 1075 bp, Homo Sapiens
catgtatgtctttttcttttgtgtttccacaccagagcctccaaccaagggagctgtttatttgacagggaaggaatttgaggagccgtgttagtcctggcccaggacaggcaggtggaggtggtggcggggggtctctgatgggggcctcaaagactgcctctcccctcataggcggactccccgcggggccacgcttgtgctgcaccttcaggtctcatcgaagtccacgccaccagctggtttcttactcttgaacccggggttgatgagcgactctcctggacaccgcctcctgactccaggtccagggccacctctctggggatctgggtctggtaagaagagctgaggccctgcaggccgggggctcttcctcgggctgacagctgtctcttctgcagctgccagtcgccgctccaggctccacacgcgttttgccaggcccagtgtcagcgcccgcagcctgggggctgcctctgggcctggtaccttggagaggtcaaaggccagtgccgagggcccccctgaaagcgtcagggatgctctgtcctcctgcagagtcagagccacagcttgctgctcacaggctgccctgggagaggagaggtgcggagagctgtggcagaccctccttctccccacccgtccttccttcctgcttgggtctcaccttgaaccggggggtgatgtcctcaggcggacttaggccaaacgggctttttagagagcacaggggcttgtacgagctggctggaacccgagcccctgtggcacccccaaactttcgaccccaaaaccctatccatgggagactatactctagggcggccaagggttcaaaactcttgggaaacccaaattttggcccccttaactatcgcctaagggggtttgggggttcaacccccccatccccaggggcccagaggttgccgtgaaagggtctaaattccggggtggctgggcaaatttggccaggggcaatcttatgggctttaaaaagattgtatggtgtcctggaattgtttctcaattccaaaaaccgccgacaaaggaaaggggggctagggga

SEQ ID NO: 124299 - DNA, 751 bp, Homo Sapiens
  misc_feature (387)..(411): n is a, c, g, or t
  misc_feature (729)..(729): n is a, c, g, or t
agtttagaagtagaatctactggaagtttccagaagcactaaaaaaatctttattggatgtccgcaacaacccatgcaatggggtaggagttggagacaccaggaaggcttggggatagaaacacaagatgcaagtccttgaccacagaatcagatcacacagtcacctttccttccacaatatcccagggacaatgaaagcaagttcaaccaagatgctgaaagagctggatcattcccatctcatttcagtggcatcacagattctttggagttgcatgcttgcaacgtggaaatgtgtttcccacagccccactagggattctcaggctaggaagttgccaaactgcaagactacatcactgacctggtatcccaggagcagcnnnnnnnnnnnnnnnnnnnnnnnnnttgtccttgttcctgtcctgagtgggccccttcatgataacggggaaactggcctttgccttctgttacctcctctgtccctgtccccaatcctgggagcatgtgtgagttctgtcttccttctaccacagtctcccctctgcctccctccggagcactccctgccaatgacccactctctaaaatgatcccccctctccttgctactgcacatctcagatgggtccaggaggacagcagtctgatggaattagctcacactaaaaaatgaaagaggtgctttcctctttatctctccttgaggagtctgtcttttcnaaagagctttctgggtcactca

SEQ ID NO: 124300 - DNA, 919 bp, Homo Sapiens
gcccactatcaacaggaaattaattttatttttaaatccaaggggccagaacaaatgagacacctacccttggaggacaaactcaagtggccaaggttgggggaggggatgacagcaaggggctgggcaggaacgcgtccaaacacagcagatggagaggacgacctcttcactccggcgcagcctccatcaaatacccattctccggagccaggtagccgtcgccgccctcagactccatgtacatgtctcggctgtcgttgcccagaccctccagcccgttgtcctggccaccgcccccacctcgggcctcatccctgccccgctcactgccccgctccccccgtttgtgctcgcggtcacggtcacggtcacgatcccggtcccggcgccgctcgcgctcgctccggtggctccgccgtcgctcccggtcacgatcccggcccttttcctctggaccgtcagggccgtcaggcccgagctcccctggaggcccatcatcagggggcgcgtcacccgcctcggagggctccgccatgtcgccaccgccgccacgcagctcctccttgcgctcccgctcccgccgggcccgctcccgactccggctgcttcgccgcttccggtcccggtccttgtccttgctccgctccctggagcgcctccgctcctccttgtcgcgactccgtgagcgcctccgccggtcccgggagcgggagcgtcgccgttctcgctccttgtctcgctcccggctccgctctctgcgctcccgctcacggtcccggtcccggtccctgtgcggaagcggggaggggccgggcctctcatcgtagcgggaggtgtcatcgcggcctgaatgccggatgttcacatcagcccctcctcttcctcgtgccgaattaccacccagcctcgaccagcc

SEQ ID NO: 124301 - DNA, 1718 bp, Homo Sapiens
aaggcgagaagcgagccgctagtagagtggtagcgtgagcgtgagggccgttgcgtggtcttatcgtaatctgtgtgtgttcgtgtgtcacctaatctaccgggctggagccgcggaatattgaggtgagatttagtggaggtatctggcggccggtggcgggtgtttacgtttgcctgttgtgggttattgggtacgaataggtcatagagtcggtgggacatctgcgatatgcgtgctttcgagcgtgaagttggtccgatacgggtctctgagtccgtggtgcagtgacaccacggccccgcaccctggggccttgatgcctgggcacaggtgcagtggccgccgttccccccggtttgtgcttcgcggtcccggtcagggtcacgattcccggtcccggcgcccgctcgcgctcgcttccggtggctccgccgtcgctcccggtcacgatcccggcccttttcctctggaccgtcagggccgtcaggcccgagctcccctggaggcccatcatcagggggcgcgtcacccgcctcggagggctccgccatgtcgccaccgccaccacgcagctcctccttgcgctcccgctcccgccgggcccgctcccgactccggctgcttcgccgcttccggtcccggtccttgtccttgctccgctccctggagcgcctccgctcctccttgtcgcgactccgtgagcgcctccgccggtcccgggagcgggagcgtcgccgttctcgctccttgtctcgctcccggctccgctctctgcgctcccgctcacggtcccggtcccggtccctgtgcggaagcggggaggggccgggcctctcatcgtagcgggaggtgtcatcgcggcctgaatgccggatgttcacatcagcccctcctcttctggtaccaccgaggcctcctcctagccgccggggcctccagcccttcacggttcggcccctctccacgtccacaaggaccctcctgccatcaatcttcttgccatctgcgtgtttgtaagcggagtgcatgtctcgctcgtgttcgtactcgatgaaggcatagccacggggctttcctgaccgcttactgtagaccatgtgtattcttttgataggtccgtacacctcaaactctctccggagcttggattctgttgtgtcataattcactctcgccacgaagagagtcttgaaggcatccccctgagcattgggatcattgtgagggtcccacattttaagctctgtctccacttcttgctgtcgccgctcaatcttttcccgtcttttcctctccatgcgctcctctcgggtttcagcacgagttggaggaggggcatctcgagggtcctcaaactctcgaatgtacggcgcaatgccacaataaggttgattgtggtgtttttcatgtggcagtttctccaggggtggcaggtatggaatagggtcacggggggcaaagagggccagaaggttgggcggcaggaactgggtcatcttgccaagtcgcgtagcgccctcctcgctctggcgtctgtccggaggctcgcggcggctgcggcagcccctcagcaacaacaactcctgcttcggcttccactccgggggcgtccacgtccgtctgattccgtcgcccgctaagcgagcgcaccaggccgctgctcagccacccgcgcggcctccgatagcgaccctcgtgccgatttcacacccagg

SEQ ID NO: 124302 - DNA, 992 bp, Homo Sapiens
  misc_feature (150)..(158): n is a, c, g, or t
  misc_feature (658)..(832): n is a, c, g, or t
  misc_feature (964)..(964): n is a, c, g, or t
tttttctgtataaaagtatattttatttaaaaacagtgatattgacatgtatgttatagcccttacagaaaaataacacgttttatagtccttttatttgaaattcagtgtaaatcactcttaaactataaattcacagttgttggaggnnnnnnnnnactttaaatgatgtgaaagcatttgttccattcaaaggcccctatgcctttgaatgacatattctcagtaacttctttgccagtaactagagtatgtgagactgagtaactataatgtgcatatttcaagaattagcttcccgctgcattataacacatttcctaggaaagcctttgtatttttcatagccttttcacatatccctcatttaagaagtcacagtgttgcagttttactttgtttcagaggggaaggccatcttgttggcataagggggacagaagatataatatactctacactccggcctcttccctacaacctaaaagggagaggagttgaggcagatgggctaggactaggctttttggtaggcacattatagaagactgggtaagaaaggtgggttaggtttttttaaacttcacactgttaggaaaacgaggcacaagcaataaccataccatatgttcaaacagaagtaggttaaaatgtagtnnnnnnnnnnnnnnnnnnnnnnnnnnnnnnnnnnnnnnnnnnnnnnnnnnnnnnnnnnnnnnnnnnnnnnnnnnnnnnnnnnnnnnnnnnnnnnnnnnnnnnnnnnnnnnnnnnnnnnnnnnnnnnnnnnnnnnnnnnnnnnnnnnnnnnnnnnnnnnnnnnnnnnnnnnnnnnntagtcatgcataggtgaccttgcagtcaaactatgtgccagggtcaatgtatactctggatatggatgatggtaaatatttactggctactaactctctgttttcaatctctcaagagcttgttgtttatanaaacagctgcagcattgtagaatcagaa

SEQ ID NO: 124303 - DNA, 878 bp, Homo Sapiens
  misc_feature (656)..(774): n is a, c, g, or t
aatcaacttttattttagattcaggaggtacatgtacaggtcatttgtttttatttataaagaaaaatatatttagctctagattctatttgaagaaaaaataggattagcctttttataggaaagtgaacaaaataacaagctggtaggttaaattgttccaataataaacattccctgagcgtatgaccttattccatttgagaaataaggcagcaataagaaattgatgataaaaatgaggttcacactgaggcctgtgtgttgtcttccaggaccaggtctgcgaggtgtacccccaggagccgtagaaataatgtacccaatgatcgaagaagaacctcagatattgcaagtgaaagagatagtccggaagtacttccctgagacctggatctgggatttggtggtagttgagtaagttgtgtgttgcctggaatttagtttaggagagggtttgaatcctgctgtatgactgatgttatcctggattcctgatccttttagttctgctctgctcttttctggtaaatatttaggtttatagttcatttatctcataattaaacaatgctaattttttttctaatttagtctattgataactaagataatagaaagtaggatgctaccagccctcttaaataaaggaaagnnnnnnnnnnnnnnnnnnnnnnnnnnnnnnnnnnnnnnnnnnnnnnnnnnnnnnnnnnnnnnnnnnnnnnnnnnnnnnnnnnnnnnnnnnnnnnnnnnnnnnnnnnnnnnnnnnnnnnnctttaaacctcaccaggagcaccaacccttagatcaagtttagcatttaccacactaggttactgagttatcatgttctaggatcagccatgctttgtgttaaa

SEQ ID NO: 124304 - DNA, 1002 bp, Homo Sapiens
  misc_feature (132)..(158): n is a, c, g, or t
  misc_feature (179)..(296): n is a, c, g, or t
  misc_feature (499)..(518): n is a, c, g, or t
  misc_feature (613)..(647): n is a, c, g, or t
ccttttatgtaggccacggggttttttgggggaaaaaggatgggctcgttttttcttttctcttggggggccccggccccaacaaaaagttgtaaaaaatttttttgtggggggggcgggccccaaaaaacnnnnnnnnnnnnnnnnnnnnnnnnnnnaaaacattctgaacttaggannnnnnnnnnnnnnnnnnnnnnnnnnnnnnnnnnnnnnnnnnnnnnnnnnnnnnnnnnnnnnnnnnnnnnnnnnnnnnnnnnnnnnnnnnnnnnnnnnnnnnnnnnnnnnnnnnnnnncagcaggagaaaaaagaataaagttacaagattcttttaatattttcacaatgttaaaactaaaactgagctctaggctatgtgtgtaagtaaatctagaacacaaaagggttaaataagattttctcttttaaagatacaagaatttaagctttccttacatttaacaaacttcacagaacagatactgcaggggaacaagnnnnnnnnnnnnnnnnnnnnagctctaagtcaggaagcgaacatgggcttcgctcccccaggccagctcccctgggctccttcccatggctgcctccacgcagcaggcagaggannnnnnnnnnnnnnnnnnnnnnnnnnnnnnnnnnntcgcacagcctcttcgggaccagagcttggcggaagcctatggggggctgcctcactgaggatggcccgtatggtggccaagggctgtggcttgacagcagtggtaaacgctgggcagacctggcccctctgccctgggttgccctagagcaagacaccggtctgggtcctgaagcaagaattaaggctggggattttgcagcgggttccactctggtgggtggagggtgggaagagcatgacttcctatttcagtacgtcggatcaaaaaacatttgcagttgcaggtgttcagctgttaatttgcagacagagttgaaccatttgttgttttattaaaaggaaagttgctggg

SEQ ID NO: 124305 - DNA, 2170 bp, Homo Sapiens
  misc_feature (1005)..(1005): n is a, c, g, or t
  misc_feature (2065)..(2099): n is a, c, g, or t
tttttgatagtagaaaaaatacctttttattaattattaggaataatccattcatgtaatgcaggatgtatgttggagaaggttaagtacagccacatgaatgaggggaaacgtgcaagaggaacagtggtgagaagggggatggtcccccactttccacaaactataaacagcaacatgaacacagagaatcacaaataagagggtctttcctcatgtctcctctcaccccattcttccataatgagtcccagttggtccctagaggtgccagggcatctggaagttctgggctgggagtggggtgcagtgagtggcctcaaagttgtgcagatgcttccgagccagaaacaaagccagctgccgccgtccatctgcactcatgtcctcccccacgctccaggggaagtcgggcccgtgttctgcctggtaggagcggaggacagacagacaccagtcctcttccacctcccatcggctataaattgaggcttcctccagctgtgaggaggcctccaaccactgcctcaccactcgaagaccctcctctgccatcacccggggataccgatgctgcaggagcttcagcaggaggtcattgcctcggttggacatgatgtcctcaggaaccgtggtggtgatgatctcatccttggttctccggatcagcagtacaggaccctggtatctgcacagctgctccgcgttgtttagattgagatgctgcctcacggtcctggtcaccaggcccctccagctgtctggcatgaccttcaaggccaagggcaccaggtcatcaaaggaggcatccaggatcatggcactaacatctgggtaggacatggctgcccacgtggcagtgaagccgccgatggccccggcgtagatgatgatgtcctggggctggaagcccaggccggtggatggcaaactgggaccaccacatcccatggcattagcctcattctgcgggaatggcacccccgtgctttccagcaaagcctnggatgattccagccccaggactgaatatccagcttccaggggcgtggagacgcagcccaccttcataaaaccccagcattcccctcacagcagatcaccagcttctgtccctggggctcagctgtccccccgccggtccacaaacatggtgtcaatctcattgccatcacaggccagcagctttgcccggcgcccattacactcttccaccagtcgggcctggccctgcagcagcacaggcatgagggccttctgcagcaggtacacagagcctggatacagcatccggcgccctagggtgtgcgccaccaggtagctggtgatctgacaaggcagcttcttaacccggttgaggagggtgtctgctgtcccccggtgcaggggctctgggcgaagcagggccacaccccggcgggaagggccccctcgagactccttccggctgctgggttcttcccagtggaagtcgactggccagctccggaagtcaaagttgtagttggcaagctgcctcttgttttctgaagactggttccgatgtgttgcttccaagatggtgatgaactgccggtactgggggttggtccagcggccaatgcctcggaggcaggccacacctgccagaagtagcagcaatgtcccagcatagtgagaaaacggcaccactttggacaaactcaagtaacctttcctgtacaagtagaagaaggcgaagggagaggagtaataagagatggaccagaatactgaagccagtgccaggatgctgtcagcatgtttctccagggcacggggctgatagtacgtatcccaggagctggaatggggggcagtgactgccgttggcgtctcagggacgctggccggggccctttcagagtccctctcccggtagattttgtagagccgggggcctaggacgcagctcagcagcttcgccatggccccggctcgggccgctgctcttccagcagcaggtccccctgccggccccgccctgcctgcctcccccggccgtaatggccgaattcccgggcatatgtccggtaccgtcgactgnnnnnnnnnnnnnnnnnnnnnnnnnnnnnnnnnnncgccgcttcctcgctcactactcgctgcgctcgtcgttcgctactagcgtggccccatatgttatcatctg

SEQ ID NO: 124306 - DNA, 916 bp, Homo Sapiens
cagcccccccttattaaaacccagcatttccccttcacagcaggatccccaggtttttgttcctgggggctcagctgtcccccgcccggtccacaaacatggtgtcaatctcattgccatcacaggccagcagctttgcccggcgcccattacacttttccacccagtcgggcctggccctgcagcagcacaggcatgagggccttctgcagcaggtacacagagcctggatacagcatccggcgccttagggtgtgcgccaccaggtagctggtgatctgacaaggcagcttcttaacccggttgaggagggtgtctgctgtcccccggtgcaggggctctgggcgaagcagggccacaccccggcggggaagggccccctcgagactccttccggctgctgggttcttcccagtggaagtcgactggccagctccggaagtcaaagttgtagttggcaagctgcctcttgttttctgaagactggttccgatgtgttgcttccaagatggtgatgaactgccggtactgggggttggtccagcggccaatgcctcggaggcaggccacacctgccagaagtagcagcaatgtcccagcatagtgagaaaacggcaccactttggacaaactcaagtaacctttcctgtacaagtagaagaaggcgaagggagaggagtaataagagatggaccagaatactgaagccagtgccaggatgctgtcagcatgtttctccagggcacggggctgatagtacgtatcccaggagctggaatggggggcagtgactgccgttggcgtctcagggacgctggccggggccctttcagagtccctctcccggtagattttgtagagccgggggcctaggacgcagctcagcagcttcgccatggccccggctcggccgctg

SEQ ID NO: 124307 - DNA, 685 bp, Homo Sapiens
ttttcactactgttttgttgacaaaacatgccatgaggctctttattgtattaatattcccacttattgaatatccatgtttctctgcagaaatagtaatgtgttccattacaagatgcttccgcaggccctaactggtatgttacgtaatatcagagtgactgagcgtcctgattcgctgggacagctccagtttaagccagttgttttgcaataattattttagcactgcttttcactttaaaaagctctggtttgtacaacaattatgtggacaccctatataatatggactctattatctttctgaaatcgattctgcggttccatagcacacactccaacaccacacacaccgagccctggtgctgagttctcaggcctctgtaatgtcccacggggggcctgcgggtgcctggctcaccagcagctccttgctctccttcttttccgtggaccggaacacctcacagtcctccagttccttcttcaagaccctcagcctggactccaagagctccttggcctcctgcaccgcctcgtccagcggcagcacggcgtgctcgcggtgctcgcgggcgcggtcgcacaccacgcagatggcgcgtccgtcgtcctggcagtagagcttgaagggttcgccatgctgcccgcagcgggcagccgctgcccgggccgcggccgc

SEQ ID NO: 124308 - DNA, 1125 bp, Homo Sapiens
  misc_feature (278)..(301): n is a, c, g, or t
  misc_feature (1004)..(1038): n is a, c, g, or t
gtatttctgccaattaatgtcagccaactataagaagctttccttaagtcacaaggaattcaatgtggttgctgttctggaagacagttaccatttggggctatatataccagaaccccacgtattcaaaaggcaaaatatggggtctgagagcaggaggactaagaaaagaaaatgttatcttttactgcagacctgccaaaaaaaagactccattacttactttggtactattgctagagacgttgtttctgccagaccacaggttggctatatgnnnnnnnnnnnnnnnnnnnnnnnngttcaaatgatgacaaactttcccaattaaattgttcaaccctataagcagacacctttagattgaccatatattttgttagttgctttgaaagaaattaattattttcttgaattggtttagcagccttgtgtctggaaaagcagtaaaacctgctttgttccccaaattagaacacttgactcagaggctgctttgtaagacacttggctatcttttatcacccatcagtcacaaaggtgaacctccatgaactctgtaacgtaataaatgtaaaaatggcctcattgaccaatacacaatattaagccagctaaacctaaaaagtaccctcataagtgggaactggcttgtataaaacaagaggatatacatccgcttacataagacaagagaaatatgtacggtaataaaaatgaatctttaataaacttgtatagagaggattccggtttacatgtaagtctgctttaaataaccacagctgaatgactggaaatgttcttttcttaacacaatgcccattcattataagttaagctggtcctagtttcttacaaatctcttatttccttgaatttatctactacaccctcactgtgatgccctttaacttataagctgggcctgcccagcctgcttataaagcccccccggccgtaatggccgaattcccgggcatatgtccggtaccgtcgactgnnnnnnnnnnnnnnnnnnnnnnnnnnnnnnnnnnncgccgcttcctcgtctcactgacttcgctgcgctcggtcgttcggctttaacgagtggcgccctatagtgagtctactacaagttcc

SEQ ID NO: 124309 - DNA, 958 bp, Homo Sapiens
ttttaaacttgaaaattgtcattttaattttgatgactaaatttggagggcttttgaaataatattacaccaacgaaaaattttattaaattatagatcaccagttatttaaaaatacacgggaaaagacagacatacaaaggtagtatcatataactgatttctaaactcaatacttttgagatacaaaacaatgatcattacccccaaaagtcagtttactgacacgaattgatgtttaagttggtctgtaactcttttcattcaattctgtttataaatgttactgaatttttaaattttgtcccatatctgaactttgttttttttgacatgtttacttctcaaagtagtatatagttatttcttgcaattaatgtcagcaactataagaagctttcctaagtcacaagaattcaatgtggttgctgttctggagacagttaccattttgggctatatatactaaaacccacgtattcaaaggcaaaatatgggggttgagagcaggaggactaagaaaagaaaatgttatcttttactgcagacctgccaaaaaaaagactccattacttactttggtactattgctagagacgttgtttctgccagaccacaggttggctatatggttgttccttttatatttcctttttcaaatgatgacaaactttcccaattaaattgttcaaccaaataagcagacacctttaaattaccatatattttttagttgcttgaaagaaattaattattttcttaattggtttagcagccttgtgtctggaaaagcagtaaaacctgctttgttccaaaattagaacacttgactcagaggctgcttgtaagacacttggctatcttttatcaccaatcagtcacaaaggtgaacctccatgaactctgtaacgtaataaatgtaaaaatggcctcattgaccaatacacaatattaagcc

SEQ ID NO: 124310 - DNA, 1983 bp, Homo Sapiens
tgcggccgcgagaaggaaggggcgggttgggggaggcgctgaggtggtagcagcggcggcttttgctgagttttctctggcccagagcgctcgggctgtcggtctagcaggggggactcccctgaggggccgctgcgggtcgccgtcttcggaggcaccggcgagggcagagccaacagcctcttcacggtctgtaaggtcattgtttgccagtcgtgggcagcgcggcaaacctgctgggaaaaggttttctggttggaataggatgagtaccgcaccagctttgccttccagctgagatgtaaatttcaggcctccatcctgtggaacgtgggaaaactatcttgagtgttggcatgttctaagtatgacataatagtttaatgtatgataaatcatgggtgtttagacgaaagatttacacatataaattggaggctttagcggtcttagtgtaactaacttttcgtccccttaacccttgatgcctgttctatgggtctctagagcggaaggagcattatactccggaaacatttgctggaaggggttatgagaaattcctctctgtatgctaactccgtaatacaagcgtttgtgtattttaaaatcacagctgttccaaatataatctagcctcgttttccccctccgtcggatgataggtgttcttcaggacagttttattttaagcaattcttagtctcaagtaaacaccatcattaaaagaactgagaactattatcaattcttcctttggagtccatcttcaatggaaaggagaagggaaaaccttttttaaaaagaagaaagaaaactgaagtttttgatttgactagagaaatattcagaagactccttattttcacctagtctaatcacaaaattgagaaacaaacattatcccttgaccatgtaaattttacaccacattatgtcaacagcatgtaccttccacattgagtattcagaaagaagtgatctgaactctgaccattctttatggatacattaagtcaaatataagagtctgactacttgacacactggctcgagcaaacatgaacgttggagttgcccacagtgaagtgaatccaaatacccgtgtcatgaacagccggggtatgtggctgacatatgcattgggagttggcttgcttcatattgtcttactcagcattcccttcttcagtgttcctgttgcttggactttaacaaatattatacataatctggggatgtacgtatttttgcatgcagtgaaaggaacacctttcgaaactcctgaccagggtaaagcaaggctcctaactcattgggaacaactggactatggagtacagtttacatcttcacggaagtttttcacaatttctccaataattctatattttctggcaagtttctatacgaagtatgatccaactcacttcatcctaaacacagcttctctcctgagtgtactaattcccaaaatgccacaactacatggtgttcggatctttggaattaataagtattgaaatgttttgaaactgaaaaaaaattttacagctactgaatttcttataaggaaggagtggttagtaaactgcactgtttctctgataatgtgaaatgagaagtatttacattggagggccaatggctggtccttcaagtgctgttttgaagtgcagatttccattaaatgatgcctctgtttaatacacctggtacatttctgaagaggggctttataagcaggctgggcaggcccagcttataagttaaagggcatcacagtgagggtgtagtagataaattcaaggaaataagagatttgtaagaaactaggaccagcttaacttataatgaatgggcattgtgttaagaaaagaacatttccagtcattcagctgtggttatttaaagcagacttacatgtaaaccggaatcctctctatacaagtttattaaagattatttttattaccgtaaaaa

SEQ ID NO: 124311 - DNA, 1040 bp, Homo Sapiens
  misc_feature (59)..(87): n is a, c, g, or t
  misc_feature (222)..(256): n is a, c, g, or t
  misc_feature (420)..(458): n is a, c, g, or t
  misc_feature (960)..(968): n is a, c, g, or t
gtgctaagcgaaaattaccctcactaaagggaataagcttgcggccgcatacgcggtcnnnnnnnnnnnnnnnnnnnnnnnnnnnnncagttgtaaaatggctttatgttccgatatgcaaaataaaacatccatgctatataacaaaacacttgaagttccatatcacctgttagctaatgtgttttctaaaaaagccttatctgtagtgtgtgtgtgttnnnnnnnnnnnnnnnnnnnnnnnnnnnnnnnnnnngttttatctaaaccattcttagtttttaatatcaaacatgtaataaaaatttaaatagatgtctttccaaataccccctccaacgtttatttttattaagttcattcatttgtagaaagcaaagctgaatttgacatgtggcctgcatttgtgagagagagcgnnnnnnnnnnnnnnnnnnnnnnnnnnnnnnnnnnnnnnnaatagctattcagcatgcaaagagtttagtgatttcccaagtttgatggagagttcaccccagccacactgatggcctggtggtattcaatgctaaaacgcagggctgaggactttgtgagcgccacactggagaattctctttgctcctctgagctcaccggctgaatttactggaagaaacaaatttttttcaactatctttatttctgttggcctttctcgctccagaagcgtagattttctgagagcagaacaggccctggagatgccagacatcagctccagtgtggcctcctggggatgatgccagctgaggcgtgtttcataattgcccatcatcataggatgcagatggtatggtgcctgggaggctgactctccacacaccagagtgagagactgtatgttggggacctagggggaagggctctgtactttattacaaaatctgaatgatgacagagatgctactggttgcattttccctcctcttgaagggnnnnnnnnnccctttaaaaatacccctcaggtgacatttagcccatgaccctttccgaacgtcatccctcagacctcagag

SEQ ID NO: 124312 - DNA, 682 bp, Homo Sapiens
ttttttgaatttccaaaattctttaattggtaagtgtaatgcccagcaacttaaaaaacacacactgaagcacagcaactcatattgataggtaaaaaaagttacaggacacaaagggcccttactaatttgacaaaatagaaagaccaggtctgttgttctttctctgatatgatttatcttgcaattgctggatttgagtggcaatttggaagtatcatctgataccaatgtgatatatagctaggaaagaccaatgataggtgaagtccttaccataaaatgtttcgaagagcttctcaagacagttgtttctatttaaaagggaagatataaagagctaggttatctcaaacaatcctgtgaaagaagtttaaaaagatttaagaaggagaaagagggaagggaagcttcctgggtatgacaccatttgcaaggtcacaacgaacaccccaacggagtgcagaccttttcttctctgttggtactagataattgtttgggacatatatatgctgaggtttggattggggttctgctcgacaaagcatctgctctcggacaccccagcgtaattcctttctatgatcttcaccaggtaaacgtattgagtccagtcccgtttgtactcaaaataccgggctacccggtctgtcttgccccggtttcggcttaactggtc

SEQ ID NO: 124313 - DNA, 1001 bp, Homo Sapiens
  misc_feature (829)..(829): n is a, c, g, or t
  misc_feature (927)..(927): n is a, c, g, or t
caggtatccacttgatgtccttttatttgacttgttaccattagtactctcctgggatcaaggctgccaagcctgacctatacccagatttcccagtgcactcaggagatcgtcggtggccttgatgaagccagtgctttttgggaaaaacggagcaaggcaacgcacgacagaagcggtgcaccaaggagtaaagattcagttccatgggccccacttgctgtttgagaaaatgtcctgcttccttcctagctgacttgactcccagcagtaacaggtgggagtgaggacgcagggtcggcactcgagtcgactgctctggctccaggcgtattttctgaaactggactctgccagcccttagcttgtcaagttagcctggccagagtctggggccaactgttccactgggccgtcgactatgacactctgctgtccatgggccactatgcacccctccactgtccttaggatggtttggagccttcgatccagggcaaggaggtggggttcagtgaggacagggctgagctggtcttccagcagtgattctcgcatcacatcgctgagtctgtagtcagcttgggccagcagctgcaggtgcaaaagtgttttcttttttatcatgcagcactgggagagaggcgagaggatggagatttcatcatgggagtgtcgtccgaaccctctggcgttgtcaaggtgaataaggaaccatcatccccgaacttggtgaacatctcattatggtgccggtccatattccctggtttccctcacttggtgaagtgacatacagcttccatctgacgccactcaggccgtgganggtgagatgctgcctatgagtgcgacccttgagcttctccagttcttgagagagggagctggtactctgtctctggactcgcactctgaggtacagantcgagatgcagtcatacattagacgctgtgtgtgtcgtaatcgttctggtccataaggatgctcactgagggaa

SEQ ID NO: 124314 - DNA, 485 bp, Homo Sapiens
  misc_feature (229)..(229): n is a, c, g, or t
tttgattttaaaagttttattgatgtatccttgacatataataaactgtacatattcaaagtatacacacaatttgataagttctgatatatactatacacctgtgaaatcatcaccacaatctaacaagacatactcatcatgccaaaagttttctttgcccctggtaatccttccccaccttctcccctccctcctattttcctgacttttatcacttccttggttnttttttccaaatacctctgccacttttgtgtgtctgtatatgcctaaaccaatgtagttttgactgtttttataaagctggaatcatattgtgtatattaaaattatgtatttcgttcagtattacgtttgtactgtgcatccatgttgtttttgttaggttcaggtcatttgttctcattgctctatagtattccatctatgaatatgccacaattcatttgttctactagaagttggcgtttgggtcattttca

SEQ ID NO: 124315 - DNA, 2125 bp, Homo Sapiens
  misc_feature (182)..(195): n is a, c, g, or t
  misc_feature (211)..(273): n is a, c, g, or t
  misc_feature (279)..(336): n is a, c, g, or t
  misc_feature (366)..(375): n is a, c, g, or t
  misc_feature (395)..(410): n is a, c, g, or t
  misc_feature (415)..(425): n is a, c, g, or t
  misc_feature (451)..(466): n is a, c, g, or t
  misc_feature (512)..(546): n is a, c, g, or t
  misc_feature (571)..(606): n is a, c, g, or t
  misc_feature (609)..(613): n is a, c, g, or t
  misc_feature (893)..(915): n is a, c, g, or t
  misc_feature (2110)..(2110): n is a, c, g, or t
agagatttattttttctctaaaggcgcggcacagaggttttttagatcgtccccctcggggggattttagtgtttttcttctctgcccgcgttttgtagagagggtcgcccacctggcgcggggggaaaaatttcttataaaaaaatttcccgccctttttttcgaaaaaaggggaccacannnnnnnnnnnnnnatattttgtatttttnnnnnnnnnnnnnnnnnnnnnnnnnnnnnnnnnnnnnnnnnnnnnnnnnnnnnnnnnnnnnnncccccnnnnnnnnnnnnnnnnnnnnnnnnnnnnnnnnnnnnnnnnnnnnnnnnnnnnnnnnnngaaacccacaccccttgtctggtccccggnnnnnnnnnnggaagaaacggttgtccccnnnnnnnnnnnnnnnnggggnnnnnnnnnnnaacaaaattgtttaaaaaattttttnnnnnnnnnnnnnnnncgaaaaaaggggatattgttttttatgtgttgttgaggaggggtgnnnnnnnnnnnnnnnnnnnnnnnnnnnnnnnnnnnggtttgtgtggtttgtgttgggggnnnnnnnnnnnnnnnnnnnnnnnnnnnnnnnnnnnntgnnnnnttatttgagcaatttattttttttcaaagaaatccatgcaaagagagaacgatagaaagggagggagtgagagagaaagacatggtaaccatgttctagcagccaaacataggagaataatttggcacaacttgatggttttttttctttctttgcaaaaggacaatctatatgctaccactaaaatgtatcttcctccaaaagataccatttgattttcgaaaacataacacatggttagtcctctacttcatggctggaggaggtatacaggataacnnnnnnnnnnnnnnnnnnnnnnntaagaaagtggttccctttatcgaggaagaccacagggtgctgtagggcagcacatgtgctgggcaccaggcagtcagtgcaccaggaagaagaagcacaccaccgagatggccatgctggtgagaagcttcagcggggaatgaacgttcccgaggttgtgaaaggtgcttatctcgttgtccttcggagttgcctgctgactgtttccaggcgcatcatccacatccagatcataggccagttctgcaaggaagcggagctgattcttcacttttatcattccatcaccagagcctccaatgcactcatcttcatcatcaccgcagtctccactttcaaacccttcctcatccaggtttttatccagaactctacctttgggcatagacatggttctcaggagctggttaatgtgcttcagtttgtcaataatttgactgaccactggctcagggcccttcattttcagctcatggagattgaactggtttttcattccattccttgctgccttttggctgtatctctccacgagttcttgtccattccagcaaagggtgtcgttttccgccacagggctatggctgcagatgtagccaggcaaagcactatagaagctgatgaaagacttcaacttctgaattagttcccttcttcggctggataaggtttcttcatgttctacatgagcaacttttaatactttcttgtcaataaagagatcttcaggataataagcagatctatattggcgttgttgagaatgggcacataacttgccaatagtggtggtcagctttcctgcattcttctggacatactggatagaatcatggattgttgaaaagagaccaagcagtacgttctccatgtcatagattctgtacatgccattcacaagttcttcaagggacagaatgtattctctccagtacttgtcaatctccaccacacctgccatacagccttgcatgaccacattgcagtaaccgccacagggtttaaccatcatcagtccctggcagtaagagcagtaccacattctggtgagcattcggccacagtccttactgaacttcaggtgatcagttgtgttgatcacttcaattccaagattcagagcctgaaggaagatcctagtgacttgcagtgacttggaaacctgggtcataataagcttggggaaattcccanatactttcaggtcac

SEQ ID NO: 124316 - DNA, 1893 bp, Homo Sapiens
agaggcaaagaacaattttttattatcaaaaaggtttctgcacattgttgtggcaatattgtatctgtttaaaaaatgggcttttccaaaagcaaacaaagataggttcctcaggtgaccaaaactgaaaatcaatatttccatgtttcattaatcaaggcataaaatacaattaaagcaaaatattttacattaaaatcttggttgtgtatttttttaaaagaagggaaatagtttagtttggggtggaaattaccagtgatttctatttttattaaaccattcaaaaagttcagtttgaattctcctttgccaggtgtgaggatttccgcaccttagagtcagcgcaaaacacgctgcaacttgaatcaagtcagcaacagagcacactatgggttagataagtccctgtgtagcaagttttcagaataagaaataaaatctaattcttagggtattaactgacttgacttgaactccgttggtttaccatgttagtaaactgtgctttctattattatcatctatacataaaacctgagcagcaactgtgtgctgaagcaaccgtgtgtgaagtcttcacaaaagaaagacttcaaagccaaagaatgtcctatttgctaatatgagcaaatattttgtttcacatgtactactcactttattggtgactgcaataatttactgtcagtaaatgccaataagctagttacgttagaaattgtaaagtaggccaaataagaagcagagagagaaaaaaaatcacctccctaagaaaagggttttcctacagacttgaatgcactctgctttttcagaagagatactgtaccagtcagggaaatagatgacactcagaattatctgaggagggttctataaaaagattttttgcaaaagtgcgagcacattatgtagaaaccacaagtccgccaggactagtaaaagccagactcccactgaggccactaatcctgaagggatgaggagggagcagttaccaaaatccagaggtggagaaggctgtgtggaaaagagggtcccctctcggagctaagaccctcaggggaggccagcccgaggcatcccgcaagggaatcagggaagaacacctccacctactacctcctccgaccccagctccagctctccggctccccactgaccaacatccaaagggcaagaaagcttgatgacttggcctttacaagtcagcccctgggcatggagcaaggaagagggatgggcagcgggtctggaggggtgagccgggagagctttaacccagtcatcgtccggcttagtctcagatccaggtgttcattgttcagtagtcgactattcagagtctttcgaggagactgatgaaacagtttatgaatgataaacatggggtacagggttttggacacgggtgcttaagcataaactataaaatgagaagaataaggtactttattcttctgtggcagggaacccaccacttgggtttacgttgcagggcaacacctgtgatgaacacaacacatggtagcagtagcccattcatgaaaaactaacaggtattcttttcacagggatagtcaaaaaatgagttgaagggaaaaaagtatctccagttggagccaaaacagccatctctagtttgaaaatacactcaacaaaatgttggtgattagagataacaggaacctggcaagggaggaatttttacatacgttcaagcttttcactttgcagccacactctgattttatcaaaattcttagccatccaaccgatgttttcttcaatggtttcaattgtctgttggacacaacggagctgagaaccattttctttcaaagagctggagagtccttttacctcttcaagccgtggtcttgtggagaa

SEQ ID NO: 124317 - DNA, 1282 bp, Homo Sapiens
  misc_feature (784)..(802): n is a, c, g, or t
aaggcaaaaacttcaagataagggaatatgattgatgattggtacgaaaaatgtcaaaatgtgttcccctaatacacgacaaaatagagtgacttctggacataaatctgccatttattaaaccattcactacaacaaataaataggtataaaagtggaattggaatttttatacttatttgttgtagtgaatggtttaataaaaatagaaatcactggtaatttccaccccaaactaaactatttcccttcttttaaaaaaatacgcaaccaagattttaatgtaaaatattttgctttaattgtattttatgccttgattaatgaaacatggaaatattgattttcagttttggtcacctgaggaacctatctttgtttgcttttggaaaagcccattttctaaacagatacaatattgccacaacaatgtgcagaaacctttttgataataaaaaattgttctttgcctctaagtggatatttgcaattattttctctctcctaactagactgtaaaaagggctgctttagatcctgtagcttactccagttattagttattaacaaacacccaagtctcgaagatatttctaattaaaaaagaaggcatattcagagttctttttaaataaatgttgtttacttttataggcatctttaaacttctggattttggtatgccatttaaaaatacttccagatacacatggaaattagtaatactgcagccgtatccttgcaaacacatctgtcagtgtcaaaggtttcaaggtttttcttnnnnnnnnnnnnnnnnnnngcaaacacctatactgcccaaatgggaggattagatacatggttagaaatccctcaggaaaagtgttttttcttttcttgttgctgccttaaaaatagaataatgactatttctgatggatagagacatagcattttaagctggtggtgtgtaaaatcccataggtatgtgcatgactttcagagagtatttggggggggaggttaacaagatgtggtgccatttataagcagtgttattgtttttgcttgctccgctgccacaagtcagctaagtcataacaaaagcttcaaactgatgcttaggaaggccatgcccctttggaaacattaaattcccaatcttggtttaatggtatgtaaccctgacatctttttccctggcattctcctacccaggaaaaataaaagatgaagatttaaaattatccaaaaattccctaatcccgatgggaatattcagctggcaaatggggttcca

SEQ ID NO: 124318 - DNA, 1945 bp, Homo Sapiens
  misc_feature (557)..(603): n is a, c, g, or t
tctccgggggccgtgttggcggcgttttgcgtttcccctggggcgcccttgtgtcccgtccgcgtgtgtggtttatgacgtttttttgcggtggtcgtgcgtggtcgcgcacggttgttcgcggcgttggcgggttgtgtgggctgccttgtgcgcgccccagtggttcccggtgtgtgctatgaggggggacacgagcttgcacacagtagggtttggcactggaaatgtccctgtttttgccgcttttttccgcccaacgttgaataaaggggatccgtgggccctcatgatatggtgcataatggaccttcacacttgggggacattgtcgaggaagagtttttcttcggggaattgagagattcccactagttgattccgcaagggctgtcttccccagagactgctcgtggtttgccccccgatgggccatattgtctggggaagagtcgccaccacggaggccttgtggaccagaccttggtgttcacagggccaaaggtgccggtccgggcctccttaacccgaattcccaccccaatgaaatgagaatnnnnnnnnnnnnnnnnnnnnnnnnnnnnnnnnnnnnnnnnnnnnnnncccccaagccccgtccccgccaaactgtagaacagtaactccagagttcaaattcaaaagaagagaaagtggcaattgaaagaggtgatggtggcgataatcctatgaatgggtttttgatttctctccttccaggggatgggtggagaatgctcattaagatttgtagttagaggttaaccatgtgagcccctcatagagtccgtcccctgaggtggcacaggagggctgcacataccagttcctgtcccgaatccgggtcaggcccagtttctcctggatctcgtggggtttcatggcatcgggcaggtcctgcttgttggcgaagatgaggattatggcgtccctcatctcccggtcattgataatgcggtgcagctcctggcgagcctcatcgatgcggtcgcggtcggcgcagtccactacgaagatgagaccttgggtcccagtgtagtaatgccgccagagcggccggatcttgtcctggccgcccacatcccatacgttgaacttgacatttttgtaagtcaccgtctccacgttgaaacccacagtgggaatggtggtcaccgactggcccagcttcaacttgtacaggattgttgtcttgccggccgcgtccaggcccaacatgaggatccgcatttccttgttcccgaagattttggatagcaccttccccatcgcgtcggaggagccggggccgggggcattcaggtgtcccgggtcccctcagccaacaacgccgccgccgccgcgaaaccgaaacgaagcctctcggccgcgagagcgcctttgcggcctgcgtgggagttgcctcctaagggcagaggcccaggccccccgctcactcgggcatcaccgaccgcacaacttgatttctccagtcgccgccgccacccgggccctgagactgcgctgggagccgccgccctgctgaggcgcggcccggcccggaactgcccttccccccgcaggcgccgcgcgagcgccgccgcggttcccgctcctccgccttcctctcaccgcgagggagactgcagccctccggcccgcccgccggcctgcgagcactgggctccccaccgacccaggacacccgagaggcagcgcggctccggggccccgtcaggtcatggatcctcgcgggaactcggtgcgctgcctgcagagaaacagagagggaggggagttactgccagagctccacaaaggagcgaagaccgaggtggcccgcctttccagctcggcccaaggggttacctccagccgccgccccgagcgcgggctccctccggcctccaactcctcctcccagcctcgtgccgattaaccccggcct

SEQ ID NO: 124319 - DNA, 904 bp, Homo Sapiens
  misc_feature (706)..(759): n is a, c, g, or t
ttttcaactagggtaaaagggtgcatataattgaaattgttaaatgttttattaatgaacaaagtaaaccttttagtaatttttaaattactggtcttaggtgttgaaaacaaggtaaaagtatacattccagttttgcccaaaaagtcacttaaaatatctacaaattatttaatctgtgtgtggtaacaccattattgctccaatttctggaaagagtctattttcaaagtttaaaaaagaggaaaaacagcaaagtggctaactttgcagtggaaagaaaaagtgtccttcatgggttacactttcatatttttatgcagcattaagttatctacgttatggggaacttgggttttattcctactcatgcatgatgtgtttcagaacttacttgctgacatttcagagaacttcttacattacctgtttaacatactgaggtgcaactggaacatattacaatattactcattatttgccactgtgggctaagtttactatactggtcttagatataaaaggtcacatttgaaattactaagttagaactcataaggaaggggggggaaggccttaaatataaaagacaaacggcagtttgattaagcaataattttcagtttactagatgaaacagacttgcaacatagtctgcatgaatgcaaaataagccatctacagcaagtgataaggaaactgggcnnnnnnnnnnnnnnnnnnnnnnnnnnnnnnnnnnnnnnnnnnnnnnnnnnnnnnatcaaactattattacaaaggactttaccaagaactgctgtgtttcccccatcccatctgctggaagtcaacaagagcatctagcaactttgtgttcatgtcaaatgtcagatcagagcatcctaacgcaaagccaacaaaaaaa

SEQ ID NO: 124320 - DNA, 1888 bp, Homo Sapiens
  misc_feature (1223)..(1288): n is a, c, g, or t
cacacagttacacggagtctttatggcaaagagaacatttagcagctttgaatattgggcatctcctttttactcaacacaagcattctagaccctataagtgaaacagggcacaagccctaaaaaaatcaaagcgcaagaaattctaagaggactagttcttttgttgttgctgggttgtgtaattttttgtgttttcccagtgataagcccagttgttggtaggcagaggcccgagggaagggtgactccccagtgttgtgctgaatcctgcctggaggctgctacactagattctccatcattcctgtacactgacccgcagtcatcccatctgagaagatatattggataagaaggcatttaagtccccgctgtaggtccaggtccaggtccaggtccagcccttctccagtttcggtcttggtgggcttcaaacccccttcttccccaggctcactttctccggtcctttggcttcctctcctgccgccgggcctgctggtcggccatcgtgcgggggatgaggaggacactgccgtccccggcgtactggagcgcatactgactgggcgagtagggtcgtccgttctcatctcgcagccgcccaaacacctcctggtacaggctctggaccttctgcttcatctgtcgcagggagcgcaggaactccactttctcccgcagcagccgggctttgtcacgctgcaggtcctccacatcacgctccagattcaggatggtgtccagcttgcgcttgcggcagttctgcgccgccatcttgttcttgccccggcgccggatgtctcggatgaggctcagctgggcttcactcaactggtatttggacagcagttcattgaactcctccacaggcaggttgatgattttgtcattggtgaaagggatcttcatggctcgggctcggtgctcatcccggctcatctgcttgtccaggaagtcagcctgcttctccttgctgcctttcttgagggcactgggtggtggcaggtcggctgagtccagggcactgggtgccatgttgtatgtgtggttgtggcccacgtgctccaggtagggcaggcatgagagctgagctggatcctggtagctcatgcggcagaacttggaatactcaggctggtagcccacagcaccctcggcctcttccagatccagggtctcagagtcagagctgtagccaaccgcaccttcctcagaannnnnnnnnnnnnnnnnnnnnnnnnnnnnnnnnnnnnnnnnnnnnnnnnnnnnnnnnnnnnnnnnnctgccttcagagctgcttagggaagaagggctatggctcgagtctaaggaaaggcctgagtcagagtcaaattcctcctccagctgggaggcctgcacagggttaaagccttcttcaatggccaggtccataaggctgatctcatccaacatagcttcatctaacagaccccccaaagggtcaggcagctctgggcctgctgtgtcattggctgtgccattgagctggggtggaaagaagagccctgtcaggttggtggagccgaaggtggagttgaggctggtagaattgctgggggccaacgggagcagcgtggagctactggccacaggcaggctttccacctcggggctgaagagtaagaagtcctggctgcagccccccagggacgcctgatgcaggctgacattctgattgatgggagtgttgggggcaaggctgtagttggtgctcagtgggtctccaggaggggcactgtacaggatttcacttgctgatgtgttcacttccatggcctgcatttccatgatggacatgagatcttgccactgctgttccaaatcaaatggtgactctgtcccggtcagaagaggagacaag

SEQ ID NO: 124321 - DNA, 1483 bp, Homo Sapiens
  misc_feature (108)..(128): n is a, c, g, or t
  misc_feature (1322)..(1365): n is a, c, g, or t
acaatgagtccatttcctttattctcaatttaaattcaaagtggggaaaaagtgcacttaagaatgaatcatccattttattttattttgtcatgtgctcaacagcannnnnnnnnnnnnnnnnnnnncctggcaggtcacagagataaattaaaaataaaatctacaaggaaaataatttataaaagcactcccaggttcacaccttctatccctactgctcagttaggcaccccctaactgggaatcagtgcttccccccacccccatttcactcccacttgtctggggcagacggtactccagagccgggcaggggtgagggcagcagtggcaaacagttaaaaataaagacattgtagtcctggaaccatctggccaccttggcactcccatgtctgcctcccccaggcagccctccaggagcctgtgcgaagctggggctgtggagaagctgcctgtggctgagagcttgtgtgtttggggaggtgctctcagcctgtcatatgcacttctcaatcttctagaaagaaacccaaaaaagaaagcagacgacgacctcgggacagaggagaaaaatcccaagtgttcacacagttacacggagtctttatggcaaagagaacatttagcagctttgaatattgggcatctcctttttactcaacacaagcattctagaccctataagtgaaacagggcacaagccctaaaaaaatcaaagcgcaagaaattctaagaggactagttcttttgttgttgctgggttgtgtaattttttgtgttttcccagtgataagcccagttgttggtaggcagaggcccgagggaagggtgactccccagtgttgtgctgaatcctgcctggaggctgctacactagattctccatcattcctctgcctcacagcagtcccagaagaggaaggctgcaggcccagttcccggagcactgccatcaccctaccccagcttacagaagagctcaggcagtctgtgaggggtggggaacacaaacaccggaccaggggaggacggcatacacatgcaggctctgatggagacaatgggagcctcagctcaggggtggctggagcacggagggagatggagtggcaaggcagtgaatgacatgcgtgatgttggggctgttgcaacatgggaccacgtgaccctttcctgttcactctaccctttgactctaaatctcaaagccagtgttggggcccagtggctccattcgattgaaacatggccaatgatatccaagagctccccttcagggatgtcaaaatgcaaggagcagaaagagttaacaccgnnnnnnnnnnnnnnnnnnnnnnnnnnnnnnnnnnnnnnnnnnnnggggtgaaatggggtttatcacaccagtgatttaggcccaccagtcactccaacctgctgcctggaatcctggccagagccaaccttaaccttccctctgattttcttcccgctttga

SEQ ID NO: 124322 - DNA, 597 bp, Homo Sapiens
  misc_feature (553)..(553): n is a, c, g, or t
caagaatgaatcatccattttattttattttgtcatgtgctcaacaggatgtttctctctctcccctctccctggcaggtcacagagataaattaaaaataaaatctacaaggaaaataatttataaaagcactcccaggttcacaccttctatccctactgctcagttaggcaccccctaactgggaatcagtgcttccccccacccccatttcactcccacttgtctggggcagacggtactccagagccgggcaggggtgagggcagcagtggcaaacagttaaaaataaagacattgtagtcctggaaccatctggccaccttggcactcccatgtctgcctcccccaggcagccctccaggagcctgtgcgaagctggggctgtggagaagctgcctgtggctgagagcttgtgtgtttggggaggtgctctcagcctgtcatatgcacttctcaatcttctagaaagaaacccaaaaaagaaagcagacgacgacctcgggacagaggagaaaaatcccaagtgttcacacagttacacggagtctntatggcaaagagaacatttagcagctttgaatattgggcatctc

SEQ ID NO: 124323 - DNA, 720 bp, Homo Sapiens
  misc_feature (674)..(674): n is a, c, g, or t
ccaagtgatataatagttttatttgagacataaaaacacatgtgtttctattacatagtgtggggtttagggtcctggtttctaagacaagactttatttcaccctgtatcacagcttcctgggaaatgaattagggagcaagagacggcctggcaagaaaatcattattgttgctgggaagttgcaaagaaaggggagagtttattcaaattagtgtaacagagcccccaggatgaagagagtggtgcagggaaaaggtctaaattcctggtgttggtggggacactggcacatcccacagcaaggactcagccctcaacggcggcggctgggtcttgggaggggagtggtgggagggtaagggctcctcagctccctccctggactcccagttcagtcaccctttcccccggaagaattcaaagaggaagggcagggtctatgtcatggacactgctacttgttcgatgaagctggccaggtttatgtcccgttctgaaaggccggcacactcatgggtgctcagcgtgatgtggaccttgttgtacacgttaaaccattcaggatggtggtccagtttctcagcctgcagggccactcttgtcatgaacccaaaggccctgttgaagtctttgaaatgaaactgcttgaagatggcatcacggccttccangcttattccacccacacagccctcagttttggcagcagctggtccc

SEQ ID NO: 124324 - DNA, 701 bp, Homo Sapiens
aactcttgggaagcttttaattatttacaactttctaagcaataaagtcatcatttccaggaaaagaatgaacacaacctgtggttaatagaacttggagccaagttttttttaacaaaaaatttattaccaaaatacaatattaaagtcaatacatgacaaactcctgtaaagcaaaataaattattctaacattgtacagtatttccaaaggtagttaaagaagcactacagaccttgcctcactgttctgaacagatgaactgctctcccatgaacacagtcctagagtttccgctttaaggcatgcagcttgatgtgcaggataattttacaaaatgcaaatcatcctattttaataagatacagtgtcagaattaactgtagtctttacatgtcagtattccagaaatttttatactttggctatagaagcaatgccatagtgttacacaatacttatttcttaaaaaaatacatgtattcatgttcatgaatatcaaacgcaaatttctattaaatatattttatcgaatattacttagagcaccttgctgtacaatttaaaaagattaaataagtgtctatgaaaactaaaaacacaataagtctcaacagagaagcctgcttgtctttgtcaagccaattacagcacgggaaggtgcaatgtaaacatggatgcccaccatttactttgtgag

SEQ ID NO: 124325 - DNA, 1559 bp, Homo Sapiens
  misc_feature (295)..(312): n is a, c, g, or t
  misc_feature (366)..(374): n is a, c, g, or t
gctggggcccggtgccgagactcccaagcggctctgtgcagaagagctgccaggcagtgtcttagatgtgagacggaggccatggcgagaatccagctttgacctttattcaagagaccagatgggttgccccaggatccggctgccagccctgaggccaagcacggctggagacccacgacctggcctgccgttgccctgagctgcagcctcggccccaggatcctgctcacagtcaccgcaggtgcaggcaggaagcagccctgggggactggacgctgctattgattcattnnnnnnnnnnnnnnnnnntacaccaaggctccatgttccccgtgacaggtgggcctgaggggtcggggtgannnnnnnnnagcatggcagcatgatttctgtacaatcaatccatcatctggggcacagggtggtgtgcgggggctatttcttggctttggcggaattgcggggtggggtgatgggtcggcctccagggttcaggccactgaactgcccgtacttccccttgttcttgtcggcgggcttgaggatctggaaagagcacatgagggtctcgtccacactcatcatggcgccagcattgtcaaactcgccacagtagttgggagctgagaaaagtgtcaccagctgccgcttggcaaagaactcgtagccgtcttctaccacctggtgtgctcggcagatgaggtccaagtcgtgcttgtggaggaacttggccaccacctcggctccaaaggtaaaagagacgccacggtcgttctcgccccagccctgcacgtccttgtcagggtcagaccacagcaggtcacacagcaggccctggtcaggcacatctgtgggccgcatgatccgccgaatctgctccatagactgcaggtccggggacaggcctccgtggcagcagaagatcttttcgtccactatggccgcgatgggcaggcagttgaagcagtcagtgaaggttttccacagtttgatgttgtagcgtctcttgcactcatcgtagaaaccatagatgcggttgatgctggcacactcgtggttcccacggagcaggaagaagttctcggggtacttgatcttataggccagcagcaggcagatggtctccaaggactgcttgcccctgtccacatagtcccccagaaagaggtagttgctctcgggagggaaaccgccatactcaaatagtcgcagaaggtcgtagtactggccgtgtatgtcaccgcagatcttgaggggtgcctccagctccagaagaatgggctggctcagaaaaatctcccgggatttcaggcacagaccgcggatctcgttctctgtcagctgtacattcttgccaggccgcgagccctgcacttccagcaggcgcccgatgatcgagtccaggttgagcttctcgctgtcggacatggcggcgccgccgctccagcccagcagctcctggcccgctcctgcctcccgccctccggcagcctccttcccctcgtgccgaattcgccacccaggcctcgctaccttatgtaaccgttatagttact

SEQ ID NO: 124326 - DNA, 1073 bp, Homo Sapiens
  misc_feature (50)..(50): n is a, c, g, or t
  misc_feature (114)..(124): n is a, c, g, or t
agatgggggcagcatgattttctggtaccaattccaattccactccattntggggcccaccagggttgttttccgggggggcctaatttctttggcttttggccgaaatttccnnnnnnnnnnntgaatgggtccggccttccaggggttcaggcccactgaaactgcccgtactttccccttgtttctgttgggcgggcttgaggatctggaaagagcacatgaggtctcgtccacactcatcatggcgccagcattgtcaaactcgccacaagtagttgggagctgagaaaagtgtcaccagctgccgcttggcaaaagaactcgtagccgtcttctaccacctggtgtgctcggcagatgaggtccaagtcgtgcttgtggaggaacttggccaccacctcggctccaaaggtaaaagagacgccacggtcgttctcgccccagccctgcacgtccttgtcagggtcagaccacagcaggtcacacagcaggccctggtcaggcacatctgtgggccgcatgatccgccgaatctgctccatagactgcaggtccggggacaggcctccgtggcagcagaagatcttttcgtccactatggccgcgatgggcaggcagttgaagcagtcagtgaaggttttccacagtttgatgttgtagcgtctcttgcactcatcgtagaaaccatagatgcggttgatgctggcacactcgtggttcccacggagcaggaagaagttctcggggtacttgatcttataggccagcagcaggcagatggtctccaaggactgcttgcccctgtccacatagtcccccagaaagaggtagttgctctcgggagggaaaccgccatactcaaatagtcgcagaaggtcgtagtactggccgtgtatgtcaccttccagcaggcgcccgatgatcgagtccaggttgagcttctcgctgtcggacatggcggcgccgccgctccagcccagcagctcctggcccgctcctgcctcccgccctccgcagcccctcgtgccgaattcacacacccaggcctcgctaccttagaccgtatagtt

SEQ ID NO: 124327 - DNA, 967 bp, Homo Sapiens
tcggggaagcgtgagaaaagaggtctctcccgttcctcccgcgtttggccaaaggaaccttcgtagcccggttttgcgtacccagccgcggttctgttccgccgagataaaggtcccaagttggtcctctggtgggcagaacttaggcccaccacccctgggggttccaaagggttaaaaggggaccccccacggtttgtttcttcgcgcccaagcccgttgcaccgcccgttgtccaggggtcaggccccccagcagggttccccccagccaggcccctggtccgggcaccttttgggggcccccagatcccgcccgaattctgctcccatagactgcatgttccggggaccaggccttccgtgggcagccagaagatcttttcgtccactaggcccccgatggggcaggcagttgaagcagtcagcgaaggttttcccacagtttgatgttgtagcgtctcttgcactcatcgtagaacccatagatgcggttgatgctggcccactcgtggttcccccggagcaggaagaagttctcggggtacttgatcttataggccagcagcaggcagatggtctccaaggactgcttgcccctgtccacatagtcccccagaaagaggtagttgctctcgggagggaaaccgccatactcaaatagtcgcagaaggtcgtagtactggccgtgtatgtcaccgcagatcttgaggggtgcctccagctccagaagaatgggctggctcagaaaaatctcccgggatttcaggcacagaccgcggatctcgttctctgtcagctgtacattcttgccaggccgcgagccctgcacttccagcaggcgcccgatgatcgagtccaggttgagcttctcgctgtcggacatggcggcgccgccgctccagcccagcagctcctggcccgctcctacacggacgcgtgggtcgacgatatcccggaaattccgg

SEQ ID NO: 124328 - DNA, 889 bp, Homo Sapiens
ccttggtccaaactccgcccacagtagtttgggagttgaggaaaaagtgttcaccagctgccggcttggcaaaggaactcgtagcccgtcttttacccacttggtgtgctcggcagatgaggtccaagtcgtgcttgtggaggaacttggccaccacctcggctccaaaggtaaaagagacgccacggtcgttctcgccccagccctgcacgtcctggtcagggtcagaccacagcaggtcacacagcaggccctggtcaggcacatctgtgggccgcatgatccgccgaatctgctccatagactgcaggtccggggacaggcctccgtggcagcagaagatcttttcgtccactatggccgcgatgggcaggcagttgaagcagtcagtgaaggttttccacagtttgatgttgtagcgtctcttgcactcatcgtagaaaccatagatgcggttgatgctggcacactcgtggttcccacggagcaggaagaagttctcggggtacttgatcttataggccagcagcaggcagatggtctccaaggactgcttgcccctgtccacatagtcccccagaaagaggtagttgctctcgggagggaaaccgccatactcaaatagtcgcagaaggtcgtagtactggccgtgtatgtcaccgcagatcttgaggggtgcctccagctccagaagaatgggctggctcagaaaaatctcccgggatttcaggcacagaccgcggatctcgttctctgtcagctgtacattcttgccaggccgcgagccctgcacttccagcaggcgcccgatgatcgagtccaggttgagcttctcgctgtcggacatggcggcctcgtgcggaattcgccacccaggcctcgctacctt

SEQ ID NO: 124329 - DNA, 935 bp, Homo Sapiens
ggcttggaggatcctgggaaaggagccacatgaggggtcttggtccaccactccatcatgggcgccaggcattgtcaacctcccccacagtagttgggagctgagaaaagtgtccaccagctgccgcttgcaaaagaactcgtagccgtcttctacccacctggtgtgctcggcagatgaggtccaagtcgtgctgtgggaggaacttggccaccacctcggctccaaaggtaaaagagacgccacggtcgttctcgccccagccctgcacgtccttgtcagggtcagaccacagcaggtcacacagcaggccctggtcaggcacatctgtgggccgcatgatccgccgaatctgctccatagactgcaggtccggggacaggcctccgtggcagcagaagatcttttcgtccactatggccgcgatgggcaggcagttgaagcagtcagtgaaggttttccacagtttgatgttgtagcgtctcttgcactcatcgtagaaaccatagatgcggttgatgctggcacactcgtggttcccacggagcaggaagaagttctcggggtacttgatcttataggccagcagcaggcagatggtctccaaggactgcttgcccctgtccacatagtcccccagaaagaggtagttgctctcgggagggaaaccgccatactcaaatagtcgcagaaggtcgtagtactggccgtgtatgtcaccgcagatcttgaggggtgcctccagctccagaagaatgggctggctcagaaaaatctcccgggatttcaggcacagaccgcggatctcgttctctgtcagctgtacattcttgccaggccgcgagccctgcacttccagcaggcgcccgatgatcgagtccaggttgagcttctcgctgtcggacatggcggcctcgtgccgaattcgccaccca

SEQ ID NO: 124330 - DNA, 1622 bp, Homo Sapiens
aggatttttgccaaagttacaaatttattggtctggaaataaatacaaatatctcattaagaaactcctctggaaagacttgtgcacaatagtttcccatccgtactcagcctctcttgccccgatccccgacttttctactcaaggccagggaaggcctccaaggtgatgggcggcaggtaacgagtcattgcctctcacgccacctggaaggctggactacttcctcctcccaactgcggggtcccagaaatcctcgggtcccagtggctgacttacaatattcaattcactctgaccaaacttcctatgagaaaatccacggtgagccaaaatgaaaagtacaaggcagtagtacaggaacctggcagccgcactggccgcccagaaacgtcagtggtgctgccccattcggcgaaaggttagggagcaggaaaagaggaagcaggagagggaaggaaagtcccatggaatatgtattccagaatccttacattttctcagccaccgctccccacgtgagttcccacccccaccccgacaagagcaaagagttctgaggatccaagaacgtgaccgggtcagacaggttcagctactgagttcacgttccagcccagctgtcgaagattgaaaactggatttaagccaatcacacaaaattcctggaaccaagctgggatccacagaaatcacaactgcactggatctcaacacaacaacaaggaatcccttacatcgagtaaccccaattccgcccccaccccagtgctcctactccggcccctgcaaggacactcatcacagccagggcagctgtggaatgttgccctccattctaaggaatgcaaaacaaatctaaatgatcttctccctgaacaagaataatcactggctcatgtatcaggggtgggaggttggggctgtggaggagaggcagaaagcagaactaaagccttcaaaaaccatgatgcccaacgtttgctgaaatatttttgtctgtaaagccaggagattttgttgcctgcttttgctgcacattaagaggatgctagaaaaatcaagcttgtttgcttctgcattcaaagctttctagatgcaccaactttaaaaatcggtttcttcaagttaactacgtagatttgttgttccaaatgcctctagcctcgacatgaatcccaccttttcccccttcctgttttgcctgtttaaaagaggtgcctgcatgtcactattacccccctccccaaatgagaaaaggattttgtttccggaaactggatcagcttctcctcagttaaagaggaaacgggaagtgggcggctggccttctgaccaggcacccgtttgaaccaggatgctcagggcggcctaggcttggctttgtgaagtgtgtgctgctacgcgtcttgtttttggcagtttggtgtctctgagggaggggaggagagtggcaaccggccactggttaatggaagaggatgcgatgcggagatgcttgcttccttcctttggtccaccgccaccccgcctttggagagggcacccacgtaatagacctcatttgtctccaccagagctcactcttacaaaataagctttggattaataccgagttaggc

SEQ ID NO: 124331 - DNA, 2328 bp, Homo Sapiens
  misc_feature (1221)..(1247): n is a, c, g, or t
gcggccgccacctctccccagcccaggagaggctgcggagccgcagccgcccagaccgcgcagcgcgggaggcaggttccgcacgaaataaatcagaatgagttatgcagaaaaacccgatgaaatcacgaaagatgagtggatggaaaagctcaataacttgcatgtccagagagcagacatgaaccgcctcatcatgaactacctggtcacagagggctttaaggaagcagcggagaagtttcgaatggaatctggaatcgaacctagtgtggatctggaaacacttgatgaacgaatcaagatccgggagatgatactgaaaggtcagattcaggaggccatcgccttgatcaacagcctccacccagagctcttggacacaaaccggtatctttacttccatttgcagcaacagcatttgatcgagctgatccgccagcgggagacagaggcggcgctggagtttgcacagactcagctggcggagcagggcgaggagagccgagagtgcctcacagagatggagcgtaccctggcactgctggcctttgacagtcccgaggagtcgcccttcggagacctcctccacaccatgcagaggcagaaggtgtggagtgaagttaaccaagctgtgctagattatgaaaatcgcgagtcaacacccaaactggcaaaattactgaaactactactttgggctcagaacgagctggaccagaagaaagtaaatatcccaaaatgacagacctcagcaagggtgtgattgaggagcccaagtagcgcttgcgcttgcgtggtggatcccaacaccagccctgcgtcgtgggacttgcctcagatcagcctgcgactgcaagattcttactgcagtagagaactctttttctcccttgtacttttttttgacctggcatctttttatagggaaaaatggcctttgtaggcagtggaaaacttgcaaggaaagctgccgtctctttggcagtctgatgcagagcctgcactctggcactcgctgaagaatctggaaggttgcggtttgctcttccagtgttcgggggcctctggctgctgaaggattcggtctaccacggagggctgtgctgttaggctgcatcccactcaaaatacaggaaaagcacgaatcatgattctgctttctgttagcttaggcagacattgggccttcacctacaagtttttccttacccctgtggnnnnnnnnnnnnnnnnnnnnnnnnnnnccataggaaagaatatataaatttgtaaatcctaattcaaagatggctcatgtgtgagggcattgagtttgatttgttttccctttggtctgggttgtgtggcttttgggggatgcgtgtgagggggctatgtgttttttaattttttaaatatatattttggtgctgtgtgtggtaagagacttgttcctagtggatcaatgaaccatctcttctgggcagttttgttgaaaataaaggtttctctttgatttcaagaatgaccaaaatggcctctaaaagatgttaatcatctcaaatgaccttttgtctttggggcgttcttccccctgtgatagcggcagtggctttttctggtacctgcagctggaaaggccacttggccctgtgctgagtgagcgggctttcattagagcgaggcagcccttggccggtggggacgcagagccccagcaggtggtgcacgactgttggcggaaggaacgcgtgttcatcctcagtgatctgccctccagcatctcggcagcatctcatcctccatcgtcagccggctctgccgatgtcctgcttctgttcactcacagaactgtcccctgctccgtggtgggcaggagggaagtggtgcagggctgcgtgcattgcctgcgagtcgggacagttgatgggcacatggccttgtagctctgggcacagatgtgtttggattcattgcagcggaccaccgggcactgttgaccccactgagcagtgctaagtgttggtttagtggatgttcgtggaattgctgacccatccaagggcgtcctttggagccagtggagcctgccggcgcatctgaggggcagaatgctgctagcacttgaatctgggatctcgccttattctcaagtagcaaggcatcttgacaagcatggtctaagcctgggggccagcttggccgtacctggagccggtccgggtcatctgccctcctgagggaccggtcctcaccgagctccggcatcccctggaaggtttgataaggaggccatccccaacaatttgtccctccccctctgaaaggaggccctccttccggggg

SEQ ID NO: 124332 - DNA, 888 bp, Homo Sapiens
  misc_feature (187)..(198): n is a, c, g, or t
  misc_feature (351)..(359): n is a, c, g, or t
  misc_feature (827)..(827): n is a, c, g, or t
tcttttcttttttcctccttagcagattacctgatgagcacaagggcgatgctaggaaaattcaaaaattccccaaactttgtcatttggaggagagagaaagatgcggatgatgccccacatccaaaagtttcttcaaagtctgtggcaaaataatggtagcaccttcagaatcttaaatagggannnnnnnnnnnnccttaaaaaaatcacatacactgtgagagacaattgtgagcaccagcgatttcacagtgggaggtagcaaacgtgggcacccccagcccgaggatctcgccgcttcccacgcctggctgctccttcccatcctctcacctctttcccgggtgnnnnnnnnntagtaacgcaccttctttttgtttgtttaaataatatatatatacacttctgtctttccttttctccttttttcatgtctcctttctaatattgcacatcaatagctccctagcagggaccagctgacgagacgcccccttccctcaagttggcttgaatgtggggctctttgggcaggaagctggggagggaacggggtggccgcagagctgagaggccacggggctcaggcaggttgcaggtccagcttactctggctggctctttggttggtctttggggctaagctgggatccattgttcccaaggacaccctatcccctcctacccccacccacttctactgggcagacaacagctggggtctgcccaaggacccttgggcaggggagctgcctctcctggagccatctgcccctcagtaccctccccttgcctcttcctcttccctcctccgtgaggcctanagtggccacgaggtcagaggtcagaggaagcacgcaggtccaacttccaagcggtactgct

SEQ ID NO: 124333 - DNA, 1043 bp, Homo Sapiens
  misc_feature (849)..(858): n is a, c, g, or t
gcacgaggggcgcaacaaatcagagtgactggaagtttccatcccgttgtgctttgaccacgtgtactgagctgcagcctctgatactctgtcacgtttccaaaaatggtatccattaggatagaaagagaatggatctgcagaaatgtttacctttcaactgctcatgaattcaggacactggatagaaagactcactccccaaaatgagaacagggaagaggagacccggcgacactaagtcaccaggtccaaggaacgtggctccctccccagggtcatctcacctagatctttctctcccaggtcatctcagctcaatctcaataaccctatgaaagccctggtctgttgtgttccttcaccgtacggtttctgtaataaaaagtgttaatccatgttaatctgtgtgaaaattattgcgtgcaacagtattttctcgtgtacctctttttcctatgtgaattgtccctcttttttatttataaatgtctacttttgtttttttaaagacaaaccaatgtgttgtagacctatatgtaacctattccttagtctcatattataggtatgttataagaatggatattttacttggctttagaatgttttacaagaaaactaattcttaactgatcaagtccttgctactaaaatgcttgtgtttttcatcatgacgtcgtgtgcttctaaattaatcattttcgttgtagaaaaatggagtgaatttatattagtcttggaaactaataatagcattgtaaatttatgagatgattttaacagaaaaaatatagaagaatatagttattttaattgtaatattactaactgtagggtgagaaaaannnnnnnnnntcccattgtggtgaactatgttatagcttgttactcatagtttctttttgatcattttttcggtctccgaggtgaaatgacttattaattaaaatttgtaaactcacatatgcatattgtatatgtgtagaaatgtaatcacactttgtcttggaattacattaaactgtttgaaatcactgtaa

SEQ ID NO: 124334 - DNA, 1278 bp, Homo Sapiens
ttttttttagttataacaaatgtttattcagaaatggataagtaatacataatcacccttcatctcttaatgccccttcctctccttctgcacaggagacacagatgggtaacatagaggcatgggaagtggaggaggacacaggactagcccaccaccttctcctcccggtctcccaagatgactgcttatagagtggaggaggcaaacaggtcccctcaatgtaccagatggtcacctatagcaccagctccagatggccacgtggctgcagctggactcaatgaaactctgtgacaaccagaagatacctgctttgggatgagagggaggataaagccatgcagggaggatatttaccatccctaccctaagcacagtgcaagcagtgagcccccggctcccagtacctgaaaaaccaggtcctactgccttctggatgctctcttgggccaggaagggaaaagtgtgggaggaatgtcttccagctgctaacgagaagtctgcacccacttgaaagggttaggagaataaaaagcagcattctttaaagaactgcaagtggagcaccaccaggccccttccttggactttcccgtcctgggcagcctcagagcctgcacactgaagctgggttcaaatcctgggtccttcctgcctgacagactgacccctggaaacatgagtctctggtttttcttcactgggctagcctcaagcaaatcttgggagctcttgagtatcttcggcatgtgccttttccagcacttgctactgattttgcagagctcccagaaccgtgctccccaactggctccagctctgccagcctggattctcttcactcccaaccagcaggggaccactcagtgacaacactggcctggtcattcagggactgcctgggctctgaagtttcgtcccaactgtctgcgcctatgctggggaaacaccttgcctggtagagctgccctgctcccttgactcctcctcctctgccaaggcaggaaaataatcctctggtcatggatggatggggtcactcacataagtgggaacaaacagtgccccttggtggcagctggatatatgcctccaggcatccctgaccactgtcctgtagacaactgaggccagaaatggagagccaggaacaaactgacctcttccattcaaataagctccaaacccaagcactgcacaatgggaggctgagcctttcaaaggcccaaccagaagagagctggcggccctcgtgccgaattcgccacccaggcc

SEQ ID NO: 124335 - DNA, 1491 bp, Homo Sapiens
  misc_feature (419)..(471): n is a, c, g, or t
gaataatttgtcccacaaacactactccctgagccaaaattttttcaggcccccatacaattatatcacctctaggtgaaccaaccacataaacaacacttgaaaaagagtagaaagattgtcccccctacagaccctgttataatactttcgtaggatgaaaaggttgtgcccccacaatattgtcccaccccccccacaagattaaggggttccctcttctcccacaaagattccctcccagcgtcacacacagagtttttcccacaccatctacgagccccgtttgtgatactcggcgcggcgcccagggctccctgtcttgtttatatacaggcgcctcccttattaggggcgcccccttgttcacaggaaaacccgggtgctcgccgaaggggccccccgggggattttggggnnnnnnnnnnnnnnnnnnnnnnnnnnnnnnnnnnnnnnnnnnnnnnnnnnnnngacattgagatatttattttgtgaaacaatgcaagcgattttaaatccccacatactatttgattaagtgcaacatggtacagtcatgtgtaatctctttacacgatagtgcatctagtccttagcctttagttattgcacaacaattataaagaccagtgaccaggacacgtggactctgacaggcagatcggcctacacaacgaaaaatcagaacagtacaccaactggaatggtcaaacaatttaagtcaaatgttttaatggtgcaattaaaataagggttcaaacatgttttcaatatattaatttctttaaagtcatgttcaggcaaggtgctgtttaaaaaaccactattagctttgtccacacatgtaagttatcaaaagttacccaaggtaattttgacgttgaatgcagctttaaacaataaaaaaatggtattaggtttacttctcgaagcaaagagagcccccaaccttgtaaactaaacattctgacacaaatgcacaaaattaagttggcaacattaattttgagatgtagtgtgatgctgagcaaacttttggtcttgactcttgaaataattaaagagagcagttctccgttttggccttcaggaagggaaatctgcccatggaactctcccaatcagattaacaaactgtttcgattcccatataaacctggaggacacaggaaacgccagatggaaaaactggctctggctttctaaccccatcccatctgtatgagaggacccatcctgtcatgtgcagtgtttgatgttttcacatacgctcctgtctcaggaaaacattcaagattagctagcccccaggtggttgtacctcattggtgaaaggcttgggatggtttgatctcatggctttgcctgatgttcacataaatcccactgtccttacccaagctgatagcgtgttgtgtgtgtactatggctacttgcttcccaaatgcacaatttaatgtggaaaataagttgctctgcccatctcttctg

SEQ ID NO: 124336 - DNA, 706 bp, Homo Sapiens
tccctgtttgtcaatcttatctggtaatgggatcattactgttatccagtgtcaatggtctcagtagtatttccattcaaaaataatttagcttttagattaaggatttctctttttgttttattaaacattgaaaggtgggactttaaaaaatggtataaatctagattttaaggattcttttcttacaaactgtctcagctttttacaagaaatgtttaaataccaaaatgctgctcagaaaatttaaagtttaattgcccgtggttattctactgtttctatcctaatgtgtgctcctctgtactgcgtgtgtaagacgctcagttcatctgaatgtttggatgggaagttttgtgttgagcctccaggcatagcactggaccagcccaggccgctgtggcagaacgggaggggagaatgggagaggcagctggtttttttctgagggtggtctgggccaaacgacaggcagctggacagcaaatggtgctttggggtgtaactccgatggctggttttgttgtacccaacgccgtgggtcaacgggaccacccagcatttacatctcttctcgttcagccaagatagtgtagacacagtcttgatggtgtagacacagcattttaaaatattatttatagtcaccagctactctagtgtgttttacacctggattcaggttgtaaagacttctttgatcttt

SEQ ID NO: 124337 - DNA, 1068 bp, Homo Sapiens
  misc_feature (51)..(52): n is a, c, g, or t
gccatacaaatggctggttttaattttttttagaggaaatactataatttnnaaaaaaaagagttccaaaatatttaacagaatctccagcaatgattatttccaaaatgtaaagatttgaaacataatttatacaaaactaaaaaccacaaggattcattcttgctttttccttttttaaaaaatccagacaatttgtcacaagaaagttcggcatgtgatagaagctgtagcctcagtcaccctcggaatcgctgtccctcttcatgaggacagagcgccgcactgaggacagcaacacgtcttcaatcggcttcttagggttttcctccaggtctgtcataattgctccagattcagacagtttccattccaactcatctcttgtcaggttcatgccgccaaacaccagaggaccaataaactgagccttgatatctccttccaggtaaacaaatatcgtgggcagattcctatcaggataattgggtatgcaggttgttgaaatggctttgataaatttgacatcaggaaacttcctggcaagtccactgaggtgctgatttatcagggcacagaggggaattccttgtttgtaaaggtgcaagatgacccacaagccctcgccagctttggtaacttcttgaacataatccttccctgagatctccaaaacttctccaaatttattcttcagtttagttgctttccactcagccagtctccgccgtctgtacatttcaatagcacgttcatcctcctcattaaactcgtcttcatgatcctccagctcttccaaagtcatatcttcatatgttttcaccactgactgctggaggatgcgctgctcctcttctgcctcctcttccaattctttcagactttccttggggggtaagataccctttttgcgtaagatgtcattccattcagtgtctgcgttggggtcctgcatcttgtttccagttcagttgctcaaaccagctgtgccgcagcgcccccgcccctcagctctcttttgtgcacgccgcacagcgccgccacgcctcttcccccagcccagccttc

SEQ ID NO: 124338 - DNA, 736 bp, Homo Sapiens
  misc_feature (48)..(62): n is a, c, g, or t
  misc_feature (609)..(642): n is a, c, g, or t
  misc_feature (648)..(648): n is a, c, g, or t
ccaaattttcaaacaagttttatttccatacaattctgacatttccgnnnnnnnnnnnnnnncttaaatgtacacagggaacatgattctttttatgcaaacaataacttaggcctgtagcatcgctgccggctccgccacgggagggctgggggaggccagcccaggtcagcagtggccgaggtgacagaccgcctcctgctctgtcccccgcgcgcgccgcgcattggccacgctgcaccgaccgcaccgcggccgcgcccccaccggacccgcgacagaaactgcccccttcctgggccactttctgacctggacacagacgatgtcctccgagggagggagcccacccccgttacacctcagagccacgaagccggcgcccgctccctgccgcagcttccccggatccctgcgctgccctcgggaaagcagcgactcaaccagacccagccccccgcgcggcaggggccctcctggccaccgcaccctactttttctagccggcgcccccaaagcagtggcttctcataggaaaggatgggaggggggcgcagctgaggtgactcttgatgacaagtcactgcagctggcctgctgtgaagtttnnnnnnnnnnnnnnnnnnnnnnnnnnnnnnnnnncgtgtncagaatgcctggtggtctgcgggggtctttactaaggggatgctggcttgacccaggcctcctttccctaagagcagcaggagctgag

SEQ ID NO: 124339 - DNA, 752 bp, Homo Sapiens
actcctccagccagccatgcgtggattgccagctggcaatccacgcatggcgggcatgcaacttctgctcccggtcgttgattttgtgtgcttccaccaagtcgatctgcatgttatacgggaccagggggtcaggcagttctgagaaaaagctcttcatggcaccagccacggtattcaccgtaaagtctttctctgccaggtccaggttgtggtcttgatcaaactgtctctgcagactctccatctcagacttgttcccgctgacccggtagatgccttccgtgctcagtcctgtggcttcaatgtactcaatacatctttcaataaaaatggggatcggcttctctggagtcacgacagttgttaagggcaccccaaaatagttactctcccaggttgcctttttgatggatggccggggtttgggctttggtttcttagtgttcctccttaggctgcgaagaatattcctcctccgcgggtcttcgtctgtttcgtatggaatgacagcattgtcccctttataaccctgggatgcctgatcctcctctttcttccggatgggccccagctcatcatcactccccacgctgaagctggtccggtaactagcaaaccgccccagccgggtgcatctcgtcctgtacagcactggcttgctcacgatggaaaccttgcgccctcgctctagagagctggtgtccatttcactgtcagaaccattcccgctgccgttggaccctcgtgcc

SEQ ID NO: 124340 - DNA, 247 bp, Homo Sapiens
ggtggaggcgactgtgggggcgacggctgacttgtgacaggcgtggaagtgaggaaggggacggtggaagccacggcagagggggagctgggcctggcgccggggggctcggtgatgggccgattgtagaagaagaaggggcactgctggataaagagttcaatgattgtctggtaggtgcgcgtggctgtgagggcgtccatagtgctgaaatcaggtctcatcaaggtgggccagaagcagatgg

SEQ ID NO: 124341 - DNA, 594 bp, Homo Sapiens
ttttgacattttttgctttattaaacatcattcactgagaatttccaaagcactgtgtggtgcctagacctgtgtaccagcgctctgggggtcgggagaagtctaaggcacgggccctgccctggcgcacggctccttctccctgggaaggcagctccactggtgaaaggccactgaccaagtccagaccctgaggacgacgaaggcctcggggcagaagcctgagagaatcatgccccactggcagtgggaggcggtgcaggctgggagccctgcccaggccccaggctgagctgtggggaaagctatgacccagtttgctgagagctgcaatgacgaacattggctctgtgcccagaggcccaagaaggccatggactggggctggcctttcctgggaaagggggaaggaggaagaactggggcctagcaggccgtctataccctggagaggcagggcctgacttctccctttagagcttgcatcaagaggaggctcaggagagagagacttgcatcagaacactccagacagccgatctcccactcagtattcctctcctgggagacccacccagaccctgcaggcccctg

SEQ ID NO: 124342 - DNA, 611 bp, Homo Sapiens
  misc_feature (577)..(577): n is a, c, g, or t
tttgaagtggaacatttagtcactgtttttcattcattttgaaatttttatatgtttacatatatctgttgtaaaaaataccaactttccaagtactaggaatgctgaccactaagcctgatctaaagtttatgttggggacctcaggtatacaggagtggaacagggacaggagtgaaagctttgactgaagacaaatgtgggcttatggcctatctctgtcactaatttaactatatgggcaaagtactaaacctgtgtcttcatctgtaacatagggattagacaccagtgataggagggtcttggtcagtagctaatcacagagctgcttccttaaaagccttgagtacttttgtttaaaagtttaggtctacttgaaagtctgtaaagtgctaatttttatcatcctgagagatctgtttctcccctttccagttaccagtggcattctcccaaaactgttagtatctatgttatagaaagatacttaaatgctatgataaattgtatgaaaaaaactttaaaattcagcaagcaattcttaatgaaagataaaactggccctctagtaccnataattagtttagaattcagtcttttaaattaat

SEQ ID NO: 124343 - DNA, 934 bp, Homo Sapiens
  misc_feature (184)..(243): n is a, c, g, or t
  misc_feature (893)..(893): n is a, c, g, or t
gttttgtatattaccaatttattaataaattaacgttataccattttccctgaaagcaaaagtatttttccacctctgctcggtgaaaattaagaaattatgtgtaagaacagcatttagcaaatagctattaaaaaaagagagaccaattttctaggtgcattgggacatccatttaaaatcnnnnnnnnnnnnnnnnnnnnnnnnnnnnnnnnnnnnnnnnnnnnnnnnnnnnnnnnnnnnttacatacatccagcacctatatactgcatttgtgctctgtaagtgtgtgctgacataaatcttctccaattattacaaaattaacaaggaaggcagaacgcacgtccaccttgagtcctactggtccacagccagtacgcacggcaggtgagaggggttacatggtggcttgtggcagtccactgctccagaaaccttcttctcctcctggggaagattacaagttttcaactgtataaatctttacacatatgctgattacttttccaattatttactcctctgatccatatatacaagtggagacaacaagctctgggaggcatggtctccctgctcagtgtagctaggttcccagtgctgtcctgtttggggacaggcagacacagtcattcatgttttaacactgccgtttatgtgtggatactgaggaaggcatggttcgtaaggcatggggtctggagaaaaaacagaatcatctcctgaagaacaagaacttcttgtgtcagggtaactaggtgaatactgttcgagaggttggctgaggtccaagtattcctcattggttgtgagagtgagaattcgatccaagtcttctaccaactgcttgaacgttggtctctgggagggcactgcatgccaacagtcnctcatcatcatgtacagttcgttggtgcagttggctggctc

SEQ ID NO: 124344 - DNA, 1277 bp, Homo Sapiens
  misc_feature (795)..(795): n is a, c, g, or t
gagtcttgagaggttccaatcaacatttattgccttattctttttatctcattcctttttgaatgtgtttatctcctaagattttatctgtgatggagatgggatgcctgtgaatacaaaagttgcagtggtggcaccagggtgggggggtgcggccggggccaccatggtctcccctgagagggggtgctgtcttaggtgccccaagaggccctcgggcagcaagcgtggggtgctgccaaaatacagctccccctgggtgggcaggacacacgtggcctcctggcagacaggtgcctgggtgagcccgctgctcctgattagtcatgaatggcacctggtctgggcgacagtcacccgcaggaagccctgagctggccaccatcaccctgggcagtggctcccggggtgccaacaagacctgggcccctcgttctttggtgctgagagccccagctgaggctgtggaggaggccctggacctggtctggtgtctgtcagaggcaggtgcccagtcctttgacttgcttctctgaattgtcataattgtgctggaattgtgccagaaactggtagtgataacagctcctggaaggcctgtggctgctgagggctgcctggtccccctcaggacggccgggggagcctctccagaagcaccagctttgtctgcaggtggacgttgaaggggggcagttgggtcaggttcagactcacacctgtggtccccacgacgctggccaggacccggtgtgtgtccctgtagagggccaggagcccagggtgccgcctccnatgaggatgtgtgtgtatgccagcatgcctgtccccggctgcacatcctccctcttgtcgtacctcccaggcgctgttgacttggagaaaccgagacacacctgtctgggcggctgccacgtcaatgtgcagaaggacgtctgtctgggggggcaccagctggtgcagcctctgcattgcgacgccacctgggtagttgaaatgggacacatacagggccgtggctgagtaggcggcattcaccacgaggtgtccgatcacaagcagagaccccgctttgtacagccaagactttttatagttattcagcaggtaggagcagcctctggcagccgtgatgttgagcatggggaaggcatagatgatgaagcgtagctccttgtgtggcaggagggagtagagtgccatgagtaaagatggccgccgcgggcccccggccgtaatggccgaattcccgggcatatgtccggtaccgtcgactg

SEQ ID NO: 124345 - DNA, 1942 bp, Homo Sapiens
tttgcgagacaaagtcctttattagaaaatatatcaaaatcccagccccctgagccaggaccagaagagggagctattccagcataggcagaaaatgcccagggaggggcttccttcaccaaacaacttcccgggaaccataaatagaataaatattcacagaggtccgaggagaagccagatcactcttctctccatggaagagggaggggcttggggtccagccctgctcctactctaggggcagggactcctaggaatcgtcacataaaatcatgacatcaaggattcacagtcataagccctacaggagaccctagagagagggacccctcaggtctacaggagcccagctccagtccagcagtgagggagaggcccctaccccctagcacggcaccagagttcagttccctcacatccctctgagaacagtgaggagctgagggtggggagaatacaaccccatgaattcggtttcatgattaaggtagacaggaaggaggagtcagtgtgaacctcggagggctgtgtggttggcagtagatagaggcccaggcctggctgggggccggcgttgcagcatctcttgacggaaggcttgggaggaaccaggtgggtaacgtggcccagaaggagcccgaggaccccgagggtcagtcccaatgtctgctgtgatgttggtataaagaggccccagctctcgagccagcaactggtatgtcagtgagttcatcccatcttgcgtccaggaattctgggtacggaccaggaggtcaaatctgtggggattttcctcattgcccttatctcctcggtgcttcaccatcttatagtgtcctacagatgtggggggccgagagatcttcatcccagccaggcgcaccctggtagcaatgtcgtcatcctcaccaccccagccccagtattcattggggaagccattcatcttcaggtactggtcaggagtaagtgctgagactcctccgaagtactgggggtacgggaggctgtatccaaacttgttcatagcaacggcaacatggcggggtcccccgggggtcacacacatacagattgtggtcattttctggcaagaggtccacatcgtgcaagaacaggcagtcccactcttcatcacgcagggcctctcgcaccccaacgttcaacagttttgccctgttaaatgttccatttccagcctggtggatgacatagatgccataagcaagctgctggcgctgcaagaaggggtgcaggtggtagagcagcaggcgcaggtggtgctcccgggcacgatgaggcacaatgatggctgttcgggagcggggctcacaacctgcagggcggtaccggccccctggttctacccggggattccgctccacaatctctgccagtgatggcactgggctaaaggacaccgacacaggacccactaagagaggagatcgttctggacagtagggcagaccttgaggagctggaggaccccctggggccccaggcaggtgactgaggttactgtagacatcacgagggtgagaatagtcaaatgtcggtccctgatctcggccaaatagggcactgagacttcggaagccccccagtgacaggtacatcatgacagccagctgggagcccacaagcagggccagcgtgcaaggccgctccagcagcctccgcaacatcctgggggtgagatctagggagggagaggggaattctaggttcaagctgtcttcttagggatcatgggggctccagggggtcccggggggacagagatgtgaggcattatctaaaattggaaatgtcacagagggcagagaaaggctccatccagcactccagcagcgaatctgggaccagctggtcttttgctgcctgtcgtcaccgccaccccaacagccgggcaggcatcgctgatcccgggaattcc

SEQ ID NO: 124346 - DNA, 1365 bp, Homo Sapiens
ccaaccttgtttattaggaaccggcaaaccatggcggggtcccccgggggttccccccacatcccggtttgtggtcatttttctggccaagaggtcccacatcgtgcaaggaacaggcagtcccactttttcatcacgcagggcctctcgcaccccaagtttcaacagttttgccctgttaaatgttccatttccagcctggtggatgacatagatgccataagcaagctgctggcgctgcaagaaggggtgcaggtggtagagcagcaggcgcaggtggtgctcccgggcacgatgaggcacaatgatggctgttcgggagcggggctcacaacctgcagggcggtaccggccccctggttctacccggggattccgctccacaatctctgccagtgatggcactgggctaaaggacaccgacacaggacccactaagagaggagatcgttctggacagtagggcagaccttgaggagctggaggaccccctggggccccaggcaggtgactgaggttactgtagacatcacgagggtgagaatagtcaaatgtcggtccctgatctcggccaaatagggcactgagacttcggaagccccccagtgacaggtacatcatgacagccagctgggagcccacaagcagggccagcgtgcaaggccgctccagcagcctccgcaacatcctgggggtgagatctaggttcaagctgtcttcttagggatcatgggggctccagggggtcccggggggacagagatgtgaggcattatctaaaattggaaatgtcacagagggcagagaaaggctccatccagcactccagcagcgaatctgggaccagctggtcttttgctgcctgtcgtcaccgccaccccaacagccgggcaggcatcgctgccgccatcttggaagcgggcgctgcgggggcggggtctcgcgtcatggggcggggcctcggggcggagccacccgggctgactaggcacccggtcccagacaccgcgtggccgggggcttgtgagggagcagcgcctgagcctgcccacctggaacgcgttgtaggcgaccccctggggagcgggtgctagggttcaactccactacgcagactgctagtgggatttcatttcctgcccctcagatttgtaaaagcagaagctcaagcccttcattttcctctgggccgagactgatcaggaggctagtgagccggtttctggtgctccgctgacctcgttatcaccttgtggttggctgagccctctcccagtgtgtcagtggcaccccctgcagcctagtgccacttagtatcaattgttccttacgcaggctacagcgttgcggaccgctctagcgcat

SEQ ID NO: 124347 - DNA, 858 bp, Homo Sapiens
  misc_feature (165)..(165): n is a, c, g, or t
caattggattcttcagaacaactttaattccagaacaactctgagttatttttaaaaactaccaggagggggtttgagaaaattggcccggccttggggagccaaattttatatcgcaaaaggcatttagacgctaccactgatgaaaagaagaaaacagttacntcacctccaaattatcatggaggctaatctcagccattaccaaaaaatattattggttgccaggaggacttttacagttgaaggctatccaccaagaggagttgaaagagttgatggtgccggattgaggcatcagctaaggaacatgaggcagagataattaggttgaacgagctaaaagagaactttagtaaaacaatgtgaggcaagtgaaaagaacatccagaagaaatatgaatgtgagttagaaaatttaaggaaagccacctcaaatgcaaaccaagacaatcagatatgttctattctcttgcaagaaaatacatttgtagaacaagtagtaaatgaaaaagtcaaacacttagaagataccttaaaagaacttgaatctcaacacagtatcttaaaagatgaggtaacttatatgaataatcttaagttaaaacttgaaatggatgctcaacatataaaggatgagttttttcatgaacgggaagacttagagtttaaaattaatgaattattactagctaaagaagaacagggctgtgtaattgaaaaattaaaatctgagctagcaggtttaaataaacagttttgctatactgtagaacagcataacagagaagtacagagtcttaaggaacaacatcaaaaagaaatatcagaactaaatgagacatttttgtcagattc

SEQ ID NO: 124348 - DNA, 598 bp, Homo Sapiens
tttaaataattaagggaatgactagcttgtcattcctaccagaacaactggtacctgtactcatttctctaccatattgtttctctttagcatagctacagacctcctcagggcatgctatcccattttctgaaagtcaaataagacaaaatcaaacatccaagtgagagacacattagacagttctcattccccagagcatctccatggcacagatgcatgaaaaaaatgggaacagattcctcatttgcatagaagctaaatagctatattaaatcttattttaagagtttccttttacctttgcttcgtaaccattaacaacttctgctttatctgtcctccagccccagaatccggatttagttctgataaaaagtgaacaccacaaatttctacatgtacaatatgccattcagatttatatctgtagcctttatagtttttttcccccccagcttaagttagtgaaggacacttggaaatcatggtcctattgtccacaggaggcggttagcaatgacagatggcttatgcaccctccaccctcctcccacagttattaatcaatttgcctcaccccaggcatagaaagcct

SEQ ID NO: 124349 - DNA, 1075 bp, Homo Sapiens
  misc_feature (43)..(62): n is a, c, g, or t
  misc_feature (955)..(955): n is a, c, g, or t
  misc_feature (968)..(968): n is a, c, g, or t
  misc_feature (1011)..(1011): n is a, c, g, or t
taccctcactaaagggaataagcttgcggccgcctgctcaggnnnnnnnnnnnnnnnnnnnnagcaagtaattgtatatttatttctctttttaaagaacactccttgagtcagatgttctgtgcgtattttggtgatcacattcacattgtttactgtgtaaacctttgcttcgtaaccattaacaacttctgctttatctgtcctccagccccagaatccggatttagttctttcaaaagcaatatttttagtatcgaggctggtgttaatgacagggcttgtgagccgccgctcaacttccctgctttttggcttcatcaagtccagagtgaggcgctccatttcttgggaaaggtcgaagcgttcggtggtgaccactttgtcatcatggttgacttccattaactccgcccagttgtcttctcccttaaatataaaactacgcctccctcttatccagctcatgttttcaaatcccagcaatgtgatatcgacgcgcagtttggcaccacttttccagatgcgacagacatcatttgggcatattctagaaaccaagggcacccagctggtgaattcccatttcatctgcacatagaaatccggagcctcgagaattttttggagcagctcaggaactctctcaagggccatggatgtgttgtggtagtctcgatgttggagaactgtgtacaccatctcaggatcgccagtgctcacagcctcatgtaaaactgtccatccctggcgattttcttttgtcacatctgctttatgtcggagtacgactcgagcagattccaaatgtcccaagggaacagcaagatgcaatactagtcgatctccgtgtggtcacaagctcgacattctggtcctgcagctccttctcgagactgcggtagtcgtttttccacactaggaggtgcacggggtatttgtccccgcgacgcangcgaggacatgtnaggagggcgtactggtctcgtcgccgcccagtctcggcccggnaggtctccgcgccgctgctggctgagccggtagcagcaggtaggctgtaccttccgcgatagcg

SEQ ID NO: 124350 - DNA, 1216 bp, Homo Sapiens
  misc_feature (55)..(106): n is a, c, g, or t
  misc_feature (162)..(203): n is a, c, g, or t
catttcagcttaattttatttcctcttataaatgggcacagcacaggaagtgttnnnnnnnnnnnnnnnnnnnnnnnnnnnnnnnnnnnnnnnnnnnnnnnnnnnncagttccttcacaaggctggaacaggagagtacccgcagtggggcaggcgccttgnnnnnnnnnnnnnnnnnnnnnnnnnnnnnnnnnnnnnnnnnnaaggttttggccatgaactcaggacaggtatggttaataaacaggttacaggggagagaaggggcagggaaggcctgggggagggaatggcagacccccacccaccccaggcaggttctgtacaggagaaaggactcacaggagggagggacactgtcttcagggggctctctggagccacgctgcctacgaaaaatatttacatgcatttgccacgctgaggccagggtcactgtggtgccaggcaggcacctgggggatgctggggccatcggctctcagatggcaactcccagggcccagtctcgatgcctctgtaaatctgtacagtttgcgggcttctatttacaggcaagaggcctggggaggcaagtccagggttgtagttgttgggagaagaaatccagagaacacaggaggcagccactcctaccccatgaggcagagggtctgctccctgtgtccaggggcccccaccaggaggcctgacaggcggctttgccaaccccaggggggtttggcccacacaccctaagccctgcccagccctggttgccacccacatgcctccagcgatcaaggggaccagtctttcaggcaaggcccccatctggcctcctggcctcctggagacagggtctgggctctccaggtcctggcctgcctcgtgctctggcagccaaggccccagaggctctcaagccacagaagctccctctcatttggaactccctgtgcttccagcaaatgccaaagcccctcagaacactccatcacaggcaggggtagggggacatgagggccctgcacccacattgcacctgggagagcctagctggtcctcactgaactctcttggactgccttgccccggtcaggccggccagggcagatttgggctggtcagactcctcatcctcaggaggataaagcctggacatctgccttgggtccagggatccatgaacaaggcccctggcctcttctctcaaatgctaaggacacagagaaga

SEQ ID NO: 124351 - DNA, 1948 bp, Homo Sapiens
acattttctttaattactttaatataaaagacagcagtttcacatttcacatatttgaaaaacatttcaaaaccctctaataagtatttaatgaaaataaatttatcgaagagaaacaatgaccacaaaattaatactaccaaatcattactgagactttttgcattacaatatttggagagtaggtgaagaaaatatagaacagaacatgaacattttaaaatgatattccacccaagctttatctttttgctaaatcttgtggacactagaatatatattcaagatgttggtaaagatattcagcaagccatacttcaaagatgttaaaacagccctccaccaataatatggcattgcaaacccttctatcccatcccttttcagttaaaagagagaatattaacagagatttagtaatagtgaccaaaataagaaatcagtatagtcaagaaagatatgtaattattcaacatcatttggtacggatagatcaatgcaactcactaagtggacaacattgtgaggggagtgggtaacatgattcagagtcctgtgggtaaattcatatgcaataatcttattccaatcaatctgtaaagtaaaagcactacatccacattaacattataacatcttacagtaatataaaagccaaatcattgttggtacgtcattttctttaaagtgaacaatttaagaaaacttcacaagagtctgcactttggaaagatacgatcagagtacacagtagagacaaaacaggcatcttcattgtaattttttttaataaataaaagcacattaacaaaaaaggaaggtaagcagcaccggaagcctttgacgtttgtaactaaatgctggtactcaaatggtctagctggttaagtttcactaggaggcgcaaaaaaggagccgtttttgacttaacattttaattctagtagagataagaagagcttgtgtgggcttacagtccttcacctgactgtccttcaccagtgagtagcataccagttcttcaaatgtcctatactttggaaagcagacccgactctggagcactcgccttaattagattctgaatgttccttgaattttggatggtccttatcagctaccagctgaagcagaacagcctcactcgtggtcactatgatcccggttcgagcgagacgctcgagggcaaacatccttgtccatcatgcttcttgatgaggtggcatcagcaacaatgtggaacctcgactcctcggccaactagctccagggcagtttgttggatgcacacatgagtttctactccaaataatacaacactcctgactccgggaatctctgctaatgccgcttctacttctggtaataccattgaaaacttggtctttggaagtaccagttttacacctgttaaatcaatttcttgaaccgtgctcccaagacctttagggtattgttctgttacaataacaggaattcctaaaatccgggccccttgcaacaatctctgtcccacgctaataatatccccaaaatacttgatggctggtctgaacctttcctgcatatcacagcagaaaaacacagtgcttgaaggtgtaagatttcccagggtagtgagctggatctgcaacggcacgaggcgcaccttgcagcgctcgctcaccgcgaagcccttgggcaagtccacgtactggccccactcctcggcgaacagctgcaccacgaatttgcggtgcatgtcgatctggtcgccgtacaggctgaggaacttctggatgagcagctcgtagcccgccccgtgtggcaccgacgagggtcgcgcgaagactgagaaacagaagagcaccgggactgtgcccgacggcgcccccgcgcccccggcgccgctgttggggagcgcaaggaccgccggctccgcagccgccatgttcccccgagcgtcccc

SEQ ID NO: 124352 - DNA, 1003 bp, Homo Sapiens
  misc_feature (40)..(40): n is a, c, g, or t
tgctgaatcggtatagaacctgttatacacaagggaaaanaatcaggatggagatagatagatagatagccttgttcagtgaacaaattaagtttgaaggcccttatacaatccttctataaatcacccaggcaggaagccatttgatttctattattttcctgactttgaaaattaattagtatttaggaagaacaaatagggtaaaggaaaattaattccctcaaaagacttaaaatcttatgctaaaagagtcaaattttcaagttgtttgagtctacttttaatctctagtgagttcatgaggaccacgaaaataaaataccttcagatatttgagtttttcaaattgctaatttaatgtataaaaagcagctaaacactggtactttataaaaatgaaacagcattttgaaacaaatgttacagatctataaatattcattatatagaataaaccctagttacttgcatgcaccacctcaaatcatatttctttacactgacctattatatacacaaagtatacagtggttaatgatcttctcttctgtttgtttgtttgtttgtttgttaggaaatttcctcaataagccagaaaaccttaggtattattttcacaaaagttaactcaggagaaattgtaaggaagtccttgacccatggagaaggtcactgtttgtttgtttgttagatacgtgtgtctgtcataaaacaaaatgacaccagtaattacttggtaatttaaaaacaagttcataaaaagaaaatacctgcaggtaatttttatggtcagttatattctataacctgaacactgaaaactaaaaacttttacttacaaactattattatctgagcacagcacagtgctttgctttaattggaaaataaaatggcatgaaggagtggtggcaggtatttgtaaacctcccaactggggttctggtgttcctgaagagaaaacaattttccaagatccaatttgctgacctaaaaggcc

SEQ ID NO: 124353 - DNA, 879 bp, Homo Sapiens
  misc_feature (670)..(679): n is a, c, g, or t
gttgtcattattggtgatactgtagcttgcaaaccatactgggtacatcaaagttgactggcaacgagtggagaaggacatgaagaaagccaaagagcagctgaagatccgtaagagcaatcagatacctactgaggtcaggagcaaagctgaggaggtggtgtcatttgtgaagaagaatgttctagtaactgggggatttttcggaggctttctgcttggcatggcatcctaaggaagatgacctcatgttcattgttcctggttttttccagccagcagcctctacactccatcataggacatcgagtccctcctcctcttctcccatgccttcttccctgccatggcaaatctgagtggcttctctaagcatctgctggtacaagtcaatgtggcaccatgagcttcatggtggcagaagagacaatagtccttagctctcctcccagtacaccccctacttggccagtctgtaggccaacaagaaggttcctttacccccatgcaagacacttatgagaacacattacaagatggctgaccgtggaggatgagtggatcctgaaaggttgtcccaaactgttgatttggaaaagaaataagcacatagataaccttattgtgtgctgcatggaaaggaactgaatacatttgcctttaagcattnnnnnnnnnnggatgaaaaattggggtgtcacatttgcaaaatggatggacaaatgtggtcagggcagatcaaggatcatttcactgattacaagccaggtgcacgccctgtcccaggcatttagaagaacaggggccagacttacatgtggtcacagttttggaagagaagatctaattggctgaacttatgtcatatgctgcttgctg

SEQ ID NO: 124354 - DNA, 1146 bp, Homo Sapiens
  misc_feature (1024)..(1058): n is a, c, g, or t
  misc_feature (1062)..(1100): n is a, c, g, or t
aagttccttttcccatggcaggccccccaataagggttaatctaaggggcttaatttcttttcccaaaatccaacagtttggggacaaccctttccgggattcaattcaatcctttcacggttcagcccattcttgtaattgtgtttctcataaagtgttcttgcatggggggtaaaaggaacctttcttgttgggcttacagactggccaaagtaggggggtgtactgggaggagagctaaggactattgtctcttctgccaccatgaagctcatggtgccacattgacttgtaccagcagatgcttagagaagccactcagatttgccatggcagggaagaaggcatgggagaagaggaggagggactcgatgtcctatgatggagtgtagaggctgctggctggaaaaaaccaggaacaatgaacatgaggtcatcttccttaggatgccatgccaagcagaaagcctccgaaaaatcccccagttactagaacattcttcttcacaaatgacaccacctcctcagctttgctcctgacctcagtaggtatctgattgctcttacggatcttcagctgctctttggctttcttcatgtccttctccactcgttgccagtcaactttgatgtacccagtatggtttgcaagctgaaggagaaaaaatccacctcccacagctgttgcagccaactttccaaccttctggaatatgaaacctgtgcaccatccagtgacacctccaatgaacagctgggttgccacgctatacttttctgctgaaggtccagattcctgcccgaacagcttacgccaccatggctgcttcttagcaaattccgcaaggtccagtgactcaaaatttccctcaaagtttccttgactggacgcggccatttcggtgagcttgtctcgcgaggacacacgtagaggatctgcgcggtaggccgcggagtggcgcgcagttgtcgcccggccgtaatggccgaattcccgggcatatgtccggtaccgtcgactgnnnnnnnnnnnnnnnnnnnnnnnnnnnnnnnnnnncggnnnnnnnnnnnnnnnnnnnnnnnnnnnnnnnnnnnnnnnactatcgccgccctagcgccctatagtgatgtatagagcttggctg

SEQ ID NO: 124355 - DNA, 497 bp, Homo Sapiens
  misc_feature (99)..(99): n is a, c, g, or t
  misc_feature (423)..(423): n is a, c, g, or t
  misc_feature (474)..(474): n is a, c, g, or t
tttatacttcgcttggccaagccggtgtaccggtcaagaaggttgcttccttgggaagctttggctccttgccaagcccctgttcccaaggagccctcnagtttcccagctgcttccagtcggactctggggatttggaggatttgtggtcggagttgctgacctgactagcacggctcacttggcccccggtgctccagtcgtcctgctgggccagcacagactcggcctcctgctccaggctgccccagtcttcgtcgtcccatctgtcagcagtgctgctgtcctctgctgtgtccttgtcctcctcctgcgtctcccagtggcctgaggttgtaggggtggcaggaacaggggtgggggctggggcaggaactccttcaggcgtgggtctttggggaatgttggtttctgttggggcantggttgggtgcgaacggatcagcttggaggtgagtgaggagaccccggtcnacgcccagcctgcccagcttagc

SEQ ID NO: 124356 - DNA, 2693 bp, Homo Sapiens
ctcccaggggctagactgagcccggcacaaggggtgtgaaatagaatttattggtggctctgattatgtacacgtgagatggcctggctgggccggccgggctcacatggtttgtacaataaatacatctgtggggcgggctctccgcagccgggaagggccaccgccacggttcagtccagcttccgggctcccagcttcatggggcccttggccaccttcctctcggcgcgtttggcctccatctcccgccgccgctcctcgcgcttcttccgggccagctcagccttgacctgtcgactgtcagtctcgaggccctcccagttgtcctcaccccaagagtctggcctcggctgggtgctgggacgtgcagacagggtagcgaaggggtcgcccttgtcgctggactctgggccaccccagttatactcgctggccagccgtgtaccgtcaggaggtggctcctgggagcttggctcctgccagccctgttcccaggagccctcagcttcccagctgctccagtcggactctggggatttggaggatttgtggtcggagttgctgacctgactagcacggctcacttggcccccggtgctccagtcgtcctgctgggccagcacagactcggcctcctgctccaggctgccccagtcttcgtcgtcccatctgtcagcagtgctgctgtcctctgctgtgtccttgtcctcctcctgcgtctcccagtggcctgaggttgtaggggtggcaggaacaggggtgggggctggggcggaactccttcaggcgtgggtctttggggaatgttggtttctgttggggcagtggttgggtgcgaacggatcagcttggaggtgagtgaggagaccccggtcaacggcccagcctgcccagctagctgcggctcctcccatgccagggctggaggctgcatggacatccttctccacttcctccagctgggtcgggtcctccgacacagactccaatttggacaggaagctccgaatggccttgaaggcctggtctcgcacggatttctcaggatctacagtgagaccgcagagcacaggcaggatcttctgggcacagtcgttcattgagtagaggttgtgggtggcagcaaagcccaggacacccgcaacccgggacggtgcaaacgggtccctagtggctcggctgaaggcagaggtaaggaccctgtgtctggtgctagcactgaggtaggagccgattttgcccaggcagactgtggtgttgcagcggatggggccctgttcatccttggcctgtagccgtgcaaagtgcttcatcagctccacattgaggttggcctcgttcagctttggggccaggagcagcatggacttgaccgtctgctcccggatggcagggttggtgtccaggaagccatgtacgacgtgggggaagatctgggtgttgactgttggctcgtcaaggtactggatgaactgctccatctgctgcaggaggcggatgcgcatggcccggtcagtggatgagaacatcttgaccaccacagggatgatcttctgctgatactcctcagcgctcaggaacttgcccaccttgaagaggggcgtgaggacaacggccccagcattgccgaactcgaaggcggtcagcagctggggcagcaccttgtgccgacagaaatcctcagggaatgcgtccaggctcttgctcagctcctggaagaatttttgcttctcggctggctctttgatctgaatctcctccaggaagaggttggtttctacaaagcggttgctcatgaagccaccaggtgcccggcagttctgcaggaagcgggctgggttgggacgcaccttggggtttgctcccaccagctcacagtaatggggcaccagcgttttggggatcttcccagggttgcgtagggctgctgcccgaggtaggggcccattgaagacttcccaaatgaggcagcccaagcgccacatgtctgctgaccacttctctctgaccactctgccactgctgtcagccaactccggggggtcatactgctcaagctcggggatccccttgcggggaggtcccccaccgttgccctgggccgaatacatgtagtccaggcccccaagcttccactcgccagctcggtccacgaacacggcggccatgcagacattgttgtggatgaggctgcagtcgttgaccaggaagctgagggctttcacgatctggtgtagcccccaggagatctccagctccttcaggccaccagcctccactctcgccttgaggtatattcccaacggggtcacagcctctgtcacgacgtggaggcatttttctgtctccagtccatcgatgtaagccaggatgttggggtgccgtagagttttgaagcgcttgaaggcagctttggccacctgggtctgctcttccgcgccaggcttcacatcatagacgaagatggacacggggctgcctgtggccttcttgcggccgcggtgcagggcccagggcccgggcaggccgccctctgggggctccgggatgagctcgaacggaaagtcccggaccgggtcccgggcaaagaaccacatcgtccccaccgccgccgcgggttcgggcgccttagctccgggtcctccggccgcccgagccggggccctcgtgccgaattcgccacccaggcc

SEQ ID NO: 124357 - DNA, 1023 bp, Homo Sapiens
ctcacagacgcgcccggacggaacgttaggaaggccctggtgagtggccccgacctcctcccccaggactggcttctccggccctctgccctttcgggcagaacagctcgtggctcttccaggacctggggctccgtcttgcagaacagctcgtggctcttccaggacctggggctccatcttgcagaacagctcgtggctcttccaggacctggggctccatcttgcagaacagctcgtggctcttccaggacctggggctccatcttgctgaggggtgctttcttgagactccttagggacgattctgattttccctggagctgtacaatggcggtctatctttccaaggtcccctgggcctgggctccgaggtagccactttccctggagcccgtgaaggaggtttggacgccagctgggctgcctgcctgtggcggggcaggaatgagagctggtgcggctggggcccctgggtgcctggtcctgctctcatgacgcccaccccttgaaccctgacatgggcgcccaaggattctccccgcaggctcgcagactcacctgatcaccgggcaagcgcggggcgggcctggggttggctctgggaagctctggagctgtggaccctgtggtaacctcagtgcccgtggctcacgtcgtgtgccaggcagcagatggcggagggtgtcgggctcccctggggtgaggctgtgctggtcagggatgcctggaagggggcattcagggtggcgggaacagcgtggtggcaggtggaggccagggtgaggtccaggccctgcctctccggggctgcaaagcaaggctgtgccaggccaggccgcaggggcctgggggtctctggtgctttgtggcgcacacctttgccctttgcagcgactcacgctcatgccgtgggtgggtttggtctcctcggcggcgccgtgctgcgactcacacctgccatgttactgggacatttgacttgcttttagttttttcttcttataaacatctttgcacatc

SEQ ID NO: 124358 - DNA, 689 bp, Homo Sapiens
  misc_feature (171)..(171): n is a, c, g, or t
gatgatcctgtgaggatgatttgcatttccagaatccttgagcatggattagatgtttcctgggaggtgccttgagtaccattatgtgcaagctacataattaaaacatttttcttagtttccctgggaagcttttcttgactcacagcccaggttcttctgcccaacacnaaaaggagtgagttggggtctttagtctcttcttattgggtagctcttgctttaatattctgtttggtgagtgtaagggattctgcaagggacagggggcctgactacccagtctttgacttgtatcctctcccctcttcatacactcctgctgaaaaatgttaatccaaatacacatttaaacttagggtcggtccttattctgatttgagtattttaatgtctcagtgtgctgatttggtagttggaagaattattcttctggaggtctgttagactacatcctacactgacttcagaaaacagtctgtcagacaaaaaggccttatgtcaccactggtacctcagtttcctcatcccatttacagtttttctaactccagggtagtgtttagtgttaatatttgggatatattttttttcaaaactgtttttaagtagtttgtaatttgtaacaaacttgtaacctggttgggactgatattgtcatagctatgataaactttggatattagcag

SEQ ID NO: 124359 - DNA, 685 bp, Homo Sapiens
tttaagaccaactgattgcagattccaaacttaccaagcaatctgattgattaaaactggtttgctccccttaaagaccttccaaagagaaaatacatattcaccaactaataactttttggtctgcatggcagaaatgtttgtttcttctagtgaactggtctcaatactggattcttgtgagctggttagcaacaatcagttcctcttcagtcacatcaattttgggtgtaaaattcaacttctacgtctctctccataactaaagccaggccttagtcatagatgtccttgggaggcaggtcctctctcccaccacccccacatcccatgtaacttcaatagttacaatatatctaagtgtccatagaggaagccttttcatatgaactcatttattatacttcatttaagttagttagacgttgattctagatgaggcagagcagaacaaatctggtattttagtaacttcctagattttttattacttagggacagaatatggtttaaaaactatcactttaagtcctttgctgctacaaccacaatgctgtcaaactacacaaagcagtgcctgggagctatctttgtgtttgttagattttacttcccattttatcttaatcctcatgtgaattatctcttacaaattcagagatagccattcatctattgctgcatc

SEQ ID NO: 124360 - DNA, 877 bp, Homo Sapiens
tttttttctttagggacaattattccagtttccatattaaaattaaaggccctgtttgtaccccaaattccaggttcccttgggggggttcagtcaaaggagggtaagacctccaggttggctcacaagagaaagcgtccactccctggcccctgtttttgggattttgcccagccttgagctcatcaataatttcttcaatatccttagctgtcaaatcctcatagtaattgtcatttatttgaaccattggtgcgttcacacaggccccctaaacattccacttctataagagtgaaaagtttgtcaggtgtagtctccccaacctttattccaagctttttctgaatggcctccagtatgctgtcagagtttcgaagcatgcagggtgtagtagtgcagacctgaatgtgatactttccaactggctttcgattatacattgtataaaaagttgctacttcatatactctcattggaggtacttgtaaaacttctgcaaccttgttcatagcagagatgggcaaccacccattctgcctttgggctaaatccaggactggaagaacagctgctgctttatggccttctggatagttttttacaattgcctctatcctcttatagttttctggtgtgaaatcaaatggagtatcagggttattctcaggagtatctctgtgcacaaataaagctcctccagctccattttgcatagctgtcttatgcaaattccttacatgtcttccccagtgggcggtgaggccagccgcccgggcccggagcgccgcggagaagaacatggcgggccacactgttcaccttccccagccgcgccaggcgagaatccgacgcgtggtcgacgatatgcccgtaa

SEQ ID NO: 124361 - DNA, 1042 bp, Homo Sapiens
  misc_feature (182)..(187): n is a, c, g, or t
  misc_feature (189)..(189): n is a, c, g, or t
cgtttttttatggggggggattcccaacccttatgtcctggccccgggttttccttagggaaccaggttagggccattttcccttttccctttcgggggcccgggggcccaaaggaatggttttagaaactttttggaggggcggaggcgggcccacaagggtggtttgtgggggggcgtgnnnnnntnggaagattggaagtccatattttatttctctagtgacatatttacagttcaatataaattaaaggcctgcttgtacaccaaatccaggtcccttgggtggttcagtcaaagaggtaagacctccagctggctcacaagagaagcgtccactccttggccctggttttgggattttgccagccttgagctcatcaataatttcttcaatatccttagctgtcaaatcctcatagtaattgtcatttatttgaaccattggtgcgttcacacaggcccctaaacattccacttctataagagtgaaaagtttgtcaggtgtagtctccccaacctttattccaagctttttctgaatggcctccagtatgctgtcagagtttcgaagcatgcagggtgtagtagtgcagacctgaatgtgatactttccaactggctttcgattatacattgtataaaaagttgctacttcatatactctcattggaggtacttgtaaaacttctgcaaccttgttcatagcagagatgggcaaccacccattctgcctttgggctaaatccaggactggaagaacagctgctgctttatggccttctggatagttttttacaattgcctctatcctcttatagttttctggtgtgaaatcaaatggagtatcagggttattctcaggagtatctctgtgcacaaataaagctcctccagctccattttgcatagctgtcttatgcaaattccttacatgtcttcccccagtgggcggtgaggccagccgcccgggcccggagcgccgcggagaagaacatggcgggccacactgttcacatcccgggaattccggaccggtcca

SEQ ID NO: 124362 - DNA, 690 bp, Homo Sapiens
tttttagaaaaaccaagtgtctttattcctcgatcgtttagtatggcggtgggcggcgcccgcgcgggggagcctggagcccagggaatcgacctggagggccagtggagggagcggagggtgcgaggatcggctcctccgcaggccggccctggaggggttcttgggggatcgcgccaggccaaaagtctgcatgggcggccccgagcctccctgagccggcgcgccccgggcgtggggagaggccgctctgggcgcggtgccgctgcgggcccgggtgcggcgctcgcccagggctaggtgccccgtctcaggcgagaccccaggagcccgccgcccccgctgtctcttcagccgacgtagacacgtcgggcgggaccccagtctacgcgtgttcaagctctgggtccccatagagcagggccccgctgaagatggtgagcggctcctccgagtgcgccagctgccccatgaccaggtcgacgcagaccgtgtccccggcctgcagcggcaggatgaggctgaagacgcccagggtgcccgggctgggctggctctcggccaccggcttattctccaggccctcaggctcgtagccaccggagtctacgcgggccacgccctgggttggagcgggacagcacggcctccactttcctcgtgcccggtgccagtcagcaccgcgctcag

SEQ ID NO: 124363 - DNA, 1708 bp, Homo Sapiens
  misc_feature (30)..(30): n is a, c, g, or t
  misc_feature (36)..(36): n is a, c, g, or t
  misc_feature (52)..(52): n is a, c, g, or t
  misc_feature (96)..(96): n is a, c, g, or t
  misc_feature (104)..(104): n is a, c, g, or t
  misc_feature (196)..(196): n is a, c, g, or t
  misc_feature (248)..(248): n is a, c, g, or t
  misc_feature (433)..(433): n is a, c, g, or t
  misc_feature (522)..(531): n is a, c, g, or t
  misc_feature (582)..(646): n is a, c, g, or t
  misc_feature (649)..(663): n is a, c, g, or t
  misc_feature (681)..(742): n is a, c, g, or t
  misc_feature (1158)..(1176): n is a, c, g, or t
  misc_feature (1478)..(1478): n is a, c, g, or t
  misc_feature (1603)..(1603): n is a, c, g, or t
cgagaagcagcgagcgcgcgaatcgagacnagcatnccgacctacaaacggngatgtgggctaggttatgctcgactacagaggcgtggtgatatnagagagangcgcggctgcctcgtcaatcgtcagaaggcgcgagggagagacgaggtgaatgcggagatattagggcatacaggcgcgatataggggcgantcgaggtgataggccaaaccggagtgaagacgcgtgcgagataataataganagtgcggatagcgagatcggcggagcgggaatgagggcgcaggtggtatatgtggagtagacaacgcgggtagggatgttagggcaagggggtacaacaaagtgggaaagaaggtttgctaaaacaaaacgggacggggtgtgcccccacggggggagtattggtgttggttgagggggagaggnagcgcaagcggaagacaggggagagaacggggaaagtgtggtgaggggaacaggacagaaaggggcgcgaatggtaggggatataaacnnnnnnnnnncggcgcggcgcccgcaacggggaaggtgaatagagggaagatctggagaannnnnnnnnnnnnnnnnnnnnnnnnnnnnnnnnnnnnnnnnnnnnnnnnnnnnnnnnnnnnnnnnaannnnnnnnnnnnnnnaaagaaggaggggaaacnnnnnnnnnnnnnnnnnnnnnnnnnnnnnnnnnnnnnnnnnnnnnnnnnnnnnnnnnnnnnnaagcggagggggaatgggtagtggaggattgggtggggggggttatatacattttattgaaaaaaattttacaacaaaatattttggcaaactgtaaaagtatacataagtgcaaatatatcctccttttaaaatacaagcaaagtgtgagtatacacggtcataaaaatatctttaaaatatggtggtagaaaacaaccttgtaaaaacgttgtattgtcacaatactgaaaaccactttcttaaactagacacattgtttctaaataattccttaataatgttctttggcacctgtatccaaatgtagtgtctggggaaaatgactctcccactcagctaggcaacaagaagaggctttcttgaaatcttgtgcttagcactgcctttttgaaaagcacacaagttttcttagnnnnnnnnnnnnnnnnnnnacttgtctgcttttttcacaccctgattactgaaggcaacgaagatcccacagatacacgttgatgccttacgcatggcacatcttcccacctgagtctgccctctccctcatgtgggagcctgcaggtattcagattggggaacgctaccttgccagcggttgtccttcttccagcagtaggcaaataacagtgaccaacgcgatcctgggcattctggctaagtggcaggtgtgtggcttactgctatccgcgtgcatgtgacttgaatccgtcccagtttctatctgcctcctcttgangaggggagaggagagagcggccatcgcttggcctctttccgttcaatgacgcaggcttaatatctgaagacgcctggtgggatgtgatatacaccgctactgaggatggaagaagaatccatganttgagacaatctttctgcaacacggagtaatgatgtgtacgggcatccactgaagtctccaggtctgtgaatacttgtcaccatagaggcagtgatgcagcgctc

SEQ ID NO: 124364 - DNA, 944 bp, Homo Sapiens
  misc_feature (133)..(133): n is a, c, g, or t
  misc_feature (145)..(145): n is a, c, g, or t
aatggtttcgatcgttttttatttaaaaaaataaaatacggagtcctgtaggggccccaccctcggggcggaggaaagcgccgcgccggttccggcctgggaggcgtccctcacacggtaggtctcaccgtgntcggctgttggntgaggcgagtgtagaacttcctccacgagtgcagcgtcttgcccgaccagatccagaagcccgacgtgatgcccacgatgagcgtcatgaggtatttgatcatgtagaccgtgaagtcgggcgacatgcgcggcgtgtagtgcgccgggcacgggatggccaggctcttgcagtgctggctcacccacgagcgctcccagtgctcgcggaaggcctgctcgtagaagtagcaagcgatgacgatggtggcgggcactgtgtagagcacggagaagacgccgatgcgcaccatgagccgctccagcttttcggtcttggtgccgtcgtgcttcatgatggtgcggatgcggaagagcgacacgaagccggccaggaggaaggacgtgccgatgaacaggtacacgaagagcggcgctagcacgaagccccgcagcgggtccaggctgttgaggcctacgaagcacacgccgctcagcaggtcgccgtcgatctggcccatggccaggatggtgatggtcttgacggccggcacggcccaggcggccaggtggaagtactgagagttggcctcgatggcctcgtggccccacttcatgccggctgccaggaaccaggtgagcgacaggatgacccaccagatggagctggccatgctgaagaagtagagcatcatgaagaggatggtgcagccctccttcttggtgccctgcaccaccgtgcggtaaccgtcctcggagaagcgctcgttgcacaccacgcgctcctggagcacgaagcccgcgatgtaggccaccgacac

SEQ ID NO: 124365 - DNA, 1141 bp, Homo Sapiens
  misc_feature (415)..(464): n is a, c, g, or t
  misc_feature (883)..(883): n is a, c, g, or t
  misc_feature (898)..(898): n is a, c, g, or t
  misc_feature (992)..(992): n is a, c, g, or t
  misc_feature (1011)..(1011): n is a, c, g, or t
  misc_feature (1021)..(1021): n is a, c, g, or t
agctcctgcaaaagcttccgtccctgaggcaaaaggacacgagggcccgactgccagagggaggatggacagacctcttgccctcacactctggtaccaggactgttcgcttttatgattgtaaatagcctgtgtaagatttttgtaagtatatttgtatttaaatgacgaccgatcacgcgtttttctttttcaaaagtttttaattatttagggcggtttaaccatttgaggcttttccttcttgcccttttcggagtattgcaaaggagctaaaactggtgtgcaaccgcacagcgctcctggtcgtcctcgcgcgcctctccctaccacgggtgctcgggacggctgggcgccagctccggggcgagttcagcactgcggggtgcgactagggctgcgctgccagggtcannnnnnnnnnnnnnnnnnnnnnnnnnnnnnnnnnnnnnnnnnnnnnnnnntctttcctggcttgaggtaggggctcttaaggtacagaactccacaaaccttccaaatctggaggagggcccccatacattacaattcctcccttgctcggcggtggattgcgaaggcccgtcccttcgacttcctgaagctggatttttaactgtccagaactttcctccaacttcatgggggcccacgggtgtgggcgctggcagtctcagcctccctccacggtcaccttcaacgcccagacactcccttctcccaccttagttggttacagggtgagtgagataaccaatgccaaactttttgaagtctaatttttgaggggtgagctcatttcattctctagtgtctaaacctggtatgggtttggccagcgtcatggaaagatgtggttactgagatttgggaagaacatganctttgtgtgggttgngagaactgaagaatgggttataaatgttattctattgcaacggatgctggcacctgctttgagatgaacagctgcgctagatttacggtcgtanatggaatgtgaggcactgnaagcttgtangagtgagttgcttcctacagaacaacgtaaaaatgaactgaggaatcatgcaggctctcaatgatgcattcttattatcatacaaattacaaactaatgtaatgtactcaattatacatt

SEQ ID NO: 124366 - DNA, 1800 bp, Homo Sapiens
tccagctcttttattcctttaactgcttaacaaaagaaagagtctccaaagtttaaaaaacctttgaaaaatatacagcttgatattatttacataaaatatgaatccaggttccaatatcaaacaaacattgctatgtcagaaacacagtggaaggcaggaacgtaactcactgccttttagatgcaaagactaatagacacgttctcctatctcgactatctttgttacctgttatcctcaaacataaattattaggcacctgagaggttggaagactaccgaaaatgaacttcataccttctgtatgattattatcttaaaaagttaccgcatttttaatctcttttataactttacttcatctacaactaacttcactttcattatcccaaatgatcaggtattaattacatgaactgttaatgtatacacagacctaaaaatcaaacaaaaatgtattgcccagttgtgtaggatatatatttgaaccccatgacatttcctagtgctttgtgagcaatccaaatttcacttaaaagagaggtgtcaattctgcccatgctgtggactatgtttttaaaaaacatacaaaaaagactgacaataattgatctcttataaattaatcaagaaacctaagattaaaaattctaaattacaattttatttgtatttaaaaatacattggaaattctgcatattcccatgatcaaccttattttcaatgcacattacttaaattttgatgacacagttgattctgacaagtcctttttcaagctgaacaccaaaatagggaaactcctgtacatttccatgggccctgttcccattgatgtatactgcttccttactaacagtgagggatgactttcatcagtcttttatcacctgaacagtcttccggccataatgatagtaactataagctgatgcagctgtggtgaaagctgtaaaacaccatagtatctgaagataaatgctgtcagcatagttgaaaactggagctgccaaagaagctgccaccaagattaactggactgctgtattcaccttgctgatgaatgttggttttaacctagcagtggcatagcaaggattgaaatacttggcaagtgttcgtggtgttggaagagttcggtatctgacataaaaaacagcagcaatcaacattacatctctcgaaatgatcatgtaagtaagtggaactggaataagatctgcataggtcaagctaacatataagatactgataagtattttatcagcaagtggatcaagagcacttcccaaagctgatctttgattggcccagtttcgagcaataaatccatccaacaaatctgttagtccagctaaagcaaaaactcctagtgcaatattaaaatcttcttcaataatcaaatagcccagaactggggccaagccaattctcgtcattgacaacatattcgggattgtccatgggttttcatacaggctgggggtgctcgccgggccccactggccgcccggggcttcggcagcggcgcccgctccggccgctggcctgggagccgccttccccgcgcccgaacagtggttccgctggccgatcccgggcagccgcaagccaagagcggccggacgcagcctccagcgttcggccaggcagcccaagcagcagggcacgggcggcagcagggcccagcaggcgcgtcgcttactcggccgcgttcccggagcccaagcggcgccgcgcagggccccccacgagccgcgcgccacgcgcaaggctagcatggccctgcggccgca

SEQ ID NO: 124367 - DNA, 1004 bp, Homo Sapiens
  misc_feature (753)..(753): n is a, c, g, or t
  misc_feature (758)..(758): n is a, c, g, or t
  misc_feature (774)..(774): n is a, c, g, or t
  misc_feature (786)..(786): n is a, c, g, or t
  misc_feature (814)..(814): n is a, c, g, or t
  misc_feature (918)..(918): n is a, c, g, or t
ggcttgtttgatgcttttaatatcattatttgtgttacacgatacacaaccaaggatgatggtcaatactgcaatgaaaatgttaaaaaaaatattatacacggctcatgtcttccacacaccttcctggaaataaattagtgagcacggagaaacctggctgggtggcagccacagctgagagaggagggagtgttaaggcagtatctacaaggggaagggtggcaggagggcaagctaaggcctagattcttccctccaacctcccagacagggaaggagggagccacacccctccctagacacagaagctgccactgccagcttcctgcctctctctgccacacatgcactgcctcagttggaagcccttgcctgccagggaactagtatgtctggtgtggggggggagattttccctggtgtctcagggccacagagattgaacaatgggcccgagtcacactgcaagtcagcagcaaaggcagcagtctaaatgagcccccaaaaagaggaggtacccatgttctagaaaggtgagccaaggagccccggggtggtggtggtggtaatgggagggctggctctggggtccagatgatgggggcacaggggttggggggatgttgatctgggtgggaagagttgggtttaaagatgggggccattatgggccttgtgggtcctgcaggtacttctctgtccttgctcctttgtttggcatttttcatcatctacttgggtcctgcacanaggangtagatgggtggcggntgggggtggtgnctgtacccatatttggactggagtctgngtatatgcaggagagacaccttcctagcacagtccatcctctctcatgtcccatcagtccactccagatgggtcaagagtggtgtggtatcacgcagctgacangtatggtcatggatgtcacacaattggggtacataatatcacggctgttatagagtggaagctggatctagtactggtcattctaa

SEQ ID NO: 124368 - DNA, 1701 bp, Homo Sapiens
  misc_feature (149)..(161): n is a, c, g, or t
  misc_feature (173)..(208): n is a, c, g, or t
  misc_feature (225)..(367): n is a, c, g, or t
  misc_feature (1677)..(1677): n is a, c, g, or t
gttgtgtggagattacacaaccctgttttttctttttgcgacgtgtttttcttggggggaacacgaaaggagcgcccactttctctttttccttttattgggcccccgcccgcccccacgagaaggttgtttaaaaagttttttttgtnnnnnnnnnnnnncccaacaaaaannnnnnnnnnnnnnnnnnnnnnnnnnnnnnnnnnnngtttagggttcgtgtgnnnnnnnnnnnnnnnnnnnnnnnnnnnnnnnnnnnnnnnnnnnnnnnnnnnnnnnnnnnnnnnnnnnnnnnnnnnnnnnnnnnnnnnnnnnnnnnnnnnnnnnnnnnnnnnnnnnnnnnnnnnnnnnnnnnnnnnnnnnnnnnaaggtccagctgtattatttatttacagcacagttcaaagtcattaaatccggtacaaaagaaatggctctcacttcctggattggcaccagacatcctaccagctgcaattacatcattttttatctatcttctgcttttactttgtgtagggtagggatggggacttacaaatgggccaaagacacttcaacctcaaaaccaaagagaaatctctgcttgcagagatacaaagaaagtaactctccctcttatgaaaagcaaccaggaactctactccagttatgagggccactgatggtgtgggagagctatcaagaagattcttcctagacgtggtgcaaagacagtgagaacccaggaaatcacattcatgggacacttgctcttaccgtcatcaccctctattctatctcaactttggccccatcaaatctaatgataaacaaaagaaggtaattacatgtagaaaatcaaagtgaatgggaatgtggtggtgtgaacataaaagaagaaattgaaaacaatcaaaagtttctcagtgctgctttcccgcactgtcatagaaatctctgatccaattcttcatatgtctaacttccaaggagcgggctaacagcacagacataggatccaaggcattcttggtgcggagatctaagtggtgggccccctctgagatggtgactgcaaccagagtgtctgtgatatccttagttactccacctcctgaccaggggtctagttcaccattgctgaaaacaatgtttgtgtgtgaactaatgtttttgcctccatacatagtagtgatccaggagggccttggtctcacaccccactgttgaaaacagtcatcagaaagttcctttaagttccatgagtgaggttcaaacatgtcatcgacaccattagtacaaaagggcatgactacttctgtgcaggcctgatagctccaacccagtgttcccagactgctagttgctgtctctgaaatattcaggcatttcacctggcccgaataattgtaatatacattcagagcttggaaaatattctgcagcagcagtgaatcagatacattgggatttttcaaatactggcacactaccttgataggccaagcaggcaaaggctgtaaaaagttagaggcataaggatagtccaccattgccagattcacccaggtttcagagatccagtctttcaaatgttggatgtcctgagaagttaatgggctgcataagtgaagggctccagtaagccactgcaaaccactgccagtatttgagagtcgattaatggcatcccangtcctgtggatgctctctgaacaa

SEQ ID NO: 124369 - DNA, 1269 bp, Homo Sapiens
  misc_feature (836)..(1143): n is a, c, g, or t
tcctctgttggcctgccttcccggaccagacagctgctcagggccctcctcctgaaggtgagcccctgcagcctcctcagcctgtgcagtccacacagcctgcccagcctgcaccaccctgcccgccctcccagctcggtcagcccggccagccaccaagcagcaagatgcctcaagtgtcccaggaggcaaaggggacccagacgggagtagagcagcctcgcctcccagctggacctgcaaacaggccacctgagcctcacacccaggttctgagggcacaagcagaaacaggcccgacttccttcccctcccctgtgtctgtctccatgaagcctgaccttccagtctctcttcccactcaaactgccccaaaacagccgttgtttgtcccaacaacctctggccccagcaccccaccaggactggttctgccacacactgaattccagccagcccccaaacaagattcctctccacacctgacttcccagagacccgtggatatggttcaacttctgaagaagtaccccatcgtgtggcagggcctgctggccctcaagaatgacacagctgctgtgcagctccacttcgtctctggcaacaacgtcctgggccatcggtccctgcccctttctgaaggaggggccccactacggatcgcccagaggatgcggctggaggcatcgtatctggaaggggttgcccgaaggatgacggtaagactctcaggcccaggtgagcaactgccccacctacagggaggaagacgtaggtagtccctgccagcccatctccctggcctgtcatggaagcattaactgtattcttgttgnnnnnnnnnnnnnnnnnnnnnnnnnnnnnnnnnnnnnnnnnnnnnnnnnnnnnnnnnnnnnnnnnnnnnnnnnnnnnnnnnnnnnnnnnnnnnnnnnnnnnnnnnnnnnnnnnnnnnnnnnnnnnnnnnnnnnnnnnnnnnnnnnnnnnnnnnnnnnnnnnnnnnnnnnnnnnnnnnnnnnnnnnnnnnnnnnnnnnnnnnnnnnnnnnnnnnnnnnnnnnnnnnnnnnnnnnnnnnnnnnnnnnnnnnnnnnnnnnnnnnnnnnnnnnnnnnnnnnnnnnnnnnnnnnnnnnnnnnnnnnnnnnnnngaagtgagcaatgaagggtccactatgcttctacttggtggggggatgtaaagtacctctagacccagaaacaaggctttacagtttttaaaaattattattttttaaatcagctttctcaggttg

SEQ ID NO: 124370 - DNA, 925 bp, Homo Sapiens
gaaagtcccttccgtgcggttaagggagttttgccaaaggggtttttaacacaccgccaaggaaatcccagagtgtccccaggctgttttttccctggggcaaaagtcccaagtcactgaatttagggcaaaaggcaagttcgggtttctgttttcgtaaagacaaaccaaacaaaaaatgttcattccacggcccgttccttttctccaaaaagaggaaagggaaacccagcccccggtgtctgcgagtccatgggtgggggatgtgtcctggggctaaagcattatgtaaacatacaaggtagcagcaccactcctagaggaagtctggccgactgagccgggcggcaggacagcaaacggctggccgtctggcagtggagtctgtccccttcggcagcttcttcctctgcttggctgggttgtcctttgtttttactgcagagccctgggaagattcactgaggtgataaccactcagtggctcacacggaggcaatgacaatcatgaggtggggagagatgttggagatgctggcaaggaggtcaggggccaggcgggacaggtgactctcagagaactcacagggcgggaagatctgcagcacgtaggcaggctgattggagccagggttgggaacgttgatgatccctgccgcctgcttggcctgcaggtaagtgatgaaggcagccttgagggactcggtctggctcacaacatcctcttggtcacggccacagggcagagccagcagcggacagtaatctgtctccaccgtcatccttcgggcaaccccttccagctgcgttgcctccagccgcatcctctgggcgatccttagtgggggccctccttcagaaaggggcagggaccgatgggccaggacgttgtgccagatcccggaaatccggaccggtccagccg

SEQ ID NO: 124371 - DNA, 778 bp, Homo Sapiens
tttttccagtaacacgttactatgttaaaaagatgcgacagtatattcatttaatctggcaattttaatttcaacaaatacatattaacaacaaattaaatcctattgtaaatacacttctttgttataccacgaccaaattttctaatcctagtacaggccacaatgaaataggccaaacatgctaccattaaagtttgttgggatgagattgtagtaagtttactcaaagtattcaagttctaatttttaaggtgctgtagagaaacataaaagatttcactgtatctaaaaatatgactgttttgatcttaagctatacattttatttttatctaactgattaagacctgcctcttaatgaggcacatttttggcatttctgtaaatgctgctacatacaagtaaaaataaggaaaagccgtgatagtaacattcatagctttcatagaaaaatatatattccctgaattagtcatatcaagtggtcattcagtatgaactgcaatattataaacaaaatgacatcaatggactttctctaattgcctatttccaacactctacttcagaactcaataatcagtatctccagctgaaattcccaggtcctcctagtttgtttttgacctttggggatgtgaattgtagggaatggatctgggtagtttttgcttcactcagaagtcacataggcccattagcacttcctttggaaaaatgcctgattttttttcctcatgacaccatacttgtcgtggtctgatttttacactgt

SEQ ID NO: 124372 - DNA, 1239 bp, Homo Sapiens
tcctgagaagtcactggtgtttaatggaaaggtatcctattagtccttggttaagataaggcagtaagagtatcactaatactatgtttttgcttagaatgaggctgatccttccactggcgtcttcacgggcaattagttccctctcttttgctcctagaaacacaggtaggagctgtctgccccctattgctgttgcattttctgagtgtgttgaaggctcatctagtctcatcacagcagcttccccagtggggatggagcgctgtatattgcattgtagcatctctccaggaagtgcacgggccccacagaggaaaacacaggcatctttctttctgactcctcttctgtttctcttagggacggggcccataaatgattccttcacatgatcaatcagaatgcgagacactgttgactaaaacataaagcaagtagccctgatttcagagaaatggagttacaaataacattttcaacagtgccttaacttgcaaggtagcttttactgcagaaggatatcagctcctttttgtctacctatcagaagagaaacaaaccatttccgtcgaactagaaatgcttagctcttatgagaatattgtgcttttaaaaaaaattcaaatgttaacattatttgcagtctgtgttctaaggtttcaatttgttttttctctagtccatttgatcattgtctctggtgagcgatataggaatattaatttggcatagagatcttcttctagctccagttctcctgtctctcgaactaaaaaaatatctgtgcacaacttcaaaattcgatccacatttggaagctcttcaaacatgatggagtgagaaatcccactgaagaattcacggacaaatttcccaatcacaaggacaactgaagcatataatcccataataccatagccagccaggaaccccagacttgggggactgactttgtcattgaagaccaccagttccagggcctgagagttcggattgtatattctgtttccagtcaggttgagaacccaccactcactgttatatttagttgtattgtctctggacaaaatgatggtaatatccatgaaattattttcagataaaagttgctttataggttttgagttagaatcactaggtgctttcacataatatggataaatcttttctatggtcctgtacattacccggccgtaatggccgaattcccgggcatatgtccggtaccgtcgactg

SEQ ID NO: 124373 - DNA, 670 bp, Homo Sapiens
tttcacatttattttgaaagctattcagacatgagacggttttaaaaagtgttagcattaatgttttattgtcacgcagatggcaactgggtttatgtcttcatattttatatttttgtaaattaaaaaaattacaagttttaaatagccaatggctggttatattttcagaaaacatgattagactaattcattaatggtggcttcaagcttttccttattggctccagaaaattcacccaccttttgtcccttcttaaaaaactggaatgttggcatgcatttgacttcacactctgaagcaacatcctgacagtcatccacatctacttcaaggaatatcacgttggaatacttttcagagagggaatgaaagaaaggcttgatcattttgcaaggcccacaccacgtggctgagaagtcaactactacaagtttatcacctgcagcgtccaaggcttcctgaaaagcagtcttgctctcgatctgcttcaccatcttggctgctggagtctgacgagcggctgtaaggaccgatggaaatggatccaaagcaccaaacagagcttcaagactcgctgcttgctctctccctttataaactggcacgcccggcgtgcgtgtggcgggggcgcgcgcgcccggccggacctccgcgcccgtcgctccc

SEQ ID NO: 124374 - DNA, 921 bp, Homo Sapiens
  misc_feature (106)..(159): n is a, c, g, or t
  misc_feature (270)..(279): n is a, c, g, or t
  misc_feature (795)..(829): n is a, c, g, or t
  misc_feature (833)..(871): n is a, c, g, or t
gtttaaaaaaaggggggtttaaggcacatttaaaggtggttttttatttgtgcccccccgcccgaagatggggccaaaccgggggggttttaaaagttctctttcnnnnnnnnnnnnnnnnnnnnnnnnnnnnnnnnnnnnnnnnnnnnnnnnnnnnnncgccaaagggtttttaaaaaattaaggcccaaatgggggcctggggtttaataatttttttcccgggaaaaaaacctgggtttttgggacttttaaattccaatttaaatnnnnnnnnnntttcaaaagcttttttccctttattggggctccaggaaaaaattcaccccaccttttggtccctttcttaaaaaaactggaatgttggcatgcatttgacttcacactctgaagcaacatcctgacagtcatccacatctacttcaaggaatatcacgttggaatacttttccagagagggaatgaaaagaaaaggcttggatcattttgcaaggcccaacacccacgtggctgagaagtctaactactaacaagtttattcacctgcagcgtccaaggcttcctgaaaagcagtcttgctctcgatctgcttcaccatcttggctgctggagtctgacgagcggctgtaaggaccgatggaaatggatccaaagcaccaaacagagcttcaagactcgctgcttgctctctccctttataaactggcacgcccggcgtgcgtgtggcgggggcgcgcgcgcccccccggccgtaatggccgaattcccgggcatatgtccggtaccgtcgactgnnnnnnnnnnnnnnnnnnnnnnnnnnnnnnnnnnncggnnnnnnnnnnnnnnnnnnnnnnnnnnnnnnnnnnnnnnnctgcgacgagctaggcgccctatagtgagtctatcattttccgccccttt

SEQ ID NO: 124375 - DNA, 1108 bp, Homo Sapiens
  misc_feature (472)..(480): n is a, c, g, or t
acaacggggttttttgaggggacttgaggggggcccttaaaaaagaacccctgggggaagggttatattttaaaaaatcctcccaagcgacatgggaaagcccccgggggtcccctgggaaaagatattttcgactaaaaccccaagcgcgggaggggcaaatttttttaaaatctgccagaaaatatgccagtgagttttaaacgccgttttacgcttctaaaaatttctattattgaccctaggggccttaaaattttcagtaagggagttcgtccaaatgagttcctccccccggaagattaggttcctccccaagaatccccaaatcagccattttttccaatgccaggggttgttaaacggcgggccagtgcctattttaaaataggccttcctaaaggggcctccttggacaagaaaaggcggtttgggtaactttgggccccttaagggtttttttgagcgcggnnnnnnnnnttggtcttcttgtagccttcaactttatcttcaactaccaaaggaagttcaggaacttcctaaaaagtgttagcattaatgttttattgtcacgcagatggcaactgggtttatgtcttcatatttgtatatttttgtaaattaaaaaaattacaagttttaaatagccaatggctggttatgttttcagaaaacatgattagactaattcattaatggtggcttcaagcttgttccttattggctccagaaaattcacccactttttgtcccttcttaaaaaactggaatgttggcatgcatttgacttcacactctgaagcaacatcctgacagtcatccacatgtacttcaaggaatatcacgttggaatacttttcagagagggaatgaaagaaaggcttgatcattttgcaaggcccacaccacgtggctgagaagtcaactactacaagtttatcacctgcagcgtccaaggcttcctgaaaagcagtcttgctctcgatctgcttcaccatcttggctgctggagtctgacgagcggctgtaaggaccgatggaaatggatccaaagcaccaaaccggacgcgtgggtcgacgatatcccgggaattccggaccggtccag

SEQ ID NO: 124376 - DNA, 791 bp, Homo Sapiens
  misc_feature (44)..(53): n is a, c, g, or t
  misc_feature (206)..(206): n is a, c, g, or t
  misc_feature (208)..(208): n is a, c, g, or t
  misc_feature (211)..(215): n is a, c, g, or t
  misc_feature (217)..(219): n is a, c, g, or t
  misc_feature (222)..(226): n is a, c, g, or t
ttggggattttttttaaaaacccttcgggttccccccggggggnnnnnnnnnngtggggggaattccaacccctttttctttgcccggggttttccttgggaaaaagttttggcccattttccctttcccttaggggccccggggccccaaaggaaatggtttaggaaatttttcgaggggcgaaggcgggccgccaagttttttntnttnnnnntnnnttnnnnnttttaaaaagtgttagcattaatgttttattgtcacgcagatggcaactgggtttatgtcttcatattttatatttttgtaaattaaaaaaattacaagttttaaatagccaatggctggttatattttcagaaaacatgattagactaattcattaatggtggcttcaagcttttccttattggctccagaaaattcacccaccttttgtcccttcttaaaaaactggaatgttggcatgcatttgacttcacactctgaagcaacatcctgacagtcatccacatctacttcaaggaatatcacgttggaatacttttcagagagggaatgaaagaaaggcttgatcattttgcaaggcccacaccacgtggctgagaagtcaactactacaagtttatcacctgcagcgtccaaggcttcctgaaaagcagtcttgctctcgatctgcttcaccatcttggctgctggagtctgacgagcgcgctgtaaggaccgatggaaatggatccaaagccggacgcgtgggtcgacgatatcccgggaattccggaccggtaccagc

SEQ ID NO: 124377 - DNA, 917 bp, Homo Sapiens
  misc_feature (227)..(236): n is a, c, g, or t
  misc_feature (454)..(462): n is a, c, g, or t
gtaggtgggcggaggctaggtcgtgcaaccttaatgtgtagttcggaacgcgcgagtatcagcaataggagagggacggggtgttaagaggtacacgttctgaagtgcggtattagtaggcggaaatgagacggaacagacgatgatagaaatggaactaggtggtatgtttagccggggggcaaaagtgtagagcatgtgttcggttagtcggtattgaaccagtnnnnnnnnnntgtatttggtgcgccgcgtcatgtctgggggaccaggtttaggggagttagctactgttttaggaatgtgggtagacaggggcccctcgcggagttcaggggtgtatattgggggcgaggcgtgttgtgttaccattaaatgttttaattgttgccgccagatgggccaactggggtttaaggtttttccaataatatttatattttaggtaaaattnnnnnnnnnttagccaagtttttaaaataagcccaatgggctgggttatattttccagaaaaacatgattaggctaattcattaatggtggcttcaagcttttccttaattggctccagaaaattcacccaccttttgtcccttttttaaaaaactgggaatgttggcatgcatttgacttcacactctgaagcaacatcctgacagtcatccacatctacttcaaggaatatcacgttggaatacttttcagagagggaatgaaagaaaggcttgatcattttgcaaggcccacaccacgtggctgagaagtcaactactacaagtttatcacctgcagcgtccaaggcttcctgaaaagcagtcttgctctcgatctgcttcaccatcttggctgctggagtctgacgagcggctgtaaggaccgatggaaatggatccaaagcaccaaacagagcttcccc

SEQ ID NO: 124378 - DNA, 802 bp, Homo Sapiens
  misc_feature (41)..(59): n is a, c, g, or t
  misc_feature (68)..(68): n is a, c, g, or t
  misc_feature (70)..(93): n is a, c, g, or t
  misc_feature (95)..(102): n is a, c, g, or t
  misc_feature (104)..(104): n is a, c, g, or t
  misc_feature (107)..(133): n is a, c, g, or t
  misc_feature (135)..(238): n is a, c, g, or t
cccccccacaccaaaggtgtttttaaaaaaatatttttttnnnnnnnnnnnnnnnnnnncgcacaaanannnnnnnnnnnnnnnnnnnnnnnntnnnnnnnngnggnnnnnnnnnnnnnnnnnnnnnnnnnnntnnnnnnnnnnnnnnnnnnnnnnnnnnnnnnnnnnnnnnnnnnnnnnnnnnnnnnnnnnnnnnnnnnnnnnnnnnnnnnnnnnnnnnnnnnnnnnnnnnnnnnnntttttaaaaagtgttagcattaatgttttattgtcacgcagatggcaactgggtttatgtcttcatattttatatttttgtaaattaaaaaaattacaagttttaaatagccaatggctggttatattttcagaaaacatgattagactaattcatcaatggtggcttcaagcttttccttattggctccagaaaattcacccaccttttgtcccttcttaaaaaactggaatgttggcatgcatttgacttcacactctgaagcaacatcctgacagtcatccacatctacttcaaggaatatcacgttggaatacttttcagagagggaatgaaagaaaggcttgatcattttgcaaggcccacaccacgtggctgagaagtcaactactacaagtttatcacctgcagcgtccaaggcttcctgaaaagcagtcttgctctcgatctgcttcaccatcttggctgctggagtctgacgagcggctgtaaggaccgatggaaatggatccaaagcaccaaacagagcttcaagactcgctgcttgctctctccctttatccc

SEQ ID NO: 124379 - DNA, 799 bp, Homo Sapiens
  misc_feature (55)..(74): n is a, c, g, or t
agctaaaattaaccctcaactaaagggaataagcttgcggccgcggctgtaggcnnnnnnnnnnnnnnnnnnnnaattttagaaacaaatatatatttttgatagaaactgtaagtaaatattcagtactaccagaaatatactatcttcaactctcggcttttttccaaaagatacagaatcattttttggaaaagatacaagatgtacagacaaatcacattcataccttacaatttaaattcataatgaacaatgaatattttcatattttccagaagtttgaaatttcaaagttgttagcaaaattattcatttccataatttttacgagtaaaaatagaaagagctgatcatgtaccttaatattgtcactttatatattactcaaaagtacaaataaccctaaaagtagaatcccaggcttatcatattataaaaatactgagacatttatcaaacataactaatataaatgaaactacatttttaaaaatgtttcacaaacaccagtccatctttctctttggttcagaaaataaaagaggtaggttcaaataaagaaaatgcctattacatcattagattttcattaaaatgctggcaatttataacagaaattattagaagtgaaatgagtttaagaactaaattaaaaactgataataacttcaactagtaaatatttttctaagttctaatcacacaaataagaaaagatagttgactataaaaatggctttagtaaaataaaaaatgctctcattattataaattaagtctcctatatcctaacatg

SEQ ID NO: 124380 - DNA, 1629 bp, Homo Sapiens
  misc_feature (797)..(805): n is a, c, g, or t
ggcacgaggttttagcatcactgttttaatttcatgaaatacaagtacaaaacattgtataagtatactttttactacatggagatgaactaatacatttatgtttttatcagaatctgtatcacccagcgctggtcaatgtactagtagctttccacagggattttttatactattcctataaggttttatcatgaataaaaaagctcacaactcttttcagccattgcagattcacatttatcttaatattcctgttcaagatgctctggagaactgttaagaactacaaaatcaccttaggcagagttttgaatgagtaattttatttcacgttggccaagatctcccttatgttggcattgcaaagacactgcacttatctgaggttagaaaaaatgtagtcttaatagccctcttaatgtgtagcaaggcaaattaccatttcctaaaatgtccagaatatcatagtagttagttattcgttaagcagtaagtcatgaaactccacttatagaagacaatagcaacagaggaccactaagtcctaaatataccaaagaaaaacaagtttacaaatattcaaactgtctgtcttctctacctctaaaatggtttaaccacatcaagtgagagtaacatcagccgattagaaagggaaaaagtaaactgtgctagcgtccggcattcagcttccatagcatgtctcacagttttcggccatttcagctaagagttttcttatgacaggcaaaaataatgattaaaataccattagctttgctgagaaatgtggnnnnnnnnntcacaatgtcaaaaatatttgaaactaattttgtttttataaataaataaaatggtgtttatcttttcttaaaattcttgctgttaaaacattcaaagttatgtcaacctgtaaggataaaggggtatttaagataacatgtttggaaaactaaaccacatttttaattgccagcattatgctttgttcttggtagagtcatccttgtttcttctttttacatcccaattataaaccctggccatattgacttctgtggtagtaaattgatctcgaagaaagtcaaggtcttcctccagggaatcaagattctttgtggcagtcgataaattcttttccaacaatgcctgagcttcatcaatatcatattcaagcattacattagcccccaaccacagacacactttatcggtaggaggaactgaagctttgcaatacaggttatctgccagcaagaatctggtctccattgagttggtggactcttttttcttctgcatgtattttagaatttccaaagtctgtttaatttcaggaatctgaccttttagccttcttttcttttgagcaaggttgagttccataaacttatacttctggtactgttcatccagcttctttaatactgtatctgcagtctcattcccaggctgtttcatgaaggaatctacatcttccacaaacacggcctcaggaatccccaggtggagccgccgcccattccctgtggccatttctcctttgccacaactgtccttaacggccgccatcttggggatgcgagcgcgcgactgcctcccgggccgccggccgccgggattccc

SEQ ID NO: 124381 - DNA, 2844 bp, Homo Sapiens
  misc_feature (698)..(715): n is a, c, g, or t
cggtgtccgcgttttttcccgggcccccccgtgagtggcgcccccccgagcctgggtgtgcccgtctggacggttgcagacggacacatgggaaggggacctaattcagctagtgtgaagtgaatactaagagagagcccgaaagagtttgtggaacggtagaacaagaaagggtagtttcttactggtgggatagacctcctgattcttctaggtcgcgctcttaagatccgaattagaaagattgagccttgagaacgccatatcaccagggaagacattgcttttgcagagaaccagaattttagaaatttgggacatgtttgcaacagaatcacacgtgtgtatcctatctgaatatgagtcaccatcgactaggattcttcttttcacatcccatcgtttgtccccctaatttttcacgttcccttcattctttttcaattggctaccttatgagacttttctttactccttaccatactaagagaaaataccgtttaagattcaaatatgaatctagaatgtaccctttacatgctctaatcctgttttaacacccagtcctggattctggagttatatttaagtatactccagtacccacagccttaagtatgctctactgtgaaaagattggctaatatgcttaggacacttttatactgaaccggtataccaacatccacataccaaannnnnnnnnnnnnnnnnngccagagttaaactaaataacccatgttatgtgtacaaaatcccctttgttgaaaaataaggggctttctaaactaataaaaaaggaagttttcaaaaattatagtttattaaaacaacttttttggcaaacaaagttacttcaggtgaggaaattttatactgtgaataaaattccaaatgaatcttttcttaaaactttttaaaaaattatgtgccagtgtatactaatgctatagattcttgtcttagaagtttttaaagcattctgttaatgcccactgaaacaatgggactccaaaaatatagtcaataatcatgataaaaaattataatatgattatcaagtgaagcaggtattgagaaataaaaattctcacttgctcactggcaatttctttctaacagatattatggagaaggcctgaagtaattcagacagatagctgtttatggtgaattataataatacttcatgagggcagagctaattaaaactagtaattgcttaaaattcaaagccatttctggacatataaaatgagagatgaatctgaaagtttttcttttgtaaaacctctttccagttcttaaagtccagtttgctacatcccccaatctgatctaccattgcatattaatgatcaacttaaatgtggtatttagatgtgcaatgtcacattgttataataataattataaaaagactttatttaggcctcaactttctccttttcttttgttctttttcagaaaagaaggagtgcggaatttcttctttttcttggatggcgattttgaaggggagccttcaggtgacaggacttcttcgattttctctggagacttaatagtaatctcgatgttttctatggttgtacttgtgcttaacctactcactcgcttagcaagctcatcttcaacatcatgcatatcatccttgccatttactaccatgacaggcacttccatggagatgaagctcttggaaaacagctcatggttttcttctaggcgttgtttttcaggttagattgacttcgtaatctcttcattttctcctatggtgatattgaagggaagccttcaggtgacaggactgcttcgatcttctcttcagacttaatagtaatgtcgatgttttctatggttgtacttgtgcttaacctactcactcgcttagcaagctcatcttcaacatcatgcatatcatccttgccatttactaccatgacaggcacttccatggagatgaagctcttggaaaacagctcatggttttcttctaggccttgttgtttacgttcgattgtcctcttatactcttcaagttctccttctgtgagatgactaaatgggttaggaggagctggtgggccatgatcatcatcttcaaattgcatagtagaaggtggcttatccacaacaattccagcaagcaactgagattgtggtcctgctgttttcaagtcatatcgattttgttcccgaatcttatttctcttttctagtacctcattcgggtttgtgtttaaaggaacaaactgatttggatcttcaattttgataggtgttccaccactaactttagatgagtcttctgctttcatccacgtgattttggttcggggactggtttctccgttccgagactcctcaggcacattcactttcatgtaagtatttggtgagttcagccatcttgttttttcacgctgttgcctctgtgccatgtatttgagaggagagagtggcactgtatcgtcttcaaaggaaaaagcagtcacagttgctgggatttccacatcactcttgtgcctaggcttctctcgaatgagaggatgcctgtaagcatagcctgttctataccccaagttgtccagagtcctcataagcccttcaaactcaatttcgccaaccttccatttttgatgggaacccatattcacacctcctccaccagacgctgctacagtgtaagtgaaagctttatacttctgaaagtccagtacatggagattgtctactccacctgcacctgctagggcctgcacctgaatctcacaggctagttgcacattaaaaatataatgaaaagcctcctctaatgtttctccaagtgcaaccacc

SEQ ID NO: 124382 - DNA, 1225 bp, Homo Sapiens
  misc_feature (500)..(500): n is a, c, g, or t
ctgggttgggttttttcatgggtttttgttttgtttatttcgaatactgaaaaatcctttgggctctgtggggttccccacgctcacggctcctttctcccacactcactgcccttcttcccacagcaaatctatttcaaggacagtactttttaaaatgattaatgttgagttctcaactagctctgcagaactagaggagctgtttgcatctgtctgtgcggatggagtttcttttatctgacaccaggtctccaaccacactgaaacaaggcatttatctacagagctcaactagaaccccttttcattaggctactccacttccttcccctcatacctaccccacatcagccacgtggttaagaaggatagtcaggaatgtttttaccaactccaagccctaattcatactcctccatatctcccaccctgcaccctttcaaccgcacccccaccccctagaatttcattgatatttctcccaactgttatttggnaaaaaaggtaaaacacaaaggttcaaggtcttggtgctcagcccaaggggctccatgtgctgggacaccaacaggaaagggcttctgcctctccagcccacacccgagccacctcctgacccctggctgcaaaagcaggaaggggcaggagccagcacaggacccgggtggggcagggaggggaagcgtctcaggatctggcagagccccgggcagcatcattcaacttggccacccgcaagcttgctggtgacgagcgaggactttctctggggcagatcctgtggggtggggatgtgatcaccagtcaccaggttcttgtctggtcctgcacttggcagctgcttattcttcatcttggctttggccatgttgtagtctcctgagtcaaagtacttttgccctttctggagtctcttcatgaggaagtcggagcctccaggcttttgtcctaggcttgggtatttggcctttagctttgcctcttcagctctctcaggcagaataccttctttctcctgcgtgtcctgcttctcctcgccggtctcctccgcagggttctcttcttcttgtttctgggacatggcgggaccgggactgtggagtgtaaggggcccgggaaggcaaccggagaagggaagggggaggggaaacggggacaacctgcgctgctgcttcggctcccctcgtgccgaattcaccacccagcctcgctacctagccta

SEQ ID NO: 124383 - DNA, 1141 bp, Homo Sapiens
  misc_feature (435)..(469): n is a, c, g, or t
  misc_feature (897)..(931): n is a, c, g, or t
  misc_feature (967)..(986): n is a, c, g, or t
  misc_feature (1087)..(1087): n is a, c, g, or t
  misc_feature (1099)..(1099): n is a, c, g, or t
acctactcctccggtagtaaaatgtttgctctaaggtcatgtgccccgttagcgcgggctgtgttcccgccgcgcagcattttgcgcgcgtgtggggtgagccccgtgttggcagccggtgaaggtgtgtgaggtgtctgcccgtgaggcgctttaaatgctccctggggggtgttgtcgccccaattggtgccgcgccccgacatgtaatggtgtgccgctctgcaccatgatttgccgacggcgtcggcccgtgttttcgtccggtcacctgggtcctgttgtttaagacgcgacggcccaggtgcctaggttattatagctggctccctacctgtactggggaccccctctgtacacaagaacatagccgtggttgacgccttaagcttggccccctcgtcaggggcaaattcttctgaggcggccgccccnnnnnnnnnnnnnnnnnnnnnnnnnnnnnnnnnnnctgggttgggttttttcatgggtttttgttttgtttatttcgaatactgaaaaagtcctttgggctctgtggggttccccacgctcacggctcctttctcccacactcactgcccttcttcccacagcaaatctatttcaaggacagtactttttaaaatgattaatgttgagttctcaactagctctgcagaactagaggagctgtttgcatctgtctgtgcggatggagtttcttttatctgacaccaggtctccaaccacactgaaacaaggcatttatctacagagctcaactagaaccccttttcattaggctactccacttccttcccctcatacctaccccacatcagccacgtggttaagaaggatagtcaggaatgtttttaccaactccaagccctaattcatactcctccatatctnnnnnnnnnnnnnnnnnnnnnnnnnnnnnnnnnnngaatttcattgatatttctcccaactgttatttggnnnnnnnnnnnnnnnnnnnnggttcaaggtcttggtgctcagcccaaggggctccatgtgctgggacaccaacaggaaagggcttctgcctctccagcccacacccgagccacctcctganccctggctgcanaagcaggaaggggcaggagccagcacaggacccgggtggggc

SEQ ID NO: 124384 - DNA, 637 bp, Homo Sapiens
  misc_feature (432)..(465): n is a, c, g, or t
  misc_feature (501)..(520): n is a, c, g, or t
tttctgggttgggttttttcatgggtttttgttttgtttatttcgaatactgaaaaagtcctttgggctctgtggggttccccacgctcacggctcctttttcccacactcactgcccttcttcccacagcaaatctatttcaaggacagtactttttaaaatgattaatgttgagttctcaactagctctgcagaactagaggagctgtttgcatctgtctgtgcggatggagtttcttttatctgacaccaggtctccaaccacactgaaacaaggcatttatctacagagctcaactagaaccccttttcattaggctactccacttccttcccctcatacctaccccacatcagccacgtggttaagaaggatagtcaggaatgtttttaccaactccaagccctaattcatactcctccaaatctcnnnnnnnnnnnnnnnnnnnnnnnnnnnnnnnnnngaatttcattgatatttctcccaactgttatttggnnnnnnnnnnnnnnnnnnnnggttcaaggtcttggtgctcagcccaaggggctccatgtgctgggacaccaacaggaaagggcttctgcctctccagcccacacccgagccacctcctgacccctggctgcaaaagc

SEQ ID NO: 124385 - DNA, 875 bp, Homo Sapiens
acatacatttaactctattttacagatgaggaaatagaaatccagagaggctaaatgacttaatcaaggttatacaacagctctgctgggactgagtagagtgagaacccagatatcttgactcctaaaccagtgctcgtcccactatcccatgatactttcaaaagcaacatgctggaagagagagagaaggtgcccattttctgtgaataatgttcatcaatctttatattatttgagagccagagcaaactgtaagagatactaagtaatggaggctaagggggcactgtagttttaggcaagcaagtcaatttttctttttaaggattctctaaacctgccataatggaaacatgaagcaatagcagcctaagggacagaacacttagaagcacagaaaacatgtctcattcaatctacctttcccaactacgttaggttagccttgggatgttaaacctgccaaactattcccaaggctcagcctaatcaattttgggacattctctcccaaaaggagaaatcacatctctccagtttctcacacaaaaaaagcatttgcagcattatccaatcctagcctttcctatttctgggccctacctggactacagggagtgtgtggaagtgtcaatctaacgaaataaataaacttagagccccttttcaacctacattaccttctcagcagcccccagcagaatcacagtcatttctggctagcaagctgagaagatctgactaggtgcccatttcatccctgcctataatatataaacgtccagtggttgaggaaggggaggagaggggggctcaggttaccccgccagttgctggtaactgatcgagacataggggtcctctagatcgaa

SEQ ID NO: 124386 - DNA, 566 bp, Homo Sapiens
tttttcaagttgaggatttatttctgtaggagagatggtttgatcttcttctgaaatgatgcatcccaaaatttatctctaatgcttaaaaagtgcacaatcctaaaacctccaacattcaaacaggcaaatgcctgggggcagtctgcatttcagtttctaacatctttccctcatttccccacacacccaaatgctccaatttaggccttaatttcctacatgggaaatcaggagggaattgataccacatcagggatttacattaatttgacttgctcttttcaaatttcaaattcgcctctccttctgttcaacaacaaaacctccagaaaaggatccagtagaacctctacagacttcattcgaagaacctcctttagctccaaagaaagagggtaagagactatgccccatacccctttctggagtctcttcatgaggaagtcggagcctccaggcttttgtcctaggcttgggtatttggcctttagctttgcctccttagctctctcaggcagaataccttctttctcctgcgtgtcctgcttctccttgccggtttc

SEQ ID NO: 124387 - DNA, 787 bp, Homo Sapiens
gggacgggcaagggccgccattttgactgagcaaccctagtgacaggagccgaagcagcagcgcaggttgtccccgtttcccctcccccttcccttctccggttgccttcccgggccccttacactccacagtcccggtcccgccatgtcccagaaacaagaagaagagaaccctgcggaggagaccggcgaggagaagcaggacacgcaggagaaagaaggtattctgcctgagagagctgaagaggcaaagctaaaggccaaatacccaagcctaggacaaaagcctggaggctccgacttcctcatgaagagactccagaaagggcaaaagtactttgactcaggagactacaacatggccaaagccaagatgaagaataagcagctggcaagtgcaggaccagacaagaacctggtgactggtgatcacatccccaccccacaggatctgctccagagaaagtcctcgctcgtcacgagcaagcttgcggggtaacctgagcccccctctcctccccttcctcaaccactggacgtttatatattataggcagggatgacatgggcacctagtcagatcttctcagcttgctagccagaaatgactgtgattctgctgggggctgctgagaaggtcatgtaggttgacacaggggctctacagttcattcattctcgttagattgacacttccaacacactccctgtagatccaggtagggcctagaaatacgacacggctagcgatgggataatgctgcacatgccttcaccgcgtgacaca

SEQ ID NO: 124388 - DNA, 999 bp, Homo Sapiens
  misc_feature (136)..(136): n is a, c, g, or t
  misc_feature (315)..(315): n is a, c, g, or t
tttttaaagggaaatttctctttaaaaccctggccccattaaatggggaacccatggaagccaattggccagcccttaagggggaccagaacccatttaggaagccaacagaaaacccaggtccccatttcaattntcccttttcccaaactacgtagggttagcccttgggatgttaaccctgccaaaactattccccaaggctcagcctaatcaattttgggacattctctcccaaaaggagaaatcacatctctccagtttctcacacaaaaaaagcatttgcagcattatccaatcctagcctttcctatntctaggccctacctggactacagggagtgtgtggaagtgtcaatctaacgaaataaataaacttagagcccttttcaacctacattaccttctcagcagcccccagcagaatcacagtcatttctggctagcaagctgagaagatctgactaggtgcccatttcatccctgcctataatatataaacgtccagtggttgaggaaggggaggagaggggggctcaggttaccccgcaagcttgctggtgacgagcgaggactttctctggggcagatcctgtggggtggggatgtgatcaccagtcaccaggttcttgtctggtcctgcacttggcagctgcttattcttcatcttggctttggccatgttgtagtctcctgagtcaaagtacttttgccctttctggagtctcttcatgaggaagtcggagcctccaggcttttgtcctaggcttgggtatttggcctttagctttgcctcttcagctctctcaggcagaataccttctttctcctgcgtgtcctgcttctcctcgccggtctcctccgcagggttctcttcttcttgtttctgggacatggcgggaccgggactgtggagtgtaaggggcccgggaaggcaaccggagaagggaagggggaggggaaacggggacaaccctcgtgccgaattcgccacccagg

SEQ ID NO: 124389 - DNA, 766 bp, Homo Sapiens
gtggtttccaccagaggcttttatttcagccactcaggaccctggctttctgctccaaggcactgaacacagtcaggctcttctaaacactggcagggacctcccccacagccacccccacagggttctctgtttcccaagtcctgatggattcaggcaagaccttcacacattcacccactacctgctggagaggagggtcatgaggcagcctgtggtgcccagctcagtgtgacacactgccaatgtgccgcctcccccagcctctgatggggccgggccttgaccacgtgacaggctcaagctgccgtgcacatcccccaggaaaggggaagagctgctaaggtgtagcagtgaccaaacaaataagaaatgctactgtggaggttacacagatgcttatttggtttttaaacaaatccaacacaaaagaaagaaagagggaacagggtgcttgaaggtgggggaggagagggaatctcatctgtaaagtgcttttccagacaccggaacctcctagtctagcctggcacacccatgtcactcagaaaggtcaggctcagggtggagatggcatgcaattcccaacacacttggtattcagagtggacagagctacacagcagccttccctttgtcggggtccatgcaatctacacatggtcgcaaggtctctgcagccacagtctgccggacgcgtgggtcgacgatatcccgggaattccggaccgtaccagcctgctttttagaaccactgttctatata

SEQ ID NO: 124390 - DNA, 723 bp, Homo Sapiens
  misc_feature (649)..(649): n is a, c, g, or t
caagaattcggcacgaggtttgttcacaaaagactttattatctagtgatgcatactgagaacatacagaaatctgcatggtccacttcacatgcagtagaacaatcttcactttacaataagtgagtgtcaactgttttatgcaatagacaacactttaaagtcacattcttaaagaaaagcttcatttacaaaagaaataaaaggtaaagaagcaattaccgcttttaaaaagcagctgctttgttcaagagtggaaggtttatgcctgtattgaaagacaacatgatcacaaataatgaaaacaatgaacaaatgaaaaacacttttaccataaagcagtacactttcaaaatgacatacaaatagttaaaaatttcattacgttgtctagcctttaaatatgaggactttcagaattaggcctcaacatttgtaattagtaaatgaaaactacgcatcgtttctatgtcactaggaactatatttaacaaaatgtatataaagtctatagcaagttgatttaaaaaaagtaaagttaataagaaacagtacactgaaggcgctctatccatcaagcgcgttctcttccaattttaaatgtgatgaacaaacagaaattgtaactatgccacagttgcaatgccanaaaataaaacaagatcagttatcacacatgcagggaattctgccacaaagctaacatccctcatttgtcagttg

SEQ ID NO: 124391 - DNA, 705 bp, Homo Sapiens
  misc_feature (339)..(455): n is a, c, g, or t
ttttatgtaatcaatcattttattattttcatcaacaaccaacacagcaacacaaattgacagccagtcctcaagggaaccttttttgaagtgaagagcaaggccctgaatgagctacctacatggaacatagtatttgcaatatgcaaatggagacctaaaggctcatgacgggaacagaaggtggctgtatacagaggaacagacacgaagtggagttatgggaagttcaatcaacaattggcaacaagctaggtcagtagtttacgaaagtggtcatctatacagtgcctgagtttgggttctgggcctggatcatgtaagaaaggcagcaaagtnnnnnnnnnnnnnnnnnnnnnnnnnnnnnnnnnnnnnnnnnnnnnnnnnnnnnnnnnnnnnnnnnnnnnnnnnnnnnnnnnnnnnnnnnnnnnnnnnnnnnnnnnnnnnnnnnnnnnaaaaacaaaagggcaggtagattccagataaataatgttgcaggaagggggtgataaaatacagaaatgtgatacacagcaaaccctcaactgctgtttcattggctcccagtgtcttaatctgtgtctgctaacactttaaggtacatctgaaataccccccaaacccagaaagcttttcaacagctaggttgtccaagaacttggaaaattcaccttctgatgtcctccaagacagattccatttttt

SEQ ID NO: 124392 - DNA, 729 bp, Homo Sapiens
  misc_feature (340)..(456): n is a, c, g, or t
tttctatgtaatcaatcattttattattttcatcaacaaccaacacagcaacacaaattgacagccagtcctcaagggaaccttttttgaagtgaagagcaaggccctgaatgagctacctacatggaacatagtatttgcaatatgcaaatggagacctaaaggctcatgacaggaacagaaggtggctgtatacagaggaacagacacgaagtggagttatgggaagttcaatcaacaattggcaacaagctaggtcagtagtttacgaaagtggtcatctatacagtgcctgagtttgggttctgggcctggatcatgtaagaaaggcagcaaagtnnnnnnnnnnnnnnnnnnnnnnnnnnnnnnnnnnnnnnnnnnnnnnnnnnnnnnnnnnnnnnnnnnnnnnnnnnnnnnnnnnnnnnnnnnnnnnnnnnnnnnnnnnnnnnnnnnnnnaaaaacaaaagggcaggtagattccagataaataatgttgcaggaagggggtgataaaatacagaaatgtgatacacagcaaaccctcaactgctgtttcattggctcccagtgtcttaatctgtgtctgctaacactttaaggtacatctgaaataccccccaaacccagaaagcttttcaacagctaggttgtccaagaacttggaaaattcaccttctgatgtcctccaagacagattccattttttatacaccttatttgctcagacct

SEQ ID NO: 124393 - DNA, 517 bp, Homo Sapiens
gctgtgcgagtttgacgcggtgctggccgacttcgcgtcgcccttccacgagcgccacttccactacgaggagcacctggagcgcatgaagcggcgcagcagcgccagtgtcagcgacagcagcggcttcagcgactcggagagtaagtgcggcccccgctaggatggcgccgggatctcccagctcccaggacctgccccgcgaaggctgcggcctcagttttcttatcagtaaactgaggaatggtttcctgaagctcaacgcagtaggccgagtggtggcggggcccctgacgataatcacgggaaaggtcgctggagggcaggttggttcacttgccgcccacgggtgtgtcaccaggcaggcgagtttaagcagcttgtcccgactcagccagacaggactccctggacctgcaccaggcctttccgcagtttccctcctcttctcctttccgtgcctctcccctctcagctgtaactttgcagatgtggaacaagtgccagtggaatgagg

SEQ ID NO: 124394 - DNA, 1000 bp, Homo Sapiens
tttcagacttcagttcaaattttatttgtatacaaaaatatattataatgggaaagcttactgctatttccaactatatataattaattacaaatattttcataaaagcactttaaattacaggaaagctatgttttaagagaaaatacaatattagcatggatcgtctgttctaatatgctgcaagcaggtaaacaaagtcagtttcactgtctaaattgcccagaaatgggatcaagggctgattttaaggtgagcctgagagtggcctggtagaaggttgagtgcacgtctttgtcccctctggcagcagattctagtagctgattttagcaggtcctcggaactttctgaagcttctcccttatgatgaaaggacccagaacttcttgtttcacatacttgctaaagttttgtcaagatcagcaatgaaggcttctagctcttttgtgtctcctaatttagctttctgaggagtgacagtggcagagagaagagctggggtagagtctgttggagaattcagtttttcatcactgaagctgaagctgttcctataaagtgaatctgcactctccgagtcgctgaagccgctgctgtcgctgacactggcgctgctgcgccgcttcatgcgctccaggtgctcctcgtagtggaagtggcgctcgtggaagggcgacgcgaagtcggccagcaccgcgtcaaactcgcacagcgcgtccgacaggtcctccgcggccgccgagtccagggccggggctgcggccgcggcggccgcggggctgccctgcgccgcgggcggcttcatgaggcggctcagctgggcccggcgcgcgtggccttgggtcctgcgaggtggcagccggggctattcgggggcttgctgtcccgcacacttcagccctgccagtcccttcggcgctgcgctccagccgcgccgctcccagcacggtccgcgcccgccctaccaccggctcgtgttcctagatcttatagcctt

SEQ ID NO: 124395 - DNA, 972 bp, Homo Sapiens
  misc_feature (112)..(112): n is a, c, g, or t
  misc_feature (114)..(114): n is a, c, g, or t
  misc_feature (116)..(116): n is a, c, g, or t
  misc_feature (128)..(128): n is a, c, g, or t
  misc_feature (139)..(140): n is a, c, g, or t
  misc_feature (154)..(154): n is a, c, g, or t
  misc_feature (166)..(166): n is a, c, g, or t
  misc_feature (177)..(177): n is a, c, g, or t
  misc_feature (194)..(194): n is a, c, g, or t
  misc_feature (196)..(196): n is a, c, g, or t
  misc_feature (206)..(206): n is a, c, g, or t
  misc_feature (253)..(253): n is a, c, g, or t
  misc_feature (259)..(259): n is a, c, g, or t
  misc_feature (286)..(286): n is a, c, g, or t
  misc_feature (308)..(308): n is a, c, g, or t
tacgtctacttcggggttttacgagagggtccccacggagacaacaaattttccggttgccaaaagacccctagaccacagagtgcaagttgacaacacgatgaccacagcntntntgggagagcccnacatcattttnnaggagtaattttcntacctgtgcggntgacctggacntccgacaccaaatgtcntntgtgccagcntccatgatgcgttcgctctgccatgagcttgcccagcccacaagccnctcccntggctttcccaggcagggagaatgggnagaggacctccttgtgtctgcnagagacctgtgacctgcctcccccactcccagtgtcttgcactgcaggccttggggccagcccgcacacaccatgcctcctgtctcaacactgacagctgtgcctagccccggatgccagcacctgccaggtgccgccccggggcaagggccccagcagccctatggtgaccgccacactgtgccttaatgtctgccgggggcccaggctgtgctgtccctgcagcacgcctccttgcagggatttgagccaccctccccgcacagccctgcaccccgcccctagggttggcagcctcagttggcccctggcagaggaacaaggacacagacattccctcagtgtggggggcaggggacacagggagaggatggttgtccctggggagggccctctggccccaggcaaccttagcccctcagaacagggagtcccaggacccagggagagtgtggggacaggacagcctgtctcttgtagcttcctggggtgggaggcacaggggcaaagcaataccccagggaaagtgggaggtggtgctggtgctctctccaggcccaccatgctgggagaggcggccagagcctggggcctccagcctgggactgctgtgatggggtatcacggtgatggtcccattaaacttccactctgcaaacctgaa

SEQ ID NO: 124396 - DNA, 1952 bp, Homo Sapiens
  misc_feature (588)..(875): n is a, c, g, or t
aatattctagcgcgtggctcgttctcgctcgccaacagcggtggtgggcgcggcctgtctcttgcgcgggagtaatatcggggcggggagacagggggttgagtagatgttgatgtcagtatgttgccctcgcgtgatggtttctttcactcagaggaattattatggtatattagggtgggcacacacaaatgccctctgggtgtgtttcgttttccccacgggttttttacttatcggggcggtggatgcgttatatcgcgggcggggtgttttcttacagcgcccgatttttttcccggcgcgtagtggtacacagttttttatatcaccgcaacagttttgtgccagggggggtggggtggaatttccgcgtggggagggaattctctagagtttgacttcaccccccgccttctggtggagaggggtgtgtaaatgagggcgggcgagaaaaacctttatatagagtgtgaggccgggattggcgacttttcttggccagggggccgggctattaaattggtagaaaaaccccccccgggggaagtccctcgcggagagggtgcccggctaaccgcctcatgnnnnnnnnnnnnnnnnnnnnnnnnnnnnnnnnnnnnnnnnnnnnnnnnnnnnnnnnnnnnnnnnnnnnnnnnnnnnnnnnnnnnnnnnnnnnnnnnnnnnnnnnnnnnnnnnnnnnnnnnnnnnnnnnnnnnnnnnnnnnnnnnnnnnnnnnnnnnnnnnnnnnnnnnnnnnnnnnnnnnnnnnnnnnnnnnnnnnnnnnnnnnnnnnnnnnnnnnnnnnnnnnnnnnnnnnnnnnnnnnnnnnnnnnnnnnnnnnnnnnnnnnnnnnnnnnnnnnnnnnnnnnnnnnaaaacaaatatttttaattaaattttcaaacatgaaagtataaacgttaatatttgttgaaaaatatatacggcatttcccccgtgtgaacacaatggcttccggtaacactacccacttacaatgagatcttttaggcacttgggtgtagaatgtgcgagagggaaatgcaactttactttcctgctacctataggggcaaccacaattagatctcatgaaatattgttttcaacactgttagcattaacaccgacttaaaacatacggtgaccggacatataacctttaaagtcccagtatatttaaaacaggagaaatctggtaagttgttaggattctaaattccttttagtctgttcactgagatattaaatttcagtagacagaacccaaaaagagatttcatttctttctaatcactttggcttctttcttttttgttaagtaggtaaaaaccttcttggtgggcacctaagcaggatgcagccaatagttcatgaaccagctgcgcacgtgaggcttaaaatctaagatgctgctgaagtggctgcgggaggagcggctgcgacttacttttaatttcaaatcagctgcagatgtttgggagccctcttgatgaacagaacaaatcacataacatgcagaatccactcagaggctgttattccagggaaagagcgggcaggtgtcctgaggagtacattcttgctgtcacagtctcactgctggcacagaggtgccttgtttatgagatttaaaggccacaaactctggctcaggtggggacaagggtgtgccgtggctgaaaccagcgtggtcactgtgtggctggcacggcctgcacatgctgcaggagctgctcgcagtaggtggccgagcggtgcttgtggatgacggcctccgtctccctcaccaggagatctgggaacagcccgctgccctctttgaggacctctaaaattgcatcctggatggccctctctggatcgtcaaggtgaaccagcaactctcggtacaggtactggacactgctctgatagtaggattttgcgttggcacccttgacacactgca

SEQ ID NO: 124397 - DNA, 853 bp, Homo Sapiens
agtgaataaatatattacatttttatttgggagaaccaattaacagcagctggctaaatgtaactcacccaggacagaaggggaagtggaggggggtggtctgtgtgtggatggaggtgggacagtggctaaggagagtcaggtgttccctcccccaattcatttagcagccccagaactttccgattttaactttaatgaaactttaagtacataaataaccactctttcctgccctggttgaggccgcgctgggtccgggaaatatctgctttccaacggggcacctgggtgggagccttccaagaacttcagctcagcggttcccagcaagggttcgctgagtctctgtcctaggaggtccgagctgggtatgctgtgcggacgcagacactgcgggaaggaaacaggtgtcccgcggcggccaaaccttcgggcagcagcccaggtcgccttgctcaccccaggcggtctcatggcacgggcctctcgaaactgtgggcaagaaagggtcctcgtgagaactaggctcagaagaagagcgggggcggcgccacctcggggggagcggaccaggctggggccgcaagggcggcgtccggggccgcgtgggcggcttcgccgtgaatgagctggtgccgcaccaggtgggtcttgcggctgaagctctttccgcactgcgggcaggagaaggggcgggagcctgtgtggatcgcctggtggcggactaggttggttttggagctgaagctgcgggcgcagacggcgcaggcgtgggggcggctgccagtgtgcaccgcctggtggcggcccaggtgcgacttgcggctgaagcggcggccgcaagcttatc

SEQ ID NO: 124398 - DNA, 1439 bp, Homo Sapiens
  misc_feature (1211)..(1211): n is a, c, g, or t
gccagagatggccccccaaagtgagcccatggaaggatcccataatgcccaggagcagatgtcctcttctagggaagagagagcactgggggtgtgctcagggcacgaggcccctacaccggaggaaggtgcccacacagaacaagccgaggctccctgcagaggccaggcgtgctcagcacagaaggctcagcctgtgggtacctgcccaggagaggagtggatgattcggaaggtgaaggtggaggacgaagatcaggaggcagaagaggaggtcgaatggccccagcatctatcgttacttcccagcccctttcccgcgcctgacctggggcatctggctgccgcgtacaaactggagccaggggccccgggggcactgagtgggctcgcgctgtctgggtggggtccgatgccggagaagccctacggctgcggggagtgtgagcggcgcttccgggaccagctgacgttgcgactgcaccagcggctgcaccggggcgagggcccctgcgcctgcccggactgcggccgcagcttcacgcagcgcgcccacatgctactgcatcagcgcagccaccgcggcgagcggcctttcccgtgctccgagtgcgacaagcgcttcagcaagaaggcccatctgacccgccacctgcgcacgcacacgggcgagcggccctacccgtgcgcggagtgcggcaagcgcttcagccagaagatccacctgggctcgcaccaaaagacccacaccggcgagcggcccttcccctgcacggaatgcgagaagcgctttcgcaagaagacgcacttgattcggcaccagcgcatccatacgggcgagaggccctaccagtgcgcacagtgcgcacgcagcttcacgcacaagcagcattttggtgcggcaccaaagggtgctaccagacggccggcccggccaggccctctcccgactcgtccgcttctcctcattccactgccccgtccccgaccccatcctttcccgggccaaagcctttcgcgtgctccgactgcggcttgagcttcggctggaaaaagaacctcgccacgcaccagtgtctgcaccgcagcgagggtcgccccctttgggtgcgatgagtgcgcactgggcgccaccgtggatgcccccgccgccaagcccctggccagcgcgcctggcggaccggggctgcggcccaggatcccgatcccgntggtgcccccagcgcgccccctcgggcgagcggtccttcttctgcccggactgcgggcgcggcttctcccatgggcagcacctggcgcggcacccgcgcgtgcacacgggcgaacggcccttcgcctgcacgcagtgtgaccgccgcttcggctcgcggcctaatctgatcgcccactccagggcccacagcggcgccaggcctttcgcctgcgctcagtgcggccgc

SEQ ID NO: 124399 - DNA, 2410 bp, Homo Sapiens
ttttttttctcttcaaatatttaatcagtttggagacctctgcattccaatccaattgggtaaaaattctaaagaaagcaagattaaggggtcctcaaagaaaacactgggctaaaatggagaggagactgggtttgggaagacagaacatagcatgtgtctgaaggcctttcgaaggaattctacgacatattttttaaaaatactcaaaatgaacaagacagaattaaaccgttatacaaatttaaggacaactgaaacttcttttatggttgaaaataccaggcatggttttgaaacacattctctaaaaacccttcgatcctgctgtggtttgtttacatagccttctctgtgtacgcaaaaagcaaactagctactcccagggttccccgccagctcccgggtctttgcaaagcagtaacacagtgagagaaggagtggaagaggtgaagaagtgacagcaagctgttcacagtctttgaacatagactcagacccccgcaaacctaatctattttctttgaaaatagtggaaataaactgaaggccttgaaaattcaccaacaatcttctatcaggggagcaatgataatactttttgataactgtgtcataggaactgggggtggcaagtcctgcagggtgacaggtctgcaatagtacaggtgagagtcaggaagtcggggctgactcttcggggaaacgttcagcaggaaatgcctaacgtctgtgtcgctctcattctctctgttatttcctctcttctcctgtcccttggtgccaatgagaggcagcgtcggaggctccagcccgaggctcagaatgggtactgcgacacatatatccgcagtcggatcacggagctgcctctgaagttgatgacagtgttgacagtgatcatttccaagtccagctggatttcccggggccctttgatggggcgtgtcatcaccagggtggcactgatggggcccgtttgccgcatgtaaaattctctgccctcattcccagatttgatctggaaaatgtaataggccccagggtagcgggtcgtggcttgcatttggaagatgtcagcgggaacggagcgtcctgacaccacgtccatgtcccggtacaagatggtaaagggctggtctctgcagccagggttctcagcaggacacatacagcggttatcactgatcctcagataaggctcctcacagcggatggggtcgatgcatttgaagcccccttgtaaattgtagcacgtctgctgcaggttgcacgtgtggttcctgtgctcacattcgttgatgtcttggcagcttcggttgtcatccagcaggatgtagcctggagggcaggagcagaagtatgtgccgggctggttcacacactcatgttggcagaggaactcagagaagctgcactcgtccatatcactgcaatgaacgccatcttcctcaagttcatatcctgggtcacagcggcagatgaaagagccgtaggtgttgacgcaggtttgcacgcaggggttctcggtggcacactcgttcacatcttggcaagaccttccatcctcattgagggtaaaaccagggttgcatgtacaagaataggatccaggaacattcgcacagagctgctggcagtaaccatagcgacattcatcaatgtctaagcactggccttccagaagccaatatccgtcggtgcaggagcaggtgtacccgccttcagtattgatgcagatctgggtggggttgcactggtgggaatctgttgcacactcgtccacatccacacattggttgctttcatccatctggtatccaaagcggcatataagaggcctggagatcgtgggatagtttggagctgagagtggtggggcagctgctgggtacggacctgagtagggggtcgagtaggggttcgagtagggccctcgatacacagggtttgtccggggaatgcataaatacccgccattttggttaacacacatcatgtctcctcggcaggcctcggggatggttcggcattcatcaatatctaaacactgtcctgactggcgatccaggtcaaagccattcgtgcactgtgcctgtgcattcccagggcttggaagacagagagccagaatggtaacagtgagtatcctttttattcctggcatgtccaagacgcgcgaggaggagatgcgaaggcgagaagaaagctcgcgggcgggacccccggaggagctcgggcacgtcggcctcctctgggccctcggggctcgcgggtgttttattccagaggggccgagcgagtcgtggagaggacacggggagagcgccggggtcctcccagccactgcagagccctcagcgcaagcacctggtttgctcggcgcgccgtcgacttcatactctctccc

SEQ ID NO: 124400 - DNA, 704 bp, Homo Sapiens
gtagagacgaggttttaccatgttgcccatgtgggatattttgtatacatttcaaaaggcaactacaaaaattggtttttcatatttctacaaatattttatggaatgtttaatatcttgtaaatgtggaagctgtgacaaatttttgtatttagaaagtatgacaatctgaaaatcaacattttacagaagtgacaccattctgttgaaactggagtatactgcacttatatatcattatttctaatatacacctagttattagagaaattagtgcactaaaggacagtggtggtttttaaaaatgatttcttcactgtggcaagtttgtcctcctctgtccaaagcaacaattgaaccaacaggcccttctaatcttatgccagcaacacaatgggatcgaggccaggttcttgtgcaatttgtgaaacctttggtttgcagagttgttagcgtagtggctcggctcatcagctctgagcatttgaatatctaatgtttcaaactgttagtcctgttctgatttatattcatccctgccattcctattaacttaattacacctgcccacaacttaatttacttgcctttgttactacagtttgaactccagctacatttttctaagaaattaaattgctaggtttttatagctgactgcactcttagaacttctctacagactttatgatctttttggactt

SEQ ID NO: 124401 - DNA, 1848 bp, Homo Sapiens
  misc_feature (101)..(101): n is a, c, g, or t
  misc_feature (105)..(105): n is a, c, g, or t
  misc_feature (165)..(165): n is a, c, g, or t
  misc_feature (173)..(173): n is a, c, g, or t
  misc_feature (212)..(212): n is a, c, g, or t
  misc_feature (245)..(245): n is a, c, g, or t
  misc_feature (270)..(270): n is a, c, g, or t
  misc_feature (1035)..(1153): n is a, c, g, or t
  misc_feature (1156)..(1156): n is a, c, g, or t
  misc_feature (1158)..(1159): n is a, c, g, or t
  misc_feature (1175)..(1191): n is a, c, g, or t
  misc_feature (1197)..(1197): n is a, c, g, or t
  misc_feature (1212)..(1232): n is a, c, g, or t
  misc_feature (1286)..(1344): n is a, c, g, or t
  misc_feature (1361)..(1371): n is a, c, g, or t
  misc_feature (1463)..(1471): n is a, c, g, or t
  misc_feature (1574)..(1574): n is a, c, g, or t
ttgtccaaccagcgttgttgtgacagccaccagattagatttggcccccccaatttaaggggcatgggagaaacagggtgaaggaccagggcaatactcanaagnaagatggctcagaaaaggaggctgctggggagtgagggcagcttagttggggagggtagnaacgccgnttcctgggaactggagtgcagtatgagctgggtgtcacnttgctcttaacatactggctttgctgtaatgcnttgaaaaagcgttggtatcttcatnttacagtttcattaacccaagtacgtttctattttaaatgacaactttgtgcttaaaaatgagtaccactttttaaagctagctgtgtcgagttaaagaaaaaatcagcagttttttctcccagaaatgtaattgccaaacactattcatccccatcttaagttttacaaggtgatgtaatcagcttgttgtagtgatgctggccaaatggtgctcagcaggtgagaacaaaaaaaccccagatttcagtgaactaatacacagcttgagcgtttccatgtgctaatgttgcacacttactaaaaaactttggaaatggaaaataatgtattagtgcaacagttgatgtgcttctttgggcaaagatatagttttgttccacaatttgtacttaaaagcgaaagaacattgaaaacatagacttactggctgtagcaatgctggcctgttaactgataactagaacttaggttcacgtttatgtaaagtgtgtaaaacctagtagagcttgcatagtcggcactcagtaaatgtttggttccttttgccccttggtaagtttattttaccatcctcccacctgccattctgactttattaaatcaacatgtggaccagagtgttaatgagatgttattgcagaagagattgagaaaattggtatatcatgcagataacatacaaaatctttttgtaacgtaaaaaatgcagttttattattgcttgtgcctcaactgtttaagtgaatattaaagggcttggagnnnnnnnnnnnnnnnnnnnnnnnnnnnnnnnnnnnnnnnnnnnnnnnnnnnnnnnnnnnnnnnnnnnnnnnnnnnnnnnnnnnnnnnnnnnnnnnnnnnnnnnnnnnnnnnnnnnnnnntgngnnccccccaaacccaccnnnnnnnnnnnnnnnnnctttcntttacgcaaccgggnnnnnnnnnnnnnnnnnnnnnggaaaaattatttatttctttgggcattgggggggcggcgccccaggagcctgnnnnnnnnnnnnnnnnnnnnnnnnnnnnnnnnnnnnnnnnnnnnnnnnnnnnnnnnnnnttctgagtttcccctcnnnnnnnnnnntacgcggggctggtcaccaagagggttttcccaaaacaaaccccaaaaatggtaatttttgggggccccctttttggtgatatttttttacnnnnnnnnnggtggggggaaaatcttcttttatatatattattttcacagccgcgggcggcggcgccttttttttatccggagaaggggggggtggaacattttatatttanccaacctctcctcgcgcccaccccgcgggaggacaccccttcctccaccacaaaaaagaattatttttgccacccagtggagagaacccccacaggggggcggagaaaaaacacacctgtgggctcctttttgtgggagacattttattattttctccccaaacggctggggaaaaaaacagcgccccaacaagaaaatatctgcttctctcattttctaacaaccaccatctttttttctacattataaaacgctcgtgtgaaagaggcacaa

SEQ ID NO: 124402 - DNA, 918 bp, Homo Sapiens
acggttaaccaaaaaagaattttgggtaaggttattcggcaaggataatacccaaattttcttcaaatctccttctggcaataaccattttcatttaacacttttggttccacatgttgatttaataaagtcagaaatggcaggtgggaaggatgtaaaaataaacttaccaaggggcaaaaggaaccaaacatttactgagtgccgactatgcaagctctactaggttttacacactttacataaacgtgaacctaagttctagttatcagttaacaggccagcattgctacagccagtaagtctatgttttcaatgttctttcgcttttaagtacaaattgtggaacaaaactatatctttgcccaaagaagcacatcaactgttgcactaatacattattttccatttccaaagttttttagtaagtgtgcaacattagcacatggaaacgctcaagctgtgtattagttcactgaaatctggggtttttttgttctcacctgctgagcaccatttggccagcatcactacaacaagctgattacatcaccttgtaaaacttaagatggggatgaatagtgtttggcaattacatttctgggagaaaaaactgctgattttttctttaactcgacacagctagctttaaaaagtggtacctcattttaaagcaccaaagttgtcatttaaataagaaaacgtacttgggttaatgaactgtaaaatgaagataccaacgccttttcaagcattacagcaaagccagtatgttcagagccaagtgacacccagctcatactgcactccagttcccaaggaaacggcgtttctaccctccccaaacttaagctgcccctcactcctccagccagccctcctttttctgagcccattctttccttgctgagcggccgc

SEQ ID NO: 124403 - DNA, 834 bp, Homo Sapiens
ggtgaagctaggtttagatgactcgaagggatcttggcctcttatgctgatcaccctcaagttctaggaggattttaattgtcggatttgcaaggcgcctcagcatgatatcataaggctcgtgacattctgaatcaggcgactgactcaaacgaagaaacctgaaaggttttgaccaggttgattattgaatatagtaacatttttttaattaaacaaaattgtaaaatacacctgtacaattaacattcaagtttatagaaaaacactagtttctgccttgctaataaaagaattacttgattaactagaataccaaccattcctttattaaaataaatacctgcttcttcttcgccggctgtaacgatgacaatcataagcataatgtcccttttcgccacactcatagcatctatcatttggatcaaagggacgtcgggcaggtggtctatcaaaacgtgatctccgaggcatgcctgtcgatagttcaaccctcactcgggagccacaaatcacctttccatccagtcctcgtactgcatcttctgcatctctaggatcttcgaattccacaaaggcaaatcctggaggatttctcgcaatccatacagttcttaaaggaccataataactgaaagccctttctaactctcctttgccagcgccagttcccaggttaccaacatacaccttggtttctcctccgtaccgcccgtaacgcgacatgatgacagacccgcgtgctcggctctttagcaagcagcgcccagggctcgagtgacgcaaaagctgacacacaccttcacccgccaagagtcccggcggcactac

SEQ ID NO: 124404 - DNA, 1230 bp, Homo Sapiens
  misc_feature (1116)..(1150): n is a, c, g, or t
tttttcttttttgaaacattttatttaaatgtgccaaataaaaacccacattttcagaccatatgatgttaatacattcaacaaaatttatattatcttactgctgtgaatttacatagtaatccagatccattttgattagatggttgaattatctttcctaggttacactttacagacatcacaaatcccttataataatgtaaacaaaataacttttccctaaagggtgaacttgagagcttcagtccattctttcaggacttgcacttctgcgaggacttcctgatggggaacgacttctttttggagatggagatctggactttgatcggctgcttcttggtcgtgaaatagacctggatcttgatcttgacctcgacggggattggaaatacctcgatccttttatagaaccagacctagatcttctgagtgaagctgatcttgatctacgaagagagatagatcttgatcgtcgaggagatgctgaccttgaccttcgtcccctgctcctgctgcgtgagcgagagtatcgccttcctctggatcgagaatgtgatctagaccgtgacctgcttcttcttcgccggctgtaacgatgacaatcataagcataatgtcccttttcgccacactcatagcatctatcatttggatcaaagggacgtcgggcaggtggtctatcaaaacgtgatctccgaggcatgcctgtcgatagttcaaccctcactcgggagccacaaatcacctttccatccagtcctcgtactgcatcttctgcatctctaggatcttcgaattccacaaaggcaaatcctggaggatttctcgcaatccatacagttcttaaaggaccataataactgaaagccctttctaactctcctttgccagcgccagttcccaggttaccaacatacaccttggtttctcctccgtaccgcccgtaacgcgacatgatgacagacccgcgtgctcggctctttagcaagcagcgcccagggctcgagtgacgcaaaagctgacacacaccttcacccgccaagagtcccggcggcactccccggccgtaatggccgaattcccgggcatatgtccggtaccgtcgactgnnnnnnnnnnnnnnnnnnnnnnnnnnnnnnnnnnncggccgcttcctcgctcaatgactcgctgcgctcgtcgttcgctatgagaggggcgcctatagtgatcttacagtactgg

SEQ ID NO: 124405 - DNA, 1082 bp, Homo Sapiens
tttaactacctaaaaaaagatttgttaaaagctgaattacaacttagcattacataatataaaacactgtaatgtgtatttaaaataaaccttgcaagtttgcaggtcgaccctctttggcccatggtctagtagatctagacgatctagaagtatctatagccgatcgctgcatctagatgttttcttcaatctaacgacgatcaaactgacagccaaatgagccaggtgaggcttgattgacgcaagaagatttttctagttgggaatgtggtcaatctggtgttcctctttctaaaccggaggggggccccaattgtaagccaaatttactgttacggcgatcaccgtctcaaattttctgccctttaaagaataaggtgaagctaggtgtagatgactcgaggggatctggcctcttatgctgatcacctcaaggtctaggaggatcttaattgtcggattttgcaaaggcgcctcagcatgatatcataaggctcgtgacattctgaatcaaggcgactgactcaaacgaagaaacctgcttcttcttcgccggctgtaacgatgaccatcataagcataatgtcccttttcgccacactcatagcatctatcatttggatcaaagggacgtcgggcaggtggtctatcaaaacgtgatctccgaggcatgcctgtcgatagttcaaccctcactcgggagccacaaatcacctttccatcccagtcctcgtactgcatcttctgcatctctaggatcttcgaattccacaaaggcaaatcctggaggatttctcgcaatccatacagttcttaaaggaccataataactgaaagccctttctaactctcctttgccagcgccagttcccaggttaccaacatacaccttggtttctcctccgtaccgcccgtaacgcgacatgatgacagacccgcgtgctcggctctttagcaagcagcgcccagggctcgagtgacgcaaaagctgacacacaccttcacccgccaagagtcccggcggcactccccggccgtaatggccgaattcccgggcatatgtccggtaccgtcgactg

SEQ ID NO: 124406 - DNA, 1184 bp, Homo Sapiens
tttcaaagtcccttaagatcctggccaaagttttatgcatagaatagtgatgttcaagacttaaccaaccacctttcaattctgaatgtaggtatgtatgaataaggttaacaattataatgtctgactctcaaatatatcaaattaagaagtgttaatattgaacacaaatcaaaaatctagttagaaacattttatttaaatgtgccaaataaaaacccacattttcagaccatatgatgttaatacattcaacaaaatttatattatcttactgctgtgaatttacatagtaatccagatccattttgattagatggttgaattatctttcctaggttacactttacagacatcacaaatcccttataataatgtaaacaaaataacttttccctaaagggtgaacttgagagcttcagtccattctttcaggacttgcacttctgcgaggacttcctgatggggaacgactgcttcttggtcgtgaaatagacctggatcttgatcttgacctcgacggggattggaaatacctcgatccttttatagaaccagacctagatcttctgagtgaagctgatcttgatctacgaagagagatagatcttgatcgtcgaggagatgctgaccttgaccttcgtcccctgctcctgctgcgtgagcgagagtatcgccttcctctggatcgagaatgtgatctagaccgtgacctgcttcttcttcgccggctgtaacgatgacaatcataagcataatgtcccttttcgccacactcatagcatctatcatttggatcaaagggacgtcgggcaggtggtctatcaaaacgtgatctccgaggcatgcctgtcgatagttcaaccctcactcgggagccacaaatcacctttccatccagtcctcgtactgcatcttctgcatctctaggatcttcgaattccacaaaggcaaatcctggaggatttctcgcaatccatacagttcttaaaggaccataataactgaaagccctttctaactctcctttgccagcgccagttcccaggttaccaacatacaccttggtttctcctccgtaccgcccgtaacgcgacatgatgacagacccgcgtgctcggctctttagcaagcagcgcccagggctcgagtgacgcaaaagctgacacacaccttcacccgcc

SEQ ID NO: 124407 - DNA, 1295 bp, Homo Sapiens
  misc_feature (47)..(47): n is a, c, g, or t
tctcccttaccttgttgtggatcctcattccactctacaacttcctntgtcattagtgacatcaccgaggagacagaggtggaggtccctgagcttccatcagtccccctgctttgttctgccagccctgaatgttgcaaaccagaacacaaagctgcctgcagttcgtctgaagaggatgactgcgtctctttgtccaaggccagcagctttgcagacatgatgggtatcctgaaggactttcaccgaatgaaacagagtcaagatctgaaccggagtttattgaaggaggaagaccctgctgtgcttatctctgaggtcctaaggaggaagtttgctctaaaggaagaagatatcagtagaaaaggaaattgacaaccctcagctctgcaaactcagtctcatgctcctggaataccttcaatagctgccttcctcaccgcagatgtttctgcctcttaaggatagatcttctgcaacagtcttgctgacaagctagagcttggactgaaagagaagagctggattatatatttcccagacttcaaaccctagcagaagctaaggcttgtgatttgacctgagacatttgtttcaggtaatcgtgtagaatgaagtatcttagtttaaagggtaagagagaagttgtttctggtttttccttgcccctgtgtgaaaataggtcctaaatgactgacttcactgcattagaccctatagctggtctcacaagacactttgtgcccagctgtcactcactctcagcagcttccttgcagcagagcagggctgaggggaaggggctatgaatgtttgtatacgtgttcacagggcacggaaaatcttatgctgctccgtcataaacctacaccaatgcccagcaatcaccctcctcacttccttgtctagatgtagaggtcaggctgctgaaccagccaacacatgggctactgctgggaagcctgggctgttttttttcttaaacacattttatattactgaacaaccaaatctaccctccacggccctgaggccttatcagttccactgattaaaaactttctcttccacggactttaagcccggtaggaaagagagaggaggagggggaaagagcaaaccatctttcttccaggcccttgactgctcctttgggctgggccaaggtttgtatgtaccacaccatgcatgactcagatgccctcaggtccctttctctatggtatgtatactgcttgtgtttgggttgaagcactacctgacattaaaggaaggacttggagagagaaaaaaaa

SEQ ID NO: 124408 - DNA, 1090 bp, Homo Sapiens
  misc_feature (211)..(211): n is a, c, g, or t
gacgagataatgtttctttcccttttagagggcaaaactttcccttcccttaggggccctcaagaagataaagcccaaggcaggggtcttccctccttcacagtaaactcccgggttcaggatcttgactcatgtttcatttcggtgaaaagtcctttcaggatacccatcatgttttgcaaagcttgctggccttggacaaagagacgcnagtcatcctcttcagacgaactgcaggcagctttgtgttctggtttgcaacattcagggctggcagaacaaagcagggggactgatggaagctcagggacctccacctctgtctcctcggtgatgtcactaatgacaaaggaagttgtagagtggaatgaggatccaaaacaaggtaagggagaagagacatttgaacttcctggagataagaaatctggcgttaatgaagccgaagctgcatcagctgccactatctttgcaatctggctgcgcaagtggctcagctcgtcctgcagctcagtagtgcggcttagggctggcagagctggcttcttcagggccagaagcctctcctcggacccacgcaggttgggaacagaggcattgcgctgcatgacaatcagagggctgggtttccaggtgtgcctcagggggcgcgtatcactcctgacccgggcatatgtctcctcttcatccgcagcaatccaggcgatgtcagccagggtagggactgggggcacatctctcaaacacaggtcagagatgttgggcagggtctcaaaggacgcccgggcacacggcttcaagggtaggttggtcccaattcttcttactacacttcgagcagccccatgtggcttgttttgccagattgggatggtcacagtggcttccattcctgacatttgaaccagctcctgcacttgaaggacaaggcagccactgggcagctccgggaggcgggaggcgtgactccttcatatcaggccatctcaagctcgggctcccggactctctcacctcacggcccctccttccaccttgggccgcccagcctcaaccgcccatcccgggaattccggaccggtccagcctc

SEQ ID NO: 124409 - DNA, 496 bp, Homo Sapiens
  misc_feature (431)..(431): n is a, c, g, or t
  misc_feature (461)..(461): n is a, c, g, or t
ttttttgtggtcagcagctacctttatttggatcacacacgtgagtcagacagtaccactaatcgggccaatatggcttgtgagcaaaatgggtgaaaatagagggaactgactgggacctgttgtctaacatcattttaaggttgaacttgagcaaagacttagagaaagctgatggaatgccaagcatcaacgtgaagagaccctctatgcacacagtggatatgttatgcctggctgtagccaccttctcttctgaaaacaagatgggaatgacggaactgtattaaaagattaagttatccactagggagcatactagcacacttccagatcagccttgagatgctagacttcagatacagggacttgtgtcaggtggcctctagaaatgtggaagactaagatttagaaataaactaatttaaaanaaccaacaaaaaaacttcgcctaggatgantgtttcacagaacaaacattccagttaaccatttg

SEQ ID NO: 124410 - DNA, 780 bp, Homo Sapiens
  misc_feature (592)..(712): n is a, c, g, or t
  misc_feature (743)..(743): n is a, c, g, or t
ctagaaatgtggaagactaagatttagaaataaactaattttgaaagcaacaccggaaaactttcgcttaggatgatctgtttacgacagaaaccaaacatgttccagttaatccatttgactgaaagtcattgttggctgacccttaaggaaaacttaagtttaaacttcctttgcatagtatgttttgctcttttttccttgggttagaggtgggaacaagaaaacattgatatagttttgaattaacattaaagaggcaaaatttcacatttaaaatggcccaaaatatcccactattcattttgctgacaggtgatacactcttgagaatcaggagtggagggtttagtcataagcatatatgctgtgggtcaggtgactcatgaacatgtcaaacaggccatgttctttagcagtttctggtctggtcctgcttttagtaatcttgcggtggaactcaggcacacagttatttggtaccacttccttataacctagcccacacccctttgcccaccctcaagccgatcggtctgttcatcccagtgcccttagaaggtgaaggtttgggctgggcccagtggttcannnnnnnnnnnnnnnnnnnnnnnnnnnnnnnnnnnnnnnnnnnnnnnnnnnnnnnnnnnnnnnnnnnnnnnnnnnnnnnnnnnnnnnnnnnnnnnnnnnnnnnnnnnnnnnnnnnnnnnnnattagccatacgtgttcgaacgcgtggcgancgcgtggtcgacgatatcccgggaatccggaccgtac

SEQ ID NO: 124411 - DNA, 1429 bp, Homo Sapiens
  misc_feature (76)..(85): n is a, c, g, or t
  misc_feature (110)..(124): n is a, c, g, or t
  misc_feature (132)..(241): n is a, c, g, or t
  misc_feature (442)..(452): n is a, c, g, or t
  misc_feature (941)..(958): n is a, c, g, or t
ggggggattccaacccttgtccttgcccgggttttcttgggaacaagtttggccccttttcctttccttttggggnnnnnnnnnnaaaaaaaggttttaaaaaatttttnnnnnnnnnnnnnnncccccaannnnnnnnnnnnnnnnnnnnnnnnnnnnnnnnnnnnnnnnnnnnnnnnnnnnnnnnnnnnnnnnnnnnnnnnnnnnnnnnnnnnnnnnnnnnnnnnnnnnnnnnnnnnnnttatggacagggtagtcaaatttatttcaaaacaaaagctttgttgggctgcatcaaatgcaggagaaaaggaatacttaggggcatggttaaattaccagtgtgcgtaacagtgaggtatgcctcaaataagcctttaaaactttataaactgaactagaacatacccatgcagtaatattttttcagtgctactaatgnnnnnnnnnnnttaaagcctgcactggaaatttacaatatggcagaatttgttacttttaccttttgaccctaatgtacagattttatgacagggtctgtgttaaaaatctaaacattttcacaagattttaaacatcactggaaagctgaatttagaggaaacaatatcagataaaagtacaatgcccgtgacagccaacattatgtaactgggctgtatgaggttgtttagaaggctagggttaaaaagatagatagacaaaaagatttttaaaaatcacccccaaagttgatgcgctgatttgaacataagtacaccagatactacagcaaggggatatacactgcaaaaaggtcatctatttacagaagagtgatttaaagacattatggttttctttacagatgtaagaacagcaactgttcactttttaaaaactctacatctcaaccctccactattattatagtccactgaattgcctgtatcaaaggcagnnnnnnnnnnnnnnnnnncccatttgactctccaaatgaacttccatcatttcttcatcatctgtgggctggctctcctgaaaagtctcagggaataagtcacaggagggcaggtttttgacctgctactaaaaattaaaccacaaaaactagagatccctctcctgcaccctgttcccctcactttgtgcagttcagtcatcactatccgacagggtctcgtactgtgctgagagcagtggggcaggctctcgctcccagatcctgttctgttggtgaggagctgcttggttcaccgcagagggagcacatgcaatcggtgttggtggagtactgctgagcatccgcatagtcagagggttataaggaaactgagttgagcctgttgaagagggcctgtcttcccaggcccaccctggcgtctgcctatggtaatcccttctgaatgtacagaggagactgaagagggccgttccgttcctaagtagc

SEQ ID NO: 124412 - DNA, 640 bp, Homo Sapiens
  misc_feature (455)..(488): n is a, c, g, or t
gttcaataaatgtttattgctttttcaattattctatttacaaacaacatggaatttcttggcctcatgatacaaagcgatactaaactgtagtctagcagtgtaggcaacatcatgggaaccagaaaatggccaggccttttgcactagccaacactttccagttgaaaatactattttacacatatagaacacttataaaatgcacttgcatgtaaacactgtaaaatcctgccatttaaaattctacactcaaaaagctctaagtacatcaaaaaatagaagaaatttctaattgataccaataaggcattttaaaactacaaacagctttctttattcaatttcaaagctaatactctgcaaatacaataaaatctgacatttcatatacattcctgctttatatttttatattttaaaagaagccacctgtaaatactattttcttttgnnnnnnnnnnnnnnnnnnnnnnnnnnnnnnnnnnttacagtaaaacataaagtagttctcaagtggaaaagttatcattcccaatgtccttgagttgttccttccttaatcaacctttgtcacattctgcttcaccaaacttggtccacttaacagtagtatcagttttaggactcattcaacagc

SEQ ID NO: 124413 - DNA, 1303 bp, Homo Sapiens
ttttttttgttcaataaatgtttattgctttttcaattattctatttacaaacaacatggaatttcttggcctcatgatacaaagcgatactaaactgtagtctagcagtgtaggcaacatcatgggaaccagaaaatggccaggccttttgcactagccaacactttccagttgaaaatactattttacacatatagaacacttataaaatgcacttgcatgtaaacactgtaaaatcctgccatttaaaattctacactcaaaaagctctaagtacatcaaaaaatagaagaaatttctaattgataccaataaggcattttaaaactacaaacagctttctttattcaatttcaaagctaatactctgcaaatacaataaaatctgacatttcatatacattcctgctttatatttttatattttaaaagaagccacctgtaaatactattttcttttgcaaaataaccaaaaggaccaaaaaactttaaaaattacagtaaaacataaagtagttctcaagtggaaaagttatcattcccaatgtccttgagttgttccttccttaatcaacctttgtcacattctgcttcaccaaacttggtccacttaacagtagtataatttttaagactcattcaacagcttaattatttctactatattctgaggtttgatagaattttctgtactgttgccattgtgactaaggcagaggagatgtgaatgaaaagatattcagtgcaaagttagattctgtgccacttcataaatcaaagcccagaaggtgtaatgttcagtttaaatgatccaaaataatggactgatttaccttcatatgacaaaaatgttttctatagtctatcatttagaacagtttataaatactacaaaaatactgtatcttcaatgtgaccaaatcttccctgaatttcttaaaagtggaattttatttaaaataaaaattgctgctccaaaatcatagaagaaaataaatatttaacatgatgtagtcatactacttcacaggtattccaaatatagaatcttaaagcatttttgatgttactcatagttttgattaaaactgtttaaagtttcttatacaaattatgtaagtgatggtttttgtattactcagaaaaaactctgacttcttttctgagtgtggaatatataaacgaagtgagtgaccatttatatataccaggacacctagactacatcctctgccaagtcttggcctcctaccccggccgtaatggccgaattcccgggcatatgtccggtaccgtcgactg

SEQ ID NO: 124414 - DNA, 967 bp, Homo Sapiens
aatttttaagtgttacaaattttattaaaaattaacatttcaagaggtcatacgcatacaaatcaaactgcaaaaaattccaggcataaaaactattatctgggttagtgtgccatctttcttctccaaatgtcaaaatgtccacaaaaaaagtctttagaaagtcaaatccactgtccatttgtgttgggtaagaaacctatgtcttcattcactgcatggaatccatgttaaaagaaccctgtcttggttgtatattatcacaggactcttgtattaatccatttttcctcaattccccatagtagactgccatcttgatttctcagtggtagggtccatttgaaactcttcaagctgactgggtgtaaatgtttccaccaatgtctacttcattgtatggggcctttagaggattcagtttgaggttcatatttttgctatataaaatactgactttcccaaagatttcctttatcctctaggataaaactccaacgtctcagtcttcaaaatggcatacctcaaataaaagaactcattatttgttcagaaccaacagcaaccaaattaattttaatctcttaagtcaccgggtccgagcgcggccaccggcacctcctggtcgcccaaacccgagtcccgggccggaccgcccgcccgagcctcccgcccgcgccgggtccagccgccggggcccgggggagcctccgaggcggcaaccgcagcggcgctttcggcgtcgtgggcccggccgccctgggcgcctctgccgcgggctgtgacgccgacgcgcgcggcccgcctcgcctcagccgcggcagccccactcccgcgggcctgctggccgtccgggcgtagctccccgccggccggcgggcctcgcggccgcggcggaacgcctgacagctcggggtgctgctgcctctccggcctcgtctcggaacgccacccaggcctcgctcct

SEQ ID NO: 124415 - DNA, 927 bp, Homo Sapiens
  misc_feature (76)..(110): n is a, c, g, or t
  misc_feature (556)..(575): n is a, c, g, or t
aatgatagccactataggcgctagcgcttacagccgaacgacgagcgcagcgagtagtgagcgaggaagcggccgnnnnnnnnnnnnnnnnnnnnnnnnnnnnnnnnnnncagtcgacggtaccggacatatgcccgggaattcagacattaccgacaccatctcggaagaagctcggaacctgtactggcattgaaattgataatccacgttgtctctgtaaatccagctcaccacgaatgctgaatttcatctccaagtaaaaactgcccgatgtacaccgaataattcgagtgattagattctagaattattatacaagtctgtactcttcgctgtggacttaatcaggattgatacaaatgtctctgtggatattacacacccacttgttactttggcgtgcagtcttatcaaggagttgtgtgtgtgttttgcatacaactttacaatttcatagttgaaagctgttacaaaatgaaagttttgtgtatggtaggatatcttcaaggtgggtggatgttttctgtttaaaagattaagatgccaacagcgnnnnnnnnnnnnnnnnnnnncatcaagcacccagtcagcttgaagagtttcaaatggaccctaccactgagaaatcaagatggcagtctactatggggaattgaggacaaaatggattaatacaagagtcctgtgataatatacaaccaagacagggttcttttaacatggatcatgcagtgaatgaagacataggtttcttacccaacacaaatggacaggggatttgactttctaaagacttttttgtggacctctcgacctttggcgaagaaagatggcacaactaacccagatatagtttttatgcctggaattttggaggttgattgatacgtttaacctcttgaatgtatttaattaattgtccgt

SEQ ID NO: 124416 - DNA, 997 bp, Homo Sapiens
  misc_feature (131)..(139): n is a, c, g, or t
attccctccaaatatcccccccataggtgaggatttgcccctttcttgaatttttcccccgggggagaaggggtccctcttggaaaatcttttttccaaacctggaactgggggtgtgaaaaatttttttnnnnnnnnnaaggttttatcctttcccattggaaggggggggcccttaagagggggattccaagttttggagggttcaaaaatgttttggggtaaaaatagaaatttaggggacttttcgcccaaaaggaattttcccttttattcccttctaggggataagaaaacttccaaaaggttttccaggttctttcaaaaaatgggcatcccctccaaaataaaaaggaacttcatttatttgtttcagaaccccaccagcaaccaaaattaaattttaatctcctaaagtcacctttcgcaggtatcactgcagccgtttcaaaatcggctttgaaagagtaaaaagccaacacccaataggagggaaaaaaacaagttttatttttgttgaaacgtagtcagggttccattgttcttttaaattagatcatgaagatgagttcccacctcaccggaaagaggttaaaaagctcctccgttggagaaccgggtccgagcgcggccaccggcacctcctggtcgcccaaacccgagtcccgggccggaccgcccgcccgagcctcccgcccgcgccgggtccagccgccggggcccgggggagcctccgaggcggcaaccgcagcggcgctttcggcgtcgtgggcccggccgccctgggcgcctctgccgcgggctgtgacgccgacgcgcgcggcccgcctcgcctcagccgcggcagccccactcccgcgggcctgctggccgtccgggcgtagctccccgccggccggcgggcctcgcggccgcggcggaacgcctgacagctcggggtgctgctgcctctccggccatccctcgtgccgaaatcgccacccaggcctcgctacct

SEQ ID NO: 124417 - DNA, 240 bp, Homo Sapiens
ctctagtccaccaaaaaagtctttagaaagtcaaatccactgtccatttgtgttgggtaagaaacctatgtcttcgttcactgcatggaatccatgttaaaagaaccctgtcttggttgtatattatcacaggactcttgtattaatccatttttcctcattccccatagtagactgccatcttgatttctcagtggtagggtccattgaactcttcagctgactagactgcccgtacca

SEQ ID NO: 124418 - DNA, 1100 bp, Homo Sapiens
  misc_feature (58)..(76): n is a, c, g, or t
  misc_feature (130)..(130): n is a, c, g, or t
  misc_feature (937)..(937): n is a, c, g, or t
  misc_feature (1076)..(1076): n is a, c, g, or t
gtgcaagctaaaattaccctcactaaagggaataagcttgcggccgcggctgtaggcnnnnnnnnnnnnnnnnnnncacttggccgactttatttttcaggaaaaacagaaaaacaaatgtacctcttgnggttggaaaggacccattgacaacatggcacagacgtgagcaataaatacgcacatacattcaagtatgcgggggggcgctacgtcctggagaccctgtgttcgggcacctgtccctgctctcgggtgcggccctgcccctccagaagcaggtcacctcaccaggcccagatctgcctctccatcctagcctgagagtggggcctagaggcaccctcctagatggaactgccagccctgggggctgtggggccatggtagggcccttggcagtcttgggaggtgccaaggctgggtctggacaggaggaggcaacctcaggcccctggggcccatctcaggctccagcaggtcctgccagtcctaggatcccgaacttggtgccctgtgagccccctccccatggagagagcagtgatgtcatctcccccagctggtgggaggaggggggttctcatatggggggtctgcagggttgagctgagtgaagcctccccagcttccactgaccacccccccacttgggtgagggtcacagagcctggtgctacctcccaccctgactgggcactgctcttgctgccagtaagcatccctaggaccaggccctgccctttttcctggcttggggttttggaatgtcgaagttcatgcccaccctcctggcgaattcctggcctcgagggcaaattcccaaagtgagtgtattaaattcgtatcaagcaaagcgtttcctgtgtgaaattgtatccgctacaattcacacaaaaacgagcgggagcacaagtgtaagctggggggctaagantgagctactccataaatgcgtgggccactgccgcttcagtcggaacctgtcggcactgcaaatgatcggcacgccgggaaagggttggtatggcgtcttcgctctccccagatccgtgcccgtcttggtggggaggtcnacaccaaggtgaacggtaccaaaa

SEQ ID NO: 124419 - DNA, 510 bp, Homo Sapiens
  misc_feature (326)..(326): n is a, c, g, or t
cacttggccgactttatttttcaggaaaaacagaaaaacaaatgtacctcttgggttggaaaggacccattgacaacatggcacagacgtgagcaataaatacgcacatacattcaagtatgcgggggggcgctacgtcctggaagaccctgtgttcggggcaacctgtccctgctcttcgggtgcggcccttgccccttccagggacaggttcctctcgtagaactcggaggccttgcacagggtttctcggacatcgggcggcaggtgccgggggtcctgcgtggcgtttgcggcgttccaggacagttgcttgcttttgcgtnggtacacgtttcccgatgttgtagagggccctcgcctccccaaccttgtctccctgctcttgggcgatgctcaggatgccgctggcagcagacggcagcctcgtcgaagcgccccaggaccttgagtgtgtttcccaggtttccacatgccttggcctcccccatgcggtcaccgatggtccgc

SEQ ID NO: 124420 - DNA, 1667 bp, Homo Sapiens
  misc_feature (1557)..(1557): n is a, c, g, or t
  misc_feature (1562)..(1562): n is a, c, g, or t
aaggagcgaggcctgggtggcgaattcggcacgaggcgggggcccagcagggactcgctacccctccccgtgaggagcaggaagtaccaggaaggcccggacgctgagaggaggccccgggagggcagccactccccgctggacagcgccgacgtccgggtgcacgtgccacgcacgagcatcccgagggccccgtcttcggacgaggagtgcttctttgacctgttgaccaagttccagagcagccgcatggacgaccagcgttgtcccctggacgatggccaggccggggctgccgaggccacggccgcccccaccctggaggacaggatcgcccagccctcgatgacggcctcgccccagaccgaggaattcttcgacctcatcgccagctcccagagccgccggctggacgaccagcgggccagcgtgggcagcctgccggggctgcgaatcacccacagcaatgcagggcacctccgaggccacggcgagccccaggagccgggggacgacttcttcaacatgctcatcaagtaccagtcctccaggatcgatgaccagcgctgcccaccacctgacgtactgccccggggccctaccatgccggacgaggacttcttcagcctcattcagagggtgcaggctaagcgcatggacgagcagcgggtggacctcgccgggggcccggagcagggggcaggcggcccgcccgagccccagcagcagtgccagcctggtgcgagctaaggccctgtgcccaccgccaggcccaccctgcccccactcctggacgccggtctcacagtcacagccacgtcctcccgaggccattgccgaggacaggcactgggcatgcagccccacggcctccccgacccagggcgacaggctcaggccaagctgcccgtggtgggagggcgtgcttccatcccgggctggcccccatggccctcggcttcctcccttctgcccctgccgcaggccggacggggccttcggcatgtcggccccgacctggtgctgtcagactcccgcatcctctcccccaagcccttcccgttctgccctgccctgccaaatgtgaaaccctgctgtctcccccaccctccccaaaggtgtctctgagccgcctcttggggccaccaaggacagggccatgttctgtccccccagagctggtcttgggatggccgtgtgacaggcatgctccacccctccagcttcgtcctggggcagggctccctccaagcctgtctccccacttcccggtcagaggtcagcaaccacagaaggccccccagaccacgcatggcagaccacgctgcagtggcagccctgacgtgccccccgccgagtcccagggccctgcacgggcctcgacaggagccgggcctatctctaaagcatagggaatggctgggcatgaacttcgacattccagaaccccaagccaggaaaaaggtcacggcctgggtcctacggatgcttactggcagcaagagcagtgcccagtcagggtggggagtagcaccaggctctgtgaccctcaccaancgggnggggtaggtcagtggaaactgggggaagctttccctcaggtcaacccctggggaccccctcctaatgataacaccccctccgtcccagcagaaatggggggagaa

SEQ ID NO: 124421 - DNA, 1355 bp, Homo Sapiens
tttttctagggagaaggtgctttattctgggatctgcgtaccaggctggctggggtgctggagtgggaaggggaatccaaggagcaaaccaagaaggtcctagggccagcctaggcctccacggcccggccgttgatgacgcggatgtggcggatgacgtcctggatggcttcagatgttgtgccctggcccccgatgtccggagtgtgcatattctcattgtccatggatgccaggacagccttacggatggaggtggcataggagtgcagcttgaggtggtccagcatcatgcagctggccagcagggtggccgtggggttggcgatgttcttattggcgatactcttgccggtgttcctcgtagctgtttcaaacaccgcgtacacatggccatagttggccccagccacaaggcctgggcccccgaccagtcccgcgcagacattgttgacgatgttgccatagagattgggcatcaccatgacatcaaactgctggggccgggacaccagctgcatggtggtgttatccacaatcatgttctcgaaggtgatctgagggtagcgggctgccacctccctgcagcactggaggaaaagcccatcgcccagtttcatgatgttggccttgtgcacggccgtcactttcttgcgcccgctctcctgcgccagcttgaaggcatactcggcaatgcgcagggacttggccttggtgatgatcttcaggctctccaccactcccgccacactctcatgctccaggctgctgtactcgccctctgtgttctcccggacaatgaggatgtctatgtccttgtgccgggtcaccacgcctggaaggctcttacagtggatgacgttggcatagaggtccaggctggtgcgaaggatgttgtttcgagatttgtgcgacggtggcaggttatggttggtttcgatgttgcccttcagggccacgcggttccggcggatggccatgatggcattgcgaatgtcctcttcatcagcattggaactcacgtgcacctcttcaaagtccactggtacacatgcgtgcctgaagacggacttgacatgcagcatgagctctggcccgatgccatcccctgggatcatggtcaccgtgtgccgcccgccatacttagcggacggaggaattgtttgttctgaaaagatgttcctcgaggggacctcgtgggcgcctagaacctcccagggacggcagagaagggctggcccgagcaccgccttcgcggcgctgccggcgacggtcgctaccttcagcgccatgacggaaagtgagagcctccgcacgtcccgacacgcagatacccctcgtccgattgaccccgg

SEQ ID NO: 124422 - DNA, 1062 bp, Homo Sapiens
  misc_feature (800)..(813): n is a, c, g, or t
tatacattattagttatactttatgaagtaggtactattcttaatccaggtgtacagacaaggcacagataaatgggggagttaactgagaggaacgcagctattaaagtgtaggcactttaatctgtttcaatccagatctgtctgaattcaatgatgttcccaaacttggaacatgaaaatatcaactttctccaagaagtctgacatgtttaatatcctctaatagcaaatgtgataaggttagcacttaagacactggtttacaacggacctgtgtacttgatgcctccccaaccggaagataagccatctgaactcacttaaggcggcatgttcacttttgcttccccagctccacagttaagtgtaccacagtttctggtacacgtaatgcgtgttaataaagatttgttgaataatcaaataagcgaaactgcttttaaacagaaagccataatacaatgttattaccttcgaatttggctagagaacatcaccaagcttaccagtttgtgatctagactccacttttccccatttttttcagtgtgctacttttgcttatatccattcttctgtgactttgtttgccacaattccttaaatacttccacccctccttttcataacagcgatctgccgtttgtgaacctcttttacagagaaaaactagaatgttacttttcctttcatagcaattctttaaaatttctgaaagcctttacaagggtattagcgcaaacatcagagatcgctgaggttaaaactatcttttaaaaatgaatttcaccgtctcnnnnnnnnnnnnnntgaatttcaaatcaaggctaggctgattggagaaaagcaacctagtatatttataaaggtcttccagtgctgtctaagcagtgttgtcccaggtggcatcctatttttcataatttaccgaaggcccttggtaatataaatacagagaataacaggtgctgcactgagcagggggtctgtctaaatcaacctttttggctccattttttgacaaagggccaagaggttagcgtaatcggtccagtagtt

SEQ ID NO: 124423 - DNA, 886 bp, Homo Sapiens
ctatttccatgtattttattgtagaacgataggtaatcttttgactttcgtgaatacatttgaatatgtactgctctgctttccatattttaatggcaaggccatgatttaatgtccatttgttatactcttgtaatgtcatgtcattacaaaaattttttagaacatggatctgacattatattttatcattagatttgtttagtttatttttacatgtaaaaatgtaattttatataacaagccatggaagtccaaagtaccagggattgcttgatagcactatatattaaataatcattcaattactgaatcatttaggaaaaaaaatctttgtagcaatatgtcacatgcttttcagtaatcttccttctcatagagtgggttttagctcaatcattcccatttttactgatttttaaaccctgcaaacataaattgtttttcacagcagtttctaagaagaatgcagaagcgtggctcattcatgagggtcatcaccactgtgccttttttttccttttaggaaaccgagcagaaatagtagtgattacactgcacaaatacaatatagctgaacctcttgagctgaaaggaagttccaaaatttatggttcatttctggggaagtctgagcatttctaatacaatcatataaacaaaaccttgtttggtaataaaaggtgggcatgcacggaatcaacatctgcccagtgtatgttcttaaacctcttgattttatagtaagatttgttattacctctagtaattcatccaactgaaatggcacattttgatttttaaggaccccccaaccacacatatgccccccaaaatgtactgtattatattaacagcagctatctacttattttacagctatttc

SEQ ID NO: 124424 - DNA, 1123 bp, Homo Sapiens
ccaaaaagctggttgtttaatatttgccagcacaccttggcatagggcaaaggggaggcaggcagggggcaccactgaggactcaaagacatccaagttagagagcccagcaggccaaaactgtgtgtgtttgggatgtgagaaccaggagcctttaattaattgccctctctgatctctctaatagctggtaatgcaagcaatgagctttgaacacccctggccaccacctgacaaaagatttcccttagatggtgcatttctatgccccctactccactttattttcccatagcggggctatacagagagtacacccttaggcctttccaggtccctcctcttcttccctcagggaactgtgtcttgggataggattgattgattgattgataggtgcagccttccctgtgaaactgcagcagctcagtgccctacccacacagtgtcttcattcttgcatctgcaaagttggcatcgtagctttatttgtgcgctgtgagggtgaaggcaatctatcatccaacttttctttccctgatatgctccagaataaagaggggtgggtggaacagccgtgaacagggccaggtgtgggctgtgtggtctggcaggagtccttagggctatggcccatgtgtgcacatcctgtttcagaagaggggggccagaggaaaaggggccagcaggaccgggcaactgttaagctgaaaggctgcaagtctgatgggacacagacttgggcagaaggagagatgaagtcaggacaggacaggacagggcagggctgcggcttcacagacttagggaggcagagctgccggggagaagttgggatccattcttcaggcaagcttgtgctttgctctcctcaaagtgggctcctctgcttaatgagcgcttaatctctccccaggaaagcaggagaagagaaaacccaaaatgagaaggaaaagttctgggctggactgtcggaacctggttgtctgaaatagtccacaaagaacatgatttctcagttatctggcattgcttgttgcagtcccgctcccacgaccttagtgtcctggaaggcttaagggcctgctggtatcctccctatagaaaggaagcccattggtca

SEQ ID NO: 124425 - DNA, 890 bp, Homo Sapiens
ttttaaagcaagtttctatttttaatttttttgctttgataaatcaattgcttcacaaaaatcctttttaaagacaacaatccaagaaaacatattgttacagtattcacatttcaaagattgtcagtttcaaagaccgaatataactagaacgaaagattgctgagttctttctgtctctaagtgccaggaatgggccttcacaaggggcagaaccccctctggacaccctggagtttgtctcaatgaaaagtgcccactgctacctcacacaggcaggagatggatcactctcaggtcacacagacacaactcccagagccgttagccgtgagggtttcttttgcatgctcgataaacacttccactcatcttactatctggaatcaaagcgcaaaggccaagctagtccctcggtgggagcgagctggaacccagcacagccagccctgccactcctgctccacaggtgcagggcaggaataacagcaacatgctcaatttgggtctcaagacacattcaaaaggagccttcatagggaaaaactcaacaagaataaaactggaaccgaatctgatcatttacaacgaaatcttagagggggtcacacttttacagattctctccactgtccaagggctggagaacaggtgttttaaggtgccaactgacttcaaacatgctgggcagtgattttgcaaactgaaacagcttgccattgtagaagctagttaaaagcacccattggagagaggttaaaggaaactcaggctatgtccataagcaccctttctctaagtgatctttatcctattcctctgaatttagtaagaatttaggaaagttgaagaaagttttcagctggagagaatgcacactgtaccattca

SEQ ID NO: 124426 - DNA, 674 bp, Homo Sapiens
cgaaagttagggtcctttattgggggatgtcagcagagaacgtgggacatgaaaacaagtcttaggagtttgagaaggggctcccaggacaggctcctctgctttaaggagcctgtcctgggagaataagcagggccccagtatgtgcagaagttgtcagggggtgcccaggggtatggtgaaggagaggtagtccccaagggcaccccagcggggccggtagatctggaagatggtgatccaggaggtgagcactatcacccagaagaggaagcccacagctgagcgccagacatagcctttgatttggctctgttctgtgtaggctgggacaaggaaggcctctcggaagaaccagaagatgttgaccaaccagagaaaaggcaggaaagcaaacccccccaggtagtacttccggcacaggttcaatttctcctcattggacactcgctccaggttcatagctgcgctggggccgggtcgtcccaagggtctgcggggcaagacccaagccttgaccctaagtaacagatgcaaggatcacgaacaaccacgccccaggagagctcacttcctccggctggggtgccttagctactttcagttatggacgtttgcgcgagacgccccaggtttccctggagattgtagtcttctttgggcgaggcaacccc

SEQ ID NO: 124427 - DNA, 1235 bp, Homo Sapiens
ttttttgcaatcctcaaaccgtttattgacagcacaaggctcaacagcaggtgagccacgtgagggtggcgagcgcttgcgaggcagtgtgggcaccaggcaggggatcccggagggaagccctctgccagggacatggtgagggcgtggccatcacccacgaagggagcataaataacactggcaggtgggtgggcagcaggagagggagagcggacagcgccacggggacacgcagggtcggcgggaaaatgctgggacagggtcacacggggattcggacacgcagacacagaagggatcatgggacgcccagaggatgccagagggggcagacacaccagagactcggggatgggcatggtgctctgcccgtggctgcccctcctccaatactcgccctgggcttgcaggcaggactgggcggctgagcactctcccagcagagccaagcaggggggcccctgcagggtctggggcgcaggtgagcccacatcatgagagccgctgtagcctagggctggaccttgccttcggggtcccggtcatagatgtagctgcccaccgcaccggtgttcactcccttgggtccgaagaggattccatagcagggcttgtggcagtagggctggccgtcgtgctccgcgtgcccgccgggggtcagtgtcttcccgcagcgctcgcagcgcaggcagggccggtgccaatccttgcccagagacgtcaccttctcagcgaagtacaccttcttgctgcagcgcgggcacgtgttgggctccccggtgaaagtggtgacactggaggctctgctgggccccttcggggggccgctcgccttccgctcctctgctcgggccgcggggacctcgatggggccggtgacctgcggcccctccgccaggggcttctcgtagatgtaggagcccgcgcccccgatgttcacgcctttgggtccgaacagggtggcgtagcacggcttgtggcagaacggcttcccgtcatgctcggcgtggcccccgggcgtcagcgtcttgctgcagcgctcgcacttgaggcagaacttgtgccagtccttccccagggagctcaccttctcggcgaagtacacggtcttgtcgcacttggggcatttggaggccatggtcggtgcgcccggtcggcccgcgccctccgcccgttctcctccgggccgccgccgccctcgtgccgaattcgccacccaggcctcgctccct

SEQ ID NO: 124428 - DNA, 1774 bp, Homo Sapiens
gtccatttgtataaataaaacattttttaattaaaaaacaaactctacagtacacgtgggggacggcagcgccacgcaggccgtggggacgcagtgtccttctctgacagcagcatcagggctcaggcaggccgggaggatgcatcacagctggcggccttggacggggcagtggctcccccggcctgaggagtgccgccccttgtggccacgctgcccagcaggccggctccttccctctcgggcgccagcagcagctcctactccttctcacgagtccacttgatcatggtctccggtgagcggtagaggaagatgagcttggcgtacaactcctcctccagctccagctcccgagtctcccgcaccaggaagatgtcctggcagagcttgaggatgcggtccacgcacggcagctcctcgaacataatggagtgcgagatctcgctgaagaatccgcgcacgaacttgccgatgaccagcacgatggacacgtacagccccatgatgccgtagccagccaggaagccgaggctcggtgggctgaccttgtcactgaaaatgaccatgggcagcaggttgcagtcggtccggcactcctgcagctcgatgacccaccattcgaggaagccggtggcccccgcaccctgctccctccgcagctggatacgcacgccgaggtagtcggcctcctcattgggctgcagctgcttcacagggttggcttcgggcccgttgggggcacggatgtacttggggaagagattggggatgaccacagactggtccgaggtgccctcgagcaggctggccagctgccgccgtgcagtgctgttgggggccagggccagcatgtgcttctcgttggcatactccacagtgcctcccttcgccaggtccctctggaagttccaggtgaagcgcagggtgatgtcggccgtgccgttgtagagctcccgcttcatctgggcacggctggggggactgatgcgccacagcgccccggagctgccctcaatctgcgccgtgacgatgtcctcagggctgtactggctgatgaactgcatggccagcggctgggggtcaaactgccgggacagctcctcataggcctgggccgtgaaggggatgatggacggctgctgggcgctcatggtgaacagcggctcatagccgcccagcttgagggtgacggtgacatcgatgggctggttgacaaccccaaccacggagcgcaccagcgacatgaagagcagcgggaaccagatgatggcgatgaggaagaggatgatgaggccacccatgccgtacttgacgatcttcttcttcttctgccctttgggctgcgggtatttctggaggggaacgacacaggtcatacgctcagctctgcccttcctgcgggtcacacaaccgcattctccagctcacccagcagcccagaaaagccccagcctgacctcagtatggcacggcggtagtaatggtgggcagacacaggccagtggacgtagaactaagagtccagttggaaccctcatgttcagggctcgttgatcttagacaagggagctgtgaccgttcagtgggatacggacaacctttttccacacggtgcaggcaccgccccaggcaggagagtgaaacgctactcctgcctcataccatctgccaaaatttacctcaaagtggatcaaagagcgaaacttcagagctcaaactatagaacttttagaagaaaacgggcaatctctttgagtacaacctgccggtg

SEQ ID NO: 124429 - DNA, 665 bp, Homo Sapiens
tttttagtgaaacattttctttttattgagaacatctcaaatcctttgtctgtatttgacagcgtctcatgctcagttccagctggtcttgtgcgagaggaagctcatgcagttgtaacgtgtggtgtatacacagatttacatacagagaacactgaggattgcatctcagcaacatgtttctcagccgaattacattcatagaaagtgtccagattctaaaatcaaattaaaagcatgtaatccaaagcctgaaaaagcaaacagctttaggggctgactccattagcgttccatagactgtgcttttaaccgttcagttcatgtttaatggcccatcggttccttacataccatcagcttatgctgtggccaaaagaagtgttcttgtggcttggtactcgtcccttcaaacagtaaacaagaaagtgcagacagtgctgccagagacaggaggattttcacatgagactggaaaagccgacacacccttacaactaagtcatggtcgagtcggacctgccatccacctccaccagtccctggaacccggcaggtcagagttttctctaattctattcgccggcatcaagtgaacactagaactcacacggaaggccccgagcaccactggcctcggggctgggtgcaccactcctcaccca

SEQ ID NO: 124430 - DNA, 1269 bp, Homo Sapiens
  misc_feature (47)..(82): n is a, c, g, or t
  misc_feature (132)..(143): n is a, c, g, or t
  misc_feature (147)..(155): n is a, c, g, or t
  misc_feature (299)..(300): n is a, c, g, or t
  misc_feature (302)..(302): n is a, c, g, or t
  misc_feature (305)..(305): n is a, c, g, or t
  misc_feature (1095)..(1095): n is a, c, g, or t
attttggaggcgcgcgggggggacctcctccctttttggaggggcgnnnnnnnnnnnnnnnnnnnnnnnnnnnnnnnnnnnnttgggggaatttttctccaaaaaaccctttggggtttcccccccgggggnnnnnnnnnnnngtgnnnnnnnnnaacccccgccccttttttctttgccccgggtttttctttgggaaacaaagttttgccccattttcccctttcccttttgggggcccggggccccaacggaatggttttgaaaagtttttgaagggcggagccggccgacaagcnntnatntccttgttgagccggtcgtcggcaggatgagacacatttattctacatctggtcacagtaaatctcacccagaccacaggcaggatgccacgtggctacaggcagctggcggaaatggagatcatctgttctggtgctcatggccactctgggcagaaagcaaaggtgcctcatggcacctactcagaggcactgaggccacattcccatctccaggcaccagggatgtctctgaagggtgattccatttggagtttccaaaatccaggacttctgagagccaagccctagttccaagtcatcctgagtccaggctctgccagaatcttgagcacctggagctggtggcaaggcagcctgggggctgaaagggcctcagactggaccacagggcagcccaggggccctgggcctcagggtcgacgatcctttctgcggtttttgtgtcccacctgggaacctcgccgggcagccttcaccaggcctttgaactgtccctgcagcttcatcttcttcctgcggttgagcttgcttctgttgagggggatgtaggcatagggatccggccggcctttcttcttcacatcaccttttgctttcttggccttgtattcagccccaggcatagccttcttggccacagggcgatgaatgccagagcctccagcttggtactgagggggtatctccagctcctcctcctcagcctctttctggtgcttgagcttctggtgctttttattcctgatgatcacatcttccattgggtcagccatctcttcatccttcnctttggcaccttcctcttcctccatcttgttgccgtctgcctcctcccttatgatcagccgccatcggcgctcaccttgaagctgtggtccttcttcctgccccggcctggccctggctgcgtggccaggactcgttgggccaccttgggatccaggaagttgaggggctcgtc

SEQ ID NO: 124431 - DNA, 1109 bp, Homo Sapiens
aaagttttgtgagagctttaatggcacaaaatgtttatagctacaagttatacatgtattgtaaactgtatataacgatacaaagtgctaactaaaatagatgaagaatgcataatcactttggctcagttaattccaataatttccacaacgggttcatgaaaaaacttatctgactggctaagtcttcaattctcatttttttagaatagtaaatatttttactgcaatcacgggaacttgttgcactttccaatgtgcaagtttgtgcagttttgctcttgattctatttacaaacatcttgagccagttttcatcaaacatatgaaaaatgaagcctgcctttttgtccccaaattgtaaacaggtgtaaagctttttaaacattaacctcacaatttcaactattaattgttgaattctcctttccaaaccacaatgttttcgttcaacacaaatctgggtgtagcagtaaaacgttcatcccatgtgttagggctacagatacatactacatgctctcataataaattctactgtgatgatgtattcacgttttaagtaattttccataatttcactgatgctttaagaaaaagggcaacactatgtttctttttaacgctgaaagaaatcataaatatacccagtttcagtggcaccactgatagaactgctgctgaacttggaaagagcacaatgcactagctgtaagaagtcactttcaggtaaagtgtaattttacttttcccccctgtaataccaattgtaatagaaattgcatactgtagcagtttagctagtcagttctcctaactttccagtctttccaattttattcaggcttttcaaaaatcagtgagccatcagatttactttcttcccaaagaaattcaaatatgaacacttgaaataaataggttatagaaggcaaatcaagtgttaccaggtttaagagtaagacagaaacatggtctaggaaaaagatgtccaaaattatttagacatcaaatgctagaaagaaaaaagaaaattactttcaaaactaggatatatcacccggccgtaatggccgaattcccgggcatatgtccggtaccgtcgactg

SEQ ID NO: 124432 - DNA, 182 bp, Homo Sapiens
agaaattcatccattgaacacatttttattgagcacctattatgtgcaccagacactgttccaggcactggcgatacagtagaagataaaacagacaaaaataccagccttacagagctcctaaagcctatattccagtgaaatcaagataggagaacttttcccttaagtttaaggtagtt

SEQ ID NO: 124433 - DNA, 1229 bp, Homo Sapiens
gatggtggttgtctctaatatttatttgtctggttataaaattaatatgtgaggagcattggatttggtgagaacgttttgaaccctagctgtcacgtgccacctgcgggatctagaccagtgacttctcagaactgccatttcctcatctggtagacaggatggtaagccctgtcttgctcactccacgtatggcagtgcagatgaaatgagatcacagaggggaagcaattggcaggctggaaagtgctgacaaatggaaggggttgtgtcaccaccctcagctgaggtagtaccaaggtccaagctcctgcccctccccctccccagcccctaaatacacacacgaatggagggccacttgcagccttggtctgatggaattgggggcaaggccacacatcttcctcaagcttggccagatggggcctcactggggcccttccagaatcgggcatcggctgtggccagctgtgtgaggatctcctccaactcgggtccatcctctgggaaacgctcagagaaggatcggatgaggccagcagctgacgcctcgtattccagaagctgcacgtctgagccttcaaggtgagtgttgggctgaacaatgagcttccgagattccttacgcagcagcaccgtgtccctgagggtgaggaagcactcggggggcgcatcagtgaccgttgcatacccctcgtacagggcccgccctccggccacatcccctgtggacttcagcacctgaagtctccgcaggaagcgctctagagcaggcttgcccacagaccggatcttgctgcggtcgaggcggacccgggcatctgggcgcccatcggagcctgtggtgggagtgatggtaacgagtccctcgccagcctccagcaagactctcaggatcacaaaccgggcctgcatatgggcctgtcgccagttgaaggcctcaggtgtgtagaactccagagcgagcagcccggcccgaaccatgttgagccagttcacgtagatcacgtcctccgcatcagccccctcaaagccaaagatctccagcacttgcgggtggagacagaggtagagacccacgctctcagcccggcactcttcgtagctggaggcgatggtgctgaacttgctatcccaggtctccccgctccgataccagctctgaatctggaaaaggagctgctcgcctcgtgccgattcaaccacccaggcctcgtacctagcgc

SEQ ID NO: 124434 - DNA, 1016 bp, Homo Sapiens
  misc_feature (716)..(750): n is a, c, g, or t
  misc_feature (869)..(877): n is a, c, g, or t
gattccatttgttttatccagaagaaaaacattcaaagtaaaatgtgaacatttaattacctttaaatcatatatgaaataatttacatgctatacacttccaaacacactgaacataaattcaactttataagacatatacacagtctgcttttgccaacatataccctgtaggtcacttaagatgtaactgatttctcagtccacctgtgagcatataaacacacaaatgtatgtctgaagttgaagattaagataataaaccagagttgaatacaagaagtcagccacagaagattctaaaaccacaatcagtgactggaacaccaaggcacaaaaacttccctttgtagtcacagagattaagtttccattcccagtgcttaaatatggaagcaggattggttaatcacatactatattttatagtgcatttctgttgctgtttaaaaaggaatattttttaaattacataatgtattacagaaaagcattggaaaaataaacaggataagataagctctcatacaataaagttttttttggtctgaaaaagatgtttatattcaaaactaatataatagaggtgtaacagaaagtagcatgaggaacactatgcaaattgcctaatactcgaattgtacttcatgccaccatgttatttaaattttcaattttaaagccagttgggtgatattgctaattccaagtgatannnnnnnnnnnnnnnnnnnnnnnnnnnnnnnnnnnggtaatttaaagatatgtactagtacacagaataaacagtaaatataacatggcaaaatgaaatctttcccagagtttatgttgcttttgttaaacagtaactttgtactagaatctcnnnnnnnnnctatatttaacaagaagaaaaataatgctccacatagaaatgacttcaaaattcatgcaaccatgcacaacctaaactatctgtacttcccttttttatttacccaaaagtttttgagtaaactgaaagttagataccc

SEQ ID NO: 124435 - DNA, 877 bp, Homo Sapiens
  misc_feature (209)..(209): n is a, c, g, or t
  misc_feature (228)..(228): n is a, c, g, or t
  misc_feature (230)..(230): n is a, c, g, or t
ttttttgttcacggaaacgctttcggttgtcccaccggggggtgtttttttatttggtggaggaatcccaaggccttagttccatggccccgggtttttccttgggaacccagcctatgccccatgtttcccttaccttactgggccccgcgcgcacaaaggaaatggtctggaaaactttttgagggcccgaggcggccggacagggntcactgtcgacggattgtngngttttgcagatgatttctttattgtaaagacagcagttacaaaagagaataaatatgacattaggatatatttgttaaaaatacaacaaaaacccctagtatttgtgagcaaccccaagaactcacaagtatgggggataagaacatctacagctggataccctgaaacagatgttagaaactggctaatggtgagtatggccatgactttggggatgtttgaaaggccctggatctgtcacttgggaacgtcagcggtctactgtaatacaatttgcacagagtcagagtgaacaggaacccttttactcattggtatcctaactattctttcgttcttacagtgaagtagtacagtatttaagagtggggaaaaggctgagctgggaagacatagacggagcaaggtgaagagggagggactgggggaatgctaaggggccaggagaaaggtggcaggaaggagcagacctctgtcctttctctaatgtgtgttactgtggtggcatgctgttcctcctgttgaagagtggacgggcagtggtccacccagcctccattaagacccaccattacccaggaacagaagatgcaaaagcaactggcagaatcctaccaaagatgagaacagggaagttgaatgtgaa

SEQ ID NO: 124436 - DNA, 481 bp, Homo Sapiens
tttttgccacacacagcactgggtggacttttattttaaagtcaaaggcacagcctggctgggctgaggcagtgaccatggatgcccagcccagacccccaaggccccacccccagccaggagtagctgtgccaaagaggaaggggtgggtgagaagatggcctcctcttttaggagccacctatctccttccttagccccaacaggggagaagcagatgacataaagtgaggcagaaatgcttcagagggtcccccagggcctctccttcagtacccccaacacgggtctttggtggacgtaattgcacagacagtccataaagtgacagttgaggggtgcccctcccaggaacggggcctcaggggagaacagggtagggggtcccagtttaggagttagcactcctaactcagtgcttaaaagtgggggaggggctctttcctgttggagcattccccctggaggggccttctgccca

SEQ ID NO: 124437 - DNA, 1057 bp, Homo Sapiens
  misc_feature (817)..(817): n is a, c, g, or t
  misc_feature (835)..(835): n is a, c, g, or t
  misc_feature (839)..(839): n is a, c, g, or t
  misc_feature (841)..(841): n is a, c, g, or t
  misc_feature (871)..(871): n is a, c, g, or t
  misc_feature (909)..(909): n is a, c, g, or t
  misc_feature (953)..(953): n is a, c, g, or t
tcaccgtgttcctggagctgcccgctgccctctgccctgtccgtccccggcagagctgggagccggccctcagcatgaccaccgaaactttatttacaacacgaggctggagtaagaggggtgggatggaggacagcagcagggccgacaggaccctacttctgctcccgcctccagacgatgaccatgccgctggcgtcactggaggccagtaggctctcgtcgcagttgaagctgacatcaagcacaggtgcactgtggccctgcagcttgttgacagcagccttggccgcccgctccacatcaaagaagtgcacgcacatgtcctcactgcccgtcaccacgcaggccccctggcggaaggacatgaggggacagaagatgctgcgcacaggatgtgagctctgctcgatggggaagcttctcttcagctgcagggtcccctcgttgtctaccaccctgtagagcagcaacttgttgaggcaagcattgatgagcagtgagggatcccgggcctcgcggctgacccaggaccgggctgagatgctggtcacagggctcccctcatgcaccaccaaacgcttggctttggtcagcttccctgtggccatatcaaagaggaaagagaagacactgccacggtcatcacccgcccagagcagccggccaggggcatcaaaggacagagcaaggacacggcctgtcagcttgctggagcccccttcactttcttgcctgtggagatgttcatgacatgcacgttgtgcttggcgttccccaccacagtgaggttgttgtagactcccgtgcgattccntggctcgaggtcgaatcnctanantgagtcgtatcaattccgtatcatgtctanctgttcctgtgtgaaatgtatccgtcacaatcacacanatacgagcgggagataaatgtaaagctgggtgcctatgatgacnatcacataatgcgtgcgccatgccgcttccatcgggactgtctgcactgatatgatcgcacccgggaaagggtggtatggggctccgtccctcagacccggccg

SEQ ID NO: 124438 - DNA, 1389 bp, Homo Sapiens
cgtctcgtgaagtatctcgcgtccgggcaccggtccccctggccgcctccagggagaccgcgggtcaccgtctgtgggtctcgtggggcgcgtgtcctcttagaggccgtggatattgcgcgctttgtttcgcctcccacgtacaagttatcccggcgggtgcgcgggcttcgggagaagggctcccggggaaattttggatgccccgcggcgggggatagtccgcgttggttcggagaaacccctggtgggaggggccagggcccccaggtgggcaccagggaggatgctgccccgtcgggtgagccagcaggcccgggggggtgtcgggtcatcattggcggaagccgcccccctggggactgcctcatccacgtgctggtcaaaaacatgatacatgcccgcaaaggcatagttctcgctcagtgacgtgtccccggccatggcccgacttgcctctgctgctgacgtgggcaccacgctgccagggggcctgtcctcatagacggcacggttcatctgcgcctgcagctggtaggagcctctgctgacagaccgacggtgcccacgggcccccagggcccgaggatcatcctcaaagtcctccatgcggtcaagagtagtgcggctactgcggacgatgctgttgctataggcacgagcactgcctggctcggagaggggcccgtagcgctggcccagcagctgcccccgaagcctcaggtactgccgacgcagcgctggggggtgcccagccttggcattctcccgcagcagctggctgcgccggcggatatactgcgtccgaaactgtggaaacgttggtgtgcggtacgcgttgtacctcgcgtccactgctaagacttgctgccacaccgcggccattccccggcctcctcctctggcgtgtccgcccgcggcagcctgcaggacaagggcctggaatgtgagcgtcccgagcgaagggatctagttccgtcccttccaccaggcgaccattgccatagacatcgagtccctccgcgccggagatgtcacgaactcccacccgggtgttaccatggtcatcaccccagccctgcccttcctgggcagcgcccgggtgacacacagcgattcagaacagacaccgcccctccccagtcgccatagcaacgcccctcccccgcctagcattccttgcttgacattctccacccatcttgtccccgccgccctccgccttcccttctcagatccaagagcatagcccgggactcggggaccacctccggggctgcctccggttcttgaggccccccggagcggccctgagaccactgtcgccggttccttctgtctccggacgcgtgggtcgacgatatcccgggaattccggaccggtccagc

SEQ ID NO: 124439 - DNA, 1828 bp, Homo Sapiens
cccgtaggagagaaaaagggggggtggggtattgttttcccccgtttcccccggtttttcctggaagcttgcccggttgcccttttgcccctgttcgttcccccggacaaagctggggagccgggccctcaggcatgacccaccgaaaactttatttccaccagagggctggagtaaagagggggtgggatggaggacagcagcagggccgacagggcccctacttttgctcccgcttccagacgatgaccatgccgcttggcgtcactggaggccagtaggctctcgtcgcagttgaagctgacatcaagcacaggtgcactgtggccctgcagcttgtttgacagcagccttggccgcccgctccacatcaaagaagtgcacgcacatgtcctcactgcccgtcaccacgcaggccccctggcggaaggacatgaggggacagaagatgctgcgcacaggatgtgagctctgctcgatggggaagcttctcttcagctgcagggtcccctcgttgtctaccaccctgtagagcagcaacttgttgaggcaagcattgatgagcagtgagggatcccgggcctcgcggctgacccaggaccgggctgagatgctggtcacagggctcccctcatgcaccaccaaacgcttggctttggtcagcttccctgtggccatatcaaagaggaaagagaagacactgccacggtcatcacccgcccagagcagccggccaggggcatcaaaggacagagcaaggacacggcctgtcagcttgctggagccccccttcactttcttgcctgtggagatgttcatgacatgcacgttgtgcttggcgttccccaccacagtgaggttgttgttgacaggctggaaggtgcagcagagcagttcagcgctatcggggtcagggatctctcggatgcagcgaccatcctcagaggcccagatgcgcatggtggcatccagtgaggtggacacgaggatgtcattggagagggaccaggcgaagtcggagacaccacggggtgggccccgtagcacgcgaagcactgtggctgggtcaggcaccagctggcacagggagatgctgccgtcgagtgagcagcaggccaggcggtgtcggtcatcattggcgaagcgcacccttgggactgcctcatccacgtgctggtcaaaaacatgatacatgcccgcaaaggcatagttctcgctcagtgacgtgtccccggccatggcccgacttgcctctgctgctgacgtgggcaccacgctgccagggggcctgtcctcatagacggcacggttcatctgcgcctgcagctggtaggagcctctgctgacagaacgacggtgcccacgggcccccagggcccgaggatcatcctcaaagtcctccatgcggtcaagagtagtgcggctactgcggacgatgctgttgctataggcacgagcactgcctggctcggagaggggcccgtagcgctggcccagcagctgcccccgaagcctcaggtactgccgacgcagcgctggggggtgcccagccttggcattctcccgcagcagctggctgcgccggcggatatactgcgtccgaaactgtggaaacgttggtgtgcggtacgcgttgtacctcgcgtccactgctaagacttgctgccacaccgcggccattccccggcctcctcctctggcgtgtccgcccgcggcagcctccggggctgcctccggttcttgaggccccccggagcggccctgagaccactgtcgccggttccttctgtctctcctccctttctcaggctccaggcaagatgctgcc

SEQ ID NO: 124440 - DNA, 1072 bp, Homo Sapiens
  misc_feature (142)..(152): n is a, c, g, or t
  misc_feature (458)..(468): n is a, c, g, or t
ggtgagctcgctgcgccggaaggatctaaacagcaagctgggaaaatgtggtcagattgggcatgcgcaaagcggctacctgtgagagggaggtggggctcaggcaggtgacatcctatcccctatgggtgtcccctagacnnnnnnnnnnnaacttcatcatttcccctttctgaccccttcacctcccaaggctaacccccatattgtcagtctgatttctgtcgccctggtatactgaccctattttttgtctgcgctgacccattcaccccgtagggaccccagcagggcagcagactgactctgttgtctgcaaactgacctcatgaccatgctcattattactgcagactcactcccaccacaggaccaatgaggtccctcatcaccactgctagtcattcttaccacctagtgccccagtcactgccacacacctcactctcctgccgtannnnnnnnnnngagctgattgattccctctgtcctgtgcctgctgcctgccctgcatcctgaccctgcaggtacaacgcgtaccgcacaccaacgtttccacagtttcggacgcagtatatccgccggcgcagccagctgctgcgggagaatgccaaggctgggcaccccccagcgctgcgtcggcagtacctgaggcttcgggggcagctgctgggccagcgctacgggcccctctccgagccaggcagtgctcgtgcctatagcaacagcatcgtccgcagtagccgcactactcttgaccgcatggaggactttgaggatgatcctcgggccctgggggcccgtgggcaccgtcgttctgtcagcagaggctcctaccagctgcaggcgcagatgaaccgtgccgtctatgaggacaggccccctggcagcgtggtgcccacgtcagcagcagaggcaagtcgggccatggccggggacacgtcactgagcgagaactatgcctttgcgggcatgtatcatgtttttgaccagcacgtggatgaggcagtcccaagggtgcgcttccccaatggatgacgacaccgcctgggctgctgctccctcgaacgaa

SEQ ID NO: 124441 - DNA, 692 bp, Homo Sapiens
tttaaatcacaatgatttttattaaccatgtctaactacgtatctgtgccacagcttgcagtgaggcaggccactcgtggcagatacaaggggctcctgagaggcagtgggtaggatggtcacactctgcccattgccctcctggaggccccatttcctcatcataaaatgagggacttttaaataaagtgctatgccgggggataattattttgatgtgtttacctagggtttttcatacaaggggccaggttggaaaccaacagccatgtgttaatggccacgtggggtgagcagcaatccatcatgaatggcctacagaggagagaggtctccatgctgttcttctgcctgaagccacgccagaaccaccaaagggaaccagaaggggaactccgtccccatctctcaggaaataaggccagagctagaaccccccagttactagtcaggcctcactagagaaacagaaccaacaggatggagggagatgcagagatttgttttaaggaactggctcataggattttgggggctggcaagtctaacatcttgagggcaggccagcatcctggagacccagggaagagctggggatgcaggctggaggcaaatttcctcctcctcaagggagttcaccttttcctcttatagtcctcatctgatcggatgaggccactgacgttatgaag

SEQ ID NO: 124442 - DNA, 684 bp, Homo Sapiens
  misc_feature (113)..(121): n is a, c, g, or t
tttttcaaaaactttattcttttctaataaaaatgatatatgttcattataaaaagtttcaaacacacatgagtctgaagaatgtaaagatcacccaaataccacagcccagnnnnnnnnntccttaacatttggtgaagatctctctatgaaacatacattatcttaaaatattcaatgttataaatgagctcatattcaacatatatcctgtagtctactttttgattcaataatattttgggaacatatatccatagcaataaacatatatctaaatatttttaaatgacaactgcatggaatttatttaatccatcttttactgaaggatgtttcagttgtttccaatgttttaatatcataaacatcatgaaatatacctttgggctcatgtttgaagacttggacaacttttattcattaggataaattcctaaacaaactgctgggtaaaggtgtatcaacatttaggttttcatacatgttgccaaattgccttctagaaaggttctaccaattttcactcctgccagtattgaacaagaattccatttttgtcaattgctttatctttgccaatatgggaggacaaattactaataataaaataaaataacacatctttattagctgttttcatgttcacatagaggacacttttactttttaagttattctttt

SEQ ID NO: 124443 - DNA, 219 bp, Homo Sapiens
cccccaaaagtcacttttttctgcattaaaaaataataaactttaactataacaactcaatgacaaaacaaggcaaaacaatgaaacaaatctcattgctgacacagctttctgggaatttccaatcctagagaatgaatgtatcacatacatggttggggaaggagacacagttacttctctttcctttgtgccctggaagccctcaacatctttcta

SEQ ID NO: 124444 - DNA, 729 bp, Homo Sapiens
  misc_feature (226)..(235): n is a, c, g, or t
tatgtcataattttttattgatggcatttatcccatggtttaacatgttaattatactgtaataaacatggctttaatattaaacttttccttattatccaaagtcaccacagtccattttagtaaatataaaaatatatgcttaatactttgtacaatactggtttttggtccaaacaaaactggatcagaaaagccaataaattcaactttaagaatccccaannnnnnnnnnaaagatttccaaatggatttaggcaactttgaataatgggatttacataataaaatctgagacaagactaaacaaacaacaaaaaaatctctaacacaaaattcaaatttcaagttcacagatttatgttatgccaaaaagtacagaaacaaaattgtatttacacaagtttcataataaaataatgaaaaaggcaagacaggtgataggagaatgaaaatatagaaatagcatataattattaaatggagagtgaactagatctaacaagtccttagcacggaccattctttaatcaggcttcctctatcagaaaagtttagcgcacaatacacccaactcactcacttcacacatacaccagcacaaactcagcatagaaatcatccgtttcaacactctctaatctatacagaattctaatctatacagaattcctcagatataattacaatttcaacgcgttccatgaacgcttatcagcgcacataatg

SEQ ID NO: 124445 - DNA, 1118 bp, Homo Sapiens
tttcgggtggagcgggtactttatgaataccacagggacaaaggaaggctgctcttctcacacactgctgaatctccggatctccgcaaggtcatagccagtcacagcaaaggagttgcctgaggaatcacaaaatcgagcaccacacagctgggtgtcggcgacacactcaccatgacagtgttccacctcaatgtagccactctctgggtttctgctcagcttccagatatgcacaaaggtgtcctcacctgcagagagtagcttgcccacctcagaagccaggtccagggcgcagatggcccgggcatgggcattgatctggacatgtagatttcctgtagtggcctcatatagatgcacttgtccgttcccatagcctgctgctatgatcccctgccacagctgcacagaggggcacggaactccaaatcctggaatgcgggtcaataatgtgaattctggccctgaccgccagacacacagcaagcctgagtcatctgccgtcaccatgtcagccacacaatcctgtccctgggcaggctcggtggcaatgtctgtgattggcatctggtgcccagccagctcctcgctcagtacaatgttgggaccctttgctgggatgtcaaacaccagcacccggcctgaccacgttcccacacagatgaagtggccactggcagcaattccccgggcaaacacagcctgtactggggaggcatctccagagtccagtgcatgccagtagaccatggtgtagccattggactcgtacatctgtattcctcgatgtgaggtgagtaccagcagcactcggaaggggaggacacaccagtggacctgagtgataagtgggggactcactccagcaccctccttagcgtggagctggcgctgggccaagggcacaccctcaggagcagcgctgagaagctgggcgcttggtccatgaaccacgccaaaatacgtgaggttgcgagccggcagctgcagcacactgaggttgttgcacagggcggcggccgagcctcgcaggggaatggagcgctcccagcggaacatcctgcagccccagatcggctcgcctgactcctggttcgtagggtccctccaaatcc

SEQ ID NO: 124446 - DNA, 733 bp, Homo Sapiens
tttttttagtgttctcacatctttttaatcattcatattgacttaatcaggttgacaaaatctcagggttggtctgggatcattcacaaatcagaattactcagagaaattttcacagcagttgcagcagcacaaactctaacgctgatttaaattaataactgttattaatgaacaaacttgaaaaaggaatttcatatagaacattacatttctccctgacactaccgtatcataaaaattaaaaatgatataaacatgttttaaagtcatagtggtagaaccagccacactacagtgcggcattgttagaagttcgctctcaagttgactcagcttagtaaagcaaattgttctctgagatttcagctttggttagtcctctttggctgacatgaacattatggagtgttaactgtggtagcaacacataaccaaaaagcattctttttaaaatacatctagaagatctcaatgacctgaataaatcaatacaatgttcctagtgacagtctctctatactgggaaaactttaaccccgcagctgaggtattatcagttaatgcaaagtacgttgcttgaacctgatttccacccatgcagatatcttcgtacctgggaattcttgtaaataccaaaataaaatctttatcttttttgctaatgagagtaaaaggcacgactgtaaaatatacatcttgatagaaaaatattataaggttttaattttct

SEQ ID NO: 124447 - DNA, 2498 bp, Homo Sapiens
  misc_feature (2488)..(2488): n is a, c, g, or t
ttgtagcttattttcctttattatcccaaaatatctgtgtgaatgggacaatgtcgcaaaacaaggcagaaatctgtagccaagtacgtctcactcagaggaaagaactgattggacagaaggcactagaaattgcattttgttgggttacatgtaaacaggaaatggggggaaagattcacaaaagagaaaggaacttgcaccatcatttcattgccacatcctaaggatgaagaatggcctcactcactgctgatgctccacctatagcttacattgtagtgtaaactgtacctgatggctaaggagacaaatacccacgcagcagcaatgcaggagggcatgaaaaggaattgagattgatctaagcccgcaggtcctctttccctcacagctcccaagggcatcttgtttggcagtgccttgtaaatgcactgctcgtcaactggttagtgaaaaagtcaaatcctaaaatgcttggtgaatacattttgtttctgtcatgctcttcaatcagatgacttggatgggtccgggggtggagggacgtaccacatcaggcctgtcttcttaggtgatgacagtgggtgcagtgcgtcccgtcctctcctgcagctgggacactttcagagcaatggaaataaggggggccaacatgacctgggggtcctggttaatcttggcaacgtccttctcatagctatcgatgtacagccgaatggtggccccggcactcccagtgccgctcagtcggaagacgattcgagaaccatctgtgaaaatgagggcgcaagccctgatttcttgaaatgtttccatcccactgggtcgctgtattcaaagttatcggccttctccacagtgtaaactttgtcatttgctgagaactgcttccccacaaaggagcgatcaaacatcagggcctccaagtccttcatcattttgtttgcgccctcagcttccacctcctcgtaatcatacctggtgaagaaattccggccatacttttgccaatgatctttgagaatgtcctccacactctgcttgcgggtggctaggatggagagccaggcaaggacagcccacagtccatctttctcacggatgtggtcagaaccggtcccgaagctctcctccccacaaagggacagtttgctcgcgtccatcaaattcccaaaaaacttccagccagttggggtctcatacaaagcaatctttgtagcactagccacccggtccagagcaccactcgtgggcatgctccgtgcaaagccgcggaccccagtctgctggaaatacggaatgctgaagatgttggcagcaatgacagccacagagtctgaagggttcacaaagaacccatgcttgcccagaatcatgtttcgatccccatctccatcaaaggcagccccaaaatcatgctctcctgacttcatggtctccaccaggtcagctgcataggtgaggttggggtcagggtggtggcctccaaagtcctccagaggaacgcagttaactgccgagttcgcaggggcaccgagttcttcacagaggatcttctttacatacggtcccacaactccatgcatagcatcaatacggatcttcagtcggtttggcccagaaagtagttctttcagtgcactgaaatcaaagatgcttctcagcattgtagcataagcttctaccgaatccacaatttccactgtgaagggtttgaacttattttccaagtcaaactgctgctttcccagaacaccaaggtctactttcaggtcagggcaaactgcatattcttcaattgtcttgctgatttggaaaattttatcagttattgcttctggagcaggacctccattagaaatattgaatttgattccaaaatctccattggggccccctgggttgtgactggctgtcagaatgatcccaccaatggctttgatttttctaatgatgcaggatacagcaggggtggagaggattccattctgtccgataaccaagcgaccgatcccgttggcggcagcgatgcgagcgatgagctggatggcctccttcatgtagaaccggccgtccccgcccaccaccagcgtggcctcctgccgctgcgccggctccacggtggagatgatactctggatgaagttctccgcgtagttggcgctgctctggaacaccttcacccgcttccgcagcccgctcgtgcccggcttctggtcctggtacgcctgggtcttaactgtcacgatcttcaccatggtggcgacttgctgccgggggtcagagcggcggacttggctggcggaggggcggccggctgaggctgcagctgctctggggtgagggcacggcgggtgggggctacgccgcactctaggccggcgtttggccctcctccttaaagggacaggggacagggccctccctccgcgccagcccacctcctggcaggtccggcgggaggggaaaggggagcgccggtctntaggcctcct

SEQ ID NO: 124448 - DNA, 688 bp, Homo Sapiens
  misc_feature (16)..(16): n is a, c, g, or t
caggaatggccaggancaggatgatctaacctttcccttcaccagaaacaaagctattgccagactgaaccctaaagtcaagcagtcacccactgcctttgctgggagcagaagcccatagcaacaagtgacctgcccctcagactcaagatcccagataccagagctggaggagtcatagggcattactggtaggcaggaaaactgagggtcgaacaaatggaagaatgcggtgatcatagaccaaagacacacagataattaaccccatgtgtccacccaggccaaagttcttcctgctaccccacagtggatgtccaggcagatggtccccacatgatggggaagcagagggcatagtgtggttttgtgggacttgttcatgttttgtagtgtgggctcaacagtgccaaaggaaacactagggaaaagttggtgaaacatgccagctagcaggaccagtaaaggcataatcaggcatttggcaaagcttgcttttctaattcaatgataggttctaataggaaatttttgaagattttttaaaacaatgttatagtggcacttccccagtatggaataaataacatgcattcttttttcaatatactgtcatattcagatgtcattaaaataaatggatgagtcacagaggagctatcagatgctctcatgactaccataactc

SEQ ID NO: 124449 - DNA, 1315 bp, Homo Sapiens
tttaagtttgattttttttatttcaaaatgctttgcaattaaatgaattactgttcagaagtctcccacttttcatacaaaaatactgtgctactgatacagttgaaaaaattcaatgatgtctctcctgcaggagaaattcacagcatccccagggtcaacatgaaatctggccctgtccccgccactgggggctccccaggcctgcgttcctgataaactgggacaggttttccaggcactgaccaactatccaccaagggtcctctgcctccaagacagaccctgaatcaatagcagcaactttcccatatttcatgtagggatatgtggagggggacaggaactctcccatttccccagctgggcctactacctgcctgccctgttcactctggtgccatgaggcaggttcagtgattgattggtcttgcctgctgcagaggacctggccagctccagaagggtcactcatcaggtcctgcaaaggtctgtatcattaatcagtgtcatcagtgtcctcagaagacactagcagagtccagggtgatgcgttcagccacaagcacaaagactgctttttctaaagagcaggatgaggtgaatgtgggaacggaaagcagttgtcacgaaggctgtgtggctctgctgggggagaggcatccacagtctgtgccaaggaggcacctcaccctgtgcagcaggagcgttaaggccaaatatcaaaaggggccaacagaaaacagctcaggtgatggggggaggagcagcaagaaaaaacgacaaccgagaccaactgaaggttcggtcaggaatgcaggctcttccgtctatacagtgtttaaaaagatccaaatgtgactgagatcattccagcctgcactttttatttgtaggcagaaggaacgggataggttgaggggcatgatgggggctctcgccacctcttgtctgcacctctggaacaggtggtagccgaatcattcaagtcctacctggtcagactcccaaccacgctgaggcaggcccttacctggatggcctcatgggcctccctcttgaaaagaccctcactctgtttggaaaagatcccttagcagccataatcaggaaagagactctagagcgagcccagggcttccccaaagcggattttctgtcctgttttcagctggaaattgaagtccttgggggcctcgaagatgagcacgatggtggagcccaggttgaactcgcccaggtgctcgcccttacgcatggggacgccctctctattggtgtgcgtcacgaagctgaagtcattgtaggagccctt

SEQ ID NO: 124450 - DNA, 647 bp, Homo Sapiens
  misc_feature (627)..(627): n is a, c, g, or t
ttttttttgcaaatcaaaactatattttattaataaagtcaatggtaacatttgcttacgtattagaaatagccctgtgaaattttagctgcaaaagggaatcgtttaaaaagcactgctcaactccaagtttgacttacagacaaggtaacagccaccaaacaaatgaaatccctcttctcctttacagctgctccttggacagagggaggcccgtcatctgggtctgaaggaggctcccaagactctgacacagaacactaaactccagggtgttctaggacagtgacaggcaaggctgttctcaatcatctcctgtctgacacggacatcgagctaagctatgagcaagggcgaacaatgcctctcagcagctcctcctccttgaccaggctcccgaccacggagcatttcagtcaaggtctagggatttgagggtggaaggagagaatttcatcactggggaggaactcccctcacagaccccccagggccactcagcttcaatcagctgtaacccagccccaacatctgcaggccactgcgcagggagtccacggtcagcagccacctcagcacacctcctcctgtggccacatcttcactggtttctggaatccaacctgnggcccctcgtgccgaattct

SEQ ID NO: 124451 - DNA, 1104 bp, Homo Sapiens
  misc_feature (1)..(1): n is a, c, g, or t
ntattttattgctgagtcatcctggggttccataaaggaccccaagccttgcttggagtctatagctttgctaggactcccatgacatcaggatagagattgaggcacggggtcctttgggttccgattaaggaactatctactctgattctgttgatcttattagtccctccaggtcacctctacttcatctgtccgatacctctgtgtaaccccagaatcactgagtggggtcctgtgtccagcccgaaacatctcccagccagcctgggctatcatcgctccattgtcaatacagaatctctcatctgtagcaaaaagccgggctccacgttcctggcacattgttgccatcatctcctgtagcctcacattacaccccactcctcccacaatgagggcctcctgggagccacaatgtgccatggctcgctctgtgatctctaccagcattgcaaacacagtttcctgcagggagaaacacagatcctcaggagtacactcgcctgtggccagcatccgatgggctacatcctcaatgaaagacaggatccctgagaatgagacgtccatcccctttacagtgtatggcagctcaaccagcttcttgcctcgtatatggggaaatcgctgaagccccagcagccagcctgcttccaccttatgtccccttaccgctttgccatctgttcaatgttgtatcctggacttgggtcgttagaaatcttcagcactcgagcaaaacgatccagacaattacccactgcaatatcgatggtttccccaaagatacggtaacgatgttcccgagtatgcaaatcacctaagggtgatgaggatgtccatgaaaccccaagtctgtaaagaggattatttggctttgggagaaaaacatagcagaggatcaacatgaccaccagggcttccaataagaagtggaagaaaggtgtttcccaaatggtgaatgggtagtttttacagctctgatttgagaagaaatctgtataccctgaggattccaggaacagattcctagacagtgtaggttcaggcagaaataaactgtcatttcaaatacattggttttccggcttagaagttcct

SEQ ID NO: 124452 - DNA, 1006 bp, Homo Sapiens
accaaaaaaccaaaaatattttattgctgagtcatcctggggttccataaaggaccccaagccttgcttggagtctatagctttgctaggactcccatgacatcaggatagagattgaggcacggggtcctttgggttccgattaaggaactatctactctgattctgttgatcttattagtccctcaaggtcacctctacttcatctgtccgatacctctgtgtaacccccagaaatcactgagtgggttcctgtgtccagcccgaaacatttcccagccagcctgggctatcatcgctccattgtcaatacagaatctctcatctgtagcaaaaagccgggctccacgttcctggcacattgttgccatcatctcctgtagcctcacattacctacaaagaggcagggaacaggattagcttagttttagccatctcttcatggtccagcagaacacgtcatgtgcactcacttagaacaatgacataggggattaggggcaaggattgggaagcctactccaaacgcttaatgatttagagtaccaggaggaagacgcatagtgttaagaataggaaagaggaacacttttcaataatacatacaccccactcctcgcacaatgagggcctcctgggagccacaatgtgccatggctccgctctgtgatctctaccagcattgcaaacacagtttcctgtcagggacagataaggagaaaatattagaggggcatcccagattagttctgctctacaatataaaaccttcagccccaactttctgtcccagttttttactgcattacctgcagggagaaacacagatcctcaggagtacactcgcctgtggccagcatccgatgggctacatcctcaatgaaagacaggatccctgagaatgagacgtccatcccctttacagtgtatggcagctcaaccagcttcttgcctcgctttgccatctgttcaatgtgatcccgggaatccggaccggtccagcct

SEQ ID NO: 124453 - DNA, 1365 bp, Homo Sapiens
tttttaaaccaaaaatattttattgctgagtcatcctggggttccataaaggaccccaagccttgcttggagtctatagctttgctaggactcccatgacatcaggatagagattgaggcacggggtcctttgggttccgattaaggaactatctactctgattctgttgatcttattagtccctccaggtcacctctacttcatctgtccgatacctctgtgtaaccccagaatcactgagtggggtcctgtgtccagcccgaaacatctcccagccagcctgggctatcatcgctccattgtcaatacagaatctctcatctgtagcaaaaagccgggctccacgttcctggcacattgttgccatcatctcctgtagcctcacattacaccccactcctcccacaatgagggcctcctgggagccacaatgtgccatggctcgctctgtgatctctaccagcattgcaaacacagtttcctgcagggagaaacacagatcctcaggagtacactcgcctgtggccagcatccgatgggctacatcctcaatgaaagacaggatccctgagaatgagacgtccatcccctttacagtgtatggcagctcaactagcttcttgcctcgctttgccatctgttcaatgttgtatcctggacttgggtcgttagaaatcttcagcactcgagcaaacgatccagacaattacccactgcaatatcgatggtttccccaaagatacggtaacgatgttccgagtatgcaatcacctgcgtatttcctccactcacatacaacacggttgggctggtggctccagtgatgaggcggcccatctcaatgtggcctatacagtggttcacacccaccaatggcttattccacagttgggccacagtacgggccacaacagccacagaaaccagtggggcacccatgccagggcccttggtgtatgcaatgcagtcgatatcctgggaggttaatccagactctgttagtgcctcctgcagcaggtctaggataacagctcggtgatgcctggctgtatcacctggaaggaatcctgtgccaggaggcgtgacgtaagtccgccgcgggttcgccagcaccttgccatcccgcaccacgcccacgccaatcttattggcgctgccttcaaaacccagcaccgccggcatggcggaggctgggagaaaacgccgacaggactcctggcaatgtcaggagctgtggaggtcctcactagtccgcgctgggccgcagctttccggagcgcagaggaagctggccagcctgcagatagcactgggaaagcctcgtgccgaattcgcaacccaggcctcgctacctagacgtatta

SEQ ID NO: 124454 - DNA, 1004 bp, Homo Sapiens
  misc_feature (558)..(558): n is a, c, g, or t
  misc_feature (654)..(654): n is a, c, g, or t
  misc_feature (697)..(697): n is a, c, g, or t
  misc_feature (737)..(737): n is a, c, g, or t
  misc_feature (771)..(771): n is a, c, g, or t
  misc_feature (817)..(817): n is a, c, g, or t
  misc_feature (875)..(875): n is a, c, g, or t
  misc_feature (913)..(913): n is a, c, g, or t
tgaaatataaaatcaataataatttttattttttgttcagcacacatggcaacacagagctgtgaagacagacgtggttagcacaaaccacttgggccagtgaaaccagggcaaactcatggatcatctgcgttcccatcttcaccttggtggcagccctacctctgagattttaaggtctacggaaagtgcaggcttccaggagtgctgtggagcagagcagagaggtaggattttcaaaatcttcctatatttatttctgaactgtcgagtgattgaacaatttcagcatagtacacagtgtgcagacttgctgcctcctcttctgtgaactgggccgttctcccagtgctcttttctacttgcctgcacagctcctgtgcctatcctggggagtgccccacgccaaagctgttaacatgattttcctgccctacagggtcctccaccttgtttcttatgggcgaggctcacacatctgagttcctgaggccaggagtcgcccaggaagactgtcctccctgacctctttaagcaggtgaggaactgacatagcanaaagcacctgcaatgtgccagtttctgtgctgtgggctaaggatggaggaaagaagagcagagccagactgtctgcttttgtggaggatataggtnaggtaaatatcaacttgattctcacaatagcgaacctagacancacattgctgcttccgtcagaatacatgggggcagctttntcaatgcggatacctgacctagcacagacttctnaatcagtatctcaaggctctgagaatcagcatttttataggatcangactccttatctgcaactcctgtgggaagactactgcctacacacatgttatccccanctccaaacttttcaggtgctcagtacacccacatagtntactgcaaagagtgttttatctattcagtcccaaaactggggtccaatgagtatatgcaagcactttaggtaccagactacattgtgtaac

SEQ ID NO: 124455 - DNA, 948 bp, Homo Sapiens
ttttgaaatataaaatcaataataatttttattttttgttcagcacacatggcaacacagagctgtgaagacagacgtggttagcacaaaccacttgggccagtgaaaccagggcaaactcatggatcatctgcgttcccatcttcaccttggtggcagccctacctctgagattttaaggtctacggaaagtgcaggcttccaggagtgatgaggtggagcattttctcaggttaccaacagccttgacatattcttctcctaagtatttttcatatgtgtttctgtcatgaagtttggccaaacatactgtgtcatctctgaacagaaggtccttggtttccgaccggaacaaacaaaagttgcccgagcagtcagttacgttgcttccaaataggtgctgctgttgacgtaatatcttgtggacgcaagcttccttatctttccgtgtgaccacagcgtgattcggggctctggccaggtggcagttcgcatactcctccacaggtttcctggtaccatcaaggcacagcaactcatagtctttttcattcagattcttagcccatggatcagggttttttcccccagtgttctgtgggacagtctggtgtttcacaaaggccacatctcccttctcaaccagacacctgaaagcgcctgtgtagccgtagtatccctctttgttgttgggttcacacaggtttaggcctgagcccatacacagcttacagagactggagtctttcttagacccaggggcacaaccttcactgaaaaattcatcaaatctgcagtggttgatcttattgtagagcaggcccatggggatgttccagccagcggttctgccaactgccgtatggcaggacttcttgcctttcagattgtcccaggtcccggccgtaatggccgaattcccgggcatatgtccggtaccgtcgactg

SEQ ID NO: 124456 - DNA, 908 bp, Homo Sapiens
gcaatcagaaatattattttaatggtatttctattacatccacaattgaaatttttttctaagaagaaaaggagaataatgtattcttttcactccattagcccttgcagacattaatgccacaatttctaatgctcagacttttctccttccatttagaagaaatggccccaggcaaagaaaaaagttgcctggactgatgtggggagcctcctatgcagataggtgtagttaacaggtgtgaagagattaagtgacacctaaagtcccaggttcctggctgagatgtttgggccacgggtttcgattaagatacaccataggctctacacgatcggccctggggtcagcattctgaattcaaagatggggcttttgctcaggacctgaacccacctggtactaaatctcaattttctcccctgtttaaaaaagggggcagttttaaaaatccctgctccgttgaacccactaaggaggctccagaaagtcaagaacgattggcagaaacgcttttcaggcctcagactgcgcagccaattacacgaatgtcctcggggtaccccattgttgagagcattcggtgggacttccaggtcgccatggtgaccaggaaattcaaggtccctgcggaaacaatcgtcaggaacttttccactggaaacttcagtcagttgctcaccacagagaccctctgtcaagttgtttcaccccagtatgttttgggtgtgatttgggagagggagcaaggtgtctggggtccctgcttccagacccttctgttaggatgtcaccaaaggccagaaacccagcaccagggagccacaggagactggctggagaggaagaaaaattagaggtctcgaccaagcaattgtttcagtgacagatccttccagattggtaac

SEQ ID NO: 124457 - DNA, 3059 bp, Homo Sapiens
  misc_feature (1883)..(1923): n is a, c, g, or t
tttgggtttctgcatttgaaacatttatttcaggaaatacattttcaacactttgtcatttatacaaaaagacaaatttctcgggaggcacgtagcaaaaggccattgaggaacagagcctgatgaaacgaacaatttttcaaagtctggttacagagaaggaaagtgaagcatctcaaggctgggatgctgctgcccacccccaccccaccccgccgccaagtgacattgaggctgggcaggccacatggcctgggccctggcgctggccactcatttccttcaaaatcttggttttggcaaaaacatggcaagtcggcaaagtaaactgtctcgccagtgggggtggtgaggggtccttcctctcttgggtggggagggagtcagacgcccagtgccccaacttccatgcacacacactcacactcatacactccttctcgctgaccttctcctggctgcaagcagccagcccggtgcctgcagatgcacctggtgatgtgtgcacctgagtggagtctcatcaggcccctctttctccccaggagcaagacaggtaacaggaagcaggaagggactttggtcatctgtgccctgcaaagacagcccccatgggtcccctcgtggggacagagggtgaggggccgggccgtgctgccacgaaaccttgctcttcagctgtggactgtgcacccctgacgcccgttctctcctttctaggggttcgttaccatgggctctgaggggaggggcccaggcacgggtagatcaacagagtcaggctcgcctggcctcccacctccccagctcagagagtcagcaaggcctgggccaggaggggtgagtggcaggggtggctggctgggcattaatgtaactacagcccagtcttgggccaaacccagacactagacagacagacggacacgcatacacatggacacacacacacttccctggtcacttgggcagggcaggcgccgggcagctcacgccactctgaccagcccaagccacggcccacacgtgcccccgccaaccttccttctggcaccttccatggctccctccttcaggtcctccaccagactcacttgcttagaccttttcaaaactgggggatgagggggtaggggtcatctctccttcctttttatcctcaatcagatcccagcgcatcagcagcacctgcagcccggtgggggcgggggtggcgtgagagggggatggcagggagatgaagacgcctccctcattccagcctgtccccgcatctggccaagcagtctgcggatggctgagataaaggcactttctgctccaggaggggcagctgccagggggcttggagtggctgggcagtcggtggcaggggaccctggagttttctacccttaggagcagggcaggggtaggggctgagtgatggccacaccatgtggcgggcagggggtccaggtgctcctggtgggctgcattctcccctgggctctgacacactccaggggacagggccgatggggatggaggggagcgtgcagcccactgggctcctctgcaagtgcgaggcctggcccccaccccaaggcctccggcactgagaaccccacacagacggatgatctgcacaccgaagctgctcttctgagccctcggggagccaggcctggggacagagggtcatgtcaattcagtgggtgctctcacccctgcctgtggctccagtgcagcctccccacaacctcggggaggccgcggcctcatcactgactcactcggagggaggccccttcccttgtttcctggcagcatgtcgaaggggtggggaacgatgacaaatggagaaaatcatataaaataaaatggggtggtgggagggcctnnnnnnnnnnnnnnnnnnnnnnnnnnnnnnnnnnnnnnnnntgggcagggtggcgtctacatctccggggcttctggctccttctcctccacgccgttggccatggcgctgctgccctcgttgaggcgcttcacacggtacgcctcgaagtggatgctgctggtgatgtccttgatgttctgcatgtgcgtcctgatgagaaggtcccgcaggtaggcaaactcacagtgtgtggtgttttcaacttcgatggtaccccacttggtcttcctcccaaggatcctcttgccgttgacctggtactcgtggtcactgcccaccacagcaaatgggatcatctcccggaacttctcgttcaccagccggtcctccgagtcctcatcaaattccttctgggggtacacgtcgatgccgttggacagcaggtctgcggtgatccgctgtttgaagtggaccctctcctccagggtgagtgtgtccgccttggcgatgacagggacgatgttgaccaccttgctcaggcgtttcataaactcgatgtccaggggcctgagggagtggccggtggcggggatgaagtagaggcagcagtggacgcgggtgtccgggatgcgcttcttgcggttgatgttgacctcctcctgcaggtatttctcgtactggtcattgatgaacttcatgatgggctgccagcagttctcgttgttgatgtggtccccgaaccctggtgtgtcaatcactgtcagcttcatccggacgcctttctcctcaatatcgtgcgtgatggacttgatctcgatggtcttggggatgcgctcctctgaggtgggctgcaccgacttccggctgattttggatttgaagagggtgttgattaaggtggatttacccaagccgctctgcccgaccaccatgatgttgaactcgaagccctgcttcatggccttccggcgcatctgctccaggatggagtcaatccccacgtagccgaagtccaccggggccttctcgttccgtgatgcaggcgcctgcttgagcccggcatctctgggggtgtcggccatgtcgccaacgcagctgggagccgcctcagtggcccagcagcggcacgtcgggcctgcgctgacgcgcacgagagccgcggcccgcccaccgggtcacatggctcagagccgag

SEQ ID NO: 124458 - DNA, 1208 bp, Homo Sapiens
gtcatcacgtcagctcatccgacgcctctcctcatatctgcgtgatgactgatctcgatgtctgggatgcgctcctctgagtgggctgcaccgactccggctgattttgatttgaagagggtgtgattaaggtggatttacccaagccgctctgcccgaccaccatgatgttgaactcgaagccctgcttcatggccttccggcgcatctgctccaggatggagtcaatccccacgtagccgaagtccaccggggccttctcgttccgtgatgcaggcgcctgcttgagcccggcatctctgggggtgtcggccatgtcgccaacgcagctgggagccgcctcagtggcctcctggctccggggtgtagcctcagccacagggggctggggcttgggctccagcctgctctgcagctgagacacaggggcaggctctgaattctccaaggtctgggctgggctgggggcggtgggcgcctcagcaggcttgggcatctggatctccaccctcttgggggctgcgtcggtggcaggggcagtgggcacctcggggaccttggaggcagggggctccatcctccggtgggctgactcctggggtttgacgatggtgatctccgtcctccgaggggccggttctggcgtcttgtggcccaacacctcggccctcttgagcccgaaccgggacgggccgatggccccggcgttctccacctgcttggacgagatgtcaatggacagctcagtgcgccgggacaccggctcggccgccttggggcccgagagctccaccctccgcagggacgccttgggggagcgttggcttagggagtccacatggcgggccgagggttctgagttcttcacgcccaggtcctggaatttctgggtggagctggccacagtggctcggagtaggggagtctggaccctccggggtggggtggagttgggtgtctcgacctcctcgacctcaaaagatcttttcaaggctgggccactggagtcaccaagcctccggagccggccactggaggtccgcgtgcctcctgagtaagacttcttcatggtgcctccgtggccgccgctcccaggaaagtgtggcggcgaggcagcggggcgcgcgctcccagggcgctaatcctgggccggtacctcgtgccgaattcggcgcgccgtcgacttcatactctccccccttcagtcc

SEQ ID NO: 124459 - DNA, 1733 bp, Homo Sapiens
  misc_feature (44)..(61): n is a, c, g, or t
taccctcactaaagggaataagcttgcggccgcggctgtaggcnnnnnnnnnnnnnnnnnngaacttcagattattaggtttattgaaaccatcctcttggcttggctgaaagacattcctcagtatcttttacaggaccacaaaagatcagggtcctgcaaaatctcaacaaatattaggctcaacaaaccaaatgtgattctcagattaagcagaagcgttcaggctcagggcagtagaagaaagcagactcgccagtccctgcagctccaacctgtcctcgtatccacctctgtttttgcaggcactttccgtgaagagttggagagaagacctgtaaatgggaagactgttccactggaattgatgttctgatgttagaggtgagagaattccaagttttgaggggagtggtccaaagagtaacaactaagtctatagatggcccgtaaaacacagaatgagcaggacatgaatcattagaaagtagatggctgctagaagtggcactcgggtccgtgaatgacagagtgaacgcaggactcgcttccatccaacgccactccgggtccttcgacaactgttgcttgtaagatctattaacagtgcctgctcctgagtgccacaggagccaatgataggagtccgggaagagtcccattcactgtgctctaaccgtctgatctgctcctcggccacagagagagattctcagcagccactctttggtctcgttcttcttccagcagcttccttaattcattcacttcctgtctggtgttgcatagctgctgctgagcttcagaaaagctttgctgcggttcccttagttcctcagggtcactctttctgtgaactccattcttttcctggggagctcctggcagctacatctatatttagtggccccgcctgcagctcttgaacctgcttctccaagactgcacagtgatttaataaggtcaccatagtgctgctggttctcacgaagactctgactggtatcgcagagctgaatggaaagggtgtttttctcttccagtagctgagagaagttgctgttcagttgctgaattcttaactccttttggtgaatttcctttaagctgtcattgagctgggtcctgagaagttctgtctcataaacccagattttgtgaccccatctggggaagctgatgtctctggggatgcctgtctttggtattgcactttgagaggctgagtctgggaggaagaagacctcaattcccttataagattctgcagatgactgagctgctgatctttatctgagatagccataaggtactgttccttcattctcctctcatgtatttcccaggaactcttctccatcctgagctgatgcagctcatgctgccaggagaggttttcctgcctgagctcttcttgcataatctgaaatgcttttgtcttatcttgatactcctgaagttgagccttcagtggatgtaactcagtgatctcttgattaatctgtaagtattgctgctgcagattcttcaattccttcagtctgcagaatcttcaaaaggctcaggaattaacagcatcaggcaccttagtctgtctctgtcattttggagtgaagacatagctttttttaaactctgtacttcagctgggctggtggaaggctgagctgcagacctctgcttcccttcctctgactttcgaaatttctccagctcattccacaggtgatccc

SEQ ID NO: 124460 - DNA, 489 bp, Homo Sapiens
ttgatactgaacttcagattattaggtttattgaaaccatcctcttggcttggctgaaagacattcctcagtatcttttacaggaccacaaaagatcagggtcctgcaaaatctcaacaaatattaggctcaacaaaccaaatgtgattctcagattaagcagaagcgttcaggctcagggcagtagaagaaagcagactcgccagtccctgcagctccaacctgtcctcgtatccacctctgtttttgcaggcactttccgtgaagagttggagagaagacctgtaagtattgctgctgcagattcttcaattccttcagtagtctgtctctgtcattttggagtgaagacatagctttttttaaactctgtacttcagctgggctggtggaaggctgagctgcagacctctgcttcccttcctctgactttcgaaatttctccagctcattccactggaattgatgttctgatgttagaggtgagag

SEQ ID NO: 124461 - DNA, 2244 bp, Homo Sapiens
  misc_feature (1856)..(1953): n is a, c, g, or t
ttttttcattctgaaaataattttattattttacagttgttcaggaaacttcccaggatgttgtaaccaagatttaatcaccacagtagatttagagcagatcagtcagcccacttgtcttctctcttctttagggagaggctaggcagtgaacacatcatgtatgcaatgagaaaataaccaactggtaggatgggggaggggaggggaggcagggaataggcacaaatggaattctatcctggctgtccttctcaggtctatctatatttaattttgtcttctctatattctccttccattgccacagagggcagagacaatggggctgagaaactgtaataactgtcactaacagcaaagtagcttagtacttcaagaggtcaggagttgcagtgtggtgttagaccagtcagactcctggctgagagtcaatgcctaatattggctcccagtggcccctgagcactgtctcagggtccacattccaggaatattcagatattcctggaatgacaagaattggaaccctgctgtccatagacacttctccctgccctttggtgaaaggaaagacttgggccacttaataccttagtatacatgtgatcaagggcaaaagcaaagggattctatccttatagtctaagacctgaaattctccctccaattatatctgaaattggcagggaagaagatgctgtcctcccatgtgatctaacagctaaaacccctagggagttccttcagctttcaccaccctattctgcaagagacctaaatcagatgtcctatgaggtgacatgttcatttccctgaactctgtttatggcagagccaccttccccctgaaacaggagaaaatacaggcaaacaaggcaaagaaagttatcaatcaaaatgatactgaacttcagattattaggtttattgaaaccatcctcttggcttggctgaaagacattcctcagtatcttttacaggaccacaaaagatcagggtcctgcaaaatctcaacaaatattaggctcaacaaaccaaatgtgattctcagattaagcagaagcgttcaggctcagggcagtagaagaaagcagactcgccagtccctgcagctccaacctgtcctcgtatccacctctgtttttgcaggcactttccgtgaagagttggagagaagacctgtaaatgggaagactgttccactggaattgatgttctgatgttagaggtgagagaattccaagttttgaggggagtggtccaaagagtaacaactaagtctatagatggcccgtaaaacacagaatgagcaggacatgaatcattagaaagtagatggctgctagaagtggcactcgggtccgtgaatgacagagtgaacgcaggactcgcttccatccaacgccactccgggtccttcgacaactgttgcttgtaagatctattaacagtgcctgctcctgagtgccacaggagccaatgataggagtccgggaagagtcccattcactgtgctctaaccgtctgatctgctcctcggccacagagagagcattctcagcagccactctttggtctcgttcttcttccagcagcttccttaattcattcacttcctgtctggtgttgcatagctgctgctgagcttcagaaaagctttgctgcggttcccttagttcctcagggtcactctttctgtgaactccattcttttcctggggagctcctggagcaacatctatatttagtggcccctacataaaactcttgtcttgattagatttttctcccagattctcattcttgaatttctcctcttaaaagttaagtctgggccgggcgccgtggctcannnnnnnnnnnnnnnnnnnnnnnnnnnnnnnnnnnnnnnnnnnnnnnnnnnnnnnnnnnnnnnnnnnnnnnnnnnnnnnnnnnnnnnnnnnnnnnnnngcctgcagctcttgaacctgcttctccaagactgcacagtgatttaaaaggtcaccatagtgctgctggttctcacgaagactctgactggtatcgcagagctgaatggaaagggtgtttttctcttccagtagctgagagaagttgctgttcagttgctgaattcttaactccttttggtgaatttcctttaagctgtcattgagctgggtcctgagaagttctgtctcataaaccagattttgtgacccatctggggaagctgatgtctctggggatgcctgtctttgg

SEQ ID NO: 124462 - DNA, 572 bp, Homo Sapiens
gattaatatgttctttatttgatgcttttgtgtgcacaacactataaggagttgcccaattcaccaagtcagcccgttcacacccttagttaaggtggccattaaggggccagggggtggcaatcagtaagctgcctcctgcctaactctctttctccaaccattctctataggctccagcgtagttgcgagccccagtgtatccaagactccgggccagctgcgtggcctggaggccccgcttgcccatctgacagaagaaaacgagatgctcatcttccagctttggcttctcagcagaatataaagcctggaaggcagctggctccatctgcagagcactctccaactcggacaccgggatgttgagcgcccctgggatggtcccagctgccgcctcctcgcgagagcgcacgtcgaagagccgggcccgtccggaggctaggagtgaacggagttcaggaagcgagaccgtgggcgctccagccatggtgcgcgtagcaaccgcgagtctccggagtgcggccctggcccgccctctcctcgtgccgattcacccccgggcctcacat

SEQ ID NO: 124463 - DNA, 1192 bp, Homo Sapiens
  misc_feature (80)..(88): n is a, c, g, or t
  misc_feature (267)..(348): n is a, c, g, or t
  misc_feature (386)..(402): n is a, c, g, or t
  misc_feature (410)..(579): n is a, c, g, or t
  misc_feature (1083)..(1117): n is a, c, g, or t
atattattttttgccccccgcgcacccgggggtgtttgttccccgcgggggtgaaaaattatttacaccaccactgtgtnnnnnnnnntgcccctcggcgggagaggggtttttttaatattcccccccactctctcctaatatctcaccgcggggggggcataaataaaaaaaaggatccggggggaccctcttttgtgaaaacacaaaaaagcaccggacgcacccctttgttgttttatacacccccctttttcacccgggggnnnnnnnnnnnnnnnnnnnnnnnnnnnnnnnnnnnnnnnnnnnnnnnnnnnnnnnnnnnnnnnnnnnnnnnnnnnnnnnnnnggggccccgccccccaaaaaagttttaaaaaatttttnnnnnnnnnnnnnnnnncgccaggnnnnnnnnnnnnnnnnnnnnnnnnnnnnnnnnnnnnnnnnnnnnnnnnnnnnnnnnnnnnnnnnnnnnnnnnnnnnnnnnnnnnnnnnnnnnnnnnnnnnnnnnnnnnnnnnnnnnnnnnnnnnnnnnnnnnnnnnnnnnnnnnnnnnnnnnnnnnnnnnnnnnnnnnnngattaaatgttctttatttgatgcttttgtgtgcacaacactataaggagttgcccaattcaccaagtcagcccgttcacacccttagttaaggtggccattaaggggccagggggtggcaatcagtaagctgcctcctgcctaactctctttctccaaccattctctataggctccagcgtagttgcgagccccagtgtatccaagactccgggccagctgcgtggcctggaggccccgcttgcccatctgacagaagaaaacgagatgctcatcttccagctttggcttctcagcagaatataaagcctggaaggcagctggctccatctgcagagcactctccaactcggacactccagccatggtgcgcgtagcaaccgcgagtctccggagtgcggcctggcccgccctctcggcgcctgcaacatctcccgttccctcccagagctccccggccgtaatggccgaattcccgggcatatgtccggtaccgtcgactgnnnnnnnnnnnnnnnnnnnnnnnnnnnnnnnnnnncgccgcttcctcgctcactacttcgctgcgctcggtcgttcgctgctaagagctagcgccctatagtgtgatcaa

SEQ ID NO: 124464 - DNA, 531 bp, Homo Sapiens
tttttaaagagaaacatcagggactttaatcacatcccgcagctctgcggacctgcccaggcgctgatgctgcgcacagcccacccccattccctccctcccgccctcctggccctggccagctcagctctgtccggggtcggagagggggtcctgaggcagcagcagcccagctccagagtgacaggcaggggctgtccagctgagtctccgcccccacgttgccctggggcaggcccagctgctgtcagtgctgcttgagacactcagcagcatcttccaaggtcaggttggccaagtgtgggggctccagacaccttaaggctggcgataccaggctgggatgtccgcagggtgtgcaggccgcggcacgctggtgttggcttacgagcaccccttctcccgaggcctcccttctctgggtcactcacaaggccggggtggctctgtgtgtcccaggccaggagaaggcagaggagcgtggtctgttcatgaaaccaccacatgggtgtggttgcagaggtgacatcc

SEQ ID NO: 124465 - DNA, 592 bp, Homo Sapiens
  misc_feature (123)..(123): n is a, c, g, or t
ttttttaaagagaaacatcagggactttaatcacatcccgcagctctgcgaacctgcccaggcgctgatgctgcgacagcccacccccattccctccctcccgccctcctggccctggcgacnatcagctctgtccggggtcggagagggggtcctgaggcagcagcagcccagctccagagtgacaggcaggggctgtccagctgagtctccgcccccacgttgccctggggcaggcccagctgctgtcagtgctgcttgagacactcagcagcatcttccaaggtcaggttggccaagtgtgggggctccagacaccttaaggctggcgataccaggaaggccggggtggctctgtgtgtcccaggccaggagaaggcagaggagcgtggtctcatgctcgtgtcctgtttgtgccagttatttatgtagttcaggaggccctggacagctgacttccactgcgccgaggactcgcagttatagccaaagcaggcgacgtgcgagtctgtgcagttgttgcaggagatggtctcgtactggaagatgccacagcggtgctgacagtcgatgcggctttcgatgatggcgt

SEQ ID NO: 124466 - DNA, 901 bp, Homo Sapiens
gttttgagaaacatcagggactttaatcacatcccgcagctctgcggacctgcccaggcgctgatgctgcgcacagcccacccccattccctccctcccgccctcctggccctggccagctcagctctgtccggggtcggagagggggtcctgaggcagcagcagcccagctccagagtgacaggcaggggctgtccagctgagtctccgcccccacgttgccctggggcaggcccagctgctgtcagtgctgcttgagacactcagcagcatcttccaaggtcaggttggccaagtgtgggggctccagacaccttaaggctggcgataccaggttgtgccagttatttatgtagttcaggaggccctggacagctgacttccactgcgccgaggactcgcagttatagccaaagcaggcgacgtgcgagtctgtgcagttgttgcaggagatggtctcgtactggaagatgccacagcggtgctgacagtcgatgcggctttcgatgatggcgttctggatgaggtgcacctgctcccggaagatgtttcgcagctcgttggggaaatacccggggaagtacatcttcccctggtacagctgatccatcatctggtacactggtgtcgccactttgtccagcttttcccgggtgatcttggcggggatggccaggtgcagctccttcatcgtgtcgtcgctccagtcggtgagcagcgcccctgacacggggatgtcgcccacccaccaggacttgaagttcacatggtggcggtagaaggagaacttcttggagaagttgctgtggcagtgcagacagccgtgggccagcgccgccgtcaggcacaccaggcacagcagcagggccatgcccgtcccgcccgccgccggccaaccaac

SEQ ID NO: 124467 - DNA, 1804 bp, Homo Sapiens
  misc_feature (528)..(528): n is a, c, g, or t
  misc_feature (734)..(753): n is a, c, g, or t
  misc_feature (1587)..(1587): n is a, c, g, or t
  misc_feature (1593)..(1593): n is a, c, g, or t
  misc_feature (1642)..(1643): n is a, c, g, or t
  misc_feature (1652)..(1652): n is a, c, g, or t
  misc_feature (1655)..(1655): n is a, c, g, or t
  misc_feature (1660)..(1715): n is a, c, g, or t
  misc_feature (1736)..(1736): n is a, c, g, or t
  misc_feature (1741)..(1741): n is a, c, g, or t
  misc_feature (1767)..(1767): n is a, c, g, or t
acgcttcgttgggtgtcccgtccccgtgtgaatgtcttcgcattgtcgcggccgctgctgcgctagaggcccactgtggtgtcagccagtcgtcgtttttcccgctgtcggatgtacatgtatacttgcggggttctactcataggttttcggtcggaaatggagtggcgcctgtaacgtgtaagccgtcggttgcgtgcttattcgtaggtaccccgttatcgcagcctgggactccattgcctgcgctcacgtggcgtgcataacgcccacgtgggacgcccggcgttccgtggcagtaaaaggcggtcgtggcgtcggccgacgtgtgacggtcggctgcgtgatcgtgacggcggctgggtggtaaccgtgtggggtttagctacgtggtggcggggcgggcactaggtggtggtcggcctggggcgagaagggagttgtcgagatgggtgccgctggagtcgcacgtagggaagaggcgcgggtcatgattgggcgggcgtgtgtgactgtgccgggggtggncttcgcccggaattcaattaaatgcaacgggttaaacccgggcttaatcgaaatttaatacgagctcactaataagggaagaccggcagagtctaccacaccttggaacaagaaaactgggtcacggaaaacaagctaatgagccacatgggccacatttcaattacctctttttccgcacccccgaacatatgagtgcctcgagnnnnnnnnnnnnnnnnnnnngccgatgctactattttattgcaggaggtgggggtgtatgcaccgcacaccggggctatgagaagcaagaaggaaggagggagggcagagccccttgctgagcaacaaaggccgcctgctgccttctctgtctgtctcctggtgcaggcacatggggagaccttccccaaggcaggggccaccagtccaggggtgggaatacagggggtgggaggtgtgcataagaggtgataggcacaggccagcccggtacagacccctaggcgtcctgacaggtggatttcgacaaggtcattgtgccctgccaaggcacagcgtagatctggaaagagcagaatgctttccttttcagatgtggctggtcatggaaggggcagttgtccaagttgggctgggtcttggtacacgtggttcggcccagctccacgtccaagaagtagttcaccccagctacgatctgcttgcgggcgcgcaccacctgcagcgcgcggctgtggtacatgtcgttgctggctttgttgtactcgccgacggcaaagtccagtgcacgccgcacaccctcctcctccacgctggcgtccatggggcctcccaccaggcgcggcggcttgccgggactggagccggccgcggggctcacggccagggccacggccaggatggccagcaggagcagcggggcgcgcaggggcccggccatggtcggctaggacgcgggacgcggggagtggggcgcaggcgagaggctggagctagatagagaggacccgctgcgataccgaggcgagccgtgagccccgcgagggcggcgagtgcggttttatcccttccggncttcgncgccccaccccaccgcggctgcactcccttttccccctcgtgcgattcnntggctcganggncaaannnnnnnnnnnnnnnnnnnnnnnnnnnnnnnnnnnnnnnnnnnnnnnnnnnnnnnnttggtatcggctcacattccnacacncatacgagcgggagcataagtgtaangctggggtgctaatgagtgagctactcacattattgc

SEQ ID NO: 124468 - DNA, 895 bp, Homo Sapiens
gttattctgtggggcgcgccggtgctgtccttctctttttgtttttccgatgctactattttattgcaggagttgggggtgtatgcaccgcacaccggggctatgagaagcaagaaggaaggagggagggcagagccccttgctgagcaacaaaggccgcctgctgccttctctgtctgtctcctggtgcaggcacatggggagaccttccccaaggcaggggccaccagtccaggggtgggaatacagggggtgggaggtgtgcataagaggtgataggcacaggccagcccggtacagacccctaggcgtcctgacaggtggatttcgacaaggtcattgtgccctgccaaggcacagcgtagatctggaaagagcagaatgctttccttttcagatgtggctggtcatggaaggggcagttgtccaagttgggctgggtcttggtacacgtggttcggcccagctccacgtccaagaagtagttcaccccagctacgatctgcttgcgggcgcgcaccacctgcagcgcgcggctgtggtacatgtcgttgctggctttgttgtactcgccgacggcaaagtccagtgcacgccgcacaccctcctcctccacgctggcgtccatggggcctcccaccaggcgcggcggcttgccgggactggagccggccgcggggctcacggccagggccacggccaggatggccagcaggagcagcggggcgcgcaggggcccggccatggtcggctaggacgcgggacgcggggagtggggcgcaggcgagaggctggagctagatagagaggagctagatagagaggacccgctgcgataccgaggcgaggccgtgagccccgcgaggccggcgactgcggttttatcccttccggc

SEQ ID NO: 124469 - DNA, 852 bp, Homo Sapiens
cgccccggatatgctgggacagcccgcgcccctagaacgctttgcgtcccgacgcccgcaggtcctcgcggtgcgcaccgtttgcgacttggtacttggaaaaatggacaaggattgtgaaatgaaacgcaccacactggacagccctttggggaagctggagctgtctggttgtgagcagggtctgcacgaaataaagctcctgggcaaggggacgtctgcagctgatgccgtggaggtcccagcccccgctgcggttctcggaggtccggagcccctgatgcagtgcacagcctggctgaatgcctatttccaccagcccgaggctatcgaagagttccccgtgccggctcttcaccatcccgttttccagcaagagtcgttcaccagacaggtgttatggaagctgctgaaggttgtgaaattcggagaagtgatttcttaccagcaattagcagccctggcaggcaaccccaaagccgcgcgagcagtgggaggagcaatgagaggcaatcctgtccccatcctcatcccgtgccacagagtggtctgcagcagcggagccgtgggcaactactccggaggactggccgtgaaggaatggcttctggcccatgaaggccaccggttggggaagccaggcttgggagggagctcaggtctggcaggggcctggctcaagggagcgggagctacctcgggctccccgcctgctggccgaaactgagtatgtgcagtaggatggatgtttgagcgacacacacgtgtaacactgcatcggatgcggggcgtggaggcaccgctgtattaaaggaagtggcagtgtcctgcgaacacacactccaaagtacc

SEQ ID NO: 124470 - DNA, 913 bp, Homo Sapiens
ccgagaacaagtgcactttattggttctgatacagaggagctgccaaaaaagccagcaggcggttgcggcacccagccctgcccgaggggagcaccaggtctgcaggcaccgggcctgatccggagctgccaatcagcaggcagccctgcctgcacagtcctcttgggcagcccacagcctgtggccggcaagtccctccgtggaggcgtgggttcccaggtggccagtctttcctgcgcgaatggggcttctcacctggccacggccacagccacagtgccccagcctgcctagactccacgaggccccggtatctccaggacagctaaggctgctactcaccacgggctgtggctgccgcagagaccccaggccctcggcctctctggcctgctcgggcccacatcccgctgggcacagtccaggcagcagggcgggactggctgcccacgaccaccctgcttgcgccacgcctggtgctctgagctggccgcctggtgcgggctgaaagtagagggatggagcttcctccagtggccccagcatcaacaggtgcttctcgctgtcctctgggccagactctggcctggctcctgctccccgacacgttcaaaggcggtggcagcggcccagagagccacgagatccagtgtgcctgcgcacgcatccagcctgggcgtctgtgggtgtccactcccggttctacagtttgagtcgggcaccctcagcttgttgtggagccctctccctgaatggcttcgtgccagccttgagaggcccatggccggggcagtgactgcctgcaggtaggacctcactcggcagggtgctcttcttgccccagggtccgaggggcaggcccctagctcccaggccacctgagacctgcccactttctggttagaccgtgac

SEQ ID NO: 124471 - DNA, 738 bp, Homo Sapiens
  misc_feature (627)..(627): n is a, c, g, or t
  misc_feature (637)..(637): n is a, c, g, or t
tttttcttttagccaacaggctcttttatttagcacctatgctgggcaaagggttgagaggtagatacaaaagggtaaagacatggtttcttccctggcacataagtctgaggtagaggctgaggctggatctgccccagctggacacgctgtcccccacctctggctgacccggccctcagcaggagccaggggccgctctggtatctgttgcagtctggctggggaagagagggagcttcaggagctcagcttcagtctgcaagagtatccctttctccaaaggctcatttaggtttccctagccttaaccacctgcagatttttccagttcacctctctgcccttcctctgcccctgggcctatggaaagggagcagaagtgcactcaagccactcaagcggagaagctgagaacaaaggaaggaaagcgccctgcgtggaggtcaggccggggcctggtctgaatcactcctctctccaggaagaacatgggggcaagcaggtgagtgaagcccaagtgctgcggggaaggagggaggcacagggctatgctgaaggggtttggaatagggaagcatgaggcgcctctcttctccagcccctcaagcaatagagattgcatangatgtcctgngttaccccagcaaggcacatgtgcacagtggtttcactgcctttgaggaatgtggcatggcccacatggtggctctctggacagttcactggtctggacac

SEQ ID NO: 124472 - DNA, 836 bp, Homo Sapiens
  misc_feature (402)..(426): n is a, c, g, or t
aacttggaacatgaacaacataagtatttatttgaaaaacattttccatttaagtaaaatggcaaattagctagagtagcttcttactgctaattctatttgcactcacagtcacttttattcatcatattcaaagatattgctaccaaaaatgatttcacaaagtatttagaaaaaatatatacagtctctctaatagaaagttaattaaaacaacaaagctaggcaatatcaagctaagaaaggaaaccaattgacatatataaacacaaataaataaatatgtacaaaagaatctatgccaacaacagacaaagaaaatctttacaatgcaagtgaatggtgacaagaatggaaaatctctcaggatcctagactatgactctaacacaatgtagtttnnnnnnnnnnnnnnnnnnnnnnnnncataatgaaaagagagtctgaattgatgctattctcaaaggtaagctgaactaaatttaggctccccagctaaattcctgacctctgttctgatgggggactaaatggaggtgagaactgcatgcttagaactgacaacagaatttggctcaatctttcaaatccatttacaaatgtttcccttgagcaatttcttaatttttttctcatctggttattgaaaatttctaaagtggagctgacattgtcaaatatgaaaaaaatatttttctggagccatacgaatatgagtagaaatcaaaagcaaagccatttttgaagctatatcttaattactattgactaagcactttgggcagaaatctgactagttagaaagctaactaatttaaatctactatgaatgtcta

SEQ ID NO: 124473 - DNA, 901 bp, Homo Sapiens
ggtttctcttttaacctttatttacaaagaacacaactcctcttgacacaaacacacacacatttcaaggaggagcccattaagaacaacaacagactggcgagaatgacggggccttattgaacactgtcaataaggaacactggtctgtgtaccccagactaggggtcactgcaaacattttctcagatatgacttttcacctccaagacaggaaaagagatcttgacgtggaggcccgcccacctacaaggcagaaagctccacactcaatcttcagcatcgtcaaactgtcctgtttcaaagaccatcttggaataatagggtatcagtggaggcggatggtgccagctggggtcatagatcatgtctccttgtggggcacagcacacccaaggtttaagctcttgagaaatgctctcctggatgtcgtcagcatcatatggattcccttgatctgctttcaactccgagtcccagtcctcattaaaaagatcgccaggctgttccttgggtggacagtttgtcccttctgacagctcccaggtattcagttctccatcagagtcctcctcatccatggcaaagccttcctcttcagaatgggtgccctcaccccgggcaggactgtcattaggaatgctctgtgttccacgggctagtcgatccatagccttctcagtctctctctcctgaccggagtggtcagctgtagcaaagccagcctccgggctggggggcgccccccgcgcgctaggcagcggcgggccccgagacggctccgcggccccctgcgcctgggccccggcggcctgaaggtccatgccctgcggcccgcggctggtcgccctggacgcccctcgtgccgaatacgccacccaggcctcgctaccttggaccg

SEQ ID NO: 124474 - DNA, 1330 bp, Homo Sapiens
tttcaaaggcgttttttacccggttggaaacctgacttggtacaaaatgtaacggaggatcacccttggatcacttgtgctggaaataagccatgccccaattcggccagaccgtttactcagtggggactgagtcataagactgaaccgctgggcgctttctgctcttgacgcctgaccaggttaaagcaccttgccccttctgcccagtgagggcacttcacggcatcaaaaccccatgttctctggaaagccgctgatgaggtccagctcagactctgtatccgtcttgaatgcattcacggccactactactggaattccaaacattctggcatttgttcaatttgtttcttcaagttactgaagcctttttcaaccagctccaggttctcctgtatgtaagccttgggaagaggcagtccagcagtgaccgtggggccgcccccgtgcatcttgagagccctgacagtggcaacaagcaccaccacgtgggggcagaggccggaataccggcatttgatgttaaaaaacttttccattccaatgtctgctccaaatcctgcttccgtcactacgaacccttctgggccaacaagcttgagtgcgatctggtctgcaatgatggaggaattgccatgtgcgatgttggcaaacgggccagcatggacaaacactggagtgccctccagtgtctgcatgagattgggcttgattgcgtccttcataagcactgtcagtgcaccactcacccccagatcttcggcactgacgggctctcctttcttactggatgccaccaccattttgcccagtctctctctcatgtcttctagagaagtggtgagagccaggacagccataatttcactggccacagagatatcaaactgggccgtccgtgtgtgacccttctccgttggagcctgtccaatcgtgatcttcctcaggaatctatcattggtatccaacactctttgccaagttatggtttctggatcaatgtccaatcttgcaaatctgtttatctcttcatctgtcagtgtggtagggtcagtcttttcaatgcctagtctctttaaccttcggatttggatgtcagagaaccttctcactccatttactgatggcaccaaacgattaaagagagccttgtctgtctgggtcagttcatgaaatatccgagcatcaatggccgcagcaacgaggttattagctgcagtgatggcatggatgtcacctgtgaggtggagattaaactcttccataggaatgacctgggagtagccgcctcctgcagcgccaccttttattccaaaggtggggcccc

SEQ ID NO: 124475 - DNA, 1012 bp, Homo Sapiens
  misc_feature (125)..(126): n is a, c, g, or t
  misc_feature (142)..(144): n is a, c, g, or t
  misc_feature (146)..(147): n is a, c, g, or t
  misc_feature (149)..(152): n is a, c, g, or t
  misc_feature (154)..(159): n is a, c, g, or t
  misc_feature (161)..(163): n is a, c, g, or t
  misc_feature (168)..(172): n is a, c, g, or t
  misc_feature (178)..(189): n is a, c, g, or t
  misc_feature (191)..(191): n is a, c, g, or t
  misc_feature (193)..(218): n is a, c, g, or t
  misc_feature (220)..(241): n is a, c, g, or t
taattttggcctgtggtccacagacccccgcccaagagaaacacccccaagagaaactcctaagggattacggttatggggccagggtttggctttaaagaaagagggtataggaaaggtttttnngaaggtttgtgggggnnngnntnnnnannnnnntnnntcttnnnnnattttnnnnnnnnnnnngngnnnnnnnnnnnnnnnnnnnnnnnnnngnnnnnnnnnnnnnnnnnnnnnnttttgcaaacttgtttccttttattctgtggaacgtcactaaagtaaacagacatgcatgatttatgttaatttatacatgatgagaattaaggctgaaaatgacttctggggaaactcctactattagtttcagatcttctgggcaggggctgacttctcttggcttacttatacttcctaactcccagtgggcctgaatagacactggccagactttcaaagtagcttcttgaagatggatggtgatctgtttagaataatccattcacctgttctgtttcagggtccaaatcaatatcataaaaacagggccgggtggggagtccaggcattgtgctcatcgttcctactaaggggtacagaaaaccagccccaacgctggcgcggatgtcgcgaatgggcagaatgaagcctgtagggacacctttttgctctgggttgtgagacaaagacaagtgtgttttagccatgcagatggggagattcccaaagccctgcttcgtgtagacttcagctttgtgttgagcttcgggaagtaattcaatgtcatctgctccatagatcttctgtgcaatgatcctgattttatcctcaactgggagcttgaggtcataaaggagctggaagctgctgggtgcttgtgctgctctctggacggcctgagccagggctaaggcacccttgcccccttctgcccagtgagtgcacttcacggcatccccggccgtaatggccgaattcccgggcatatgtccggtaccgtcgactg

SEQ ID NO: 124476 - DNA, 1334 bp, Homo Sapiens
taatttaataattggcagcttcatagcatatccagaaaaaaaccatgaatggtccaattcaggtgaaagtatcaattggtccaagatggctaacatgggtaagcctagaatgtcaaatattggtttcagaaggttgggtttttttgctggtgggagttgatgctgcacacatttgttttgtagggggtgagtggtgcactgacagtgcttatgaaggacgcaatcaagcccaatctcatgcagacactggagggcactccagtgtttgtccatgctggcccgtttgccaacatcgcacatggcaattcctccatcattgcagaccggatcgcactcaagcttgttggcccagaagggtttgtagtgacggaagcaggatttggagcagacattggaatggaaaagttttttaacatcaaatgccggtattccggcctctgcccccacgtggtggtgcttgttgccactgtcagggctctcaagatgcacgggggcggccccacggtcactgctggactgcctcttcccaaggcttacatacaggagaacctggagctggttgaaaaaggcttcagtaacttgaagaaacaaattgaaaatgccagaatgtttggaattccagtagtagtggccgtgaatgcattcaagacggatacagagtctgagctggacctcatcagccgcctttccagagaacatggggcttttgatgccgtgaagtgcactcactgggcagaagggggcaagggtgccttagccctggctcaggccgtccagagagcagcacaagcacccagcagcttccagctcctttatgacctcaagctcccagttgaggataaaatcaggatcattgcacagaagatctatgggagcagatgacattgaattacttcccgaagctcaacacaaagctgaagtctacacgaagcagggctttgggaatctccccatctgcatggctaaaacacacttgtctttgtctcccaacccagagcaaaaaggtggtccctacagggcttcattctgcccatttcgcgacatccgcgccagcgttggggctggttttctgtaccccttattagggacgatgagcacaatggcctggactccccccccgggccctggtttttatgatattgattttggaccctgaaacggaacaggtggaatggaattatttctaaacagattccccatcccatctttcagaaagctacttttgaaagtctggcccagtgtcctatttcaagggcccacctggggagtttagggaagtataaagtaagcccacagaaaaagtccagccccctgggcccaaaaaggatcctgga

SEQ ID NO: 124477 - DNA, 462 bp, Homo Sapiens
tttgcaattaattcatcaatttaatcctattttgctaattacaagataattatgaaatgtttaaaaagtacatcagagtgaataatagctggtatgctttagtaatagatcacaagttccagatgatttgagtaacatcttcatcctgtgggcatctctaaaagtgggtgtatgacttcaatttgcagagaacatcaagagtaccattgctttatctttgttgctaggtagttcagctacactttgatggcttaatagagtgacctgatgttaaaagttggtattgaactcttgcgtaatattgcagtttcagctttggaagacacatattgagtttggtatttatagaaatttctgcccagataccagagttacaaataactgagtactctgggaacgagcattgtcgtgctctaaaatagtctagaatggatttctcacatcagtcagcagctgagcttg

SEQ ID NO: 124478 - DNA, 522 bp, Homo Sapiens
gtgatctagaggatcctggatgaggacgtactctattagcggtcaagtgtagctgaactacctagcaacaaagataaagcatggtactcttgatgttctctgcaattgaagtcatacacccacttttagagatgccacaggatgaagatgttactcagatcatctggaacttgtgatctattactaaagcataccagctattattcactctgatgtactttttaaacatttcataattatcttgtaattagcaaaataggattaaattgatgaattaattgcaatgtcttaagtacagcattacattttgttattaataactgctgaaagaccctaggacaacagacacagatatgtcgccaagcctggcgtgtctgggtacccaccagatcttcggcactgacgggctctcctttcttactggatgccaccaccattttgcccagtctctctctcatgtcctctagagaagtggtgagagccaggacagccatcatttcactgggcacagagatatcaaag

SEQ ID NO: 124479 - DNA, 576 bp, Homo Sapiens
  misc_feature (343)..(393): n is a, c, g, or t
aagttttctaaatgctttaattttttgtcacaaatatttctgcatctctcagtcccttcttgttggaaaaaggagggctagtgatacatttgttaatggcacttttaaaatgtgctttggtatatagaggtaacaatgtacttcttaggtatgttaataataaattaaggttataatggttgccatattagagaaaatgaataagattagtctcagcaaaaacaaaaattagtttggaagtagataagctagaaatatcaaaactgaaaaaaatagcttcccagatagcgttctactatgtgcaattttttgaggaataatattcaattacagagtgtaatannnnnnnnnnnnnnnnnnnnnnnnnnnnnnnnnnnnnnnnnnnnnnnnnnntttattactttttaaacaaattactgagtaatcttccttagtaatcatttctgtaactcagataaaaatagaaatttataagagtttttatttttgttacttgtaaaagtatatttcctagagaaaatatcagcagtggtagagaccagaaaaagtaagtgtgtgtgttctaaacagtgattc

SEQ ID NO: 124480 - DNA, 1414 bp, Homo Sapiens
  misc_feature (345)..(395): n is a, c, g, or t
ttaagttttctaaatgctttaattttttgtcacaaatatttctgcatctctcagtcccttcttgttggaaaaaggagggctagtgatacatttgttaatggcacttttaaaatgtgctttggtatatagaggtaacaatgtacttcttaggtatgttaataataaattaaggttataatggttgccatattagagaaaatgaataagattagtctcagcaaaaataaaaattagtttggaagtagataagctagaaatatcaaaactgaaaaaaatagcttcccagatagcgttctactatgtgcaattttttgaggaataatattcaattacagagtgtaatannnnnnnnnnnnnnnnnnnnnnnnnnnnnnnnnnnnnnnnnnnnnnnnnnntttattactttttaaacaaattactgagtaatcttccttagtaatcatttctgtaactcagataaaaatagaatttataagagtttttatttttgttacttgtaaaagtatatttcctagagaaaatatcagcagtggtagagaccagaaaaagtaagtgtgtgtgttctaaacagtgattccaactcaatgtgttcagagaaaacactttgaccctgtctgtgtttacagtccctgctgacagtgtactgtcgtatcctcagccttgttctatttctttattttagctttacagagattaggtctcaagttatgagaatctccatggctttcaggggctaaacttttctgccattcttttgctcttaccgggctcagaaggacatgtcaggtgggatacgtgtttctctttcagagctgaagaaagggtctgagctgcggaatcagtagagaaagccttggtctcagtgactccttggctttcaacccacctagcctcagacagccaggaggcctttttaccactggatactgatgagatgttttaggtccttgcactttgcaaaactcctttctcccagtgggatattattaggacatagccaggctagaaaggccgtgggaagctttggaggtaggaggataggatccagacagggttacaataaggagaagggcattctctttggtgcactccatagtccaatggcagtcctgagctgattccagttaggaaccaagggtggactttcttctttggttctttggcccttttgatttccccagctggggcagggtaaggagcatgaaagaaaccagcctcaggtgtgtctcctcatttctgtctcatctaaacttcagcttccaggcatcgcacggtagttttgcttggactcttggactcttctgggtttttatcagttttctttgattcctcattagggttgctatcattggccttctcctcctcccggccgtaatggccgaattcccgggcatatgtccggtaccgtcgactg

SEQ ID NO: 124481 - DNA, 999 bp, Homo Sapiens
  misc_feature (886)..(920): n is a, c, g, or t
ataccttttgacatagcaaaatccaagaccagctgcagcaccaaagaagaggagagcaagcactagcagagccgtggggacacctccaaacccagcagcttcattcttgaatgctgctttattttcaacaaatggttcagtttctgtagacatggtgctagtttccataaaaacttctgtgacacaaatcaatttttttctccgtggaatagaagtggaagctggagcaggaggagtagtagtaggggcaggtattgtagagtaaggggatgccaccgagtaggtactgtcactgaccataaattctgttgtttgtgttgcaagtttgagtgttgaatatgggatctttggtggtgataatttctggaatgcacgagttagtccaagtatcagatgagttgtaacaataggctgcaaactgtcggctcactggaaccttccaaatcaggacacccaccccatgttgttcccacacttggggtttgggctaatcctagagatgaccacgaatccatctccaacccagccatagctgcaagtttcaaagctagctttcaaggctgtttcaacttggtccttgccggccaaacttagtcccagcagcctacaggcctccttagcttctgtgaaattcagctgctggttcgcctttttgctcacaagggtgatccccataattctgcatgacacctggatggaaagctcttctgcacgcaaagagccttggaccaggagcctcgtggtccagatggaagtgagaagcaacaccaggctgaagcacctggccatcgtgcctaccccttcagagccagggaaacacctcagatggccactccccggccgtaatggccgaattcccgggcatatgtccggtaccgtcgactgnnnnnnnnnnnnnnnnnnnnnnnnnnnnnnnnnnncgccgcttcctcgctcactatctcgctgcgctcgtcgttcggtaaaaacgagctagcgccctatagtgatctatcatcg

SEQ ID NO: 124482 - DNA, 1130 bp, Homo Sapiens
  misc_feature (806)..(806): n is a, c, g, or t
  misc_feature (863)..(863): n is a, c, g, or t
  misc_feature (881)..(881): n is a, c, g, or t
  misc_feature (884)..(884): n is a, c, g, or t
  misc_feature (898)..(898): n is a, c, g, or t
  misc_feature (927)..(927): n is a, c, g, or t
  misc_feature (936)..(936): n is a, c, g, or t
  misc_feature (967)..(967): n is a, c, g, or t
  misc_feature (1014)..(1014): n is a, c, g, or t
  misc_feature (1016)..(1075): n is a, c, g, or t
  misc_feature (1106)..(1106): n is a, c, g, or t
agatataacagtattccttataaaaatttattttatggttttaaaaaatatttaaattattgtataaacatttctttaaaaatatggtctgtagaaagaaaagagtaaaacctaagttgtaaagtgacagtgatttttggttccatcattttattcacgtaatcgtggaggatccatctgattccgtgggaagctgagggctagaggctgccactgtcacactgcattctttctcatttcacccaagaagtcataggtctgctctgaaaggtcaaaaggttcatgaactccgtctggtgacagcagagcttggagggcgccctggttttcttggttttgcttaaggaagtcagtgataactttccaccgtgcagtctcagtctcttcttctgcccacctgaatgggggtaggcgtgtggagtggagaagtgggagcacgcagtcatggtaaaccaggagaaacgtggacttcaggaactctttgtctctcttctctgatctttttaatgtgctttcttttccagcccacgaactcctgagagcatccatcacatcaggctgctccaagagcatggggaaggtggccagcatgggatggctaattaaatcagtactttgcaagctcatcctgtctttcaggagcacatctccaagaatttgtcgattaaatatcaacaagtgaatagaacacatatttccaattaatgtttctggcagtagacttagtacatttcttgatcttctgttcaaggatctcagtttcactagaagttgaggctgccttctcattgtcataaatctggtanaaacactggcgtgtgctcttctggatattgaagggtccacttcaatacctttttcantaggagtacaccattcanganaagctcaatagttnttgctggaataggactccactggcatcanaaagtttangaacacccagcacagcttactctctctttcnacagttgattgcgaatatagctcgtgcccgattcttggctcgagggncnnnnnnnnnnnnnnnnnnnnnnnnnnnnnnnnnnnnnnnnnnnnnnnnnnnnnnnnnnnnatcgctcacattccacacacatacgagcggnagcataagtgtaagctggggtgcc

SEQ ID NO: 124483 - DNA, 967 bp, Homo Sapiens
  misc_feature (186)..(205): n is a, c, g, or t
gtgaaagaaaataaacaccaactttattaatataatagcaacagaaagagtttccaatttctcaaaaggaaaataatatgagactagtgggctatgatgatgcctgtgaatagccagctactgtaccccactgtagctggacaagtgttaaacaagtaaatgcctttcaagagggcagagccctgnnnnnnnnnnnnnnnnnnnnaaaaaaacgggaaatgcctacatttcttgttctgatagcttcccaccacacaccaaaggttcctcaaggacagctgccaccagagctgctgcaagaacatgtttttcactgggcgtcgcttcacagtcagttcctcaagcagaagactaaaatattatttctttttagaagatcttggttgagggagaacataccaatatggagaacagatctatgcttctcgaattcaagaaaaaccattaactaatctatcaagttttctccgatatggtgtgccagagtgctctgtgaagaatccttttccatccctaccacgtgtctgggtgaagggagaggagggggtggcaagctgccagtacactagcaggcactcctggtgatgctctgggctctgctccctttctgctggtagtagtaggcatgttttctggcagctgcagcaaactgatgttgggggggaggaaggggccacccaccaatcacctcttcttgaagccgtattttttgcgttcatagaaagaggtctgtcttaaagctccccagatttgacatctttgggcagccatctctgtccttcctccgggagggggcactcctttacataataggccatcagagaccccaggtccctccacagatcacacaggggccccctggtaaaatcccttagttacacctcatcacatatgccccaccaaaagtgcgggggaaccccccattaggaggtcccaaatccccccactttggccattcacttccagg

SEQ ID NO: 124484 - DNA, 979 bp, Homo Sapiens
  misc_feature (99)..(114): n is a, c, g, or t
cccctttaaacgcggctcttccagaaaaagttgggtatagacctgaaacgcgtaccccgggggccggtgggtgacacgaaccctcaaggggagaccctnnnnnnnnnnnnnnnnaaaacgggaagcaacattctgttctgatagctttccaccacacaccaaaggttcctcaagggacagcttgccaccggagctgctggcaagaacatgtttttcacctgggcgtcgcttcacagtcagttcctcaagcagaagactaaaatattatttctgttttagaagatcttggttgagggagaacataccaatatggagaacagatctatgcttctcgaattcaagaaaaaccattaactaatctatcaagttttctccgatatggtgtgccagagtgctctgtgaagaatccttttccatccctaccacgtgtctgggtgaagggagaggagggggtggcaagctgccagtacactagcaggcactcctggtgatgctctgggctctgctccctttctgctggtagtagtaggcatgttttctggcagctgcagcagactgatgttggggggaggaaggggccacccaccaatcacctcttcttgaagccgtattttttgcgttcatagaagaggtctgtcttagagctccccagattgacaatctttgggcagccatctctgtccttctcctggatggtgcactccttacaataataggcatcagagaccccaggtcctccacagatcacacagcgcccctggtaagatccatagttacactcatcacatatgcgcaccagagtgcagggacgcacataggagtcacaaatcacacacttgccatcacatttttcacacagtcttccgatggcaacaccagcctgcttgcggcaaaagatcaaatcaggatgatgtttagccatagctcctaactaagccggccaccggaagcttcggaacttccgtccctcgtgccgaat

SEQ ID NO: 124485 - DNA, 1334 bp, Homo Sapiens
  misc_feature (1313)..(1313): n is a, c, g, or t
aggaaagtgacgcccagactgtatttgtcctggatataaattactgttgcattcaggcagcgataaatacagaggggcccggtgtgcagggcacagaccccacctgggtacagactcacatacaggacaagcccctcaccacagttacacacgattcatacagaccacagtccacaccagggctcgcgaagcaaaactaatcacaaaggactggtcttgaagatgacaatgacgtaaacaagagtgcacgctggaggccacaagcggccttacaatgcgtgtgtctgtgcagtttggcagatgcggggggtcgggggattagtggcatcaagggccccccaggaggctgcagcaggctgggccaggccacactcctgaggccaaaccagagccacttctgaggtcaaagccacacccaggaaagctccgcaggattggaggcccaggccagctgtgccccacaagggaagggggagatccgcaccgtgggaccgtttctcgtgggggagtcggggcttcccacagagcgggctccatttttgttcagactcctcccggggccagtgcaccatctgaatccttgggcacgtggaggcagctttgtctttggctggtgcaccccagcctggcccagatgcaggaccctccaccaagctgtctgggggcgtgggagcaggagggctgcaggagctgggtctccacacgctgacgagggataggactgagcagatgtcggctcacacaggcactgggaactgcacatcaacagcgggcaagcagcgtggaaagtgctagcgtggggtctggggctgaaagccagctcctcctccacgtgcatgggctgtttacacctcccaaactcctcgtgcaccgccatgccctgcttttggtcccttctgggtgctaagtgccccaccctgagggaccgaggggcagacactcgggcccggcccacactctggtgctgccagggcagcacctgagacctcctagcctccacgtggacagaggttctcctccccaagcagaggcactaggaaagggccaccaggtccagctgggcactgcctgcccctggagctgtacctgagatccaagctgccatctgtatataacaaggccagaaaacaagggaaggcaccttctcccttccctgaacacaaggaagtcaccagtcaccaccacccggcagcctcacacgctgcccacacctgctgcccagggcggggaggtgaggctggagggactggcagcctgtgtctgctggggcagggacacaccagggagcctgctgcctcgtgccgaattccacncccaggcctcgtactagcgta

SEQ ID NO: 124486 - DNA, 850 bp, Homo Sapiens
  misc_feature (561)..(561): n is a, c, g, or t
  misc_feature (663)..(663): n is a, c, g, or t
aggaagcgaggcctgggtggcgctccacgagggctaagcgtttttccgttgagccgctccaaaacactaagctggggacgccaggtgcccccccaccccggctccctggccctatccacacctccacccccaccccaggatcgccatctttaggggaggcctgggagggggtgttaggtgttttagggccaccgagctcaaacacaaggacccctccccggcccacccagcccagccccaactgacctccatgcctagggaaaaactccccccaccactgccccctcccccgacccaggccaaagccagggcaggtctccgggtctcacctgctcctagcctcacccccctgcccccgaaaaccagactctcctcccaaactagcctcaggagcttggcgaacccgctcgctcctaaagagaaagacccaggaccctcccccatcacccccaagagaggttcgccatcctctggcctcgagcccttggtccctccgtccgtctgtcctcggggcccgctcccccggtggcccttggggatcaaagcgtgggccgctctccngggagggcgggcgggggagggggtggtcgggttgtgccattggggtgtccggaagcttctcagccagggtgggggtcgtggagtggggggagggaggccagnccgggctccagaggggtcagggcgcgacgagaaccaactctttacctaactttgcatggtgcttagtcaaggacttctgcgacctggctcccgaggtcagctggccggcgctgacacacatgcatggcagactatccctggctctatctccctgtttctcgccccctccaccccccacttcctcttt

SEQ ID NO: 124487 - DNA, 808 bp, Homo Sapiens
  misc_feature (125)..(174): n is a, c, g, or t
  misc_feature (462)..(462): n is a, c, g, or t
  misc_feature (694)..(694): n is a, c, g, or t
aaactacacgagcagaacatgcagctatgtgtgtgcgctgatattgtttaaaggtaatacttattctcggaaggcaaggcacatcttgtggtagaaaatttcgggcaaattaggaaacatggaannnnnnnnnnnnnnnnnnnnnnnnnnnnnnnnnnnnnnnnnnnnnnnnnnaaagaggaagtggggggtggagggggcgaggaacagggagatagagccagggatagtctgccatgcatgtgtgtcagcgccgccagctgacctcgggagccaggtcgcaggagtccttgactaagcaccatgcaaagttaggtaaagagttggttctcgtcgcgccctgacccctctggagcccggctggcctccctcccccactccacgacccccaccctggctgagaagcttccggacaccccaatgggcacaacccgaccaccccctcccccgcccgccctcccnggagagcggcccacgctttgatccccaagggccaccgggggagcgggccccgaggacagacggacggagggaccaagggctcgaggccagaggatggcgaacctctcttgggggtgatgggggagggtcctgggtctttctctttaggagcgagcgggttcgccaagctcctgaggctagtttgggaggagagtctggttttcgggggcaggggggtggagtttttccctangcatggaggtcagttggggctgggctgggtgggccggggaggggtccttgtgtttgagctcggtggccctaaaacacctaacaccccctcccaggcctcccctaaagatggcga

SEQ ID NO: 124488 - DNA, 842 bp, Homo Sapiens
  misc_feature (190)..(255): n is a, c, g, or t
  misc_feature (669)..(693): n is a, c, g, or t
tggcgcttgcgagccctggccaggggaggaagtgaggcccaggcacctgctgcccctcgagggggccctgcctgccgcggggcctccccacaagcccctcccaaagcgccggccgactcgctgtctcgctggggactctttcagccctcgcgcccgcccgtttgggaggagaagtctctatgcaattggnnnnnnnnnnnnnnnnnnnnnnnnnnnnnnnnnnnnnnnnnnnnnnnnnnnnnnnnnnnnnnnnnnaaagggagggacccacattgcacacactgtaagaaatgcactttccgaggaaggggatgggggagcccggacacccagagctccccgagttgggggtgcccgtctggagcgcccccgtcagcccctggcggtgggaggtgagagcgagtggtttaagtgcctgattaccaccacccgcccccccctttgtccagctgggacacggaatggccgcgggcctcctccccctcccctccagcctttccaccagcccctccagtcaaccctcatcgccgtgcccccccagagctagagagatggggcccctgcgtggcccgaggggcagagctgggcgtcacttcgcaagcgtcctgccctgcccggggggcgggggtgggctttggggaagccggtgcgccccccacttcctctttnnnnnnnnnnnnnnnnnnnnnnnnnggtacaagaaaaacctttaaaaaaattccatgtttcctaatttgcacgaaattttctaccacaagatgtgccttgccttccgagaataagtattacctttaaacaatatcagcgcacacacatagctgcatgttctgctcgtgtagttt

SEQ ID NO: 124489 - DNA, 942 bp, Homo Sapiens
  misc_feature (138)..(151): n is a, c, g, or t
  misc_feature (390)..(415): n is a, c, g, or t
accaccccgtcgcgggcctgctgcgtggtacagacatatcgtgcgtgagcagcaccacgaggggtgggcggcccggggggcgcgggtcgttttcgttattaactgctccggacggtgggggtcacccaagcgcccacnnnnnnnnnnnnnnccctcgcggcatataattgattgggggggcccgcggggtggaagacccggaggaatggcgacccctctcctaaagggaaaagggggaagggtcctgggttttttctccttaggagcaaacgggtctcgccacgctcccgagggctagtcgcggagggaggagtctggttttcgggccaaggggggtgaggctaggagcagcggagacccggagacctgccctggctttggcctggtccnnnnnnnnnnnnnnnnnnnnnnnnnngtttttccctagccatggaggtcagttgggggctgggctgggtggaccggggaggggtccttgtgtttgagctcggtggccctaaaacacctaacaccccctcccaggcctcccctaaagatggcgatcctggggtgggggtggaggtgtggataggtccagggagccggggtgggggggcacctggcgtccccagcttagtgtttttggagcggctcaacggaaaaacgcttagcagatgggaggccccctacacggctgcggggggccccaaggtgcgacgccgaaccccccgaaaaccctccccgttccgagcggggaccgctggcgtcggcctcctctctcctctgggggcccagccgtgatgcacgtcccgcagctgggccccgcgtcggggtaggcgatgaaagtgcaaacggcggtcccccttcgctgggaggcaccagggaggggggtcgctccagaatgtaaggcactggcagcggaggcgtggggggcgccctcgtgccgaattcgccacccaggcc

SEQ ID NO: 124490 - DNA, 1697 bp, Homo Sapiens
  misc_feature (984)..(1006): n is a, c, g, or t
  misc_feature (1036)..(1558): n is a, c, g, or t
attccgtcgttcttactgagtctgcagcgggggagtgaacaagtgtgcagatgtaagttcttacatgataagcagattgaatacaacaccagcagcttgccttagaaaaggagaaaggaattccttttcccgcccgaacatgaagaaaaacgacctgaccctgtagagagaacacagtgtgaatgtttcccctcgtgtgagcccagcctgtggtcttctccgtacccgcaacgtggtcatctgtgcccgtgacgtcacctgtgcccgtgcgtggcgtccccgtctccgttggggccattagaatgaggcagacaccaggccactctagaagccgagccgtcacacctcaggcgtgtgcggggcggggacggggggtctcctggttacattttggattaaacctgtttcccggttatgtgtagggaacagcagagtgatgcacgaactttgaacattcgttatggggaaaacatcctttaacttcggggtcgtctgccagagcagggtctgggagggtccatgcagttcccgctggtgtggagggaaatgccctggtctggcctccgagcccccaggtccaccgtctcccctcccctcatttgtaagaatagctacacactaacattttgggaaggagaggcacataactttttttaacatttggtaactaggttatgggctctacattgtcagctacttgggatatatatttaattttcttaaattcccgttaaactctattttatggttttgatttcagattgcaaacatgtaaaacctgcatagcagcgagttctcggttttgccggtttctttagttctttactgtcactgtcatgtaatcagctaattctctgtggatgttgctgtaaagtatgcatgttcctttcatgtgtatttaatcatgatgtttaattttgcacacttatttgtaatgtttcttttaaataaaagtgactaattttgttgtagtctggacctgtnnnnnnnnnnnnnnnnnnnnnnngcctacagccgccctcgtgccgaattcttnnnnnnnnnnnnnnnnnnnnnnnnnnnnnnnnnnnnnnnnnnnnnnnnnnnnnnnnnnnnnnnnnnnnnnnnnnnnnnnnnnnnnnnnnnnnnnnnnnnnnnnnnnnnnnnnnnnnnnnnnnnnnnnnnnnnnnnnnnnnnnnnnnnnnnnnnnnnnnnnnnnnnnnnnnnnnnnnnnnnnnnnnnnnnnnnnnnnnnnnnnnnnnnnnnnnnnnnnnnnnnnnnnnnnnnnnnnnnnnnnnnnnnnnnnnnnnnnnnnnnnnnnnnnnnnnnnnnnnnnnnnnnnnnnnnnnnnnnnnnnnnnnnnnnnnnnnnnnnnnnnnnnnnnnnnnnnnnnnnnnnnnnnnnnnnnnnnnnnnnnnnnnnnnnnnnnnnnnnnnnnnnnnnnnnnnnnnnnnnnnnnnnnnnnnnnnnnnnnnnnnnnnnnnnnnnnnnnnnnnnnnnnnnnnnnnnnnnnnnnnnnnnnnnnnnnnnnnnnnnnnnnnnnnnnnnnnnnnnnnnnnnnnnnnnnnnnnnnnnnnnnaacagcctttctcctgggagctcctcgtgcgctctttgttcgacctgccgttaccggatactgtcgcttctccttcggaacggggttttcccaacccaccgtaggacccaatcggtgaagccttccccaatgggttgcg

SEQ ID NO: 124491 - DNA, 825 bp, Homo Sapiens
ggaaactgagaaagctgttgggagccaggagggcccctggcccctctgttctttgcccccgggctttcagccaaccctgcaagcccctccggacaaggcaacgtcagcccaggtagaaaacttaagagtccctcctagaaaaccagtggatgtgctggccctttcagggacacaggccccttcagcttcaccggagatgagaaggtgccacccgcaacaggggctgctggtcacagctcagtgcgcgatgccttggccacaatcaccagcttggacagctcagctttgaatgccccgggcctgtgagccactgctgttttggtcacttcaaattcctcagttttcagagggacatcactttccctttcaaatgcggctttagagtaggccatggcgtactcaatctcagcgccccgcacctctgccttgaactgtgtgaagtacagataggacttcccctggggcctccagatggtgcaggtgaagtgctggtggtcttcgctggtccccagactcatctgccattgctcattggtccctccttgagaggcgtaagtgaacatacacgtatatttgtcccccgggcccacgttatgggagaaggaatgcacgacgccgccgggccgcacgtcaaacgccaccgtcgtgggctcggacaccgcctccgccggcctcagcgccacggcccctaggagcagcgcggcccacaagctcgcgccgacgccgttccaccctccgctgggcgccgccatgttggactagggtcctcagggcccccggccgtaatggccgaattcccgggcatatgtccggtaccgtcgactg

SEQ ID NO: 124492 - DNA, 1037 bp, Homo Sapiens
gttattttgctttttaatgttcttatttatttaaatatgaaaaaacatttcatctcttcccagttcatctgaaaggaggtcccctgggtaaacataggaaagcagttctgcaggctcatgaaggatgctcggctggaggtcggggggagcatggctgctttccccagcatagcccccatgttccccaccctctttgtgccccggatctgcgatcctgagtccagaagagctcagcaggaagtgggaactgagaagctgttgggagccaggagggccctggaccctctgttctctgccccagggcttcagccaccctgcaagcccctccggacaaggcaacgtcagcccaggtagaaaacttaagagtccctcctagaaaaccagtgatgtgctggccctttcagggacacaggccccttcagcttcaccggagatgagaaggtgccacccgcaacagggctgctggtcacagctcagtgcgcgatgccttggccacaatcaccagcttggacagctcagctttgaatgccccgggcctgtgagccactgctgttttggtcacttcaaattcctcagttttcagagggacatcactttccctttcaaatgcggctttagagtaggccatggcgtactcaatctcagcgccccgcacctctgccttgaactgtgtgaagtacagataggacttcccctggggcctccagatggtgcaggtgaagtgctggtggtcttcgctggtccccagactcatctgccattgctcattggtccctccttgagaggcgtaagtgaacatacacgtatatttgtcccccgggcccacgttatgggagaaggaatgcacgacgccgccgggccgcacgtcaaacgccaccgtcgtgggctcggacaccgcctccgccggcctcagcgccacggcccctaggagcagcgcggcccacaagctcgcgccgacgccgttccaccctccgctgcctcgtgccgaattcgccacccaggcctcgctaccttaagaccgtaggtagttactgccg

SEQ ID NO: 124493 - DNA, 526 bp, Homo Sapiens
tcgtaatgaggtggtttccatagccgcccccgggcccgtcatcatcagctttatcgtctaaatttaaacgatgagcattcatccttcatgagttacgagaagccagaactcctcgctttgctccctggctgttcttggcgtgtgtgtttccgtctcacaacccggctcctactttccccatctggcattgtcccctggcaccgcttttggcttgtcctgctcagtcttcgttcagggaacagcttcctcttaaatgtcccttttgcaggtttttagaaaccggttttcttggataaaagttggcagtgaagtggcagtttgcaagtggccagtgattcccccaactccaaagacagatttttacctttctggttatttttgttcatcttttgggcagggcaaaggttacctgagacacaattactttgggaatgtagattaagatacgttacatggaaacttgcaactggcatccgaaagaaaaactgtttttatcctgttgtacaaatacagtttttaaagcatt

SEQ ID NO: 124494 - DNA, 2128 bp, Homo Sapiens
  misc_feature (1098)..(1108): n is a, c, g, or t
  misc_feature (2053)..(2053): n is a, c, g, or t
  misc_feature (2104)..(2104): n is a, c, g, or t
ccgctgccgcgcgctgctacagccgccgcgcgctgttgccgcggcttgttattcttaaaatggcgccgctagacctggacaagtatgtggaaatagcgcggctgtgcaagtacctgccagagaacgacctgaagcggctatgtgactacgtttgtgacctcctcttagaagagtcaaatgttcagccagtatcaacaccagtaacagtgtgtggagatatccatggacagttttatgacctttgtgaactgttcagaactggaggtcaggttcctgacacaaactacatatttatgggtgattttgtagacagaggttactatagtttggagaccttcacttaccttcttgcattaaaggctaaatggcctgatcgtattacacttttgcgaggaaatcatgagagtagacagataacacaggtctatggattttatgatgagtgccaaaccaaatatggaaatgctaatgcctggagatactgtaccaaagtttttgacatgctcacagtagcagctttaatagatgagcagattttgtgtgtccatggtggtttatctcctgatatcaaaacactggatcaaattcgaaccatcgaacggaatcaggaaattcctcataaaggagcattttgtgatctggtttggtcagatcctgaagatgtggatacctgggctatcagtccccgaggagcaggttggctttttggagcaaaggtcacaaatgagtttgttcatatcaacaacttaaaactcatctgcagagcacatcaactagtgcacgaaggctataaatttatgtttgatgagaagctggtgacagtatggtctgctcctaattactgctatcgttgtggaaatattgcttcgatcatggtcttcaaagatgtaaatacaagagaaccaaagttattccgggcagttccagattcagaacgtgttattcctcccagaacgacaacgccatatttcctttgaggccttcgcccatccatgctgacccatttttctgccctcttcttaccccaattttcttgtattagcctctacaatatactttttattgagcactttgctgctgaaatgctgcctcttgccnnnnnnnnnnnaaattttaaattatctaaatttattgtttgttgtggtgtctatagcaaagtttttctatcaattttcccccatcccatccccaccctggactcatttgagaagacttgagaaatgtcttaatactcacactgctgcatgtagctcttgcttatttactggtctgggaaacaggatgtgtttcctttttttaaaagccaattgacagattacacctaaatactcctccttttgtatcattcagccttttgttttagtttggtaagttttaagaaatttcagcagcaaagttgttattcagtgggcacgatggactccaaatgcctcaagttatgtatacctgtcccagatgtaaacttcattgtcctttgttggatgatattttaaatggatataaaataaattggtctaaagggctgccctccttgttgtgtttttaaattttagttaaaaactgctacagcttatgactttgtactttaagataattgtattgatcttttttcagattccttgtattttttaataaagtaatcttaaataaaactcagataggttaagtgttagaaattttaaacagcttacattgttagcgtaaagttatcttttcttttttcctaatcagagttcttgaccctttggttattgagtttaaaacttcaattgaaattcaatagtatttatttttgaaaaaaatcactaaactgtgcctaaagaacataactgccatattaatgttttggtttatatcctctatagtaatagaaaaacatttaatacttgtaatgctgatgtgttaatttgataccagttgagtagaatgtgatcaatccagtttacaatctatcatgagtattattaactaaaatctatgtgcttttcaataggaatcattcttctcttgctgtaacacttgaccttaacttttagaaagtgttcatttttanactgcaactggaaaggttgaaaagttaggactcttgtatttgtgaactgtnatctgaagcagatatttaaagtgt

SEQ ID NO: 124495 - DNA, 734 bp, Homo Sapiens
  misc_feature (524)..(524): n is a, c, g, or t
  misc_feature (568)..(568): n is a, c, g, or t
  misc_feature (608)..(608): n is a, c, g, or t
  misc_feature (634)..(635): n is a, c, g, or t
  misc_feature (712)..(712): n is a, c, g, or t
ggcttgttattcttaaaatggcgccgctagacctggacaagtatgtggaaatagcgcggctgtgcaagtacctgccagagaacgacctgaagcggctatgtgactacgtttgtgacctcctcttagaagagtcaaatgttcagccagtatcaacaccagtaacagtgtgtggagatatccatggacagggtgattttgtagacagaggttactatagtttggagaccttcacttaccttcttgcattaaaggctaaatggcctgatcgtattacacttttgcgaggaaatcatgagagtagacagataacacaggtctatggattttatgatgagtgccaaaccaaatatggaaatgctaatgcctggagatactgtaccaaagtttttgacatgctcacagtagcagctttaatagatgagcagattttgtgtgtccatggtggtttatctcctgatatcaaaacactggatcaaattcgaaccatcgaacggaatcaggaaattcctcataaaggagcattnttgtgatcctggtttggtcagatcctgaagatgtggacacctgngctatcagtccccgaggagcaggttggctttttggagcanaggtcacaaatgagtttgttcatatnncacacttaaaactcatctgcagagcacatcaactagtgcacgaaagctataaatttatggtttgatgagaagctggntgacagtatgggtctggctcta

SEQ ID NO: 124496 - DNA, 1212 bp, Homo Sapiens
ctgggaagtatattttatttacatttttaaaatctttaactagtatctcttcctcctttccacccccagagacttgggaagggaaagaacgggaacctcaaacacctactccccacatacaaatacacaccccatggctcacaccagcaaatgaaagtgaaagagaaacaggtccacccctccctctgaagggcccaccaggtctgggcaagggtgggagggccctgggctgggtctctaaagagaagaaaaggagaggtctaaaaacacccaccaccttgccggtggtggcactgaccagcttggcctggcagtccccagagcccagttaggatcaagctgccattcctggttggcagcaacacaggtgagtgggccctggtgaccctcagtccctttcagtacatggatagggcttccctgcttcaggtcccaaatcctgatggtcccatcttcatagcctaccacagctctcttcccatcagggaggactcggccacaggtggctgggcagttgggaccctggaaggtcttgcagtcaccattcgggactttccacatccaggtgttgccgtcagctgtgcccgccaacaggacaggtgcccgaggatgccactccatccactccaggtctcccgcttcaaaggaccagacctcctccttagtgtccacctgccacactttcaagaggccactcatgtcccctgtggccactagagtggagtcatggctgaaaccagcacaagtcacagagtctttatggcctgcacactcaaagagcagctccccatcgctgagccgccatacgaaggctttgtcatcttcacccccggtcactgccaaggtattggtcttggggtccaggctcacacaaaacacagatgctgagtgcaatgcaaaggtgacctcgctatcgtcggggccctccatgctgccgaccaccccttcctggggttctagaacccagccctcttcgttgccctcttcctcctcttcttcctcaaagtccacatcttccatctcctgggccaggtcatctgctgggtccggcggaccgggatcaagttctaccacctcgataatctcttcatcaccatggaagcttagggtctccagtgggggggtgtcagcagcagccccgctttccgattcggactccatgcggcgcaagcggcggatccacttctctgggcccaaacgcctcccagagtc

SEQ ID NO: 124497 - DNA, 1077 bp, Homo Sapiens
ctgggaagtatattttatttacatttttaaaatctttaactagtatctcttcctcctttccacccccagagacttgggaagggaaagaacgggaacctcaaacacctactccccacatacaaatacacaccccatggctcacaccagcaaatgaaagtgaaagagaaacaggtccacccctccctctgaagggcccaccaggtctgggcaagggtgggagggccctgggctgggtctctaaagagaagaaaaggagaggggagcaagtcagttgaagaggctggaaagtcatccagggccccaccctcctcttccctctgtgccctactgcctctgctggcagacaggggcaggggtcccttcgtcccctcaacaccagacacacaggcaggggctgcagccattaacggtcaggcctttggacacaaaatactttcgctttgtggtctcctgacgtggtcaccaccagggaggcatctttgctgagggcaaagtccaggatctcagccgtgtggccccggtagtcagtaagcaggcggccggtccgggcgtcccagaggcgcacgatgccatccaggctgcaggtatataccacggcagtgcctgcctcccacagcagctgcacgatgcccgactggtgctgacactgatgcctaagagtctgcgtagccaggtcatagatggccaaggtcccatccaggtagccaacagctgccaggggcatcacactgcagaagcccaaggactccaccgagttggactcactctcctccccttctcccaggctgggctgggaggccacagtctcaggtctaaaaacacccaccaccttgccggtggtggcactgaccagcttggcctggcagtccacagagccagttaggatcaagctgccatcctggttggcagcaacacaggtgagtgggccctggtgaccctcagtccctttcagtacatggatagggcttccctgcttcaggtcccaaatcctgatggtcccatcttcatagcctaccacagctctcttcccatcagggaggactcggccaccctcgtgccgaattcgccacccaggcc

SEQ ID NO: 124498 - DNA, 978 bp, Homo Sapiens
tagtgggctcgggtattcggcacgaggcgcagagctgactctgggaggcgtttgggcccagagaagtggatccgccgcttgcgccgcatggagtccgaatcggaaagcggggctgctgctgacacccccccactggagaccctaagcttccatggtgatgaagagattatcgaggtggtagaacttgatcccggtccgccggacccagatgacctggcccaggagatggaagatgtggactttgaggaagaagaggaggaagagggcaacgaagagggctgggttctagaaccccaggaaggggtggtcggcagcatggagggccccgacgatagcgaggtcacctttgcattgcactcagcatctgtgttttgtgtgagcctggaccccaagaccaataccttggcagtgaccgggggtgaagatgacaaagccttcgtatggcggctcagcgatggggagctgctctttgagtgtgcaggccataaagactctgtgacttgtgctggtttcagccatgactccactctagtggccacaggggacatgagtggcctcttgaaagtgtggcaggtggacactaaggaggaggtctggtcctttgaagcgggagacctggagtggatggagtggcatcctcgggcacctgtcctgttggcgggcacagctgacggcaacacctggatgtggaaagtcccgaatggtgactgcaagaccttccagggtcccaactgcccagccacctgtggccgagtcctccctgatgggaagagagctgtggtaggctatgaagatgggaccatcaggatttgggacctgaagcagggaagccctatccatgtactgaaaggggactgaagggtcaccagggcccccttcccctgtggttgcttgccacccaggatgggcagcttggatccctaactgggttctggggactgcccaggcccaaactgggtcagtgccccccccgggaaa

SEQ ID NO: 124499 - DNA, 921 bp, Homo Sapiens
  misc_feature (627)..(627): n is a, c, g, or t
taggatcaagtgccatcctggttgcagcgaacacaggcgatggggccgtggggagccgtcagtcccttggcagtacatggatagggctgtcctgcattgcaggtcccgaaatcctgatggtcccatcggcatagcctagccacagctctgcttccacatcagggaggactcggccacaggtgctgggcagttggagcctggaaggtcttgcagtcaccattcgggactttccacatccaggtgttgccgtcaggctgtgcccgccaacagggacaggtgcccgaggatgccactccatccagctccaggtctgcccgcgttcaaaggaccagacctcctccttagtgtccacctgccacactttcaagaggccactcatgtgcccctgtggccactagagtggagtcatggctgaaaccagcacaagtcacagagtctttatggccatgcacactcaaagagcagctccccatcgctgagccgccatacgaaggctttgtcatcgttcacccccggtcactgccaaggtattggtcttggggtccaggctcacacaaaacacagatgctgagtgcaatgcaaaggtgacctcgctatcgtcggggcccgtccatgctgccgaccacncccttcctggggttctagaacccagccctcttcgttgccctcttcctcctcttcttcctccaagtccacatcttccatctcctgggccaggtcatctgggtccggcggaccgggatcaagttctaccacctcgataatctcttcatcaccatggaagcattaggcgtctaccagtgaggaggggtgtcaccgcagcagccccgctttccgattcggactccatgcggcgcaagcggcgatccacttctctggccctcgtgccgaattaacaccaggcctcgtactagcctatag

SEQ ID NO: 124500 - DNA, 571 bp, Homo Sapiens
ggcttcaggatttgggtttaatcccaagcacgagggcgggcagggaaaggatttggtttcattccttcagatgcccaagccttggccagagccccagggtgcaggagtgagggcgcgtggccacccagcctgtaccaacaaagcctgcctttattaaatagagatcgcgttacattccatccaaagaaggaaatccggacgtggtgagggatgcgtccaggtgggagctccgaacgctggtcctgagtgggctctgatgggtgggagggcccaggtcctgcctgcccacccaggccccacatgccagggcgcgtgtctgcatggccacccacagctgaaaacaggcgtgggtgatctgaagccctgtctgtgttctactgtggcagaaagtgccccagtccttccagcggttttgggagcagggcctccaggagcacagggctgagacggggtgggagggaaggtgacaagggaggcctttatgaatggggagggaagaaggggggagagggaaaggagaaaccgattgagagcaacacagggcttatataagtcttttaaaattatacag

SEQ ID NO: 124501 - DNA, 1224 bp, Homo Sapiens
ttaaattttatgcatgtatacacactttattaaatttgcattctaagatatacacaaggccagcatttcacaaaacttcctattattccaaaagcagtaatcatgaaacagtgattatataagtcaatcaagcaaaaaacattatctatagggttgtatcatatcatctcttatacctgttttcaaatagaagcctgaaatatatgatatatattagaataggaagagagaattttactttataacaatcgcttttcaaatattagactttatataaaaataaaggggtcttaacaaagttcatctgtgagttagcatatctctttatttcaaaacaatccctgcaaaaacttaactttccagtccatttaaacaacaaaaactaaaaatgaagcttggtttaaataataaagtgaatcatcttgtctcctagttctcacaccattggaacaacttccatttcctgacctaattctatcccaccattgaatttcaaaaattaatgtaaataccatcatatttcagttatttcttaacagtgttaagttcgagcctaaaaatgatggccaagtgtccctttaaggcaaagaagacagtaggtggataaatatcctgaaagacaaaaccatctattatcattatagaggcagaacattttgacatgatcttttacaaacagaatagatacactgcataccatcgaagaattttttctttataatggcatactaggggacaagcttcataatagatttatgttacgtttgaagaagtagagacttttcccagatgagagcaatacaagaaataaagccattaatggctgttatggttacaatttaaaataaaggacacatcggatgctgtaacagaagtactgcacgctaagtgatgctctcttgtaattgaaagagaatgggtttcccttcaaaccatatgctattactagtctctgagtgccttcaaagcacatactcttcctttaaaatccaaggatccttgccttcaaaagacacaaatgcagtagttttcatttcttacattcacttaaaaatggattatgattccagcaggcaaatctgcatattaaatatagacaacccaaccacagtatctgaacgttaaaagaaatctatcacgacagacattttacctagttataaataacgtaacaatagatcacactcagatttcttaaacagctcactcaggagtttcctcttt

SEQ ID NO: 124502 - DNA, 916 bp, Homo Sapiens
ttttttgctcttgtttacattttattatcattattagtaataaaccaataaaaactgaataacaaaggaaaaagctcaagataaataatttcttccttgtgaattcaaacacatgcacacacacacatcctcctctgtgtgtgttacttcctcctcacattctgtcctacggtacaaatagttacacaaaagtctacaaaacgcgagtagcagaccccagctgtgttaagctcaggctgattctcagtctagatcaccagcttctccacgctaagtgtacttgtggtttcatcctcttcatttgacccaaaatatcctgggaggtccagcatcctctgctcagcctcagtgaggccaaacgacgtattgtcatagaaggcaaactcagggtgagtggggaagctttgacacttgtcttttctacactgagaagggctcagagaactgaccctctggtagttatctttgggggatgtgggagaagactacttccttgagatactcttgtgactgggggacggtccccgacgagctctgtggggctctgttctctcaattccggccactaatcctgcctggtgatccccaaggtctggtttcctcaagggctgccccaaagtgtatgatttagggagagggtttaatggaccacgggttccacttgcctcttggaaatgctccagtttttcaggaaacaggtgggcacctcgactctgagggctaaatctgtcctctgcctgctcgcaggtccgcgtcctagagctgtaggcaggggcctgccgtggagtcagagtggacatgctcctctctcggaacggccgggcctgcctggcttcatggaaactcgctgtcctcctgaaatgggccccggccgtaatggccgaattcccgggcatatgtccggtaccgtcgactg

SEQ ID NO: 124503 - DNA, 1872 bp, Homo Sapiens
tttttcctttttaagagacttttatttgagtggttcttacaaagattgttgcaatatgaaagtcatttgtttgatagaaatatcaagctgtcttgtcaaacacactgaagtaacccaaaaatatatttcagagctcacagagcttaaaaagagcaaagattatatgcaaccagacaaaacctatttctgcatttcctatttctttctcagactgctttgcctaccagactctcacgtttaaacatcttcaggaaatgcagggatcattttgtttggaattttaagacacaccagaacacatagtatttacaaagaaacttttacagatacattaattgaaaagataccatcaagaaatataattttgaaatctccctttcttgccaattgatcagaatgcaagatgagatgctaaccaaacagccctttagctgtcttgtatttccatacactaaatgtgtatttcagaaactgctcaaccatcagccaaatatcaacattagtgaaatgtgaaatgtaaccactgtgtaaaaagttaggcttctgaaacattaaaaacattacatccctggtctgcctttttacagaaagcacatttgttctcctagagctattcctatagttcattaattgttctacatgaacattttaaaaggcagaacaagagaacagttttgtatacagtgggatttactatttagggagaatgagcacactgcattcctgttaacatttttattttttcaaggtaacaggaaattgcatacaaatgacagtagatccttgcctctttatttttatctaaataaaagataactcaagatgaattctcaagaaagaaaaaaagctatatacataagggactatatcttccttcatcgtctacttggaaccagtagctgtgttgctgtcatagaatcaggaaacaggttgtggtaagttggaagaggtacatatgctgctgttatcattttaccagcaaaccacctgccatgcaatgcattgacagcagcaatagctgcagcaattgatgggcacttcacatacacattgccctgagctgaatttttgtcaacataaatatgaataactcctccatgtttattacattcttcaatcacatcatccttaatctcggtatcccatccaacttcttcttctgtttgagggttaaacatgttagagagttggaaacattgtgttgcaagtggctgaacagaggcagctgcagctaaagctgaagcttcagtctgctgggaaagtcttgtttgcaaatctataacaaaagagaattctgccacagcaccaaatgccaaagagccactcatctgtagagcttgctgtgctgctggcggaatctgcaaacctgtaccctctgcaagtcttgccattaactgaagacgaccagttgttcccaaatcaattccagtcctttccagttcatcactgtccaaaaatgaactagcactcgaagcatcagtacgttcagtaacatgaccaactttcattggtcttcctgctagttcaaatccattaagttgttccaaagcctttttggcacattctgagtcagaaaatgtaataaatccatatcccttggatcgaccagtttcactgtccatcatcagctggatactttcaattcttccaaaaggctcaaagatcccacgaagcatatcttcagttatgttgaagtgtaatgagcccacataaagcctcataggtccagcacttcccttttgtaaattgtttgccattgctgcagctctgtttttttctgcctgtgcggacgcgtgggtcgacgatatcccgggaattccggaccggtaccagcctgctttttgaaccagctgttctataggtcactatgca

SEQ ID NO: 124504 - DNA, 616 bp, Homo Sapiens
gagaatgtgccacagcaccaaatgccaaagagcactgcatctgtagagcgttgctgtgctgctgccgaagtctgcaaaccttgtaccctctgcaagtcttgccattaactgaagacgaccagttgttccccaatccattccaggtcctttccaagttcatcactgtcccaaaatgaactagcactcgaagcatcagtacgttcagttacatgacccactttcattggtcttcctgctagttcaaatccattaagttgttcccaagcctttttggcacattctgagtcagaaaatgtaataaatccatatcccttggatcgacccttttcactgtccatcatcagctggatactttccattcttcccaaaggctcaaagatcccccgaagcatatcttcagttatgttgaagtgtaatgagcccacataaggcctcataggtccagcacttcccttttgtaaattgtttgccattgctgcagctctgtttttttctgcctgtgatgcctgtactatgattggcacgcctttaaactcgttggcccagttaatcctattgctagaggcactgaggtaacgcgtcgagacagtgtatgtgtctcgaatcgagagcatag

SEQ ID NO: 124505 - DNA, 2046 bp, Homo Sapiens
gacttccgataatgactttattttaacatatttaattacagacataaaatagctggggaggggggtgagccccagcctagccccaccatggggctataggaggggaggcgcaggcggggcccccctgctgaccctctctctgggggtcttcctatggcggggccctattgcttgagtgggggaggagccatgcaaatgaggggggcagggcagccactcggccccaccccaccccgaggacggcctccccacagaatgcccaggctgtgcccccagccccagctgctccacctccttcctctctgtccagggagcagaccctctggccagcccctgactctgcccctaccccctctgcaaacctaaaggggaataaatacaaactttacaaagtaaaagggggtccaacattgccctggggcggggcctgctctgcccctagcccagggcctgggtccggtgggattggaggggccctgggatgcaggccgccccgcccgtcacctcacatcattcctagctgcagcagcgtgttggcataggccatgggcttgacgttgggatgaggcactgctgtgaactggtggaactgaggccgtaggtcagagccctggaggtggatgtaggaggctttgttccccatctggtcgcagtagttgggggcagagaagacggtgacacagcggcctccgtgagccacctcgtagccctcggccttgacttcgtggctgcggatgatatagtccaggttgttctcttccaagaaggccttggtgacgtcaggcccaaactgacagctcacgccccgcttgctgatcgagcgcccgttctgtggctgtggatctgaccagagcaggtcacacatgggccctgaatctgggggttgtcgattccgctcaattttccggatgtcatccagggtgacaccgtcttcactgaacaggcctccgtgcatgatcagcactttgccgttgatgcactgggccaacgggagccactcgaacacctcgctaaagagctcgtacatctgggctgtgtacttggccttcacctcaccctcgaaaccgtagatctggttcatgttgtctgtctcgtggttgcctcgaaggaggtgaaagtgatctgggtacaggagcttgaagccgaaaagggtgaggatcacttctacagagaaggagcctcggtccacaaagtcaccattaaatatataggggttggtctccgagggtaaaccgttgagctcgaatatgttgaggaggtcatagaactggccatgggtgtccccacatactgtaatcttctctgtctctttgagtgtggtttccacgagcgtgctcagcttggagaggacctctttgacctgtaccagaatctggtaggcacatttccggtgcagtttcttctggtccttgtaccactgcatgagctccttcatgaaactgattgtcactttgccgtcttcaagcttgggtccgctgtactcatcctcaatggtcatgctctcgatgtccagcgagtccaccacggagcgcttgtgctcgtcgcccgcgatggcccgctcaaaggccttctgcttcacgatcttgttgcactcctggtatttcattttggcatccttgtcatggggcttcaccttgaccaccgtctcgtagtctcgcagcgcggcccggaacttgcccagtgccatgttgctggcagcccggcggtaataacccttgatgtacttcttgtccagctcaatggcccgcgtggcgtctcccagcgcgtagccatagcactcagtgcgcaggtaggccaggctgcggttgccatagtagatggcattgctggggttcagctcgatggcctggctgtagaacttgatggcgttctcgtagtccttggctttgaagtagtcattggcctgagtcttgagctcctctgcccgcttcagagctccatcagccgggggttcgtcccgggggggctcagcacactcagtcctctcgccctccgccatcgccatcctcgtgccgaattcaacacccaggcctcgtacctagccta

SEQ ID NO: 124506 - DNA, 1005 bp, Homo Sapiens
ggatctggttcacagtgttggtttctgtggttccctcgaaggaaggtgaaaatagttctgggatacaggagcctgtaactcccgaaaagggtgagtatccacgtgcttacagagaaaggaccctcgggtccacaaaagtcaccagtggaatagaataagggttgttctcccgaggggtaaacccgttgagctcagaataatgttgaggaggtcataagactggccatgggtgtcccccacatacgtgtaatcttctctgtctctttgaatgtggtttccacgagcgtgctcaagcttggagaggacctctgtggacctgtaccagaatctggtaggcacatttccggtgcagtttcttctggtccttgtaccactgcatgagctccttcagtgaaactgattgtcactttgccgtcttcaagcttgggtccgctgtactcatcctcaatggtcatgctctcgatgtccagtgagtccaccacggagcgcttgtgctcgtcgcccgcgatggcccgctcaaaggccttctgcttcacgatcttgttgcactcctggtatttcattttggcatccttgtcatggggcttcaccttgaccaccgtctcgtagtctcgcagcgcggcccggaacttgcccagtgccatgttgctggcagcccggcggtaataacccttgatgtacttcttgtccagctcaatggcccgcgtggcgtctcccagcgcgtagccatagcactcagtgcgcaggtaggccaggctgcggttgccatagtagatggcattgctggggttcagctcgatggcctggctgtagaacttgatggcgttctcgtagtccttggctttgaagtagtcattggcctgagtcttgagctcctctgcccgcttcagagctccatcagccgggggttcgtcccgggggggctcagcacactcagtcctctcgccctcgtgccgaattcgccacccaggcctcgctaccttaggaccgtagagttactgcctt

SEQ ID NO: 124507 - DNA, 1019 bp, Homo Sapiens
  misc_feature (193)..(194): n is a, c, g, or t
  misc_feature (207)..(207): n is a, c, g, or t
  misc_feature (260)..(260): n is a, c, g, or t
aaacggaaagggggaaaagttagattcttgggttcacacgggaggtttggaaagcccgaaaaaagggttgaagggattcacttttttccaagagaaagggaggccctcggtcccaccaaaggttcacccatttaaattatatagggggttgggtcttccgaggggtaaacccgttgagcttcgaatatgtgannggaggtcataganctggcccatgggtgtcccccacatacggtaatctttctctgtctcttgagtgntggtttccacgagcgtgctcagcctggagaggacctctttgacctgtaccagaatctggtaggcacatttccggtgcagtttcttctggtccttgtaccactgcatgagctccttcatgaaactgattgtcactttgccgtcttcaagcttgggtccgctgtactcatcctcaatggtcatgctctcgatgtccagcgagtccaccacggagcgcttgtgctcgtcgcccgcgatggcccgctcaaaggccttctgcttcacgatcttgttgcactcctggtatttcattttggcatccttgtcatggggcttcaccttgaccaccgtctcgtagtctcgcagcgcggcccggaacttgcccagtgccatgttgctggcagcccggcggtaataacccttgatgtacttcttgtccagctcaatggcccgcgtggcgtctcccagcgcgtagccatagcactcagtgcgcaggtaggccaggctgcggttgccatagtagatggcattgctggggttcagctcgatggcctggctgtagaacttgatggcgttctcgtagtccttggctttgaagtagtcattggcctgagtcttgagctcctctgcccgcttcagagctccatcagccgggggttcgtcccgggggggctcagcacactcagtcctctcgccctccgccatcgccatgccgcaaagcgacccctaccctggcaacggccgcctcgtgccgaattcgccacccaggcctcgctaccttg

SEQ ID NO: 124508 - DNA, 961 bp, Homo Sapiens
  misc_feature (688)..(688): n is a, c, g, or t
  misc_feature (802)..(802): n is a, c, g, or t
gccaattttaacatagaactttattgaaaacacagactcaaatagagaaccatatatttaaacaacgaatagcagggtagcttacttaggtgacacagttcattgaaaacttaatactgaaaaataccgcaatctggacagcaagacaaatatcaacaaatgtgttttcagttttgatattcatttggcatccacaaaatgatccagctcaaaacaagagtttgacaaagttaacatcagcattaaaaaatataagttacaacaaaaaaacagactgtgaacaccaaagcactactcagggctctttgggaacataaggctgatcagcggcaggtggttaatcatattaactttgttgtcccacctcaggatcattttggttgtctatttgggcttgtagttgcttagctaactcctcaaattcacgaaatgcagaaataagcggctcaagactgaaatcatcatcaattaaggacatctttccactttttataatgttactgatattctgaaacattttaataacaatttgaatattatcatttgtctcttctatgttaaagagacccacaaatattgaaagagctttggcactgaatagtttttttggcacagcaggattttcagacaaattcaatagcattttcagaacgtgaaacttcgttctcgcattggctgtgggttatanggagagaacccggacatatagtggcatcagtgtgtgatagtcatagcatagtgaggtgtctagcaccttatcagtcagctgtcagggatcacatattgcagggttctcaaactnacaatgatgctcatcatgttaattggtaggtgagcagtgatcaatttcaaaactgtctactctcagagggtattacaggtcataatgagaaactgaccccatgatccgggatggggactccaacatgacttatatcagataagtcgattgtcataaaga

SEQ ID NO: 124509 - DNA, 1607 bp, Homo Sapiens
  misc_feature (646)..(657): n is a, c, g, or t
ttttttctgagagtcatttatttcttttgtcattgccaaacattccccaggtcttactcaccagaaattaacatagcttcttcatttctcctccctgacaaccctcatctactgaaagggctttaagggcacactgccaatgaaaatgcagagtgcatataccatgtccttaacttgtttcaaaactacctattctggcagtatccaattcaggtttcagtgctcccttgtttgaaagtggtcttcacaaaagcccacattttaaagctatttggaggagcacaaagagttaaagtggtaatagcctttcagaatttgaaaaggtagtacttgtctatatcaggttcattttttatgtggcatatgccacaaaataggcaagaatatataagaccaatatttacgcaaaatggggaagagaatccagaaacacgacaacaaagctgctctaaccaatgttccagagaaagccaccctcaaagagaaataacccattaaacattaccagataggcatgaggtacagaaaaagaatttttctttccagctccagataaatatctacatctggtgtcaaagtctcaggatataaagaggagagaactccatatataaaagaggataggacaatattctcagaaaattcnnnnnnnnnnnngttggctaaggggatgggtggaaacagtggggcgtagactaacaagtaaggtaaagtccagggagaaggaatgcgcgccttggttttcccttagtggcactaccaggagcactaggagactgtcaaaacatcaggggcaaatgtgatatttctcaattcttaaacccaaagaagcaaaaataagcttcagagggcaagtgatcatagctatggatgaggcctcgggctccaggaaagttggggcagtatttattgctgcttctactttctctttcctgtcattttcaatgtttgggtcactttactccctaaggttgcttttcatgtctgtgggtctagtcactgctacttggtacaaagcatttcccagtataaacagcatagggtagttctagagttttcatcctaaatccgttttcttactttcaatcttaaaaccatattgagaggacaaacagcctccataaagtttttttcccaaggagacagagtaatcttattatgtgaatgacaacagttctaacttctagacttgttatatcacaaatacaaaatgacaaatcagttatggttttaaaaaattagtttggaatggtttcacaagctagatgatggagcagctactaaatcaatggagcttccaagaacattctataccccaggaaggaaaggacaaccaaagaggtttcttagttttgtacagggcaagcggagcctatagttggccttgagagggagctctttgggcaagataaaaaaacaagaggacttgacgaggaatagcaggaaaacctactaaaaggggaggggggaatcaaaatgtaagaagggaagacagtgaaatttacacaggaggaaggagctgagaaagtcacagccttacacaaacagctgaaagaatcttcactcagtcctcccagcacaggtccccgtgacaacagcatcacatc

SEQ ID NO: 124510 - DNA, 2257 bp, Homo Sapiens
  misc_feature (716)..(716): n is a, c, g, or t
  misc_feature (1265)..(1283): n is a, c, g, or t
  misc_feature (1421)..(1438): n is a, c, g, or t
  misc_feature (1528)..(1600): n is a, c, g, or t
  misc_feature (2118)..(2118): n is a, c, g, or t
tcaaccaccctcctgccttccagttctgccaggtgctccatgctggggacaagtaggagactgccagggcccaaagaaatgggtgagcagtagagtcatctcggggcacttggcagtgtcaagcacctgccccttgcctccttgaccacactggggtgggtgggcccccagcacttcagaggcaggagcctttgggctgagcaagcactgaggaggtggatggaagggagcatctggagggggggagcttccttgagcagtgggcccaggcctggccctccacacttcattctctgacctttctctctcctcatttcggtgcatgtcctttctgcagctgcctttcagcacaggtggttccactgggggcagctaacgctgagtgacaaggatgggaagccacaggtgcattttactcaagtcttctctagtcaatgaggggcacccagtgcttctagggcaggctgggtggtggtcccctaggtatcagcctctcttactgtactctccgggaatgttaacctattttcagcctgtgccacctgtctaggcaagctggcttccccattggcccctgtgggtccacagcagcgtggctgccccccagggccaccgcttctttcttgatcctctttccttaacagtgacttgggcttgagtctggcaaggaaccttgcttttagcttcaccaccaaggagagaggttgacatgaccntcccgccccctcaccaaggctgggaacagaggggatgtggtgagagccaggttcctctggccctctccagggtgttttccactagtcactactgtcttctccttgtagctaatcaatcaatattcttcccttgcctgtgggcagtggagagtgctgctgggtgtacgctgcacctgcccactgagttggggaaagaggataatcagtgagcactgttctgctcagagctcctgatctaccccaccccctaggatccaggactgggtcaaagctgcatgaaaccaggccctggcagcaacctgggaatggctggaggtgggagagaacctgacttctctttccctctccctcctccaacattactggaactctatcctgttaggatcttctgagcttgtttccctgctgggtgggacagaggacaaaggagaagggagggtctagaagaggcagcccttctttgtcctctggggtaaatgagcttgacctagagtaaatggagagaccaaaagcctctgatttttaatttccataaaatgttagaaggtnnnnnnnnnnnnnnnnnnnttctttaaatttttgagtctttgatatgtctaaaaatccattccctctgccctgaagcctgagtgagacacatgaagaaaactgtgtttcatttaaagatgttaattaaatgattgaaacttgaaaacaccacaatannnnnnnnnnnnnnnnnnggggaaataagcggccccagcaccgcgagcgttgcttgtccggccccctcccgcccccggagaaagttttctcaaacacatttcttttcnnnnnnnnnnnnnnnnnnnnnnnnnnnnnnnnnnnnnnnnnnnnnnnnnnnnnnnnnnnnnnnnnnnnnnnnngcggcccatgcgccgagcccgccttgcgccttccccccaccacatcacaacaccacgcgccggggcggtgccaaaccgggcacggtggttgggtgccaaccaaactttctttttcacgcgggaccccctccccacaggtcctcctcttgaacccgcgagatttgtttgctccacttcccgtgcaagctcgccatccgcgtagcgcgctctcctcgccaattataccccacacaattttcatgcactctccccggcgcgctgcatggtgcacagctttccgcccgcgcgcccgctcacacggcgccgacgcgccgcacgatgggcggggacgaggggctgtatctacactgccccacccgacacggcggaaagcgcccccttctacacacctcagcgccggacccgtgacgtgtgtcagacctccgccgcctccccgccaccagaccctgtggcagtatctcatcgccaccgcgtaggtgtcggcgcgccgcgccgtggcgctacagatagccgctatntgcgcgcctcctgccgacggggagtgtaacgggcggggcggcgcgcaccgcaggcagccggtcgtcggtcgaacgacgcgcgtcctatcgtcttgtggcaggtacggcaatgcgcggcgcgcgggagaccgcagaagcc

SEQ ID NO: 124511 - DNA, 2092 bp, Homo Sapiens
  misc_feature (179)..(191): n is a, c, g, or t
  misc_feature (269)..(278): n is a, c, g, or t
aaattatccaaaatgatttctttattgagattaactacatagatttcacagtactatggaatacttatatttagctaaagtcacaaacacatttcaacattcaaaatgatgagcatcattaccattctaatctacaaagctcatgaataaagaaaaatacaaaaacctcaagttttacnnnnnnnnnnnnncttttaagtctacatacattaacaataaaaccatttcttccagataacaggtaaaagtataaaggcataccactgacnnnnnnnnnnctagatagccaggaatgaacgaatgtttaatatctacgacgcttattagggccttcaaagttgcccccttgacttcctctaccaaagccaccaggaccaccactcacaggacctacaccactcattggtgcttgaggggtttcagaacctgttctactccccataggtgaacccatctgagatggtggtccttgaggaaatctgtcattgtgcactgctccattatctggcatcattggagttcccatatttgcggctccttctggtcccatggcaggaccaggacccattggtgggccaggtatagttgctctgttgttcatattcatacccatcattggaggaggaccttggttaccagcaggggctgggctaaacgcatctcccatgtttattgctccacggggacccatatcacccattctcatttcctgttctctattttccatgtagtttggcttaaagccctcttgctgtcgcctcagttcctcctgttctctgtgtcggatcatttcttcctcacgccgccgatgctcctcttcatgtcttagttgtatttgcttccgtttttgcaactcttggtttctgagttcttccaagcgtctgagttcttcttgacgcctcattagatcttgcctcattagcattaattggtgttcatgcctagctgcttccatttctgcctccagtttctctttggcttctctgatgtttctatcaacctgctcacgctgctgcttttccatttcatcaagagccttccatcgagatgcatactcaaattcaaatgtcccaggttgagcaaaacgtggtggttgttctctttccttatgatattgttgagttttctgcatcagcttctctggcaagccatcttcatcatcaaactgctccatgggttccacaatgactggacgaggggtcgttgttagcaagaatgccccatcaccacatctttccagagcctttcgtgcaggaggttttgctgcaaactctacaaaaccttttcctgtagctctaccgcgatcatccacaaccacaacagctttctctactggaccaaactgagaaaatgcttgctctagcagctcattggaaacaactggagaaaggttcttgacagtcaaggctgctccatgtgtagcgaagcgaatccgtagaggtctgctcttgagaatggtgccgtccagctctgcttttgcaatttcagccagggttctggattccaagcggatgaagccgaagccacggtcccggttgatgaagacttcgctgggctcgccatagcgttcgaagagcctcttgaagtcctcctccgtgatgtcggtgggcagatttcccacgaagaggcggcagcgctgcgtgtacgtcttctcgcccggcttgaggaaactcttgatgtcgatagtgaaccccatctcctcgtccgggtggtcctctggaggcgcgggcgcgggcggtgccggctccccggcaagagcgagcgccatggctgccgcggccgccggctcgctctcgcccaccgcggactccagggcgcgaaggcgggccgggtttttctcaatgcgcacttgcttcaggtttcctcttaacatcatcttactgagttcgcctcggacaccggatacaggcctagatttaaagacagtgtgtctatatatatgtatacgtctctacataaacctatgccaacaaaatatcgacaatcaagagaccgctaggtaggcgagtcggcaacccgtcctcccccaactcacgcccgctgcagcctcgtgccgaattcacacacccggcctcgtacctagccttacgtt

SEQ ID NO: 124512 - DNA, 451 bp, Homo Sapiens
tttttttgaagttcgaaatgtttaatatttcatgcagttaacatgcttcaaagctttaagtctgaagttttagacttatcccaaatccttgctaagaagtcaagaccactatggaattcacactgctttctatagacttccactgacttgcagctaatggtccttacacagcaaagttgggatttctagacgtctccttccaggttcggaaaagcctcactaggcaagtggcaagactgaaaggaagtatgattccagtacttctggtcttaactcttctgaattacactgcaagctgaacttcgggtaacttcagccacattttcttttatcaccctagaaatacaatgaaatcagattcagcatttttaagaactgatttcaataaacaatgagaaaaatcagagttaactcatttagtaaattcataacagtaattgaggtttcgata

SEQ ID NO: 124513 - DNA, 1339 bp, Homo Sapiens
  misc_feature (1265)..(1299): n is a, c, g, or t
ttttaaagaagttcgaaatgtttaatatttcatgcagttaacatgcttcaaagctttaagtctgaagttttagacttatcccaaatccttgctaagaagtcaagaccactatggaattcacactgctttctatagacttccactgacttgcagctaatggtccttacacagcaaagttgggatttctagacgtctccttccaggttcggaaaagcctcactaggcaagtggcaagactgtgaagacaatgaaggttcagaattcagtcaaatggaaacaagatcaggaaacaagatcaaggactcatctgtccgcctggcaccactttagttttgaaggtgacgccaccacgcatccccgcagcacacactccttcctgtgccgactcccgctatttgcttgcctgagccagttcatgtttcagtaagaacgatttttctcccaacagtgccagttttcttattcccaattttgagagttgacccaaaattgtgggctatgagggatggtttttaaaactcctctaatggttcccaggcacagagcgttgaaaaggagggatttcttggctattctgaatttgtgcattgctgccatactacttcccaacacgaaccagcaagaccaccacaccaaggagtgggtaacatcttgatttaatttacaaataaaaagccaaaaccctcaatgcaaaggaaaactgcagtttacacttattctggagatcattgtttaaccacagaataatgtgctccctgtagcatgttttgtaaatggcaagtcgctatgattgcccagacatccataagactgcttgtactggagtaagaaagttcataaatgaagaaagatttgttattctgtcttgtttctcgctaggtctacgaacaggatatttcccacaaaatgcttttgacctggaaaagagacagagtcgttcagctagtaaacaggatcgtaatctccatagtatatttttctaaagaaacaagagctttcagtcctaaagtaatttgctagactagaatcactgaccagcagacctaaattcaagcttcaatattaagattgcttgataggaggcaactgtcatggaaatggcaatttcgttaactctttataataaaagcagattcaatgtcacaagaattaaatatttggcctgtttaataattttactttctttacatgtttctggagtgaacctcggttaccccggccgtaatggccgaattcccgggcatatgtccggtaccgtcgactgnnnnnnnnnnnnnnnnnnnnnnnnnnnnnnnnnnncggccgcttcctcgctcaaacgactcgctgcgctctgtcc

SEQ ID NO: 124514 - DNA, 689 bp, Homo Sapiens
ttgccttttcatttgtctttttattttacatttaaaaagtggttattgctctaagtggatcagaggtaaggacctctcccctaaggagccttggccttgcagccccattcagcagggatggaagtcacaagacaatgagtggagcctcatgccctcccatgaggaagcccttagtattgctgacatctgccctttatcctgtctctcctccccagtgctgtcacacttgggcaaagcagagtggtggcagacccagccttgagagctcttgtagaccggaaggaaggggcggtcattgggtgatggcttctggctctctggcttggggaccaatgctcttatcattcatttcaacaaatatttactgagtaccaggcttgcactaggtgtggttctcccacacccatccttgaccaccaatggaagatgcagatgtccacctcttcccatgcaggcatctggcagccgtaactcgtcagtcctagggaagagtctaccttccctcatcaagcaccatttttttaaaccagaaaggggcagtggagagagagacctgtcacctcacaccactcaggctctaaggaaggacatgaggaccctgggtaactttcatggaaccctggatgagatggcaagatatgaagaccccagaggccagtggtgatagccagagctgccgctgtgccgaa

SEQ ID NO: 124515 - DNA, 1174 bp, Homo Sapiens
  misc_feature (1150)..(1150): n is a, c, g, or t
ttttttatgtacaaaaacattttaattgaaatacctgtataaaaaaatatgatctccagacatctcacttttgaactgaaagaacccccatctgcgatgcctgcacacaccgcattcacacaaacacaggtactgaataaattaaacgctcaggctctggccccaccccagctttcagagcccacaagcagactgtacaaagtcaataatttaaaacccaaaccctgggcacagtgcctggaagtgtcagggtcacccactccccttaagttagccactatacatgttcatcttctgacaggcggggccaggacagacgccaggcacaggaatcagggcctggggtccctggaccacagccaccccctcccctgcctccccactgtcccctggggcttgggagaggcagactgctcagaggaaataacctcaacaaataaattaaacaataaatagccccggtgggccgagggcacctccagggggtcacaccataaataacagagttggcggcgggtacggctcgcgtgggcgggcgggcgcggaggccaggacttgcattgtgtgtgcaggacgtgcccagacgcacaccgcaggactgagggcgggaggtgggcttgggaccctgcgccggcggaaagagctccgggtgggcaggcagatgggaaggccgcctccggacacagcagcacagaggggcgtctggggttcaagtatccacccagggcaggcgggacctcgaccggagcgtctttggacagacagagcttgagaaaaccaagtcccgcgggaccagcgttcaaaaggcactcaaagcgaaggtcaccaggggtcagaggtcactgcttccgcaggaggagacggcccacgcaggaaaaagtcagggtctgggggcgtcccaggtctggccaaggcaggtggtcccctagctcccagtcaggtgcagctcctcacaagctctcgctgctggacgtggtgctggccacgtcatcagggtcgagggtgcacagccgcaggtcacagctctccggggcgcccccgtcagcccccagcatccagggatgggccgcaatctgatccagcgacggccgctctgagggccgcagggacaggcaccaccggatcagctgctggcactctgtgcatcccngggaattccggaccggtttaccag

SEQ ID NO: 124516 - DNA, 669 bp, Homo Sapiens
  misc_feature (565)..(565): n is a, c, g, or t
ggatctgaaaataatcaaaaattttattttaattcacatttatttaaatataacattttttatagacacatgaaggtacttatgaacatttataacatggtaggcacaaatatagatgaaatgtttaggtattttcgacaaaatttcacacaaaattagacaaactgactatgtgcttgcatttaatttcaagggtacattaacatagatatttgaaaaggatgttcttttacaaaactactacaaaatgttcacgtttgcatcagtaataagtcatatttcctagactgatgctttgtaagaactatgtaaagatctaatttaatcattaacaccatatggtaacattatatgtaaatgaagcatatttttgtcaatagaaatgttcctctaacttttaaataacatagcatttgtattaaaaccatgccacatttattaaacaaacatgcataatactttaaaactggaataattcatgtacctttatgcacagtgtttagtttcactatggcactctatctttgtgaaaaaatatacttaaaacttggcacagagttaacanatcatattgctggtaatcaaaataaatgtgatttcaatttcccatgacatagaaaattctctatcacaatttacctcttcgctttacagtttattgaccactgg

SEQ ID NO: 124517 - DNA, 460 bp, Homo Sapiens
gctttaaaaatgtttattcagcgcctgcaatgtagaaggcactgtgtttggcaccatgaggaatacagaaaccaacaaggcatgattcttgccttaggaagctcacagtctagcgtgggaaattagaaattgcacatgcacacaggtaactgtcacaccaggcaggaagcactaaatgctgtgagattgataccaacattataagaacccagaggaagaaaacactatttggggatgaggataagagattagagaagttcccttagaagtagggggtttaaacatgacagatcaaatgtagataggaaaaaattcagaggaaaatgtaatcggggaaggctctaattaaaaccagaagcaggaggtacttctgtgatgtgatggaggcaggagaagccccgctgggctggattcagaggggaggggagacaagaggatggggaggtggaggagggagcag

SEQ ID NO: 124518 - DNA, 1244 bp, Homo Sapiens
  misc_feature (340)..(397): n is a, c, g, or t
tctaagcccgtgggggaaaaatttgagaaaaatttgggcaacatggccaccaccagggtaacctgttcacccccagggccagggaagcaattaaatggctgtgaggattggatacccaacctttataggaaccccgagggaagaaaacactatttggggaggggattaagagattagagaagttcccttagaagtagggggtttaaacatgacagatcaaaggtagataggaaaaaattcagaggaaaatgtaatcggggaaggctctaattaaaaccagaagcaggaggtacttctgtgatgtgatggaggcaggagaagccccgctgggctgattcannnnnnnnnnnnnnnnnnnnnnnnnnnnnnnnnnnnnnnnnnnnnnnnnnnnnnnnnnaggggaggctggaaagatgtgtggggatcaagacgggaaggtgagtatgtgagtatgtgtgccagacaatggtgtttccatgtcaatggaggtttctcagagagaggtgatctggctggagaaagcttaatctggtggcaatggacaggtgactttaagaagtggggaacgagggaaggaggccagtttgaaaatgataacaagggtccagactcagtgatgcagcagtgaccatgagaacagagcagctgcaggtagaagatggagacagaactggggagatctggtggaggtaagccgggtggaaagatgatgtcaggtttatacctagagacacatgatccattcacaaagccagggaaacctaaagagaaaacacttagaatttgaggagaagaggctagggctgggcctgagacatgggctggcctccaggtggaggggtccagcaggcaggtacaagccggatgagagttcagggcagagggcagagccggaaacagaccaaaagctgccatggagtggcgagggtggaagcagcggcacaggccgagggccatctcgccggggaagggtgggtacagcacaaccctgtggccacgttttcctcacacaggaaattcccacagaacacccaggagggtgacgatgcctcccatgaacaatgccgtgtgtctctgtttgtcctttgtccccgatttcacacctaagaaacaatgtcttcagctgtgtgatgacaagtaggaacgctgcctccattcggacgcgtggttcgacgatatcccgggaattccggaccggtaccagcctgctttttaaaccacggttcactagtgtcacaagcttt

SEQ ID NO: 124519 - DNA, 769 bp, Homo Sapiens
  misc_feature (751)..(751): n is a, c, g, or t
tcattaaaaaatttattttcatataaaagtgccaaaatatccaccaatgtcataatctatctcaataaccagtttacactagtaatcaaaacacaagcctctttattcacattgtttaaaaatccaattattttcacacattcccacagtaactcgagtctctagacagtgggaaatttgcattcctattcgctgtggtagtccatatgtccaggttcatataggcgcgaaacgggttgaaccccgggtagtattccttgcacacgaccgcttggttttccatgtgggtcgaatgttccgtggtggggttgatggggcagcaattttcatacacatcgctttgcggggcccagatggaaccaaaaagtccagacattggagacaagcttcgggtgcttgtgaggtagggcggagagctgatgaaactggcatgtccccaggcagcaggcatgttgggtggggtgttccaggtagactgagagttgtgatcaataaagtctgtctgaacatctgcaggacaggggaagccattggcatagttcatgttttcttctggaaaggcattgtaatcgttcaattccaatggacagtatgcgctggaaaactggccttcgcatgttgcactccaatcaatgaaactattatgaaccggggccgactcctgaatcacacaaggcacgccgttctccagggtgcagtttaagctgcttgtcacacacactggcggagtgggcacaggtctccaggtgangtaaagactttatcttct

SEQ ID NO: 124520 - DNA, 2078 bp, Homo Sapiens
  misc_feature (1940)..(2036): n is a, c, g, or t
gaatgaaacaatgaacacatgaagtctccatttattctgggatgggttagagtaagcctctgaggctgccatcaggctggctgagttgttgcccaacattgtatccagcagtctcaggcccgcgcagtgcacagccagcatggggctcacaggtgcagatggaatccagaagctcccaactatgctgcaaaggccaggcctaggggtccgggtacatgcagtgagtccttggggcagggccagccctgctgactacacaagcaaggttggtggtgagacaaggggtgtatgtttccccgccaggacagagggcaacacacaggtgggtggcgaccctcaaggctgacggcatccctgcccagagtgacgaccagggcctactagctctactaaattcagggtggcggaaatcctggatgtgccccttgtcatggctcaggggcctcctttcatcctagttcatgaagccccaacacttcctccctgggatcagtaccaatcccctgcaaggccctgcccctccctccaacttcatcccagtcaaccacacacgtccaatcgtgtagtctgttgcccttctttccttcctggggcatcctgagccctctgggatggcgtgtgcccagttccagctcacggacctccatggcccatccaccaagcaccccatcgtatcaacttgccatgtaagggtgtggaccccttccccgctcatggatgctcctggtggcctccactgaacatgtaggagaccgtccacccaaagcatattggtcaaggtgtctcatttcacaagccagctgttgcccagctcttgctgggcccgtttgtaggccctcctgcaggtcggctacctgcgtttggaaggcaactagcctggaaggccactgtcagtgctcaaggtgatagccacatattcctgaacccggtgtcgtcctgttgtagctgggatactgtctcaggccagcagcatgacggcatcatcagcactggtgaggatcgtgagcggggtgagggctccaagggtgctgtgctcaggagctgttctctccaggcacgtgcctgctgtgccgcatgtatctgcagcagggcgggcgggtggaatccatccctcgtggtgggtctgcattcagaaacctgaacgtggtggtggtcactgatccggaaactgttaagggaagtcctgtgttgagaatgcaggcgcctgcccagagtttggaggtatttagcaggtggggccaggaagtgtccctctccatgagtgttgcaggcaggcattctctccttaaacacgaggtctgctgatctcacaggagtctcttcttgtcccaaccccttaatgtgtccaggagaggagataggacatgaacacatcccatcaaaatcaggggttaggacccatccatcctcatccctccactgtgtgcgctgctgggatctcggggtactccaggccacctcttctcccagcctttcctgggaggcgccacttggtatctgggacctcctctgctctaacacaaataagaattcctcaaaagttttctagcacacaacttgttctttcacctctttcacctctccaagaaagtcaaacacggtccttgcttttcccagtggccatggttacccaagcacaggaggccaaggcctggggctcaggccagcagagcaggatctctgcagacgtgtggtcccaggcttggccagtacagttcttcctggatggccgacacagatcctggggaaaggcaatcccggcactgctctgaaaccagagctcctcctccctccccgggcagggtggagctgagaagggctgctctagcgttgggactccacctccatacacctgatattttgatagggcaggtccctgctatgggccactgttactgggcagtatagtatgcttgacagcataccttggcatctatccnnnnnnnnnnnnnnnnnnnnnnnnnnnnnnnnnnnnnnnnnnnnnnnnnnnnnnnnnnnnnnnnnnnnnnnnnnnnnnnnnnnnnnnnnnnnnnnnngctctagggaaatctgctggtatgagaccccaacatcaagga

SEQ ID NO: 124521 - DNA, 1173 bp, Homo Sapiens
  misc_feature (981)..(981): n is a, c, g, or t
ttagaagaatgcaattactttttctttacaaacctacatattttcactcctctatttaatgcagcaaataaacatgcatttatgcccactaaaaacccatcaaaatcaacagacacagaagcataaagtttatttacttaaatcatttcacaactattatattgataatggacaatcatttatttaaaataatatcctaaatacttacaaaaataaatcaaatattggttttatttttcaagtgtcaaagtctttgccatagaaaatagaaaggaccttttataagctaaacattacatttgtgctacatcatttaataactccacactcttttatggtttgtgctttacaaatttccaaactacttcttcacaatgtacaggtgcacaataaaaatgtatgcatacgttcacatacacacatttttacataggaatgtttctcattaaatacacatttagtgaacttaacacagacactactgtggcctaaaggccatccccaagccccagggtcagaagtgccctagaaagaaataggtatagatgtggaaacattatctaacattcaaattagcactctaattatcagaaatgatgacataatgaggaatactcactttaatatttctaaaaaagatgtcattaatctatactaaatcatttgacagccttattcatcgaaaaaataaacttcaaattttcctcaatacataagttaatctcaacatagacatcactgccatacgtacacacccttaaccttaaaaagaaaaggaattttaatcttagagcaagtgcttaacattgaagatcatttgcaaattggtctgtggttttactttataatcactaggacatttaattccttatcaaatagacaaatgctgaatatctcttcattggtatatgtactcaagcctcccttataacacagatgtgtataaatcatggttcaagatgaaatgtttataatgctttnaccacccacagggtgtcaactcactacattaaccagatgtggaaaagaatctcacttctgatcagttcctgaatttctgtatgattaatcacaataatacagaactttaaattacattagtcttatataaatacttacatatcaaacgttttgaatcctacttatcaactagaaaagtgataaatcagaaag

SEQ ID NO: 124522 - DNA, 1382 bp, Homo Sapiens
gtcattcttgacagcaagctgctctggaggatcaacacccggccccccaactctgcccagatgtataatttcaccagtttcactgtgagcctcaacgagctggagacaggcatggagaagaccctgccacccacggactgccgcctgcgccctgacatccgcggcatggagaatggcaacatggatctggccagccaggagaaggagcggctggaggagaagcagagagaagcacggagggagcgggccaaggaggaggcagagtggcagacgaggtggttctacccaggcaataacccctacactgggacccccgactggttgtatgcaggggattactttgagcggaatttctccgactgcccagatatctactgagggcctggaggggcctggggcccgggaccggaggctgacgaggctggacttcctcgagtggccactgtgagcctcgtcacagcagaaaccaacttttctaacgactgagttcgcggagatagcatcatccctgatcaaggatgtaattctaattaactgttgattgccaaacatttcactctgctgtgccgtctcttcataaagcttcacttgggatcatcgtcttcattaaggtttcaacagggaaattcttcacggcgcccttttatgtggcagaaatcagctggggcttgtttagcttccagcacactctcagtcatagcatgtgtagctaaaggaagtaatgggaaggggttcatgttctctttataatgcagtggcaaaaggttctgaaagccttttaaactcgaaccagtgggggaaagatggatcttgaagctaatcctgcagagagttttatagaggccagggattgccttctaaattatgataaaacagaagtgaagagtttcagagcatcagattgagtgaaaagttgtcagattctgtattttttaacaatcttcaataatgtaaagattacttttaaaatatttaagttaaaactacttgaatagtattttgctgaagagcaagatatgcattaatcaccggttttatactgtccaaaatgaagcatccccgtgacaaaccagagtgggcagaagcatcgagagcgtgacaggaaatcccaagactgcttccgcctcagaggcgtcccggctgcgattcgctgccctgttgtcagtgaggcctggctgtcaccgcacaccgcgtccgtgtctccagggggttcctttcttctcacacgtcgcgtgtacccatagcactcttgtgtttctgtttttcccagtatgcatgtttaaaatagaagtgacaagaatcacatccggttgtgtcctgtgggagggtcagaggcagaatctacttacagtggtgtaattaaagttatttaaccaaaaaaa

SEQ ID NO: 124523 - DNA, 1214 bp, Homo Sapiens
  misc_feature (51)..(525): n is a, c, g, or t
  misc_feature (573)..(590): n is a, c, g, or t
  misc_feature (727)..(735): n is a, c, g, or t
  misc_feature (1008)..(1022): n is a, c, g, or t
  misc_feature (1074)..(1098): n is a, c, g, or t
cctgttcttatagtctgtcggttcgcacctctgactgagctcgatttgtgnnnnnnnnnnnnnnnnnnnnnnnnnnnnnnnnnnnnnnnnnnnnnnnnnnnnnnnnnnnnnnnnnnnnnnnnnnnnnnnnnnnnnnnnnnnnnnnnnnnnnnnnnnnnnnnnnnnnnnnnnnnnnnnnnnnnnnnnnnnnnnnnnnnnnnnnnnnnnnnnnnnnnnnnnnnnnnnnnnnnnnnnnnnnnnnnnnnnnnnnnnnnnnnnnnnnnnnnnnnnnnnnnnnnnnnnnnnnnnnnnnnnnnnnnnnnnnnnnnnnnnnnnnnnnnnnnnnnnnnnnnnnnnnnnnnnnnnnnnnnnnnnnnnnnnnnnnnnnnnnnnnnnnnnnnnnnnnnnnnnnnnnnnnnnnnnnnnnnnnnnnnnnnnnnnnnnnnnnnnnnnnnnnnnnnnnnnnnnnnnnnnnnnnnnnnnnnnnnnnnnnnnnnnnnnnnnnnnnnnnnnnnnnnnnnnnnnnnnnnnnnnnnnnnnnnnnnnaagaattcggcacgaggccgcggctgtaggctttttttgaataatttnnnnnnnnnnnnnnnnnngaaactttacattttggagacaaacctgtgtgagttttttattggtacaaacgttgtatttaacactaggggttttgtacagttttttgccttttctactagaaaacaatgtaaagtgatttcacaatgtgaagagnnnnnnnnnttgccactatgaccaaacgcacagtctgttctgcagcaacaacgggattcaatcaactcagtcgtgattcagccgtagaaatgcttttcctttatcttgtttgagcttttcctttctttcctgttttgatttgcaaaagaaaatgtcttttttgtgtgaacttgtgttgtactctgtagaaaattatggattttactttaatggtttaaaaaaaggcaaggagagcccttgtcgcttttcttacctaatcacagagtttgtgtagtgaatttnnnnnnnnnnnnnnnttgttataagtttggagcaagggagtatgtgtttcaaaggaatctccttccnnnnnnnnnnnnnnnnnnnnnnnnncccaatggggaacctaaatctgttttaattgcacagacacatggacaaaaagtcattttgtatctgccaagtgtggtaccttcctttgtttatttgctattaaactgtttgagaag

SEQ ID NO: 124524 - DNA, 741 bp, Homo Sapiens
  misc_feature (19)..(19): n is a, c, g, or t
  misc_feature (78)..(95): n is a, c, g, or t
  misc_feature (529)..(543): n is a, c, g, or t
  misc_feature (595)..(619): n is a, c, g, or t
gtggtggttttaatggatntgagaccctggagcggcagctgcctttctgatttccagctgctttttgtgaataatttnnnnnnnnnnnnnnnnnngaaactttacattttggagacaaacctgtgtgagttttttattggtacaaaacccctagtgttaaatacaacgtttgtaccaataggggttttgtacagttttttgccttttctactagaaaacaatgtaaagtgatttcacaatgtgaagagaaaaaaaattgccactatgaccaaacgcacagtctgttctgcagcaacaacgggattcaatcaactcagtcgtgattcagccgtagaaatgcttttcctttatcttgtttgagcttttcctttctttcctgttttgatttgcaaaagaaaatgtcttttttgtgtgaacttgtgttgtactctgtagaaaattatggattttactttaatggtttaaaaaaaggcaaggagagcccttgtcgcttttcttacctaatcacagagtttgtgtagtgaatttnnnnnnnnnnnnnnnttgttataagtttggagcaagggagtatgtgtttcaaaggaatctccttccnnnnnnnnnnnnnnnnnnnnnnnnncccaatggggaacctaaatctgttttaattgcacagacacatggacaaaaagtcattttgtatctgcccaagtgtggtaccttcctttgtttatttgctattaaactgtttgagaagaactg

SEQ ID NO: 124525 - DNA, 1486 bp, Homo Sapiens
taagtagaggctgggtggtgaatcggcacgaggccggggcttccgggaggctggctgctttgctcagagagggtgggaagggggcctggagagacacgagaagcagaggtagagcctagaaggtggcagcaggtgggtaagaggcttatttagcacattaggggcagtgagcacctggaggaaggagggcgctcccaatcacccgtaggaggccatctgcacaccaagcggcaattcacctgctggcgcttttcctaggtgacaagcacaatactacagtcttcacactgtttacagccctgggcaccagccacccggcactggctcttcatcacagctctgctcttgcttagctagtggggtgggggaaagggcagggatttgtttttttaattgggtggagagccaaacagctactgtccctgggtgccaagcaagccagttttttggttccctgagggaaactgaccctcctctcttgtggcaccatccagcctcagggtcttggagacttgagtaagaatgtgagtggagggggagaggtgaggagaggagcacagggtggatctgtggagggaagaggttacagggggaggagctgatgatagatcccacccagacttaagctgctggtgggtgggtgagctgggaagtaggactgtccagggaagggtggagagatgtagctaggggctggggagggggaggtggaagcgctattgagcatcctccacaccaaggttgatgaaggaagggatcccagcagggtttctgctctggggctggcaggttgcctggtattatgcccaaggccgctctgcctgggggaaagggcagccaggcagaggcccagtgtctggtaggctgctgaatttcctggaaggggtgattggatggaaagaggccagaaaccccagcctgagagactgctgtgcaccccacagtctgactgcacagagccgcctctgttggcaggaggcactgaggctccccttcctgtgtattgagaagcagtgtttgccaatatattttgctttcaattccaagaggagctctgggaaaacctgtggataaaaccaaatgccaaatgttggacgttgtttccttttccttttctctctctgattgttttaattgttctgtggtggttttaatggatttgagaccctggagcggcagctgcctttctgatttccagctgctttttgtgaccttaatttaaaacagaaaaacaaaagagctttacatttggagacaaccctggtgtgagtttttcaggggtcacaagcggtggttttaccactaaggggttgggacagtttgggctttctactaaaacacggtccgcggtttccagggtcagcagaacaagattgcctttgacaagggcagttgtcggggcacaagggttcaccaccgcggattcagcggaaaggttcctaatgggaggcccctcgcgtgggtgacaagacttgtggaactgtgc

SEQ ID NO: 124526 - DNA, 523 bp, Homo Sapiens
cccccattcaccatccaggcttttgaggagaaagataccaatcttagcagcagaggacactctggatagagctaggagtttgttgcagagtctgacaaaagttccctctgcagaagggatggaaggatagccttgggggttgatttaggactgggtgtatgacatgggggaaaagaaatccttgggggagctaaatgaggggaggtggaccccttatgatagtttatcagagcaatctaagaaatcatgtaggcctctaagaaagcatcaagaatcaatgcgatttgattaattgacttaaaatatgttgaacttttcagcctccattgtgtatttttggtgcaatactctgtgcaactatttcatccaagaccagaaggggctggaagattgcctgcttcacattaaaaccctccttattgtattggtgctgacacgacacaaggatatgcagtctttatccagtccttattgctcacagaaagataccagtccttactgctcacagaaagtagtgaagcct

SEQ ID NO: 124527 - DNA, 851 bp, Homo Sapiens
acatttattcggtttttaaacaattaaaaaatcttgtctgggcaggccctttgctcaggcctgtgtgtcctgctcagccactctgtcgaccacactgacccaggggctgccccggacatagaagcggaggggtttccgggcccactcccctgcatggccgatcgcccacccggtctgctgccactacagccggctcactgggctccaggggaccacgctccagccatacagcttcatcctgtgccaggtccctctggtcaaagctcttgttgatggccagggccctggcacagcttggaggggccaactgcagagctcgcggtccttgaggacacggctggcggtgcctttccggagggtgctgcgaagctgacgcatggtctccagaccttccaggggctccagtgctcgcagcaagacgcaagccccgtcccctgtgggacggacagtttggaagtggagcctccctaggctcctgtcctctctgccctagtacacatccagacatcctgtgctgcagggagggtgcagctgccttcctgcctgggccagggacctgctctgtgcacctgcaccatctcctgggtctgacctggtgggagggggctgcacctcactgtgtccagacccctctgcctaccttgccatcctccaagcctgcaccatgaggtgtgcctcctgtgggcacctctggcttccaccaccaggcagggcctcccccactgtggccgcccccacaaagccagactgttaaaaacacatgacaaatgctgggtatcagttcctttccacctggcttcacctggtcttgtgactggcagcagctataaagccagcaaaggaagctccag

SEQ ID NO: 124528 - DNA, 1987 bp, Homo Sapiens
  misc_feature (189)..(189): n is a, c, g, or t
  misc_feature (318)..(318): n is a, c, g, or t
  misc_feature (426)..(434): n is a, c, g, or t
  misc_feature (443)..(451): n is a, c, g, or t
  misc_feature (519)..(554): n is a, c, g, or t
  misc_feature (744)..(754): n is a, c, g, or t
  misc_feature (931)..(932): n is a, c, g, or t
  misc_feature (937)..(938): n is a, c, g, or t
cgcgggctcgcggggcgtggggagtgggggtgtttttctcggccacaccggtggttgtggaagatattttataagagagagggtgggcgcgcgcacgataatattgtgagaggaggcacaaatgtgtgtttggttttgcgtgcgccgccccgcgccgtgtgttatatgtaccgcgcgcacagagggggngggaaaatagattattctgtttatatcgggccgcaccagaggcaggggaggacaatagagggagggtggtgagagatgacgacagccgctagtggaggcgcaaatgtgtttatgaggggtgtgtctcgncggtgaatgacggcgctcccgggattggtgggggaagagaagggggagtatttgcgcccacaaggtgtgtgggccgcgcaccagagaaaataggcgcgtttaatatannnnnnnnnaaattgttnnnnnnnnngacccctttgtttattctcgcgaatgacagttagagagatgtgtgtgaccaccaagtgcgcgcgcgtnnnnnnnnnnnnnnnnnnnnnnnnnnnnnnnnnnnnaaataatttgaggagagacgcttgcgcgcgtatgtgaggaagaccctccctcgtgggtgggggataggaagagattcccccgaagtatagaggggcgacctcttgcgagagagaacttctcccaattcggggagaattttgtgtttcggaaggaatacggctgcgggtggttccgccgcgcgggggcggnnnnnnnnnnngtggtgggaaggaaattcccaaggccatttaggttcaaggggcccagggtattttcttttggggaaacgagcttatggcccatggttcccgtttcccttgctggggccccgcgcggcccaaacgaaatggtgctagaaaggctttttgaaggggcgggggcggcgcggacaggtttnntggtnngtgagatggagtgttttttttcgagaaaataaaacatttattcggtttttaaacaattaaaaaatcttgtctgggcaggccctttgctcaggcctgtgtgtcctgctcagccactctgtcgaccacactgacccaggggctgccccggacatagaagcggaggggtttccgggcccactcccctgcatggccgacgcccacccgggctgctgccactacagccggctcactgggctccaggggaccacgctccagccatacagcttcatcctgtgccaggtccctctggtcaaagctcttgttgatggccagggcctggcacagcttggaggggccactgcagagctcgcggtccttgaggacacggctggcggtgcctttccggagggtgctgcgaagctgacgcatggtctccagaccttccaggggctccagtgctcgcagcaagacgcaagccccgtccccctggctggagatgttcatgcagaagtacatgccgtaaatgatgtacacgtacagggtccccggcttcatgaacatgcctcggttgcggggggtctgccggccaccccttgagtgggcggcttcatcctctggccccaggtatgcctcggtctccacgatgcggcctcggagttctgtgccattaggaagtcgccggactaggacctgtcccagaaatgcccgggccagggggactgccggctggtcgaagaactccaaccccagtcgggtaaggtggccctttgggcttgagaaatagatgctgcggtatgggcccggagtggtgggcggtcccaagcagcgctccctggggcaaggtgcctgggctgcatcggacgagctgtgtggctgctctgcaggtgcctgggctgcgtcggacgagctgtgtggctgccctgctctagctggtcgctgcttcttttgccccatccgtcggcaaaactgggccccgctgcgcgcgggcatccggcggctcgggccggggcttcgtgggactcggaccccggcgcggagcccagcagccgccgaccacggaagcaccccta

SEQ ID NO: 124529 - DNA, 696 bp, Homo Sapiens
  misc_feature (663)..(663): n is a, c, g, or t
ttttcagtttttggtcattttaattgtaaaaaccaagacatttatataaataagaccgctgtgtaaaatacgattcacccttctactaaaacccttttcccacactcgaaaagaacatagaaaacccagcagagagcagtacaaatcagcatgcggtccctgatgcgaagtcgcgggcaggccagggttccctgcggaagcagcctcgtggtgagagcactcctgcccaggtgtcccaccagaggctcggtgacccctcgagaaactgccaggtagcagctcccacacaccagcccctggctctcaactgtacgggtcgaggaggggacgggaaaggctgcttggtccccaccaaggctgggggctgggggggctgctggcccagtgagatgcagtggtctgttcagcctggggtcaagttgggggaaggggtttctgaggggtcagcacctccccagaggacaaggagagaagctgcctgtgtcccttgaaagaatcatctccttcttggggccattttcatatgaccactaatgacaaggacggccgacacttcccggcagtactggggatggcagggcagtggggctcccaggatgcaaggggaaggcagccctggagaaagggggactggcgtgttcctgtgcggaagatctcatctcncacctcctctaccctgtcacaccgccccacccc

SEQ ID NO: 124530 - DNA, 3305 bp, Homo Sapiens
  misc_feature (72)..(115): n is a, c, g, or t
  misc_feature (872)..(954): n is a, c, g, or t
  misc_feature (956)..(1027): n is a, c, g, or t
ggttgtgtgttgtgggtggtgtatgtgagatagatgacaacaacaacacatcacgacagaaagaggctgatnnnnnnnnnnnnnnnnnnnnnnnnnnnnnnnnnnnnnnnnnnnntggggttgggtaggtcagcggaaacgagtgaagttggaatcaatgatgacgtatcttcacgtgttcctctcctcgctgtgtagtgggagagtctggtggtgttgatattctatgctgggtcgtgggggtgtgacgcctaggctgggtagcagggtgcataggtctatggtagagtcttgtatgttgttttgtgtcggcgcagtgtgatgggtgggcttatcgttctgtttatgtgcttggttgtacggagatttgcgatacagtggcgggtgagtgtgtggattagtgatcatggttgattggttattctgtttggtgataagcgtgcgagagccccacttcctcccgcgtccctcgtaaccgcctcgacccctgagcctctgctttacgtggcggtgctgatccccgtctcaccgtccctctgtgttatctttgcggctgcagcgtcgggcacactccctgtcataccctcgacgccctcaccctcacgcgctcccagtcccgcgtggcttcgtgggctccgccacgcagccgtcggcctgcgcggcatgatggtggttggtgattgtttacagaatgcgactatattggtgtgatgtcgtagcgttgatattgttttttttaaataatatatgtgttgtcattagatgtatgtcacatgattatagatgttttatagtcttgaaaatggagtgattagggagtaatgatgtgtgatatactatcagtagcgtcgggcgaggagctatagatttannnnnnnnnnnnnnnnnnnnnnnnnnnnnnnnnnnnnnnnnnnnnnnnnnnnnnnnnnnnnnnnnnnnnnnnnnnnnnnnnnnannnnnnnnnnnnnnnnnnnnnnnnnnnnnnnnnnnnnnnnnnnnnnnnnnnnnnnnnnnnnnnnnnnnnnnncttaaacacacaggtgtttatttaattgttcatttgattgaatttttaagttcactttactacgtggatgagatgggtgcatattacagtaggctttcgctatgagcgctgccaccatgaggaatatcccagccctcagttctgcttccctttctgagtcccacaaaagccagatgtggacagccttgggttcccatcccagctggctgctccttctggggctgtcttggtggggagagggagatggggcagtgggtccctgctgacccctgagccctgcaggggtcaggatcctcccgtggtccctgggtgtggctctggaagacactggcagtgcccggccaaggcctcccgcaggatggaagttgagggccctggctctgggtcctaagagaactcagccgcccccttcacactttacagcaaggggccaggcagcagctttgggatggggcttccgtggagaagtgggggatgctgcagtggtacaaagacagcctcccccaccgccatcctccagctgaccgtcctccaaggccagcactgggcgtccaagggaaagaaggaactcagcccagagggtgtgggcaggagaggcctggagtcaggcctccacccacagccccctctgggtgccaagtgggaagggtgttggggctggcttgggaaccttacccgctgcccttccaacacctggatctgtgggcagcggtcccacaaaatcccccttggggctccctgaggaggacttgtgtctgccgcttccaccagggcagagggcacaggaggggccagcactccaaagggctctaggtgggtctttcaaggacatctgcaaagccctggtggggagggcggcggggctgtcccacggaggggcctgggccagaggctctttggaactcttgcacttctgagtgggggactgtccatgctgcccacaacctctagaccatgcagcctgctcatgggtccctggcagagaatgcccactccccagcagactcagggcaggcccccaactgcaggcttccaggaaggcccagggtgtccacctcacgccaggtggtctcagaggacccctgtgcaaccacattaaggaaagctgcagcccccacccacccgcctgccagttcaacaagcaccggctgcacacgcaggctcccaggcaccatcacgcgcctccccgcgtcgcccctccctcatggggagccccgttccccctggtaagacagtcaggtactgtagcctcgccttgctggccaggggctccggctcagaggacctgccctgacctgcacgtgctgaccagacagcccagcgtaaggatcccgcgatcccacgccaccgccctgggtttaccacggtcaccggcacctctctcacagggcccccgggggacccagccgcgcccggcctggtgtctgcaccgagggaccgcgtctcacgcccggcggctcctgcaggggaagccgtggtcagcgactcaccacgaggacagggcagggcggctgagtgcggaagagaagcatgaaagctgggggctggggtgggggaggaggaaccaaaagttgcatctagacagaggtgaacgaaaccaaaccaaaaacccgaacgtgttccgtcgcaggatgggcgccgcccgtcccgggcccttagcccgacatctcttctcgctgctccttgttcctgcgcacctcggccgcgtgcagctccttctcgcgcagccgctcgcgcagtgcggccaggtgtgcctcgcggatctccttgctgagctccatcttgtagttgagcttctcctccgcctggcggctgaagttgttattctcctccagcgccttgtgcagcacctcgcgctcgtgctcgcgccgctccgccagctgcttcagcacctgcgcctcctgcgtcttcctccgctcctcggctgcctccagccgcttttgcagctcctccagggaggtgtccttcttcttgggtggggaggagagcatagggctctctggggacaggtcagaaggggacttgaggatgacctcgaagctctggcctgaggcccgcttgtccagctgcttcacctccatgtccccgtactggtagacggtattggggtgcggctgtgtgtagaagcaggagcagatgagcgacagcaccgacagctccttcatcttctccttgtaggcggaaatggtgctggccatggtgctggcggcggttgggcctgcggaggctggagaggcgcaagtggcggccggagctgcagacggctggtgctgcagtg

SEQ ID NO: 124531 - DNA, 1870 bp, Homo Sapiens
cccaggcaaaagtgttgttttttattttctttcttgggccagctgcagcttccaaccaagaaaacctcaaagcattagggaaggagcaggtgtggggctggggtggggagaatcccctaagctccagggcccagggtctaacctgagaggtcggggctgcaggaagctgggggaggctcccggggctgggggaagaggagcctgcccccagcagaaacagcaggtctcagcggctacatgtgctttagagcttggctgggggacaaaagtgggagagagagagaaaccggcctcatgactcagctggtcaggagatagggggccagatgctgaccccaaatccccggcagcacccctagcaaataggtctgtatcaaagattctgtacagctggttttgggggtgaagggcacctatgggggcttaaataaatggacagggggcaagggatgtagcgagaacagagggtgactgtccggccagcagcctgggcctctggcgcccctgcatgctgacccccggtgccacctgcccactgtggcccgcgggactccccagatgggaaaggagggaagctctccagcaagtctcggccccacctctctctgagcagatgggacaggaagacgggcactggggggctgggtggggcttagcgcaggtcctcctcatcgccctggatggtcttcttgatgcgcagcagcatggtggtgagccactggtccagccgggagatggagtcgtattccttcaccgactcggtgtagctgtccacattctgctcctcgtgggcctctagcaattttttcatcaacttgcattcccgggaatcagagaaagctgggaacagctcctcatacttttggacagccagcttggcgttgagcatgtcgatgcagaagtggcagagggccgccttgaagaagtagtctttggcgctgtacttgaggagggggctgtccatggcattggtccccacctgttcgtagatgtcaatggccttctgatactgctccagcagcgcagcgtaaccagccaccttcagcagacacttgttggctgagctgttggactcctcgcctttgtagtagtctgcagactgctcgtagtgggcaatggccttctcgatgtccaccaactctgtctcatagatctcagcaatggagatgtggtgcttggccgcaatcgtgaatcggcccatgtctgtgtagatctcgattgctcgcatcaaacagttaatggcctcttgggggtcggctttcttgaatgcgttgccagcgtccacaaagcaggtggctgcgtcgtgcttgctctggagctgcaggtgcagctgtgcagcctggcagaacgcgtttccagcagcactccagtttttggccattttgaacatgtttgctgctctggcgtagatttcgcatgcttcctctattttggatgagcctccaaagaggccagagaagaaggactgcgagttcttcactttgcgctccgcctcggccaacagcgccatcgcctccgcttccttcccggaattgtccatggcggccacaaagggactcagcaaagcgcctgaccctgaccctgggaagactcagccgcggccgggccgcggaacacagatcggtaaaactcgcccggctgcgttgacgtcgcaccggcgcgcgtcgcttgcggccaggaaccacgtgactagcgctggccaaaccagcggacctcgtaacgccgcgcccgctccgccggacacgcccccaccaaccgccgcacgccgcccgtgactcgtgaccccccaatcggcgtcaagagacctcaacgcatgcgcacataccggcgaacggcgctccaccctcgtgccgaattcgccacccaggcc

SEQ ID NO: 124532 - DNA, 478 bp, Homo Sapiens
ccagcaagtcacagtctgcagagtcagccctctcaccagatttcctggggctcagggattccgtccccttcttcccagccccttgagagtgtgtggcagcgctggcagctctgagcgcctattgatctctctgctggcagccaggtgcgcctgcgtccgcctcctctcctcagcttctgctgatacgacttcactttctcatgtctcctcccccctccctttctctcccgaggccattaactgtttgatgcgagcgatcgagatctacacagacatgggccgattcacgattgcggccaagcaccacatctccattgctgagatctatgagacagagttggtggacatcgagaaggcccttgcccactccgagccgtctgcagactacctacaaaggcgaggagtccaacacggtagcccccttcctgactgccacagccccgcagggaccgccaccacttcccctcactgctcctcg

SEQ ID NO: 124533 - DNA, 1736 bp, Homo Sapiens
  misc_feature (65)..(103): n is a, c, g, or t
ttttagctgtgagtgttaaaataattacacttaatattttaatagtgtgctgtgcaaatacatannnnnnnnnnnnnnnnnnnnnnnnnnnnnnnnnnnnnnnaatgacttcggtccaatataaagaaaatgaaatacagtgaatagttcttctttcaagatgagctgtatttattactggaacggaagttgtcatatccgtgatcattagctttgaactttaagcacgactgcttttcctccaaggactgtttttcttcaaatgactggcaccagcagcataagcatgacttaaagcagtttttgaatcttttgctcaccaaatacagagcaattgggttaatgcaggaattcagtgaagccatgttgataccaatatagtccaataccaacagaaagctcaaaagttcacatctattgggatcattctgattataaagagtgagcttcagaatcctgctgaggtgaaggggaagccagcagagggcaaagacaaggaccaggcaaaagacggttttggccacttcccgtctctgctttaggtgatcatttaaagcaatctgcatgccacttttctttctcaacatttcacaggtcattagtgtataaaaaaatgcagtgatggccaatggcaagcagaaatagaaactgaatagccaccaatcttttgctgtcttgtaaaactgcatgaaagctgtcttctgaacgggatgaagcaagcagattcgcagataacttcctttgtagtccatcgtaattatatcaaaacctatggcttcagggacagccagaaccacagagaccacccaaatcaaaacaatttctactgctgtccattttggaaccccaattccttttattctactccaagaagcaacagctcgatatctgtcaatactcagagcacatagactcagcacagtgattcccacggaggctttctgtatgaaaggcaccagcttacacatctcagctccaaatggccagtcctctgccagcagcttgtagacattgatagggatgtcaatgacgatgtgcagcaggtctcccagagccaagctggcgatcaagatattgggaccgtttcgcatgcacttgttcttgtagataattctcagaagtgtggagttcccgatgatccccagcacgaacacaaggcaggacacaaccgtgttgatgtatttgaaagtctccttgatctcgatgggtccttggcacgggggaggggagatggtgcgtggcggagatcctgccgtcctgtctcctttaggcacctccgcaggtgccaacgaccgcgccagactggcgttggaacccttgggccataaggtcttagtgggtggcgtcattatctctgcggtttgcaaaagcggagtggccctgtcaggcgggaagcctctctcctctccccagatccgcgacaggccgcaggcaagaaccagcgcaaccagggcgcgtccgcacagacttggaggcggctgcatgctgctacctgctccagaaggcgtccggtggccgctccgcagtttcagagcctagagacaagcagaggaaggaagacaggacacttgggtcagctgcccgagccaagtcgctgcaaacgctaataccgcccgcagcctcttcgccagtatccacgcctcaaaagtaactcaagtttgcgcgccagtgggaaacttggcgctcatgactcgccagcgcgggtcgaaactccttcctgatatcccgggaattcc

SEQ ID NO: 124534 - DNA, 1752 bp, Homo Sapiens
  misc_feature (551)..(579): n is a, c, g, or t
  misc_feature (1308)..(1335): n is a, c, g, or t
  misc_feature (1586)..(1604): n is a, c, g, or t
ctttcaatttttattgaacacaagtattccgacagaatgcaaagtcaaaattctcagttagtactcagtatttacaccagtgagaatggaaacaaaggtggtatcgatgtttcacttggtaaaaagttttataacaagagagaaggcccccgaagtacagaatgctgggtagggatgttaatggaggtctgaaaaccgccatccagacagacagcctcaagtgaaaacctgggactcggaaggctccatagaaaagtgtgaaaatagagttccacctccaaagctgcactatatacaccacagccctgcagggtccagtggccctgctcgtcacacttgagtgctcctccagcagaacttggccatgccggtcttcatgtgaatacatatgtatggcacatacacacatagacacatagacattggaaactggagttgatccctccttcaaaaattaaaaaagaaaattataagctttgatctcttaacataaaagataaaacatcttggaataaaatgactccctctttgattttagagaaagcattgcnnnnnnnnnnnnnnnnnnnnnnnnnnnnnagaggaaaaactcttgcatgctgagacaaacctatgtgtaatgggagagaacagaccaaaatgtgggcagagtcttaggtcctagctaatggcagagccagggttctagggggtcagctgtcccgggccaggtgatctgagggctgacctgtttcttcctaaccatcagaaccaaaaccagtttgacctaaccacaaccactttgacagtcttgacaaggtatggcatgggcttggcctggtgtggcaaagccatcgacattacaagatgaagaactgagtccactgaacagcctggtgaccagaagagcctgcccctcactgctgggccctcccggtctcagacacccaggctctcacattctactgtgtgctctaagatctctcttcatgttcctctattctgagggcctgtgcatttgaaccagagatctgtgcaggccctagaatcaaaggggccagggctgtgtgttctgggatcctccatttccatccccaggagctgagaaaatgcaacataaccccacattgagcaaatgacaagaccattattcttcacagtttgaaattataatctagcatcgccactgatcagactgcagaagtgtcagaacgttggggagagtggcccacagaatggacccagaggcagccttgccaccctaacctcttgctgctttgtaccttaggagaggagcgcatgcggagtactgatttctgtttacttagnnnnnnnnnnnnnnnnnnnnnnnnnnnntgtatttcattttctttgttaaaaggcttcgattccgtttgagtgatttttgtttcctgaatattttttctgaactatctgctataccttccacaaccaaactatgttgaagttttatttcaatactatgacaaaaacacgtttcacactaaaatattcacgcatccacagtgcacaagcttgcagttctaaagtagaatgagggaaaaaaaagcaaaatttctatacaaagggctggcttttcccttctnnnnnnnnnnnnnnnnnnnttaaagtttctgtattttttcccccacttggtttccaatccaggaaagttgtgttatgactccagacagtaggttgtttctttcttcttttgtttctataaatgctgcctaagtgaacagaaggccgatgttactttacttcaacaga

SEQ ID NO: 124535 - DNA, 926 bp, Homo Sapiens
  misc_feature (643)..(661): n is a, c, g, or t
aggtaacaaataccacctagaggtaggtaggatcatcccacgcttgctttagcacaggacaactttacaaaacatgattgtttacagctgctcttcccctcttttctgatctgcagtttttgcctgggtcccactcaggtgaaaatccatctcattctggaatggttttgcttttgaatttttggttatttttgtgtttctttgggggttagaccactttctgattagccgccacctgcctgcatctgtgaaaagggatctgctcccaggcgttctcacccttcttttgaaggactccttaggctttgttgaatgaagcagagaagattgtatagttggggctggtcttggtgaacacacattattaccccacacatcccctttgtgtagaaagccaaataaaatctatacataccatttccttttgagcccagaatctagatttgagcggaagagcatgtgtgcttcagggaattagtgtctttttttggaaatctgttgaagtaaagtaacatcggccttctgttcacttaggcagcatttatagaaacaaaagaagaaagaaacaacctactgtctggagtcataacacaactttcctggattggaaaccaagtgggggaaaaaatacagaaactttaannnnnnnnnnnnnnnnnnnacgaagggaacaagccagccctttgtatagaaatattgctatgtttttccctcattctactttagaactgcaagcttgtgcactgaggatgcgtgaatatctgcagtgtgaaacgtgtcacggtcatagtattgacaatacaacttcaacatagtcggaacgtggaagcgtatagccagataggtcagaacacaatagccaggaaccaacaaatcactcaaacggaatcgaagcctggaaacaaagaacacgaaactacagcatg

SEQ ID NO: 124536 - DNA, 491 bp, Homo Sapiens
ttgctccttttcctttttattaaaaaatagatcaagaaaatatacacacttcagtccatccaccatggtggatgctttgaggaggccaaagcaccatggggatgggatggaggcattgggagagccagccctgccctcgtgccaagggtgcagagaaggagggtgccctcagccaaccttgccaagcatggccctggaaggaaagcctgggccatgtcactgagcagtatgagagcaggtgggaaggggaggagggtccccagtgagagcagagatggcaaaggggattgggagccccagggaggtggggcctccagactcatggtgggaacagggccacacagggctactgcccacagaacgtcccttgacctggtcctcctcccctggggactctgggcctgctggcctcctctctgacctgtcctccacaggccctggcagctgccctcaggcattgatggccttccagcgctcgctgtctgtgctgt

SEQ ID NO: 124537 - DNA, 1523 bp, Homo Sapiens
  misc_feature (298)..(307): n is a, c, g, or t
  misc_feature (326)..(326): n is a, c, g, or t
gttgtttgcatgtgaaaatcaaatacatactttggtagtctttgaatacaaagtcatctgctcttgtttttcaagaattttgagacacaaagttgtatgtaaaggaatatattaatttgccgttttctaggtagatttgctcaaaaagagtgaatcaacttaatatgtacaaatgatagctgtgaaactgtagaatatctttgtgtcaggcttggagttcattgtgacctccaaattttgcctgaaggaccagctgggcaaagcatcttttaaatgttcagaggccaaaagataaacnnnnnnnnnnccttaaaatcctacctctntaaacagccttcagataagagaatcctcagtgcaatcattattttgattcgtttggtacctgttttcctggagttcccgattttattattttggggtggctccaagcattaagaggtttaatctttgatggcattgttctagttttgaaatttctagtatatttcagagtctcttagaagacttgtgtgggaagtttcactttgttttcagtgaagatcacaaacctccttcttcctttactcaagaggaaaggtcccagtatacatatttgaatggttgatggttttcaagaccttcagggagctccctgcattttacctagaaacagaaaaggcccgcaaaatcttaagtttcctggcctgcatttcccgggtaggggcaaatgactccaagctggtctctaagccaatacccttataaaccagagcccaggaaagacagctcgagtgtataattctctggagctcaattctatgcagttgtgctgatatttcattaagtcactgtgtatttttaagtgttgatacattaaaagtcgctttatggaagatgagtaaattttttaaatacttggaaattttatttccttgttaacttctacagatcagggcatgcaaccaaaagcagcttaaatgaaatattttaaaataaaatatcaggaagctatttttagatttcttctggcttatgtttctactttaggaccctcattgttctcttattaaaaaaaattatttcctgtgcatctcatggactgcagggtaaattatttgggcataaataatttaaatagttttctttcattttgactatctccagtaataacagtttttattatccagcatattggcttattgcacaaatcttaaaatgtacattgactactttctgagaagaaagtggtatcagtactcatgatgaaaaggttactactgaacaaattcacatttcaggaacacctctatctttggtttaaatcttactcttagtttttccgtctaaaaatcatactggtattagtatcaggtaaggaaattaaagtttttaaaatggtttcattctctgcaatatgcaaaatttagattttactttctggtactgtaaagaacctgaagtgatttacacttaatgggtgattaatccagtattctttaccctgaatgtttggatattaaagttcctttatgttttctata

SEQ ID NO: 124538 - DNA, 729 bp, Homo Sapiens
  misc_feature (711)..(711): n is a, c, g, or t
ggaaggggtgaggatgggtagaaaagaattttattgagcaaaagaacagctctcagtgggagaggggatgcagggagtggtccccaacccccacagcagggtgatttctctcctcactgcagctgagtctgggtcttttatgggctcagaataggggaatacacgttgactgatttgtaagtatgcaaaggcaccactcaaaaggtgggcacagcagtgtaaaaaccaattaggaaagggcaggtatacgtaaaataggtgaagggttgggatcaatcggaggaaagcacaccaaatgggaagacaggttctcaattcagtatgaggatttagccgggactgtcttcagctttaaggttgggtttcaccaggtacccacccctatctgcctgggcatttgactgcctcctgccactatcattacctgaccgggtttccacaacccaccatccacagtgaggaagggcagggctcctgaaaatgagccagcaattctccttcaggtggatggagatacaagtcttaccagtacagtctcatgcataatcacacacagaatgtctccactttggtatctagcaatggctgaaaaagccacagcactgtgtgtgtcctctggtgtctgatgaagtatgactcctggctaaaggctgtaccacattccctatacacataaagtttctatcctgagtgtgtcctctgatgtctgantaggttggacttccgact

SEQ ID NO: 124539 - DNA, 945 bp, Homo Sapiens
  misc_feature (925)..(925): n is a, c, g, or t
acttttccattcatgtatttattgtcttggggatacacctaattaacagcagaagaaaaacaatgtaccctgaaactaactgtaaatttattgaagacaggctccacatctttgtctcccacatcttcttcccctattttgtgcagtggttcacatatagtaagtattcaattaagttgaaaagcaatgcaagtttcaattcacattaatttggaggggttgcactgatttaaggagcagctgagatgaaaaggctagcttcgatcttttctgatttctggctagtgaggcacaccatcttgaaaacttcctctgctgaaccttgcataactgctgtccactgcggcattcttaatgtcttgatttgtttccatttctgctgaaggtaacgagatggttctccagtgcttatctttccaaagagaaaacgtgcagggtgatttgaagcaggtactcagtggctatctgtcccagtcctagaggcagtgtatcatcaatagagatgagctgcaagttgttgttccatagttgacataggcttcctgatctagccaattctattgccaaagctccccagtgaatggcagcttacatcacggcatggtagctaccataaggatgcagctctggggctcctcttgcatatggaaataaggaaattttaatagaaatattgagaacatctgctgcaacctgtgatgcaggcccactgccaccgccattcatcctggttaatattgtggtcacggagaaaacaggttcatcatgggctagtttcatttatccacaccttttctcttgagtttcatctacctgctggtgaggcaggatttggccgagtctcgtttctggtgcccacgacgcacggtccagggtccgagggcggctgggccggcggactgggcatccagtgtgcctgcggtgncctggcgctcgctgtcgctg

SEQ ID NO: 124540 - DNA, 688 bp, Homo Sapiens
  misc_feature (670)..(670): n is a, c, g, or t
tttttttatcatcaatcactttatttttcttttgctcttaataacaatttattctttctcactcttgaactacttttacagttagtgtaatacatctgttcttcaaaaccagcagaatcgtttctataaagattgagaataacagaacactctgattaatataattactccctaaattaaaccattagatctgaaactgtttgcatttgcggataatcacgaaaggtcatgaccccagaatccatctctcctaccagggttgtctgcctgtaccaataatatcaataaggaaatatgggtgatatctcttctcatgaaagagcatcaatggattatgagttcatgactaaaacaaatatatattaaggcaaaccatatgaagttactgcttgtcagattaaaaacagccaaatatccacaattatatatggttcaacttaatagattttgtcccattttaaagcagcgtgactgaagaatttaattttcttaacaagtggtaaaggagatgggaacagttactggaaatgaactagaaagctattgttttatggcatagtttagttcctacagtaaatttcatcaaattttaataaactctcccttacatagtcatttaactcatttctcttgtatgtcctatatttacttatgggttttaatattatangaatagaggatattcatt

SEQ ID NO: 124541 - DNA, 1298 bp, Homo Sapiens
  misc_feature (105)..(115): n is a, c, g, or t
  misc_feature (1024)..(1024): n is a, c, g, or t
  misc_feature (1037)..(1037): n is a, c, g, or t
  misc_feature (1060)..(1060): n is a, c, g, or t
  misc_feature (1072)..(1072): n is a, c, g, or t
  misc_feature (1082)..(1082): n is a, c, g, or t
  misc_feature (1206)..(1207): n is a, c, g, or t
ccaaggggaaaactcgagcaagagagtcccctgaatcgtgccatctgtctaaattccaagtatgcctgcctgatctaccagggcactgaagagctttaatagagnnnnnnnnnnncatctgtgagctttatcccaagcacaaacagccactcaggcgtgggagagctcctgttctccccgtgtacgccacatgcactcactctacagggaccacacatcccattcacaggcatggaggggaaacagcaaaataaacagacttcactttggagttgttttttagaaagctgcagtttgtgaatttctcttgctttttaaaacagaatatttccaaaacttgggcatcaatgcttggtctttttaggtgggggatagaagactgggccatcttcacagactctcagaccccggctctcggcggccccatttgccagccagacttcctgcttgggggacggctgctcccccggctcggtgcagttttgcagctgctggtcttgcttagtgaggcacagttctatctgaccaattgtctgtacttcctcatcctggcttggtggaaggcactggattttgggtatcactccatatactctggcaagggcatctttaaaatctgcaacttggtagtaattgatggatggttttatccccaattttagaagcacactgttgaggtccagctccctgtagagttccaggcttctgccaaagtacttcttctgggagttgagcgcatccacctgggcggcgcaggtcccatgcttttcccactcatgcttccagaagcggctgcgattgggaaacgagtgaattacgtcaggccagtatgccctcatttctggcaaaagatccttaatctcttctaaattgaagggccacgatctattacatccttcacttttatcgggccatagtccatgtattgtccagtaatccggagggtctctacagtcgttttgaattttctcgcatactgtctcacggcagtgctgaaccataattagttttttccactcatggntgtcactgttacnacataagaaacttacttttcaangactttttttanagttacaganaaaatcatccaccatccatccttcaatcattcatcacactgagtgctgtgggacggaggacactgctgcctgctgctgacaactccgtgaggaaggcgcgctcgtgcgattctggctcgaggcnnaatcctaatgatcgataattctatcagtcaacgttctgttgaatgtatcgtcacatcaacacaacagcgagatagtgtagctggggctatg

SEQ ID NO: 124542 - DNA, 813 bp, Homo Sapiens
cattttctggattgagcgcatccacttggcggcgcagtcccaagcttgtcccaatcaagctccagtacgctccgattgggaacgatgaattacgtcagcccatatgccctcatttctggccaaagatccttattctcttctaaattgaagggccaccgatctattacaatcccttcacttttatcgggccaatagtccatgtattgtccagtaatccggagggtctctacagtcgttttgaattttctcgcatactgtctcaggccagtgctgaaccataattagttttttcccactcatggttgtcacgcaggcgcttgtccgcaccgcccaggcaaagcaacgccaggcagaggcagcccagcagggccccgcgcagggctgcagggcgcatggtgccgacctgcggagagaacgctgccagctgccgctccggctcccacttcccacctgctgcccgaggaagacttccgggagaaacgctgtctccgagcccccgcgccgccgcgctccctccgctgcagcagcggccaccgggtgcgcccggagccctgggacggcctaaaccagtatctcgcgggccccgcgccgggctccgggaatggccgcagcagccctggagacccgggcccctcggagctccccttcaggatcgtgcaccaagcgcgcacgtcccgggctctgcttcgcgacccacagcgaccccagctcctccgcgctgcagccgccgtccgcccacgaccacggtcagtcgcgttgctcccccggccgtaatggccgaattcccgggcatatgtccggtaccgtcgactg

SEQ ID NO: 124543 - DNA, 2980 bp, Homo Sapiens
aagtttcttaaatacagaaaggctatgctgatacagtgttttttgccctttaattgttattatttcttaatttaaaaagaaacctagggcttagatagtcctatcttctatttggatgtcagcaaggttaaaaagtgcaatgccaggagtatgtagctataggtggcctgtggcatttgcttacagaaacaggcagaaggatgccgcaggcaccaggaggcacttgtctaagaacaacaacaacaataacaaaaagctgctgagaaaggagggcaggggaacaaaacaacacaagacatttcctttttctccctctagccaccccccgccacatcccctgatcatgggtctcagagaacacatccttatttgcatttagataaaagcagatcacccacattcactcatttctctatttttaaaagtgcccagattgctcaaagatagcagaagtaggagattaaaaaaaatctggaaccacaaagttagtagtttcagatgatctggggtttggctgtgtgaggggtggcagaatgcaggtaggcgcctcagtcgtatctttctgcagcttccgttctcagctcctcacatgggggaggtagcgcactccgaggtcaactccatgtcaaaggtgagggactcaaactgccctcctgctgagggttcagcaccttcaccattatttccaaactgcatcaatgaatggtgtcacacagataaacttggtcttcaggtatggggcagcgctacctgggtcagcttcaggatgctcctggctctctggccgacaatactttccgaatgcctcctccttgggaatgtcaggatagagatagaccagtggagacaccaggatattggtagcatccatgatcttatagcccatgatgatttcagcaaatgacatgttgttcagctgctgctttgtgtatggttccacggactggatctgggtcttaccgctgatgtccttctccacccaagtgaaagtgacgcctccttctttgctgctttcactgaatcttagcaggaaggtgcctggaggcttagtgctcaagatggcccgctcccgctccttactgataaagcccatgatgtacccttcgttccaaagggccaggatgtactttttcacaaggtcaatgatattgtccagccagacccagaaggagaagcccttgccagccatgttttctttgcaaaatttagcccatgtgatctgacaccctgaataattcacaccaggtcccaagagtttctctgccagtgtagtcagctgctcgatgctcagtcctcgcttggtggtggaggagaactgccagctcaggacctcggccacttgatcccaggttccaattgggggcttggtaaaaaagtttacattcttgggattgttggtcagcatgttgtaccacaggatggacgcccaggcatttggcatctgacagatgttggagatcaccacaactggcaaggagtgggtctctaggtcaatcttgaggccttggtgatacacctcggtctcaaaggtgatcaggtgcagctcctcagtcacaatcagggaagcatcacaattggctcggcccccattcccacatctctgctccctcagggtcaagtgtttgaattctgcagagagggctgccgttgttggatttccttccatgttcatcacttttgtgtttgtgcccagaatgttaaatttccgggatcctctgagagctgcaacgtcccccagagtctttgtcaatgcacactttaattttaagctgataattcaactcagggaatttgaccagcaacctgactttagtagtgaactggacgccggtcttgatgacgaggggccggtcaggatgcatgggcatgcagggctgccgctccaccacaaaggcacttttcattaagtttctaaacagctccacgattctctcctccagcatcggccggtgctgtacaatggggtcccctttgtaggaaactttttgctgcaactcctccagtttcttaatttgttgacgggtctgaagttgagattctgctaatgacgttatccagttttctagccgatctaggcagatgttgggcgggcctccaatgcaggcaatctgttgccgcctcttccagtcagccagctcctcgtccgtgagagttttctgcacgtactccatcgctgacaaaagccccgccagctcactcacgatgcttctccgcatctggtccagcgcagtgagcatctgttccagctgctgcatcttctgcctggtcactgactggttgtttccattcagatcttgcatgtctccttgactcttgagggttttatagttgaaatcaaagtcatcctggagattctctaccactttcattttctgttctagatcctgcactctcttccggacatcctgaaggtgctgctccagcatctgctgcttctccgtcaccacggctgctgtgggttggttggcctggcccccttgctgggccgcagtggctgcagtctgtagaaggcgtgattcttcccacaggcaccgggccacaatccgggcaatctccattggcttctcaagatacctgctctgaagaaactgcttgattcttcgtagattgtgctgatagagaacattcgactcttgcaggaagcggctatactgctggtcaatctctcccaggagattatgaaacaccaaagtggcatgtgattctttgctggccgcatatgcccaatcttgactctcaatccaaggggccagaaactgccgcagctccattgggaagctgtcactgtagagctgatggagctgctccaggtaccgtgtgtcaagctgctgtagctgattccattgggccatcctgctgtttctccggcagaggccgagaggccggggctgcgcgtgtgccggggacgggcggcgaggctccctcaggccgaagggcctctccgagccgagggggagagacagcgccaagccggggtgcc

SEQ ID NO: 124544 - DNA, 701 bp, Homo Sapiens
tttagatctaagcagatcacccacattcactcatttctctatttttaaaagtgcccagattgctcaaagatagcagaagtaggagattaaaaaaaatctggaaccacaaagttagtagtttcagatgatctggggtttggctgtgtgaggggtggcagaatgcaggtaggcgcctcagtcgtatctttctgcagcttccgttctcagctcctcacatgggggaggtagcgcactccgaggtcaactccatgtcaaaggtgagggactcaaactgccctcctgctgagggttcagcaccttcaccattatttccaaactgcatcaatgaatctaaagtgcggggggacatcggcaggtcaatggtattgctgcaggtcgttggtgtcacacagataaacttggtcttcaggtatggggcagcgctacctgggtcagcttcaggatgctcctggctctctggccgacaatactttccgaatgcctcctccttgggaatgtcaggatagagatagaccagtggagacaccaggatattggtagcatccatgatcttatagcccatgatgatttcagcaaatgacatgttgttcagctgctgctttgtgtatggttccacggactggatctgggtcttaccgctgatgtccttctccacccaagtgaaagtgacgcctccttctttgctgctttcactgaatctt

SEQ ID NO: 124545 - DNA, 614 bp, Homo Sapiens
aggtcgtaacctgatgatggcagagaaccatccttatttgcatgtagatagagcagatcacccacattcactcatttctctatttttaaaagtgcccagattgctcaaagatagcagaagtaggagattaaaaaaatctggaaccacaaagttagtagtttcagatgatctggggtttggctgtgtgaggggtggcagaatgcaggtaggcgcctcagtcgtatctttctgcagcttccgttttcagctcctcacatgggggaggtagcgcactccgaggtcaactccatgtcaaaggtgagggactcaaactgccctcctgctgagggttcagcaccttcaccattatttccaaactgcatcaatgaatctaaagtgcggggggacatcggcaggtcaatggtattgctgcaggtcgttggtgtcacacagataaacttggtcttcaggtatggggcagcgcctgggaagaagaaaaccagttttcttactgactgtgacttcgcattcagtaagcagagctggaggaagccatctgcctcggcaggactgatttgaaactcactcatcctcatggcaagattgtctggaaagctccatctgcccctcagggt

SEQ ID NO: 124546 - DNA, 715 bp, Homo Sapiens
  misc_feature (355)..(363): n is a, c, g, or t
cgattttattgagcaaaatttatttttatatgtacatacaagagacatattctttgacatataaaaaatacagaaatatttacatgtatacaaaaatattaaaacagatttcagaaataaggaaaacaagcaagtttttacaaaggatactttcttgggaaatacacacaatgaaaaaaagctttagaaaggtgacaacacatttaatagactccagaagttgatatttctgttggtatcaattgagtaagaggaacataaaatgtctgaaatgctaacagatggaaaaccagacatatttaagactgtctaggtaaaattgcatgggtttcctttaccataaaattgaatcaannnnnnnnnaccctcagtatcactatctacttttccttttttcttaaaatatttaaattgtttgatttgtattgagaattttaaactttttctcattaaattgtaaaaatattttaagaggttgtctatcctctttatcttctggggggaaaaaaacctcaggatactacaccgatttcaacataaaattgaaaatcacaatacaattttttttaagttaaaacctaacattttctaactaacattcatgatcagtaacaattgatttaataagagatcacaatcttcgtaaattctttttgcttttctttgtaccaggcaggggacctattttacaactggctttgaggagcttgcatct

SEQ ID NO: 124547 - DNA, 975 bp, Homo Sapiens
  misc_feature (120)..(120): n is a, c, g, or t
  misc_feature (825)..(885): n is a, c, g, or t
aagaagcctgtccattcgggaccttccctcccccccttcattcatgtactgccttttgctcgatctgatgatcaaccccaattttcaccagagacctcaggcccccagacctcaatctcnatctgcatgagttcattgatggctgactggtcccccaatattatatgcacaatagcggatgttgggtgaaatctcttgccacacgttggttatacagcacagcctgctcctctgtgaaagcactggctagcttctcatagatagttttgcatttgttaaaagcctcaatggcagctttccattcttgatgttcaaaacgtagcattcctgagaggtaagctgtgtaagcctgagcctctaatttggtcttggcatccacgcgattgctctcacacaagcgttccaattcctctgcatgcttcacggctttgcgtaggcgagataacaagtgaaaccgttttcggggttcagtgttggcttcctgtttcagctgcatggcgtagctccaggctctttcagcatccatcagaaccagaagcaagtatctattatcggtcagaagctcttcagtcactttcttccctgtgaatttgtgtctgttacccatcttgaagttgagtgtttttcgaagacgtctttgtctacgggaacagtagcccctgtacctctgaaaatctccatgccgtaaaccatgctgctgctgggattccttaataatctgaagaatctccaaactcaggctatccccaaattctttgtttgccttcgatccggccgaagggcgttcgttttctttattttcttcccctccggcaccacgtccannnnnnnnnnnnnnnnnnnnnnnnnnnnnnnnnnnnnnnnnnnnnnnnnnnnnnnnnnnnntgggacctgcttctcagcgccacccaggcctcgctaccttaggaccgttatagttactgccgtcgtttacaactgctgtgtgacaactgc

SEQ ID NO: 124548 - DNA, 2573 bp, Homo Sapiens
tttcatgtctcaaatcacttttattccttgctttcttacattgtttttgtgacttctattattgatgttataatagaagtgaaaagggatgactaaggaaaaacggggggtaacgaaggggattaaaatataatggcatctaaaaattacacattgggaagtcctgaaaaatagtgcctctaacatgtgtatctggcatcagcctcacctagttgccggtaagtcaggttacacttgacctcaccggcttcacgcaactaggctcccgaggagagaacggggactggacatgagggagggcatataagaaatgggcacagtctccgtcatctttgccttttaatataagatttggtttcatcatttctgagtgtaacatatttcttctaaaaatagagctctctgcttgtctgaaacttcttagcgttcactgggaggtgaaggggaataaggctgaccgtaattctggggtgacgttgccagtttcatagtcatagataaacttctcaagggctcctggatgctcacagcaaggatgagttcatttcaaatccatggtactgaagaagcatgacaaagcgtttcaaggccccatctgtgcctggtgtggactcctgaacgcattactgaccaaaggcaatcaatcacagctcacagggcaccagacagcagcggcccccttcccaggaggtacaggagacaggatgaccctgcacacatttaccagaagacaacagggtgctctcctgacacgctgcttaagaacgtgtacagacacaagatgtaggaatgcagggccgaagatgttaaactcttgccccgggccaatgcagacctggatttaatatcatggaacttgctgggattttctcacaatacagattaagagtcagaatctcccccgcccccgaggaagagcctggttagctcctgaatccaaagatgcccttgatgtatccagtgaggccactcttggtcttctgttccaacttgtcctcaaggggtgggaaagccacatggttgagggccaggtcaaagaacaaaggcttgcagggaatgggctggaagcctggtgggaagtgcacaaggttggcttgcttggtgacaagggaagggtccaggcagaatgtctcaaaccgttcaaccagaggcttattgtccttgacttgggaggaggaggtctctgtttgatgagcgtcgtttgcatcaaggatggctgcggcctgcagggagcacttctctgaccgcacttgagtgatgagctcttgcacatcaggcaggtcctttaggctgttcttgaaggcgccagcatcagaatttacttcatttgcatatttcaggactctgtcatacaggacaagggcttcgctccacttcttcaccagcacataggactgagcaatgaaaaaacacctgtaagctttgaacaccagagtcttgaggcctatctctttctggaaggctttgtcttcctctaaaccaggaagctggagcaattccaccagattctgtaagatgatgtcatagagtcggatcaggtcctggggccggggtgagcgcttgctgtcatcctctggctgctgctgcagcagagccctctgcagacctttggccatgttctcattacgcttgattgccgttgatagcttgatgtaagtcaggtagctatgcaagtattgaagattagacaccttccctggctctccttcaaggatataatctctctgtttctgatctggcttgagctcctcccgaaccacctggatggcgtcccgacactcgctgagcattgattcaaacaggcgctccttagtttcttcgctttcagcctggacaatagctgcttcgttatcagccagtcctaataagaaaatgcgcactttgtcaatcttcactggaaccgttctccctctccactccacttcactcatggtagctgcctgtttggctcgagtctgagtgatcaaagcctccaatttttcagccaagagaccctcagtgcccccagacctcaatctcatctgcatgagttcattgatggctgactggtccccaatattatatgcacaatagcggatgttgggtgaaatctcttccacacgttggttatacagcacagcctgctcctctgtgaaagcactggctagcttctcatagatagttttgcatttgttaaaagcctcaatggcagctttccattcttgatgttcaaaacgtagcattcctgagaggtaagctgtgtaagcctgagcctctaatttggtcttggcatccacgcgattgctctcacacaagcgttccaattcctctgcatgcttcacggctttgcgtaggcgagataacaagtgaaaccgttttcggggttcagtgttggcttcctgtttcagctgcatggcgtagctccaggctctttcagcatccatcagaaccagaagcaagtatctattatcggtcagaagctcttcagtcactttcttccctgtgaatttgtgtctgttacccatcttgaagttgagtgtttttcgaagacgtctttgcctcgtgccgaattcgccacccaggcctcgctcctt

SEQ ID NO: 124549 - DNA, 2244 bp, Homo Sapiens
  misc_feature (177)..(189): n is a, c, g, or t
  misc_feature (223)..(223): n is a, c, g, or t
  misc_feature (403)..(411): n is a, c, g, or t
  misc_feature (441)..(450): n is a, c, g, or t
  misc_feature (616)..(618): n is a, c, g, or t
  misc_feature (624)..(727): n is a, c, g, or t
agggggcggtgaacattatagcaggcagactttcttttcgtgcccccaggtctctcgcccacgcggtgggcgaaatattgtgtctttgccccaacaggcgcgaccacagggcgttgcgggcaacacctcccctgtgggtggtaatatagagggtgtgcaaactaaaacccccatctnnnnnnnnnnnnncctctgcactggttgctgccacaagagtatgttntatagtgaattgttgcccacaccatttttctcctttttattaagggggtcaaaagggcggcacggggggaaattatgttatgagttttacgggacttccccctggggagggatcccctgtttgaagtacattcccccaagtaattgggccctccacaacaaccgcccctccgaggaggannnnnnnnnaaaaaacaccattttgtgtttgcccccgtnnnnnnnnnnttttttttatgggtggggaatcttcaaccccctcattgtgaattggccgggaggtttctcgtagggggagacactttatgtggcgggtgcgctccttccctttggggggcgcgcgggcgcccaacgaaggggttcagaaagtttttttgtggggccccgtcccccnnncccgtnnnnnnnnnnnnnnnnnnnnnnnnnnnnnnnnnnnnnnnnnnnnnnnnnnnnnnnnnnnnnnnnnnnnnnnnnnnnnnnnnnnnnnnnnnnnnnnnnnnnnnnntttgccagttctattattaagaattttatttttgagcattctatatacatttataagtgtacatatgatgtattttatgtacatggattaggaagttcttcaagggcaccattaagtgcccactggaaaattttctacaagagaatagtttggaaaataacagatcaatttaggagactaaaactatacattgatataaagaatggatataggttttctcaatccagaatagtaccctcaccccctctgccctcccctctcctagatggtcaccatagggcagtaaagtttaatcagttgagcacggagcttcagggcgctggcacccagactatgatggagagaaggaaagagcaacaaacaaacaggcacgttggtagttggctacagcctgggtataagcccatggcatcttcttcccccgagactggggatgtcccggcaactgagtaagggatgggcctcctgctgctgacttctccatagtgaactcaatctccttgcctcacaagaacatcagagaggtcctctgttccttccagttttagattcttttcattggctaaatgtaggagacaggcaaaagccagaggtatggagaggttctgagccatgacagggggcaggctcctctgcaggtccttcgtgagcccgctaagcatcttctcgtcagccacttctgccagggccgcttcttttccagcttccctgtggtttgcctctgcatctgcctcctttccggagagcgctgtcagcagactccacatgctctgcttcagtttcttcatgtccatctttttggcagtcttggcatagtgaatttcaattttatttaccttctgaggctcagctaccaagtttgactccccatatgttgtgatgtctaatccttgggcttctggagtgtcaccattctgttgtgctgtcttaggtggatggcaaggataaggtgagaggtcagagttcccaacaggtcccacaaataagtcatccaaatcttcatcatcactgtcagcagcctgtaatccagggcaaaagttggaggtgtcgttagggttgttgtaatcatagtcttcaatttcttcataatgctcagtctctaccctatggccctgggccatcttaagtaacctggtgcctggtttgaggtgaagctggaccagagtgtcaacattgtagttgaaatctgtaggaagggtggtagctctccaattctggttctccaaagtggacttggtcagaatagtagcagcctttgtttttctaaaatatacatcaaagtcaatatcatcttcaaagtcaatttcaaaatctttttttgtactcttctttttgttttctgattgggaaggagcatcttgtttgcgtcgaggcctaaagcgccagtgatccgggccagcccacatcgacatggtccgaggactgaaataagaatattctccaggtttcatagacagaagggggcacatggtcctgatgtctccatccccaagggaaatcatttcttccctcgtgcc

SEQ ID NO: 124550 - DNA, 881 bp, Homo Sapiens
tttagtttgtaaaagtcttttattgtatccgtgccacacatagtgaaaaataacactcctaaaaaaagaatgctaccttttccacaacattttattttaaataaaacttcaagtactcttacgtaggtacaaaaaaaatctgatctatttgcctccaacaggccaccacaacacacagtagataaaacacagtggttacaaacgtcttttaaatttatttctgaggcaaggcaaatgggagggaaatgtttctatgaaaaaatactgtgtgcgtaggaaattgtcacaattttattccacatggatacaaatgattatactttaatttaggccctggtggcttaaaattatataacaaaatagaaaaatggaaaactaatatcccctacaccctgtttcaaaggcaggcactaccaagattaaggagacgccacagtgttggtagaggataattactgtacagactgtatagctatcattaccttcagacgaaaataaaatgctacaatcctctaaggcatgaacaataatgtctgcaaacaatatatacacataatacatatttaaaacaagacttaatataaacaagaatgaacagtatatacatgtcaattttttcactgttttgaaatacaatttaactacacaagtgatgcagcaacatatatatataaatgtacttgtaactctacagtaaagtttctttttggtgcttttatagcacatcagtgtaaacagtttaacttggctttgttttatattttaaaacattccttgtattttcaagatttaaagcaattttctagttcttccttttcacagaaaacgaagattctggatgtggtttaatcataaataattcataaaattaaatacattca

SEQ ID NO: 124551 - DNA, 472 bp, Homo Sapiens
aagtgaattaaaaagtttattagccatagaaaaaaactgattcctcaaaatcaattattgataaatcccctgtaaaacagcaagcttacagaaaatttctctcatgaacagatagtcactatacttttggtccaagaaatgttgggttttttcctccttcttcagatgacagatggatgtaactgaatctacgaacgagtgtacttgccccaaatgtgcaacataaatacagaagcgatgaacagaagactcataaccaatactggaacagggccaactttgagcccaggtgaatcttctgtgtagaatcgccacatccccccggtgcctgccgaggttgtgcggcctgcactccttgtcccacagctggcatttttcctgaaagagaggaaaatgttacaaatggccttttctggaaattattagaatagcattataacatatgctaccattattacacagttaaggaatc

SEQ ID NO: 124552 - DNA, 1121 bp, Homo Sapiens
  misc_feature (377)..(540): n is a, c, g, or t
cctcacggcgcggcaattacccccgcggcggcgggagtgggtaagatttattggtgacgccttttcgtggatagcccgtgtgatagggcggcccgcgctttgatgtaatgcaaaggcccctcccttggtagcgtgcgtcgtaataagggatcggcgggaacaccggcgggcggtttcttccttgggcgggagtctttaaggacgagggggatgcgggtacaccaggtgggtttgtgagaagaagtagggggggcgcacgcccgtggtgtctatgggggggccgccgcccggggaaaacaggtgggtaaaaggggtttttttgggtgagagagggggcgccacccccaggaagaaaacgcgagaaaaattgtttcgannnnnnnnnnnnnnnnnnnnnnnnnnnnnnnnnnnnnnnnnnnnnnnnnnnnnnnnnnnnnnnnnnnnnnnnnnnnnnnnnnnnnnnnnnnnnnnnnnnnnnnnnnnnnnnnnnnnnnnnnnnnnnnnnnnnnnnnnnnnnnnnnnnnnnnnnnnnnnnnnnnnaagtgaattaaaaagtttattagccatagaaaaaaactgattcctcaaaatcaattattgataaatcccctgtaaaacagcaagcttacagaaaatttctctcatgaacagatagtcactatacttttggtccaagaaatgttgggttttttcctccttcttcagatgacagatggatgtaactgaatctacgaacgagtgtacttgccccaaatgtgcaacataaatacagaagcgatgaacagaagactcataaccaatactggaacagggccaactttgagcccaggtgaatcttctgtgtagaatcgccacatccccccggtgcctgccgaggttgtgcggcctgcactccttgtcccacagctggcatttttcctctgccggacagtggatcccgccgcccgggcggccactgctttgctgggagagcgccctgaggatcccacgttagtgccactgggggtcggaccaggcatattggagatgagggtggcaaggcgctgacgcggacggatagaaagttacggagcccccgaaagaccggcagctggcgagactgactcaggccccgccccccc

SEQ ID NO: 124553 - DNA, 817 bp, Homo Sapiens
gtggagctggagctggagcccgcgctgcccgctgagagcgtgacgcgcgtcctgcagccagccgtccccgtggctgcgctgcgcctcaacctctcaggcgacaccgtaggcccagtgcgcttcgcagcacaccactacgccgcaaccctgtgcgcgctcgaggtgcgcgcagccgcttcggccgagctgaacgccgcgctggaggagctggcggcgcgctgcgcggccctgcgcgaggtgcattgtttctgcgtggtgagccactcggtgctggacgccttccgcgcgcactgcccgcgcctgcgcacctataccctcaagctcacgcgcgagccgcatccctggaggcctacgctcgtggcgtgattgggcgacttctctcccccgtccccgtggacgtaagcgctctgagagggaacctggacacatgtccaggcgcgccccgagtgctagtgccttcttttgggattgttgccccccgggtctttaccgagttgggaactgtgatggcatcgggaccagtcctgggcgccctgagaccactcgctgctctcaccctctgcagacgccccacccgctcggtcctggacacactgcccccctctcttgcctccacccctctgcggactctgcagctccgcggccccggcgcagggagagggagggcacgggcgcgggccgggcctcaagggacttgcccagcccacaccaggtcgcgcaccggcgatttctcctgtagaacaaagaaggaaatagagggaccgagaggggtgggactcgaacccaagtctcccactcatctcaccccaccaaagac

SEQ ID NO: 124554 - DNA, 824 bp, Homo Sapiens
tttttgaaacagttctctttacccgtgatcactgagtgacgcctggggcggggaggccgaccgagagtcgggggcgagggctcccccaccgtccccctgcccccacgccacgtcgcccagcggcatcgtggaaagaggattctcccatgcaaaccccggagccagaggagaaggggaagcgccattctgcgccccctacccccggggcacggacacggccacagcacggggggcggtgaggccccggggacacgagacacgggggagggagaggggaacccgcccgcagatgacccgggggaccggcgaccggacgcggcggggcggagctgagtggcacagggggcgaggcttgtagcagcgagtcccccctcccctcctttcggacgaagaaggaagacttgggccccgcgactgggcaggaaaaaggggagggagcagcctctccccgcatgcggcccgggagggaagccccgcccccttcccgcgggtaaaggacacccgtctcccaacagaaactgatcaataaattacaaagtagagaaaaggaaagcggacgtttggggcgggatttcttcctccccgcttcttccccctctcagtccagttcatgtggtttggtccaggccccggccctgtgcgaggcgggcgcgcgcactcccgctggtctgtacagatggtccagtcctcggcgcgagctcccccgcccgctctccccggcgaggccacagtccgggcaggagagggaacagcccagcctcgggaagattcttccgtccgagtgaggtcacctggaggcctgcactagcaggaataggtccgac

SEQ ID NO: 124555 - DNA, 1223 bp, Homo Sapiens
  misc_feature (117)..(166): n is a, c, g, or t
  misc_feature (489)..(530): n is a, c, g, or t
gtaagtcggcatgcaaataagcagcatttgttgttgtttgcgtcagcagcttgggcactttttctgggcaaccgtggcggcgtgtgcactccagtgttgccaagggctggggatacnnnnnnnnnnnnnnnnnnnnnnnnnnnnnnnnnnnnnnnnnnnnnnnnnnctgtgcggctcccagcctttccaccagggcctggctggctggggctggggcggagggccccacggagctgcgaggctgcggacaggagtctgcggcctctagtacttagcgatgtcccccttcttcaggatgacctgtcgctgccagggcgccagcttgctctcatcgtagcccagcgtccgcagcttctctgactgttccttctcccgccgcagctcctcctgcttctgtcggtcctcctctttccgcttctgctccctctcttcttccagcttcttccgcaggaggtcccgcctccaggcgggcatgctggccagccgggnnnnnnnnnnnnnnnnnnnnnnnnnnnnnnnnnnnnnnnnnngcatcttcagctgcatcttgcgcaccatcacctggcgcttccactcggggatgggccggccctgctcatcgtgcgtggggatgagagcctccacgtccagctgcactcccggcgcaggagtagtgggcggcacgggaaccaagcttccattgagcagcggctgaaaccccgcagctggcggtgtggggctccggactggtgacagtgcaggtgacacagaaggcagcggcgaatcgggctggaaggccggctgcccgatgcctgagaacactgtggtcagccccttgctctggggcgtcggcttcaggctcttgcctgccttaatctcagccagtagctccgagttgtcgcccgtcggggacatcatgttgaaagacttggtgcctcctcgctgtgcgccatgcccgggcgtgcggccagcgtctcgccggggcagcggcccagctgccggtagtagtcccccgtgctgggctgcttgctgaaggcgcggggcttgcggctggagtcctgcctccgcagcccgtcgtggccgtcacaggagctcagctcctggggactcgcggccagcggccgtcgaggggtgcagcagctgacttcctaggaccccctgttctcacagtggcagcgggcgaggtcatgggcctcgtggaagggcagccctcgtgccgaatttaaacccagcctcgtacctgc

SEQ ID NO: 124556 - DNA, 2559 bp, Homo Sapiens
  misc_feature (154)..(154): n is a, c, g, or t
  misc_feature (167)..(167): n is a, c, g, or t
  misc_feature (169)..(169): n is a, c, g, or t
  misc_feature (189)..(189): n is a, c, g, or t
  misc_feature (211)..(639): n is a, c, g, or t
  misc_feature (2011)..(2052): n is a, c, g, or t
  misc_feature (2297)..(2297): n is a, c, g, or t
  misc_feature (2344)..(2344): n is a, c, g, or t
  misc_feature (2350)..(2350): n is a, c, g, or t
  misc_feature (2356)..(2356): n is a, c, g, or t
  misc_feature (2362)..(2362): n is a, c, g, or t
  misc_feature (2369)..(2369): n is a, c, g, or t
  misc_feature (2371)..(2371): n is a, c, g, or t
  misc_feature (2378)..(2379): n is a, c, g, or t
  misc_feature (2403)..(2403): n is a, c, g, or t
  misc_feature (2412)..(2412): n is a, c, g, or t
  misc_feature (2427)..(2427): n is a, c, g, or t
  misc_feature (2440)..(2440): n is a, c, g, or t
ccgtgacacgttcgtagccgcgtacggtgtcacacagtgcgagctccgatggtctcgtgattggaccacgtccgagagagcgcagttcgtacgcagtcgacagagccagaggactccagggaacgctgttcttatgtctgtcggttcgcccctngattgactcgatntntgtgctgtcaggggcggacntatgaaaacccagcacgcgccnnnnnnnnnnnnnnnnnnnnnnnnnnnnnnnnnnnnnnnnnnnnnnnnnnnnnnnnnnnnnnnnnnnnnnnnnnnnnnnnnnnnnnnnnnnnnnnnnnnnnnnnnnnnnnnnnnnnnnnnnnnnnnnnnnnnnnnnnnnnnnnnnnnnnnnnnnnnnnnnnnnnnnnnnnnnnnnnnnnnnnnnnnnnnnnnnnnnnnnnnnnnnnnnnnnnnnnnnnnnnnnnnnnnnnnnnnnnnnnnnnnnnnnnnnnnnnnnnnnnnnnnnnnnnnnnnnnnnnnnnnnnnnnnnnnnnnnnnnnnnnnnnnnnnnnnnnnnnnnnnnnnnnnnnnnnnnnnnnnnnnnnnnnnnnnnnnnnnnnnnnnnnnnnnnnnnnnnnnnnnnnnnnnnnnnnnnnnnnnnnnnnnnnnnnnnnnnnnnnnnnnnnnnnnaagaattcggcacgaggcgtggaagacttgcgcagccgcctgcagcgcggcccgtgacacggcgcccacttgccacctaggcgctctggtggcccttgcagaagccctaagtacggttacttatgcgtgtagacattttatgtcacttattaagccgctggcacggccctgcgtagcagcaccagccggccccacccctgctcgcccctatcgctccagccaaggcgaagaagcacgaacgaatgtcgagagggggtgaagacatttctcaacttctcggccggagtttggctgagatcgcggtattaaatcccgagaaggagagagcaagtcgcggccacagcgagtgagtgaaccggagcccagatgagagcgctttaatggggctgcgaggtggcggagacagggtcgggatggggtgcagcagttggagacacagggtcagggcccctcatcctctattcactccaccggggcagtgaaagggtcccggcagcgagtgggtctggctggggacggggcgcagacttgagggaggtggggccagaggtggggtcccgggggccacaagtgcggcccggccagacaggcagttttcatgtttctggtaaacaaatgactgagaggaaacccttggcggggataagaaatgaggcccgggctaggccgcgcgcagatctgggtcagagaggaagggaaaaccccttccccgagctcggggcctgcctccacccaggatgcgccagcgacgccggttccggggtgcgggggagggggctgcatcctggagggggctgagccccgcaggaaaacaaagtcaccacccacggggctggggagagctctgcactctttgatagtcaacgaacatgcaaatatatgtaagtcggcatgcaaataagcagcatttgttgttgtttgcgtcagcagcttgggcactttttctgggcaaccgtggcggcgtgtgcactccagtgttgccaagggctggggatacggggggccagggtgggggtcagggaagggtttccagcgcaggaggggagggctgtgcggctcccagcctttccaccagggcctggctggctggggctggggcggagggccccacggagctgcgaggctgcggacaggagtctgcggcctctagtacttagcgatgtcccccttcttcaggatgacctgtcgctgccagggcgccagcgttgctctcatcgtagcccagcgtccgcagcttctctgactgttccttctcccgccgcagctcctcctgcttctgtcgctcctcctctttccgcttctgctccctctcttcttccagcttcttccgcaggaggtcccgcctccaggcgggcatgctggccagccgggnnnnnnnnnnnnnnnnnnnnnnnnnnnnnnnnnnnnnnnnnngcatcttcagctgcatcttgcgcaccatcacctggcgcttccactcggggatgggccggccctgctcatcgtgcgtggggatgagagcctccacgtccagctgcactcccggcgcaggagtagtgggcggcacgggaaccaagcttccattgagcagcggctgacaccccgcagctggcggtgtggggctccggactggtgacagtgcaggtgacacagaaggcagcggcgaatcgggctggaanggcggctgcccgatgcctgagacactgtggtcagcccttgctctggngcgtcngctcangctccntgctgcntnatctcanncagtactccgagtgtcgccgtcgnggactcgtngcgattctggctcgnaggcaatccctanatgagtcgataattcgatcatgcatactgttctgtgtgaatgtatcgccacatccaacacatacacggacataatgtagctggggctatgatgacaccacatatggtgcccacgcgctg

SEQ ID NO: 124557 - DNA, 928 bp, Homo Sapiens
  misc_feature (654)..(654): n is a, c, g, or t
ttttgttttctttcacagatttaataccgcgatctcagccaaactccggccgagaagttgagaaatgtcttcaccccctctcgacattcgttcgtgcttcttcgccttggctggagcgataggggcgagcaggggtggggccggctggtgctgctacgcagggccgtgccagcggcttaataagtgacataaaatgtctacacgcataagtaaccgtacttagggcttctgcaagggccaccagagcgcctaggtggcaagtgggcgccgtgtcacgggccgcgctgcaggcggctgcgcaagtcttccacgcagccgtccagccccatgcgctccagggccgcgtaaacggctccgaggcccgcgggctgctgctggcgccagcgcttgagcatctcgtactgctggtctcggaagcgggcgatctccagctccacggcttcgatctctgcctcgcgcagccccagcgtgcgcacgaactccttccagcgccgcgctgggaccgcgtccatcacgtcgtagagctgcgggcccggctgcagcatcatggctggcgagccggctggggactctggcgagagtgtgggcgcagcagcggggccaagagctctgctggggcactggtgccaggaccatgtcacctgcgggcagagncgccttctgggtctcggggtagccaggggtccagctgttacccaccaactggacggtgcagatcttctcactgctgtcaggaggtgctagaagggtgtgggcgctgtccaagggtgacagatgggtggccggtggtggggtcagagcctccatcccagcttcatcagtaaccaggggcttgtgaggccagcagtggcggtatgtgtaggtcagggtggccccaagcaggagggggaccacaaggccagccaggagcacctggacccagaacact

SEQ ID NO: 124558 - DNA, 1476 bp, Homo Sapiens
  misc_feature (131)..(162): n is a, c, g, or t
  misc_feature (276)..(291): n is a, c, g, or t
  misc_feature (323)..(340): n is a, c, g, or t
  misc_feature (393)..(413): n is a, c, g, or t
  misc_feature (455)..(466): n is a, c, g, or t
  misc_feature (910)..(1285): n is a, c, g, or t
  misc_feature (1294)..(1295): n is a, c, g, or t
  misc_feature (1311)..(1311): n is a, c, g, or t
  misc_feature (1313)..(1313): n is a, c, g, or t
  misc_feature (1321)..(1321): n is a, c, g, or t
  misc_feature (1323)..(1323): n is a, c, g, or t
  misc_feature (1328)..(1329): n is a, c, g, or t
  misc_feature (1336)..(1337): n is a, c, g, or t
  misc_feature (1360)..(1360): n is a, c, g, or t
  misc_feature (1383)..(1383): n is a, c, g, or t
  misc_feature (1396)..(1396): n is a, c, g, or t
  misc_feature (1416)..(1416): n is a, c, g, or t
atttggaggcccccctcttgggccctcccccgtgggtgttgggtcccccgcaaaatgggccccccacgagaacctccccttctggggggttgtttgttccacaaaagcctctcgggtgtttcccccgcccnnnnnnnnnnnnnnnnnnnnnnnnnnnnnnnnagaggccccccaaagcccccttttgtgtcccttctgcccccggggtttttctcctctgtggagaacccgcctcttagggccccccggtttccccctttcacctcccaggggggnnnnnnnnnnnnnnnnaacggaaattggttttgagaaaagttttttcnnnnnnnnnnnnnnnnnnccgcccccgagcacccttctttcttatgcagtttttgttcccgggcgcctcgnnnnnnnnnnnnnnnnnnnnncccttcggtgccgcccccggcggtggggtttttggggtgtgnnnnnnnnnnnncatggtctgatttattggtggtgaatacacaggggcaggcccaggacaagcagcttggctactccccctctgctggctgcccgaccggcagagggggctccatgtggcaggagctaggctcccaacgcccactgttcttgccaccctctgggctcccaggctgggctccgctaggctcctgtctcccctgccagttagttaggcaagttcaggtgtggaggccgcagggatagatccaggtggctctgggctgggccctcttctcttcccagcggggaggtgctgttggcctggctgggctggcctgaatctgtttcaagttctcccttcctgcccagctcagttcaccagtgctggatccaggttcaaatgacagggacttgggtttttacaacagcgtggcaagtggtctgtctcctgggcagccctcgtgccgaattcttnnnnnnnnnnnnnnnnnnnnnnnnnnnnnnnnnnnnnnnnnnnnnnnnnnnnnnnnnnnnnnnnnnnnnnnnnnnnnnnnnnnnnnnnnnnnnnnnnnnnnnnnnnnnnnnnnnnnnnnnnnnnnnnnnnnnnnnnnnnnnnnnnnnnnnnnnnnnnnnnnnnnnnnnnnnnnnnnnnnnnnnnnnnnnnnnnnnnnnnnnnnnnnnnnnnnnnnnnnnnnnnnnnnnnnnnnnnnnnnnnnnnnnnnnnnnnnnnnnnnnnnnnnnnnnnnnnnnnnnnnnnnnnnnnnnnnnnnnnnnnnnnnnnnnnnnnnnnnnnnnnnnnnnnnnnnnnnnnnnnnnnnnnnnnnnnnnnnnnnnnnnnnnnnnnnnnnnngatacgcanngaagacatgtgagcananggcagcananggcanngacgtannaggcgcgtgctggcttttcatangctccgcccctgacagcacacanatcgagtcaatcnaggtggcgaccgacagatanagaacagcgttccctggagtcctctggtcctgtcgactgcgtacgaactgcgctctcttg

SEQ ID NO: 124559 - DNA, 1397 bp, Homo Sapiens
  misc_feature (36)..(36): n is a, c, g, or t
  misc_feature (123)..(123): n is a, c, g, or t
  misc_feature (236)..(236): n is a, c, g, or t
  misc_feature (316)..(316): n is a, c, g, or t
gcactttttagaaagaaaacatccggtcaaagtctngggaatgttgatagggcggggatttacactccccgcagcggagcataagtgacaagtggccacggagttcagaagatgccacatgtngcatggcatcgggctccccccagagccttgagtgtgtttgaagctgaagcacgaatgtttctcctgaaagatctgaaagagtatctccagtgtccagatctgcatgtgtggtnggcgtcgatgagcaggacacgtaggggacccctgcaggatgagacggcatcgagatccccggtgcgcagctcagtccacnttcaccgtcaccgtccggggcccggccgagtggcccggcaggaccctcaggatgtgcgcctccttgtggccggccacgccttccaagtggcagccccggaccaaggctggagtacgcggccgccactcgagcgtgcggcccatgtcctggctgtcttccagcatgcagaaggacagtgacccctgggcttggcccagttcggaggaggatgctctgggggtcattccgctcagcagcagaggtgatggggcccttctcagctgcccactcaaggatctgggtcttggggaaggatggcagctctgtggtgttgacccccgggggctcttggaaggtgaccaggctggaattgtaggccaagtgcagtgggattcccagggcctggagatgcaggaagacactgctgtttacactgaggaccagaagcacctctcggggccaggtgccattttgcttggatgcctggagagtcagctccagctgtgacgggcccgttgggaactccaggaagaggacatggacttcaaggatggcattgggggcctgagccacgcagcccttcgagacctggctagtggtatatgtcacctcgcccctctcggggcccacaggctgaaggtcacaatggactgtttctgcaagacttgtggggctgaggctgcagctggccagcagcagggcaacagccagagggagcgtgccgcggtccatgctgtccacgtgggggcctgtgcgctgggccttatcctgtgtccagtggcagggctgcgggcgggcaccggggccggcgtgggctcgcacggggacccgaggggagcaggcggccggagcgacggcgtccctgctccagccttctggggtggcggccgaggggtcaggagaagtggacacagggacgcggggctgggctggagttgctgtccgaaggatgggcggggagggggtgctgggctccaatggatggcagtgacagcagcagtcctggccccagggcgcagatgaaggctgtggtatgaccggcagcagggagccctcgtgccgaattcggcgcgccgtcgacttcatactctctcccccctag

SEQ ID NO: 124560 - DNA, 3237 bp, Homo Sapiens
ttagttatgtttgatttaggagtgggtagttttacggttagggttttaccttcggattaagtgtctctgtaacttttgggcgaatccaagttttcgttgtggtctgttgtgaacctctgtgacccaggatttcagctctatacgttaccgggtttcggtgagcataacaagagggcaatatccgctaaaagggaatatggcgacatggaaatgtgattattcaacttttcctttttcattttaattacccctcactaaaggggccttacttttacggtcctaaggtagcgagcggccgcgataaggccaattttttattattatcggaatattttctattcgggtttcatggtctgatttattggtggtgaatacacaggggcaggcccaggacaagcagcttggctactccccctctgctggctgcccgaccggcagagggggctccatgtggcaggagctaggctcccaacgcccactgttcttgccaccctctgggctcccaggctgggctccgctaggctcctgtctcccctgccagttagttaggcaagttcaggtgtggaggccgcagggatagatccaggtggctctgggctgggccctcttctcttcccagcggggaggtgctgttggcctggctgggctggcctgaatctgtttcaagttctcccttcctgcccagctcagttcaccagtgctggatccaggttcaaatgacagggacttgggtttttacaacagcgtggcaagtggtctgtctcctgggcagccatatcccagacccactgggttgaaggttctgtggggtggagggaccccaaggtgttccaagccagtggctgcactggcagcaggcctctgagagggaggcgggaagggtaggcgcggagagcaggctccattctgggtcgagtggaggactggctcccagggtgagttcacaccagtgctcccagctggcggctgctcagtctctcctgctgggcgagcgcggggggccggggctatgccatgctgctggtggagcagggggtgctctgggtgctcccgatgctgtggttggtgctgctgctctccgaggaggccggggcagccaccgccaccacgggctcccgcttgctgggggaacgcgtgtgcgagtagatgtaccagagtgcagcagtgagcagggccccgatgaggaaggcaccaaaggtgatgcccagcacggcgggcaggacgaggcctttgcttgtgcaaccagacaggtcagggctgatgatgttcaagcgcatgaagacagtcctatggacttcctggtcttgagacccggtcttgggacgcagggctaccgtgcagctgagggtgccggttttgggtatgggtactgtgtagaagtggaggaggaagctgaagcgcgggtcaccctcggggcttggggacagcaggctcacacagttgcccttggccgcccggccctggatgagttccacggtgcctccctcaggccccaagtccaggtggcagctgtctaactggagcaggaactcggagacggatggggacactctgacctgcacaaagctctgctgccccggctcgatggtgttggaggcctggaggaagtgtgggctgaggtagaggcccagctggaaagagaggctgtccatgttgaggcagtgcacctttttccgctgtggtgatgagctcgacaggatattgaccaccgcctcattgctgatcatacttgctgacacctgcatgccacagctggagtaagcactgcgcaagacaaacttgtcacccctgtcctctgcctcacagctggggtcccagaaggtcaggcccgtgatggtgcacttcaaatgcgcaacaagctctttctttagtaccagggtcatggcgtcgtcggcacactttgtctggatcaaggacatgagcagctccgggctacaagtgtccttgggaggagtggtctggatcggtgcgggtgaggtctgcagcctaccaccgcagctggaggcatgaagtgagacaatgctggccagcggtagctccacgaaggatgccacaatgctggcattgagcatccgggcctcccccaggaggccttgaggtgtgtctgggagcttgaagccacgaatgtttttctctggaaagatcttgaaggagtattctccagtggtccagatctgcatgttgtggttggcgtcgatgagccaggacacgtaggggggaccctgcaggatgaggacggcatcgagatccccgggtgcgcagctcagttccaccttcaccgtcaccgtccggggcccggccgagtggcccggcaggaccctcaggatgtgcgcctccttgtggccggccacgccttccaagtggcagccccggaccaaggctggagtacgcggccgccactcgagcgtgcggcccatgtcctggctggcttccagcatgcagaaggacagtgacccctgggcttggcccagtcggaggaggatgctctgggggtcattcagctcagcagcagaggtgatggggcccctctcagctgcccactcaaggatctgggtcttggggaaggatggcagctctgtggtgttgacccccgggggctcttggaaggtgaccaggctggaattgtaggccaagtgcagtgggattcccagggcctggagatgcaggaagacactgctgtttacactgaggaccagaagcacctctcggggccaggtgccattttgcttggatgcctggagagtcagctccagctgtgacgggcccgttgggaactccaggaagaggacatggacttcaaggatggcattgggggcctgagccacgcagcccttcgagacctggctagtggtatatgtcacctcgcccctctcggggcccacaggctgaaggtcacaatggactgtttctgcaagacttgtggggctgaggctgcagctggccagcagcagggcaacagccagagggagcgtgccgcggtccatgctgtccacgtgggggcctgtgcgctgggccttatcctgtgtccagtggcagggctgcgggcgggcaccggggccggcgtgggctcgcacggggacccgaggggagcaggcggccggagcgacggcgtccctgctccagccttctggggtggcggccgaggggtcaggagaagtggacacagggacgcggggctgggctggagttgctcctcgtgccgaattcggcgcgccgtcgacttcatactctctcccc

SEQ ID NO: 124561 - DNA, 586 bp, Homo Sapiens
gttgttgttgttttagcacctgtacaataaaactgtaccatctccaaccagagccggccacggcgaggccctcctgcctttggatggtacatactctacaaggattgttcggaaaaatagcaattggtagaaaaataagagtgggagggacaatgccacagagggggcggggacagggaagcaacccaagctcctctctctctctcactcgacaaacccagcgctggaggcccagaggccagggggaggccaggtagggataccactcagccccaggcccccaggcatgagtggagcaagggctggagaccactttcctgcccttgcctaggaaacagctgacgcctggatttcacatccggcagtgagtcccagagccctctgcagattcccaaggagaatgaggggctgagggaggaggtgggaggagaggaaggaaaggggtgctgtgagtctcaaaaggggcagggatgggggtggctgagggctgggaggtgagaggctcagtatcttgagacagggaggccagaacggggtgggagagtggaggcaggaacaaactcgtattgtgcactctgaggggggc

SEQ ID NO: 124562 - DNA, 1298 bp, Homo Sapiens
  misc_feature (551)..(657): n is a, c, g, or t
  misc_feature (1037)..(1037): n is a, c, g, or t
  misc_feature (1130)..(1130): n is a, c, g, or t
ttaggccaagacaacctctttatttaatgggctcagagagcaagggaaccacacaaaatttacagtctgagttttgcgcgcagagacccctctccacctttttcatgcctgtgtgtacacacacactgtccaagcctcagaagagaagccgtttattggtaaaaagacacatggaaatgtggctgccaggcctcagagcatcctgcccttttcccaaacagctggcctctgctatccaccaggacttgggcttggcatccaggctggataccatgagagcaccttctgtctctggtctattctgccagtgtctccgtgtcagggtgggttggctccctccagggcacaaaggtctgggctctgtccaagagtgcccctccataggggtgggtaccaccatgccacacagcagtatttgccccatccggatgatcaagatacccctgcctcatcctgttaccttaaattccagaagccccatctctgcagctcagaaggtaaacaaaccctggttcaggcattggtctcccagagcaaggttgggaggcatnnnnnnnnnnnnnnnnnnnnnnnnnnnnnnnnnnnnnnnnnnnnnnnnnnnnnnnnnnnnnnnnnnnnnnnnnnnnnnnnnnnnnnnnnnnnnnnnnnnnnnnnnnnaaggggaaagtgtcagttcttaacagatgaggcagcaggaatttagggttgagtccttaggtgaaagccagtttatttattcaacaagtattgaatgcctactgtgtgctaggcagtcttctagaagccaggggtacagcccgtcctggcaaggtcctgactcagcccagccaggacagtttcctgagcttcaaggttactgtctccaatccctatttctatctattcttcctcccctttcttcccttccttctccctcccaccacctcccagggcctttcttctctgctaagcggcagagcccctccctttggtctcctgggcctccaccctcccgagtgtgagggacttcgaggtgtcagcggggggctggtgcccanaggaggtgggggtgggctggggatcagagcgggtaggggatagcctgggaagctgaagtcctggggctccatgtgagtgaggcggtggcgaanaagggtggagctgaggctgaaggtacggtcgcattccgggcaggcatggggcctctcgccactgtgggtgcggaggtgtttgactcgggcggagctgtccgcgaaacctttgccgcactctgggcagaggtagggcttctcacccgtgtgcacccgcaggtgcttcac

SEQ ID NO: 124563 - DNA, 885 bp, Homo Sapiens
  misc_feature (589)..(600): n is a, c, g, or t
tttgtttttttattgtattttattacagtacgtgtagtgtatactaactgaaagggaaaaatgtaaacaaaaccaaagtcatggggaaaatggcatcttgctttaatcttcaactgaaagttaccttaacaatccatttacaccattatgtcaaattttagtcatctctgcagaattttagacaaatgaaaacagacaaggtaacaccaaatagttaagcacagaaagtgatactgattaaaaagttgaaagtaaaatctaccttggctagaactgaacattcagatctgtctctccagaggaaaatctaacttgaatcataatggttcatattttgactagttcataccctatcaattacctacttatgacttgaacataccttttctcagctgcatgtgacagcctaaaaccccactgagcatgctgcttggcatgccttactcctctgaaatcatcatctactttctaaaaaccagaaaatgagtttgtgatttaaatttcaaaaaatagtttgtagaaaacacaaaaagaatcaactgtttaaagtcttatccttttcttcactctatgacagctacttctaccnnnnnnnnnnnngagtatgtgggtactttctaagaactcagaaacaagaaaaccaaaatcagagggtgcatgaatatatgtgcacgcacatgtacagacttaatctctacatcccccaagacagatttaaacaggtaatcccaacattttaaattcagaaaccagagacaaacagttttgtttctaaatcagtggtgttcctagctgaaatgtttagaatactgcactcacagttcagcagtactttgattatatatctcattcaaaaaatcaaaataatggcctacagccgcggcc

SEQ ID NO: 124564 - DNA, 612 bp, Homo Sapiens
tttgtatagaaaccattaagacatttatttatataaatgaacaaagtatacagataaatcacataaaagcaaatcagaaaaactttgatttctctcctatgtttactaaattagcaacaacatataaaacccctactcaaatggtaacactgtaaaatgttacaactctttgggaatgcaataaggcaaacataagtcataaagttcttcatattatttcactaaataatccccctcccaggaatttatcataataaaatttaaaactacttaagtattcagcaatagagaaatactctaaataaattaagagtataaagtaatataattaaaataatcattatcacaactacatacatatagataatatcaaatgaaaaagtcaatttaaaagtataggtgccttaagactatgtgaacaacaaaaaggaaaatagtaatataaaaatttaaattctaaagttactacattaagatggtagaggtaacagtaattttcccatttggcaaaacttcagttttaaacataaaagaaaaagagtggctatcgttttttaaaaatggtcaacaatctctactcctctattagtaaactctgtgtcaatttttaag

SEQ ID NO: 124565 - DNA, 975 bp, Homo Sapiens
tttagcagtagtaataatttgtgtttaatttatacagttgctgaaacagagtgtaaccatgttgatttaaagaaaaacaggtgaaatacaaataagctagaaggagcaaaatcattaaacacctgtaacacgaagataattcaaacacataggtaaccagggacattgatcaatgataacgtagcaaagcaggagtacacaagggcagtgtgagtgggcaggctggatggatggctgcagggtctactgggcccaccaccaccccaagcatggccctcacatagcaccttgatggggtccacagccttcctggggtgccacacttatcactggcagacaccagagacccacagaacactacggcacttatagccatctacatgagttatgattctgtttattttatgaaaaacttacaaatcaggggttaaagtcaaaattaaaacaagaaaaaccccacatagcacttcaggcagagacctgccacgattacaccatattgggggcccgctgtccccacacccctatcctttctcctcctgttgtgcctctctctgtgtatctggatgaatcctaaccataccacacacatgggtgggaactcagggtttaacactctttggctatttgacaggcacattaaacaatttctacatgattgtacagcccctgaggagtgatgagtgtaaaaatatatttctctctttccttccttttatacgggatacaatgcttcatatagcaaacaggatgtctttgcctggatatgtgaagaacaagtgaggaaactggcaagtgctcaggagtgaaatgcttggaaagctgttttccaagacaacattgcattcagagacacaccaagggagtggggagaaggatcagtccacctctgtgggaagagcattcatctctgatgtttcacattgtctgggcatagtgatgataaaaagcacaatgacttgtagacagctttat

SEQ ID NO: 124566 - DNA, 1002 bp, Homo Sapiens
  misc_feature (33)..(33): n is a, c, g, or t
  misc_feature (116)..(117): n is a, c, g, or t
  misc_feature (156)..(156): n is a, c, g, or t
ccagaacgtttgacttatacgattatcgactcnttagggattgcctggagccaagatcggcacgagccataaggatatcacagtacttctacagatagtagcaactctctgagatnntgaaagatgtcatcttgagaagccacagagacgctaacntgtgagatcagggagaacttgtaggacatcactttcctgtcagtgagagctggagctgacctgctcttgagaccagtcactgcctatgggagtgcttggggctcagagcgaacgcttcccatctaacctggaggttgaagcttcaccacaggcttcaagtgcagagtaaatgcttctcctctttggaatctggcccatgtgaaaatggagcctcaagaaagtgaagaaggcaatgtctctgggcatggtgtgctgggcagtgatgtcttcgaggagcctatgtcaggcatgagtgaagctgggattcctcagagccctgatgactcagatagcagctatggttcccactccactgacagcctcatggggtcctcccctgttttcaaccagcgctgcaagaagaggatgaggaaaatataaaaggaaaagagggagatgttttgtccagacctactagacccaacagaaaaggtttttgtattagaatctgtttccttaaaaattgatttgactcctgttcttaaacacaagtggtttttcctaattccagaggaactggacgtcaccaaacaaggttgcattttacttttgcatccagtttttatagttttccacaaccaagccacccttcacagataaaatatgatgctggcatggcaatcagaccaaagcactgtccccaattgttgtcttaactatgactagacatgttatacagccatttatcttgtacaactgagaagaatcatactttgacctaccttgtagagatgtgaggatttagatgtttgctaacttcaaaactgtgcttgaatagactaataatatatgctcatatcagatgtc

SEQ ID NO: 124567 - DNA, 687 bp, Homo Sapiens
gagcaaaagtttttttcttctcagttgactgaattctgttttcttcatttacttcttctgtctcttctttctcttgcaccctctgctgaatgaggaacctaaaatagtttataacagccttaaagaaaacagagaaagtgccagactccctttgggggagaaaccggtttttccttatggaatcccaagagcataaacagaccagttcatctcaactcttaaactatttgcttttgtattttgttatctgatttattgactaaaataattattgcaacagaggctactctcgggtttttagggagagtgtagtttagacactcagaaaagtctttgtttaaaaaacccttttttaaagtgcactgtaaaagcatcacatggtctagcctcataataattctccttttttggagacccaggattcaatgtgggctctgcccagagctcagatccagttaaaagacaagtagtccctatctaaataaaactggtctcctcttacagtcctatggtagatttgtataattttgtgcttgacatccatctttaatctctctccagctctaccagactttttctttcagtaccttgagatgtaaattttgctatctgatttttcactaagagttgtttccttcactatgcagatttagggctatttagctgacaactgccagagtgatgaaa

SEQ ID NO: 124568 - DNA, 1804 bp, Homo Sapiens
  misc_feature (153)..(174): n is a, c, g, or t
  misc_feature (276)..(285): n is a, c, g, or t
cgctcccgggtttccccccccgtacgcgaaaattctatccgcgaggggggacacagagggtaaaactcccggggggggatcggttttcacccccccgttttggaagggttgtccgagcgggggaaagtcgttcaggattttcccccctccgcnnnnnnnnnnnnnnnnnnnnnnttaaataggattaaagggcccctgggtccccggtagaagaaccccaaaagcccctggaggcccatctggaattttttaaaaccactcgttcccccccggggnnnnnnnnnnggggggatcccaaccctatttatggccggggtttctttggaaaacagtatggcccacttctctttccctcgggggcccgcggcccaaagaaaaggtttaaaaaatttctggaggccgcggggcggcccccaaaaccaagttttcatttgttgttttctttctcgcgggaaaaaggattgggtggactttttcacaggggtgttttttatattactcttagcggggttatttttaagatttaatttttcaggaaccggtatttattatcaaagtcatattcgatgtcaacaagatgccacaactacaaaaaaaattgcgcacattgcaatctcaatgcaaacagtcaaatggaaccccagtcattaaaaaagtaattcaaattaccccaaaaagcaactgaattttttaaacatctttatacatccagccaacaaattaaaatggttaacaagaaaaaatacaaattcagaggtctcgtatcgatgtttaaaaaaggcaactgcttaagcgtttctatcaattcgaacgtcaatctctcggccactcagcttcatgccattcatcatccggcaggctctctcggccacctctggcgactcgaacttaaccacaccacaccccttggacttcccattctccatcttgatgtcggcgtacagcacgtggccgcactcgttgaatttgtcctttagcatcttccatgtgaaatcgaatggcagatttctcacaaatatctggcaggccttcctggccaccccaggagcatggcctccagctccaccaaaggaacctgcgaagcttcctccgaagttgccacgctccatctcgatggcacggtcaaagctggcaccgccaccgccacccatggccaggcccatgcgctcaatgccagcgcccagggccgggcccatggcggggcccatgcgctcgaggctgttggcacccatgcgctccaggcccatgcgctcgaggctgttggcgcccatgcgctccaggcccatccgctccagattgttggcgcccatgcgctccaggccggtggccatgcgatccatcacggggcccatgcgctccaggccagctcccatacctgcgggcaccatgcgctccatgctcaggcccatgcgctcgatggcagggcccatgcgctccacgccagagcccatgcgctcaatggtctggcccacacggtcgatgggagcggccatgcgctcaaggccgaagcccatgccggcacccatgcgctccacgccagagccaatgcgctccatggtctggcccatgcgctcaatgctggaggccatgtggtcgaggcccagcgggcccatgcgctcaatgccggagcccatgcgctccacggagcccatgcggtccatgaccaggcccatgcgctcgatctcggagcccacgcgatccatgcgagcgcgtgggcggacgcgtgggtcgacgatatcccgggaaatccggaccgtatccagcctgcttttttaacgcacgtgttctatatgtcactatgctt

SEQ ID NO: 124569 - DNA, 1044 bp, Homo Sapiens
ttttaaagtgaattaatttattgattcatccattccataaatgtgagctcctttgaatgttatccttgctggggggatctgtgcccccaggcctgggggctgtcacaggccaaggcctccccacaggagccctgtggttacagagctgcaggctcaaggagcccatgggtcagagaggcaaggctgggctgctggtttgcttcaggctgtagggggtgagtgggtggaggcaatgggagcggccccttgccccagcttgcctcagctcttggagtaacgcctctgcagcgattcccggtagaaacggaagacgtgttgcgaagcggcctgggccgcagccaggcactgctggagctcagtgtctgagtagagccccttggtgctggacatcagcagcttccgttccacgctgtccagggcaaaggtcaggactgcccgggcctccttttcttgcttggatgtaggatccagcacgagggtcccatcagagtccagggcgcaggcgaccccacagaagagagcccgcatgggcacacctgcatccaccaatgccatgcaggcggcattcagacaacaggccaggagagagccggcatcgctgacaacctgcagcaccacggtgatggaggtgcgggggtgcaacgtgcccagcaccaccgcctcgcacgtgttcctgatcagccgctcccggctcttctctgcaacaccaggcagcccaatcttcggcctcaggatcacttcgagtgtggccttgttgaaaatctctttgctgaccttcacctcggccggcccgtacacacccgccaggacagaggtgtcaccttgcaggaaggaagcagagccatctggccgcgacagcaggttctgttcgcaggcaaagtgccggaggctgcagccaggaccccgagggctggaccctgttccattttcagcacggattttggcgtcagtatgcatctcctcctccatcgcgccgagcccacgtgcggctgcagttgtcaccggacgcgtggtcgacgatatcccggaaatccggaccggtcc

SEQ ID NO: 124570 - DNA, 859 bp, Homo Sapiens
tgatgttacccttctgggggatctgtgcccccaggcctgggggctgtcacaggcccaagcctccccacaggagccctgtgttacagagctgcaggctcaaggagcccatgggtcagagaggcaaggctgggcttgctggtttgcttcaggctgtagggggtgattgggtggaggcaatgggagcggccccttgccccagcttgcctcagctcttggagtaacgcctctgcagcgattcccggtagaaacggaagacgtgttgcgaagcggcctgggccgcagccaggcactgctggagctcagtgtctgagtagagccccttggtgctggacatcagcagcttccgttccacgctgtccagggcaaaggtcaggactgcccgggcctccttttcttgcttggatagtaggatccagcacgagggtcccatcagagtccagggcgcaggcgaccccacagaagagagcccgcatgggcacacctgcatccaccaatgccatgcaggcggcattcagacaacaggccaggagagagccggcatcgctgacaacctgcagcaccacggtgatggaggtgcgggggtgcaacgtgcccagcaccaccgcctcgcacgtgttcctgatcagccgctcccggctcttctctgcaacaccttgcaggaaggaagcagagccatctggccgcgacagcaggttctgttcgcaggcaaagtgccggaggctgacagccaggaccccgagggctggacccctgttccattttcagcacggattttggcgtcagtatgcatctcctcctccatcgcgccgagcccaccctcgtgccgaattcgacacccagcctcgctaccttagaccga

SEQ ID NO: 124571 - DNA, 825 bp, Homo Sapiens
agcttcctcagctcttgagtacgcctctgcacgattcccggtagaaacggaagacgtgttgcgaacgcctggccgcagccaggcactgctggagctcagtgtctgagtagagccccttggtgctggacatcacagcttccgttccacgctgtccagggcaaaggtcaggactgcccgggcctccttttcttgcttggatgtaggatccagcacgagggtcccatcagagtccagggcgcaggcgaccccacagaagagagcccgcatgggcacacctgcatccaccaatgccatgcaggcggcattcagacaacaggccaggagagagccggcatcgctgacaacctgcagcaccacggtgatggaggtgcgggggtgcaacgtgcccagcaccaccgcctcgcacgtgttcctgatcagccgctcccggctcttctctgcaacaccaggcagcccaatcttcggcctcaggatcacttcgagtgtggccttgttgaaaatctctttgctgaccttcacctcggccggcccgtacacacccgccaggacagaggtgtcaccttgcaggaaggaagcagagccatctggccgcgacagcaggttctgttcgcaggcaaagtgccggaggctgcagccaggaccccgagggctggaccctgttccattttcagcacggattttggcgtcagtatgcatctcctcctccatcgcgccgagcccacgtgcgcgacgcgtgggtcgacgatatcccgggaatacccggaccggtaccagcctgcttttatataaacaccccgcgggggttcataattagttgtcacccaa

SEQ ID NO: 124572 - DNA, 1917 bp, Homo Sapiens
  misc_feature (101)..(101): n is a, c, g, or t
  misc_feature (1209)..(1209): n is a, c, g, or t
  misc_feature (1797)..(1825): n is a, c, g, or t
gccatgagttcgcgtgtacgagcatcgatgatagcgttcgactgcggagaataggggtaggaggaggtagtggtgagaaatgcatgacccgtgctagcggnatgatggtcgtgtggtccagtggccgctcgcgggagatacgtaggtgtgtctctcgtgcgtccccaccgccttaagggtaggttcggtgtgcgagaacaagtagagtggttttacaaacaaatatcgtccgtacaggattgagggtgtaggaaagagtcgagggggtggatgaagttggtagacctctctaccaactatgggaaaagggttccaccgggagcggagggctgtacatgtgtgttggggggggtgccgtacgggagacaggtgtatcgatgcgagcgcagaatacttttaggggctgaatgtgggtgggggtccgtaggcgcgttccagccggcgggcttaagggcggtgctgaatatatcaaaatgattatttttttaaaggaggaggcttttaatacaaagagggtggggcatagcctgggaaggacttaaataaggaggataagagtgtcaggaaccagcagctgggggtacagggaccctgcggagtgggatgatgcagacagaattccgagcctctttgattctccaccatcggccaagcctgtgctcctgccctaccccagccaccaggaagtccccagagctggagaacttgaggctgttgataaaacccaccagggggatgtcacagagaaggtcaagctgccggaagccttccccacactgccaaagccgcacacaggagctgtgggagcctgtggccacaaggtctgtgttgaggagggctgccaccgacgatatccagaagggctgctccaggcctggctctccccgcagcccgtgagcttcacgctgcagggcaagtggtcgcttcttggagagaccccacaaggccacagagccatcgtccgcgccggacaccatgtgctcctcattgattaggtggatgcagtcgatggagccctggtggccatagaagacaagctgggactcctcggggatcttccacacacgtacagtcccatcccggcccccagccgtcacacagcactcccggctcaaggcatccagtgcagccacagcgtcctggtgtccgaagagcgtctccacgtaggagttctctgccacattccacaccttcacggagcgatcgtgngatgtgctgtagagctggtggtgcctctgcggaatgccagacccgacactgcatcccggtgtcctgtgaaggtgtacaagtgctggcagctctgggcctcccaaatgagaatgagcttgctgcggtcaccagaggcaaggtacttgccgtcggaggagatggccatgcagaggacgtggctgctgtggccagggggctttccctcggcacccttcttggctcgaggaatcacatgcagcttccgtccactctccacgctccctgcagttgggggtgggggagaagctaacttaatgatgctgcagtctttggcagcagagaagatggctgagtcatcgggggtgacgaccaaacatgtgatagagagctggtgcccccgtaaaacgcgaatgtcagctgaggctggggcctggatctcttttgccaccaacttctgcagcctgcccctctgctcaagcacatcctccttcaggcgccccgccacctggtcctcctcaaatgcacgggcctcagccttctcctcctcttgctgacggagctgctctaggtagagcttggccaagcgcagcttcttttcctgtgcagttnnnnnnnnnnnnnnnnnnnnnnnnnnnnnaggcttccttggagctaggctctcgctctcagagtcgctggagatctcctcattcatcttgccgccacccttggattgcccctgtcccccgc

SEQ ID NO: 124573 - DNA, 350 bp, Homo Sapiens
gcatgagggggtgcttgaaggaggatgtgcttgagcagaggggcaggctgcagaagttggtggcaaaagagattcaggccccagcttcagctgacattcgcgttttacgggggcaccagctctctatcacatgtttggtcgtcacccccgatgactcagccatcttctctgctgccaaagactgcagcatcattaagtggagcgtggagagtggacggaagctgcatgtgattcctcgagccaagaagggtgccgagggaaagccccctggccacagcagccacgtcctctgcatggccatctcctccgacggcaagtaccttgcctctggtgaccgcagcaagctcatt

SEQ ID NO: 124574 - DNA, 1090 bp, Homo Sapiens
  misc_feature (101)..(147): n is a, c, g, or t
  misc_feature (982)..(1016): n is a, c, g, or t
tgggcacggcatacagcttcccccgttttttcccttccttccttgttgccttcttccaggtcgccccaagggactttggcgccccggatggtccctcggtnnnnnnnnnnnnnnnnnnnnnnnnnnnnnnnnnnnnnnnnnnnnnnnttcaaaatatttaattgtattttttgtttgtggcagcaactcaacagattctgctgctgggaagggcctcagcgttcctgaagagagatgtaggggacccactggttgttgccccggctttcttcgcagtagctggccacctccaccaagccgtggctcttccaggcgtccgtgtgagggttcgtgaccaggagacaatgcaggtctcgggcctcggtggtgccctgggtctcggccggctctcccaggagctgcgccaggcgctgcatgcccgacacccgcacgatgttgatgtcgttgtcacagcagaaggactggatgagcgtgaagtggatttgcagggcgatgtcatcctcctcctcctcgtcaatggccaagaggcagaggaccacgctgtctgggtccacattcatcaacttggccgactcgtacacccccactgtgaggcgatcctggcgctgagcggccaccaaaagctcctccaccgcggcggtcaccgtctgcatcttctgcgccgcgttgtcgcacgccacgagctcttccagcgtcatgttgcaattataatccacagtggatgcggctccacggcagtccccagggagaaattgcaaaatccgagccagagagcccaaaaccttcccacagagctagagcgctcgtccaagaccttcgggaagcagcgaaatccttccagaaaaggcggaaaaatatattgcaaagtccttggcgaggataatccaggaagttgcggaaaccaacggtagtccgacgcttcggcgatctccccggccgtaatggccgaattcccgggcatatgtccggtaccgtcgactgnnnnnnnnnnnnnnnnnnnnnnnnnnnnnnnnnnncggccgcttcctcgctcactacttcgctgcgctcgtcgttcgctgcgcgagtagcgccctatatgatctatcat

SEQ ID NO: 124575 - DNA, 754 bp, Homo Sapiens
  misc_feature (568)..(594): n is a, c, g, or t
tatttgaggctttagaaatttattacaaggccctcatagtagaaataaaaatatagatatctatgcttcccatctcgctctcagtggttcgaataacaagtgcaagtaacaaaatagattgtctctataattcgcaaactgggagttcatgggtacagagcaacttcagccccagctcccaagtcccaaagtgtggtcttgtcgagggtgcagacaaggaccaaccaagttcaaccaagtctctcgtatgcagacgccagctccagtctcaaggagggtggggcttgcagtcagtctcactccacccccgagtggacagtctggaccctccgtgatggggaaggcggcagcgtgccccgccactccggcttctgctccatcccaaggcctcagcttcgggggtcctgtctcctgctggcctgggtccccccttctccatcggatcggcggccgccagctcctggatctccgccctgggggcggccgctcactccccttctcctcctcctcttcctcttcagtctccaacgactctgcccccgatggtcctcgtggtctggttgttttnnnnnnnnnnnnnnnnnnnnnnnnnnnttcaaatatttattgtatttttttgtttgtggcagcaactcacagattctgctgctgggaagggcctcagcgttcctgaagagagatgtaggggacccactggttgttgccccggccgtaatggccgaattcccgggcatatgtccggtaccgtcgactg

SEQ ID NO: 124576 - DNA, 974 bp, Homo Sapiens
tttttttgaaacctaaaaatgtattttattttgaagttgtgctttggattttccccaatccaacatctgttgagtgacagtcttaggttcacacaaagcatctccaagcatacatacaatattccagttatcaacactattttaaagaatataccattttacacaaatgtgacatacaagtcagacgccacaacattgcgattccctggaagatgtgacttctcttctgcatgggaagtagatctgcaccagcccttccagtgctctgcgcatcccggtgctggcatcaccgctcctcatctccttggggagaagccagggcgccctgaggaggttggctgagaccagtgtttccagtttacaggctgctggctacaaactcctctattttctaaattgggatgctagtagccccaccccacctctcttccccgaagactgacccttcagagtccacaccaggaaaaggatccatgccatgaggggtggagcagggctctttgaagcatcatgctggtttcggcaagcatagctgaggaaggctggtctccctaggccctggatggccagctccttttggcttttcggtgtaaaaatcacagtgtgcaacctcaattccagttgtttgcagtgagctctgccgagaaggactctcctcctatcggttcctagtcctctcgacaggaccatctcacaggtgttaggagcaccagagatggggaagacagctctgcccccagagctgggtttagtaggtgaccactcacacactgttcagttcatgatgcaaattagcgcggatggacactgatcaaggggatggtgaacacgagtcatgtacagggttgaaagagaaataaggcaggagcaacagaacaggcccaaagtgttgccattaagaaagctttgcttttactttcttagaggggagtgtgctggagagagggagaaagggcaagtgtgggtaccagttt

SEQ ID NO: 124577 - DNA, 1392 bp, Homo Sapiens
tttaattaaagaaatccagtgtctcaaaaacttgtgaaaatgtgtttaaaaaacaaacggccagtgagcctgctacaccattttgcccatatgcctattgtaacttctgatgtcaagagacaatgcaaaagcctctgttttcacaggccctattatattaactctgacttacaactgtacctctctagagaaaaaacagaaaataaggaacaaagggaaggcagttttactagtgagaagatgcaaatcaaaagcaaactggaaagcaagagcaatagtaagggtgagatgagggactggagttgagactgcttgagaaatctggctgtgtagctttggtttgggggactgaggaagaggctggacatataaagtgcaatctacattggtaataaatggtcatccctttcttctgactcctcccccagctggtcatcccccacaccacgatatgctgcaggcacatttcgaggtttagaacggcagacaaagtcacagccatctgctaccaggttgccaagatcctgccagaaggctaagtggggaaactgctccattcctttggctcccactaccagtcgctggtataggaaccccccaacaacataaacagcaaccagtgatgcaaacgtgacaagtaagatggaacccacactgaggtgggagatctctggtgaacaggccaggctgctatccatctcaaagaggtagaaacaatcttggactttgccacgctcctcagacacagggttaaaattgtccgctagggtgtgtcgattgcaggagatcatcaccactgcacgacgctgctccttgccacagtggttgtcatattcatcaccccctttatagatcagcatgatccaattacttccgttgaagatgtgagtctcgttgagtctccctaccactgtctccttcccattacttttgttgatttgcaccaggcctgccccagaagtgtggttgccagcttcccggcacaccctgaagatgtagatgtatgtgtctgaaccctggcccacagtgctctcaaagcttttattaaacagtggtttcagcctcttcactagagccaactctttctctgactctttacccttttctcctaccaagtcgcaagttttttcttctgtctgccaggattctctcactgccacagccaggagtagtagtagcagtccagtcctccagcagctgtagaaagggaacatcgtgtcgtgggaaactggagtagccaaagctcagaatccccagtgaatacccttctggggatgggagacggggccagctaggggccggccgcagaccccggtcccagagctagtttcagaggccagcgttccccctagcgcctcgctgtgccctcgtgccgaattcgccacccaggcc

SEQ ID NO: 124578 - DNA, 967 bp, Homo Sapiens
  misc_feature (639)..(639): n is a, c, g, or t
  misc_feature (788)..(788): n is a, c, g, or t
  misc_feature (790)..(790): n is a, c, g, or t
  misc_feature (895)..(895): n is a, c, g, or t
aatgtttgaaatttatatttcatttctgaaggagaggagacagacccaaacttttatatctttccagttggctgtacaatttctgaaccttgtccttgtagacacctggtcaccggaaaccatcatgtctgtaaaactaccacacagtccagcctccatcctcaactgccgccctcttcctctctgcactggagccggccaggccacctcctccccaaccgtggaacaccatggtgacaggagatggccctggccagggggaggctgctgggactgcacccccatcctgaccagacctccctcctttgtcccctgcagagcctccaaggcaggtcatcctgacactgcaacccactttggtggctgtgggcaagtccttcaccattgagtgcagggtgcccaccgtggagcccctggacagcctcaccctcttcctgttccgtggcaatgagactctgcactatgagaccttcgggaaggcagcccctgctccgcaggaggccacagccacattcaacagcacggctgacagagaggatggccaccgcaacttctcctgcctggctgtgctggacttgatgtctcgcggtggcaacatctttcacaaacactcaggcccgaagatgttggagatctatnggtgagggggggatccgtggatggagttgggaagtgagaatcactttcagcccctcgggggaagaaaaatctgagtccacttgggaagcaacaccaggagccaccttcatcctgaggctccctcttactctccctctcctgaagtcttncnagtcccagctggactcactgctcagagcgggagaggcactagtctcggcacatcagccagactgacggccctggcttgtcctcacataaaattgctgatgccacnagtccaagtctctctgtatctgcggcgaacagactgaggattacatctgcaaagggtgtggacacaccagca

SEQ ID NO: 124579 - DNA, 1245 bp, Homo Sapiens
  misc_feature (1124)..(1158): n is a, c, g, or t
  misc_feature (1162)..(1204): n is a, c, g, or t
ctaagtccaggtgtttgtattcgggctagaaaaggcaatgtcccaagtctctgctgcctgtcacagtccttcagccagggctggacctcaaccctgaggagtcacactgagttccagtgaccaccgtggtggtggccatgccactcatggttgctatggccggaaggcctggggcagcctcctccaagccgctcgcaccccgtaggtgcccatccgctgctggcgcaagtgctggccgaagatgaagcagagcaggacagatgtcacgaacagggacagcaacaccgacaccaccgtgactatgatgaccatctggctgtccgacacaggctcatagatctccaacatcttcggggctgagtgtttgtgaaagatgttgccaccgcgagacatcaagtccagcacagccaggcaggagaagttgcggtggccatcctctctgtcagccgtgctgttgaatgtggctgtggcctcctgcggagcaggggctgccttcccgaaggtctcatagtgcagagtctcattgccacggaacaggaagagggtgaggctgtccaggggctccacggtgggcaccctgcactcaatggtgaaggacttgcccacagccaccaaagtgggttgcagtgtcaggatgacctgccttggaggctggtacacgctgacgttggaattcattgactcctgcttcccggagcaggtgaagtggcattggaggaccgtgtcatgggagatgtttgagaccaagtaatgtttccactgagcctgttcgtccagcagaatcttatctagagaggtctccagaccacccacttcaggctggttacaggtggtgctgcagttgacctcgagggaccctttgggctcaaccgccagcttctttggcctcacgtgtacctcgaataccttctcatccgatcctggacagcagatcagggtgaagagggccacagtcagggtcctgtaaccgaaagaggacatctctggcagtctccacgggctcgcagggaccagccaagggctgcctggagggagatggtgggcgcaggtctgagctatggcccagaatccctcccggccgtaatggccgaattcccgggcatatgtccggtaccgtcgactgnnnnnnnnnnnnnnnnnnnnnnnnnnnnnnnnnnncggnnnnnnnnnnnnnnnnnnnnnnnnnnnnnnnnnnnnnnnnnnnaagacgagctagcgccctatagtgagtcgtatacagtctga

SEQ ID NO: 124580 - DNA, 1264 bp, Homo Sapiens
  misc_feature (124)..(124): n is a, c, g, or t
  misc_feature (138)..(139): n is a, c, g, or t
  misc_feature (147)..(148): n is a, c, g, or t
  misc_feature (688)..(688): n is a, c, g, or t
  misc_feature (720)..(720): n is a, c, g, or t
  misc_feature (722)..(722): n is a, c, g, or t
gggtccggaattcccgggatccggaagtgttgtggccgccgccgccgcgcgtcgcggaggcacgtgtggagccccggcagcaggagcgtcgcaggtccttggcccttgccagacattagcaccnatgacgcttctggnntggcatanncgaggagctgatcaaggagggtgacacggccatcctgtcactgggccatggtgcaatggtggcagtgcgtgtgcagcgtggggcacagacccagacccggcatggtgtcctgcggcactcagttgaccttatcggccgccccttcggctccaaggtgacgtgcggccgaggtggctgggtgtatgtgctgcaccccacgcccgagctctggacgctgaacctgccgcaccgcacgcagatcctctactccacagacatcgccctcatcaccatgatgttggagcttcggcccggctctgtggtctgtgagtctggcaccggcagtggctctgtgtcccacgccatcatccgcaccattgcacccacgggtcacctgcacacggtggagttccaccagcagcgggcagagaaggcccgggaggagttccaggagcaccgtgtgggccgctgggtgactgtgcgcacccaggacgtgtgccgcagtggctttggcgtgagccacgtggccgacgccgtcttcctggacatccatcaccctgnggaggccgtgggccacgcctgggacgcccttnanggtcgaaggcgggcgcttctgctccttctcaccgtgcatcgagcaggtgcaacgcacatgccaggcgctggcagcgcgcggcttctcagagctgagcaccctggaggtgctgccacaggtctacaacgtgcgcactgtcagcctgccaccgcccgacctgggcacaggcacagatggccctgccggctccgacaccagccccttccgcagcggcacgcccatgaaggaggccgtgggccacaccggctacctgaccttcgccaccaagaccccaggctagggggccgcctcccagggcaccagggagctgggagcactgaagggctgggcagggaggccagaggcaccttatatggtcagcgatgcctgccagacacagacggtggggtggggcttgggggcctcctgggtggccagagtgggacagcaggaagggcggctgtgatggaggagcagtgctggggctgggcctcagccattcctgtccagccctgtggcccatcccagctgctgtttgttgccaatatgaagtatccactgcc

SEQ ID NO: 124581 - DNA, 963 bp, Homo Sapiens
cggagagccccgccccggcccgggagggccccaaccggggttctgggcaagtccagacccgtgggccccggccccctacagggcgccccccggaaagggctggtgtcggaccgcgcaggcccatcggggcctgtcccaggtccgggcggtgccaggctgacagggcgcaccgttgaagacctgggcagcacctccagggtgcctcagctctgagaacccccgcgctgccaagcgcctggacatgtgcgttgcacctgctcgatgcacggtgaggaagagcagaagcgcccgccttcgaccttgagggcgtcccaggcgtggcccacggcctcccagggtgatgggatgtccaggaagacggcgtcggccacgtggctcacgccaaagccactgcggcacacgtcctgggtgcgcacagtcacccagcggcccacacggtgctcctggaactcctcccgggccttctctgcccgctgctggtggaactccaccgtgtgcaggtgacccgtgggtgcaatggtgcggatgatggcgtgggacacagagccactgccggtgccagactcacagaccacagagccgggccgaagctccaacatcatggtgatgagggcgatgtctgtggagtagaggatctgcgtgcggtgcggcaggttcagcgtccagagctcgggcgtggggtgcagcacatacacccagccacctcggccgcacgtcaccttggagccgaaggggcggccgataaggtcaactgagtgccgcaggacaccatgccgggtctgggtctgtgccccacgctgcacacgcactgccaccattgcaccatggcccagtgacaggatggccgtgtcaccctccttgatcagctcctcgtatgccacgaagctcatggtgctaatgtctggcagggccagacactgcgacgctcctgcctcgtgccgattcaacaccagcctcgtactg

SEQ ID NO: 124582 - DNA, 682 bp, Homo Sapiens
aatggcattttgtattgccacagaggtaggatgagccatatattagtgaaatgttttattttgtaaaatataaatggattatttgccatcattagtacctctcaacttactttttagaggacaagaaacaatctgtagattggtttccatacagggaagttctccgtcctatgcaatgtttctaattaatttgcttaattctgagccattaatcctgctacactttgaatgatacattaattcagactaatctttgggggctttattttgtaagttagaactttcaagggaaacatgttcaacactattattttgttataaatttataactttgttattacattgtgtaacaaatataaggtttacgagctatgagaattggtgctatcaccattagctatttgctgtaatgtcaagaaaatgttcaccagatgcaagaatgtaccttttctttttagaaagccaaatgtactttagacatgaatgcaactatttaaagaatagcttcatcaatgttattccttacatgtcataagattcttacttaaacttggtcttctttcaaattgtttgtatgaagatgctgtacccacttgaacagtccgtcaggttgtttacataaatactatgttttacagttttcatattttaaaatattaataaagttaaatcacaatagttc

SEQ ID NO: 124583 - DNA, 686 bp, Homo Sapiens
  misc_feature (452)..(504): n is a, c, g, or t
tgaagcacaatatccatttttggaaaatatttattaaaaaactagtgaatgtggcagaaaaacaaaaccaacacacagctttaaatagcaagcatatgacacaccggttataaagcttttccaactctactgatttagtctttcacaccagctactgttgaggagggcttccgagggaagccacgtgtaaacgggtcatctgtactagtggtgagcaaaactaattacatgagaactatcaatggccatatgacttgctttcctaggcaatccacccaaaacataggtgagtggccaaatctcaggcgtgcgttcatgtggatctatagttctagttttaatttgagggttgggggaagttaggggatgaaacagtagaaagacaaacagtatcggcagagggcaaccttaaagcacctttaaaatctggaccctttcccacaatttaaccnnnnnnnnnnnnnnnnnnnnnnnnnnnnnnnnnnnnnnnnnnnnnnnnnnnnnttggcaggctccctaaatctgcaattttaagataagcactccgggtgattcagtgtctattagccagccatccaatttcagaaacactgtttacaatgcattaaaacaattcctacctcccacaaacaaaagtaaaggaatctgctgacagtcactgtgcttttgtcaatgtcaaggggaca

SEQ ID NO: 124584 - DNA, 668 bp, Homo Sapiens
  misc_feature (443)..(495): n is a, c, g, or t
atccattttgtggaaaatatttattaaaaaactagtgaatgtggcagaaaaacaaaaccaacacacagctttaaatagcaagcatatgacacacctgttataaagcttttccaactctactgatttagtctttcacaccagctactgttgaggagggcttccgagggaagccactgtgtaaacgggtcatctgtactagtggtgagcaaaactaattacatgagaactatcaatggccatatgacttgctttcctaggcaatccacccaaaacataggtgagtggccaaatctcaggcgtgcgttcatgtggatctatagttctagttttaatttgagggttgggggaagttaggggatgaaacagtagaaagacaaacagtatcggcagagggcaaccttaaagcacctttaaaatctggaccctttcccacaatttaaccnnnnnnnnnnnnnnnnnnnnnnnnnnnnnnnnnnnnnnnnnnnnnnnnnnnnnttggcaggctccctaaatctgcaattttaagataagcactccgggtgattcagtgtctattagccagccatccaatttcagaaacactgtttacaatgcattaaaacaattcctacctcccacaaacaaaagtaaaggaatctgctgacagtcactgtgcttttgtcaatgtc

SEQ ID NO: 124585 - DNA, 759 bp, Homo Sapiens
  misc_feature (431)..(483): n is a, c, g, or t
ggaaaatatttattaaaaaactagtgaatgtggcagaaaaacaaaaccaacacacagctttaaatagcaagcatatgacacaccggttataaagcttttccaactctactgatttagtctttcacaccagctactgttgaggagggcttccgagggaagccacgtgtaaacgggtcatctgtactagtggtgagcaaaactaattacatgagaactatcaatggccatatgacttgctttcctaggcaatccacccaaaacataggtgagtggccaaatctcaggcgtgcgttcatgtggatctatagttctagttttaatttgagggttgggggaagttaggggatgaaacagtagaaagacaaacagtatcggcagagggcaaccttaaagcacctttaaaatctggaccctttcccacaatttaaccnnnnnnnnnnnnnnnnnnnnnnnnnnnnnnnnnnnnnnnnnnnnnnnnnnnnnttggcaggctccctaaatctgcaattttaagataagcactccgggtgattcagtgtctattagccagccatccaatttcagaaacactgtttaaaatgcattaaaacaattcctacctcccacaaacaaaagtaaaggaatctgctgacagtcactgtgcttttgtcaatgtcaagggaccaatatgggaaggcaggcaggaaggggcctcccattcctaacacactgatctatagaagccctgtgcaacagcctgtcaagtgttgtttagggagt

SEQ ID NO: 124586 - DNA, 490 bp, Homo Sapiens
ttttcatttttggaaaatatttattaaaaaactagtgaatgtggcagaaaaacaaaaccaacacacagctttaaatagcaagcatatgacacaccggttataaagcttttccaactctactgatttagtctttcacaccagctactgttgaggagggcttccgagggaagccacgtgtaaacgggtcatctgtactagtggtgagcaaaactaattacatgagaactatcaatggccatatgacttgctttcctaggcaatccacccaaaacataggtgagtggccaaatctcaggcgtgcgttcatgtggatctatagttctagttttaatttgagggttggggggaagttaggggatgaaacagtagaaagacaaacagtatcggcagagggcaaccttaaagcacctttaaaatctggaccctttcccacaatttaacccagtaattctcaaacattactgttgaaaagaatcacctgatgagactg

SEQ ID NO: 124587 - DNA, 974 bp, Homo Sapiens
  misc_feature (799)..(799): n is a, c, g, or t
  misc_feature (868)..(868): n is a, c, g, or t
  misc_feature (909)..(909): n is a, c, g, or t
  misc_feature (926)..(926): n is a, c, g, or t
  misc_feature (935)..(935): n is a, c, g, or t
  misc_feature (952)..(952): n is a, c, g, or t
ttacggctaggtacgaggcctgggtgtgtgaattcggcacgaggcacttcctgctgttcctgccaccgctgctgctgctgctggacgtccccacggcggcggtgcaggcgtcccctctgcaagcgttagacttctttgggaatgggccaccagttaactacaagacaggcaatctatacctgcgggggcccctgaagaagtccaatgcaccgcttgtcaatgtgaccctctactatgaagcactgtgcggtggctgccgagccttcctgatccgggagctcttcccaacatggctgttggtcatggagatcctcaatgtcacgctggtgccctacggaaacgcacaggaacaaaatgtcagtggcaggtgggagttcaagtgccagcatggagaagaggagtgcaaattcaacaaggtggaggcctgcgtgttggatgaacttgacatggagctagccttcctgaccattgtctgcatggaagagtttgaggacatggagagaagtctgccactatgcctgcagctctacgccccagggctgtcgccagacactatcatggagtgtgcaatgggggagcgcggcatgcagctcatgcacgccaacgcccagcggacagatgctctccagccaccacacgagtatgtgccctgggtcaccgtcaatgggaaacccttggaagatcagacccagctccttacccttgtctgccagttgtaccagggcaagaagccggatgtctgcccttcctcaaccagctccctcaggagtgtttgcttcaagtgatggccggtgagctncggagagctcatggaaggcgagtgggaacccggctgcctgcctttttttctgatccagacccttggcanctgcttacttaccaacttggaaaattttatggcatcccatnaaagcccagatacacanaatttccancccatgattcaaggatnctggttccactaaggaattggg

SEQ ID NO: 124588 - DNA, 1386 bp, Homo Sapiens
  misc_feature (145)..(145): n is a, c, g, or t
  misc_feature (302)..(302): n is a, c, g, or t
  misc_feature (322)..(345): n is a, c, g, or t
tataatttttccctttaagaggctttttaaatcttctggtaaggtaagttttgttcccaaattaagtttccccacccccacgaaggtaaaggttccctttcaccaaaagatcccccaaagttagccagtttttcccccagtccanggaggttggtaaaaagggaccgggccaggtgccctaagtttataaatacgggctcccttttaggggcccccttttgtccaaaaaaagcttggggtcgcggtaaactttgggcccccttgagggataactctagagcgggccgcccttcttggagggnccgaggcggccggacatgtnnnnnnnnnnnnnnnnnnnnnnnntttgcttattaaactagttttactttagcaccattcttagtggagcaggattcttgatcatggggtggaattttgtgtatctgggcttcatgggatgcataaaattttccagttggtaagtagcaggtgccgagggtctggatcagaaaaaaaggcaggcagccgggttcccactcgccttccatgagctctccgcagctcaccggccatcacttgaagcaaacactcctgagggagctggttgaggaagggcagacatccggcttcttgccctggtacaactggcagacaagggtaaggagctgggtctgatcttccaagggtttcccattgacggtgacccagggcacatactcgtgtggtggctggagagcatctgtccgctgggcgttggcgtgcatgagctgcatgccgcggtcccccattgcacactccatgatagtgtctggcgacagccctggggcgtagagctgcaggcatagtggcagacttctctccatgtcctcaaactcttccatgcagacaatggtcaggaaggctagctccatgtcaagttcatccaacacgcaggcctccaccttgttgaatttgcactcctcttctccatgctggcacttgaactcccacctgccactgacattttgttcctgtgcgtttccgtagggcaccagcgtgacattgaggatctccatgaccaacagccatgttgggaagagctcccggatcaggaaggcttggcagccaccgcacagtgcttcatagtagagggtcacattgacaagcggtgcattggacttcttcaggggcccccgcaggtatagattgcctgtcttgtagttaactggtggcccattcccaaagaagtctaacgcttgcagaggggacgcctgcaccgccgccgtggggacgtccagcagcagcagcagcggtggcaggaacagcagaagtggcgacagggtcatcgcagcaggggcaaaggtgtggcgactgccccggccgtaatggccgaattcccgggcatatgtccggtaccgtcgactg

SEQ ID NO: 124589 - DNA, 1111 bp, Homo Sapiens
  misc_feature (992)..(1026): n is a, c, g, or t
tggacaggttctgatcatgggtgaaatttgtgatctggcttcatgggagcataaaatttccagttggtaattagcaggtccgaggttctggatcagaaaaaaggcaggcaccggggttcccactcgccttccatgagcttctccgcagctcaccggccatcacttgaagcaaacactcctgaggagctgttgaggaagggcagacatccggcttcttgccctggtacaactggcagaacaagggtaaggagctgggtctgatcttccaagggtttcccattgacggtgacccagggcacatactcgtgtggtggctggagagcatctgtccgctgggcgttggcgtgcatgagctgcatgccgcggtcccccattgcacactccatgatagtgtctggcgacagccctggggcgtagagctgcaggcatagtggcagacttctctccatgtcctcaaactcttccatgcagacaatggtcaggaaggctagctccatgtcaagttcatccaacacgcaggcctccaccttgttgaatttgcactcctcttctccatgctggcacttgaactcccacctgccactgacattttgttcctgtgcgtttccgtagggcaccagcgtgacattgaggatctccatgaccaacagccatgttgggaagagctcccggatcaggaaggctcggcagccaccgcacagtgcttcatagtagagggtcacattgacaagcggtgcattggacttcttcaggggcccccgcaggtatagattgcctgtcttgtagttaactggtggcccattcccaaagaagtctaacgcttgcagaggggacgcctgcaccgccgccgtggggacgtccagcagcagcagcagcggtggcaggaacagcagaagtggcgacagggtcatcgcagcaggggcaaaggtgtggcgactgcccccggccgtaatggccgaattcccgggcatatgtccggtaccgtcgactgnnnnnnnnnnnnnnnnnnnnnnnnnnnnnnnnnnncgtccgcttcctcgctcacatgacttcgctgcgctcgtccgttcggctataagcgatagcccctatatgatctatacatacttcg

SEQ ID NO: 124590 - DNA, 761 bp, Homo Sapiens
ttagcgggtaacggcttttcgaagttatcggggccctcatttgggtgctccggccggttttcccactgttggtccaagaaaacgtgtggccccgggatccaccctatgtggccacaggccacagtttgcgaacaccttttctcccgcgccccggcatttgagtggcgtccggagttttgtttagtggttatttcagttgctatagttttttgactaagggcttattaaactagttttactgttagcaccattcttagtggagcaggattcattgatcatggggtggaattttgtgtatctgggcttcatgggatgcataaaattttccagttggtaagtagcaggtgccgagggtctggatcagaaaaaaaggcaggcagccgggttcccactcgccttccatgagctctccgcagctcaccggccatcacttgaagcaaacactcctgagggagctggttgaggaagggcagacatccggcttcttgccctggtacaactggcagacaagggtaaggagctgggtctgatcttccaagggtttcccattgacggtgacccagggcacatactcgtgtggtggctggagagcatctgtccgctgggcgttggcgtgcatgagctgcatgccgcggtcccccattgcacactccatgatagtgtctggcgacagcctggggcgtagagctgcaggcatagtggcagacttctctccatgtcctcctcgtgccgaattcgccacccagcctcgtacctagcca

SEQ ID NO: 124591 - DNA, 821 bp, Homo Sapiens
  misc_feature (194)..(210): n is a, c, g, or t
gggggtaaagggagaaaccgggggtttatatttttttccccaaagaggggttttccccctatagggccggggtgaccccagggggccccaaaatattttctttccgggtgtggcttggagaaaaaccttttttgttccccctttggggcgttttggggctgtcccatagaagctttccattccccgcgggtttnnnnnnnnnnnnnnnnnttttccaatgaataaggtttttgggggggacaaaccccttgggggggtaagaaagcttcccaggccaataagggggcaagaattttctttttcccatggtcccttccaaatttttttcccatgccagaacaatggtcaaggaaaggctaagctcccatgtccaagttcaatccaaacacgcagggcctccaaccttgttgaaatttgcactcctcttctcccatgctggcacttgaactcccacctgccactgacattttgttcctgtgcgtttccgtagggcaccagcgtgacattgaggatctccatgaccaacagccatgttgggaagagctcccggatcaggaaggctcggcagccaccgcacagtgcttcatagtagagggtcacattgacaagcggtgcattggacttcttcaggggcccccgcaggtatagattgcctgtcttgtagttaactggtggcccattcccaaagaagtctaacgcttgcagaggggacgcctgcaccgccgccgtggggacgtccagcagcagcagcagcggtggcaggaacagcagaagtggcgacagggtcatagcagcaggggcaaaggtgtggcgactgcccc

SEQ ID NO: 124592 - DNA, 603 bp, Homo Sapiens
tggagcagcatgggggtcagacccctgctccagggccacttgagttgtgggcccaggagccctgcggctgccggcaggtgaactgagtgcccgacagctgagaccggcgcccacccgtcctgagcatagctctgtaggcagtgcgggcatagcctgcatagtgtcctggcgctgggagttccccgtggacagagccagagggcagtggcgctccctgtcagagctggatcaggccccccatcgaggagggagggcagacggaggcccgagagcctccccaggcctcttcgtgggaaggccccagtaccactcgtaggaggtctcagctctggcatggctgccccggatgtggccgagggggcttcaccctgtgtccttaggagggggtggccttgaggcagagccgtgcctcactgacccccaggggcctcatcctccccatggaatgggctgtatgtcctgccccaacttggcccgcagcaggccagacccccctacccccgcccagagctcagtagccagcctgggtcctgccagggcttctcgagggcttgggggaagaatagatttagtaaagcaggaagatctgttgttacttaacag

SEQ ID NO: 124593 - DNA, 812 bp, Homo Sapiens
  misc_feature (719)..(719): n is a, c, g, or t
tttttttgcttttaaaagtccttttaatacagcatgaagaggctatatttctataggcgagccgtatacagattctccaggaataaggcacacaacggaatgccatcccaagggctgcacttcggagacgtcggagccttctccacgcaccttccgagctgggcccacgggttctgttttgtctttttagctggactcacacgtatggacagacacagacacggacggggtcaccgcatgggggcggaggaggtcggacggcaaggttggcaacagagaaggataagtccgctgccacagcccccaggggaccgcttggccatctcgctgaaggctggaacacccccatttcagggttagtcgttggactgagctacaatgtagtgaggttggattaaatattcgtttagagtagattcaagtctattagatgctggagggctggtgtaagggctccggttgacatttccaagttcaaggagcatggcctggaggaggcgtggctcagatggcaaagctcccgagcggcgaggccaggctttgccccacttcttcttccctcctggggccctgctgattgagagccctcccaccaagccaagacgctggtggaccacagaggggctggttagtcaaataagctgcttcttccccttgcccactcccctgtccctctacaaattaataaaccgtatacaagataagaagaagaaggtgcngagaatggattacaatgctgtttgtcgacgcgtgggtcgacgatatcccgggattccggccgtccgccgctttttaccactgttattgttcta

SEQ ID NO: 124594 - DNA, 629 bp, Homo Sapiens
cgcatctttgaaatgatttattgttcacttttgcacacgcgtgctgaggacagggcaggtccagcctggggcctgctccccactgcagcatttccaggcccccagagtgggccgaagggggacatgggcgtgtctttccacattaagtagcaggagattccctgagtaaaaggcattttcttaagtaggacgtgtccaggctccagcagcagtcctgggggtgggggttgtgggccttcaggccagggcactgcccatgacttcggagaagccacctggtgttccaggtgctgctggctgaggctcctgcagctcaggctgggcctctttccaggccagagacttctccaatttggttttaaaaagcaatccgtgacctgggcagtctgcagtctctttggaggctcgcttcttgcagcagccgcggcacaggctgaacacacatctgttgccctgggcacaggaaatctcgggagcctgtggccagcaccactcccggggccaggctggccagcaggggagcagccccactggggaagcctctgccagatgcccacggcctggatgcagccctgggaactgctctcaagccagatgcctctctctcaccccaacccacccagactctc

SEQ ID NO: 124595 - DNA, 910 bp, Homo Sapiens
catctttgaaatgatttattgttcacttttgcacacgcgtgctgaggacagggcaggtccagcctggggcctgctcccccactgcagcatttccaggccccccagagtgggccgaagggggacatggggcgtgtctttccacattaagtagcaggagattccctgagtaaaaggcattttcttaagtaggacgtgtccaggctccagcagcagtcctgggggtgggggttgtgggccttcaggccagggcactgcccatgacttcggagaagccacctggtgttccaggtgctgctggctgaggctcctgcagctcaggctgggcctctttccaggccagagacttctccaatttggttttaaaaagcaatccgtgacctgggcagtctgcagtctctttggaggctcgcttcttgcagcagccgcggcacaggctgaacacacatctgttgccctttgggtttccacactggtcacactttgcatattttggcttcagagaggggtcgaaggtcttgtgggggttcctcagctgcttcttttgcttgttcttggacaggacctccgtgccaccctcctcttcctccagggcccgcttgctgcgcgcacctgccttctccttgctcccctccctgggccccggccggatgtagggctggcagatccagtggaagggcaagtcgccggtgggcttcgctccctcctgcctggatatctcctcctgacaccgcagcttcagctcctggctcacagcagcgatgccctccagggtcttcaccttggccagctcctctcgcagctcctggtgcacctgcagcgtgtggtgccacagcttgaagaggtgggcccggacgtaggacagggggcaggggtgctcctcgtgccgaattcgccacccaggcctcgctcc

SEQ ID NO: 124596 - DNA, 974 bp, Homo Sapiens
  misc_feature (907)..(915): n is a, c, g, or t
ttttttcatctttgaaatgatttattgttcacttttgcacacgcgtgctgaggacagggcaggtccagcctggggcctgctccccactgcagcatttccaggcccccagagtgggccgaagggggacatgggcgtgtctttccacattaagtagcaggagattccctgagtaaaaggcattttcttaagtaggacgtgtccaggctccagcagcagtcctgggggtgggggttgtgggccttcaggccagggcactgcccatgacttcggagaagccacctggtgttccaggtgctgctggctgaggctcctgcagctcaggctgggcctctttccaggccagagacttctccaatttggttttaaaaagcaatccgtgacctgggcagtctgcagtctctttggaggctcgcttcttgcagcagccgcggcacaggctgaacacacatctgttgccctttgggtttccacactggtcacactttgcatattttggcttcagagaggggtcgaaggtcttgtgggggttcctcagctgcttcttttgcttgttcttggacaggacctccgtgccaccctcctcttcctccagggcccgcttgctgcgcgcacctgccttctccttgctcccctccctgggccccggccggatgtagggctggccgaatccagtgggaagggcaagtcgccgggggggcttccctccctcctgcctggatatctccctcctgaaccccgcagctttcgcttcctgggttcacggcagccgatgcccctccaggggtcttcacctttgggccagttcctctcgcaagctcctggtggcaccctgcaaacgtgtggtggccaaagccttgaaagaggtgggccccggacgttaagaaaagggggggaaagggggtgcctnnnnnnnnnaatgttccaaaataactcctcgggccaattttccccccgggtaagggtctccgggcccc

SEQ ID NO: 124597 - DNA, 734 bp, Homo Sapiens
ttagagtcatgaccttatttatttacaagcacaggataagtccctaacctcccccaaagactgagcaaccctacccagcccagttaaatactgcaactgggggggtaaaaaaggtcgggaggaggaattaagggaaatacaggaataggggaacatatcccacattaaatagttatatacacatcagttcctgtggttctgtacagagcagcggctgaccccacccccacaggacacaatgtggggagaggagactgagggtactgaggccagagccaacctctggtgaagtgcaatagcagcagcaaagtcctaatggtgcacaagagggaggggaacccccagggctacccacccccaccctgccctggaatgtgtaagggacaggaatggctctcagggagcacacaggaaggacaaggctggaaccgtcttcagggcccagttttaagggcaacgttttgcctacttcaccctagacacagcaacccttggaggaaagcagatggtcagcagtgctcttatctgcccctccaaacctaagtgagggcctggttccttcctacctctccccagggaaaaggaaggcagctgcttggcttccttctagaagccccgggagcctttaactaccccagctcccttcgtagtgtcactgtccccaccagggaggggccaggcacagtctgtgggtcatcaggctcaggagaagttctggacagggtggctgaccg

SEQ ID NO: 124598 - DNA, 1051 bp, Homo Sapiens
tttgcagagcatgggttctgggtttaattgggggtgaaagggtgctgcacagttgctcagagggcccatggctgggccgcatgagtgttcacctttgcgactgaacagaggagcgtggcctaactagaaacaattcggccctcgagtctgcctccagcacctggggggacacggggcggctctgctgaccaggccttctctttggaacacccctcccaccacactgccctgggtctgggagcctcccacccctgctgaagtcaattccttaagggagaatctggcggtcgcagccccaactggggatggacagggagtggggaccccagggcccccaatctggaagggccccctcccagccattgtgggaacaataaatactgtgtgacggtggcagggagtggggggttcggccactggctggcgggcaagggggagctggccggcctagccgccctgccctgccccgaggccaggcctgggctccccaccctcactcagtgcggaggatgatgtggatgccggaatccgtgaacacgggcccgctcatctcccccgtccgcagcgcaaacgaggcgtcttcaaatggcttctgcatctgacctctgctgaaggcacccaggtctcccctggccttggctgagctgcagtcgctgaactgtgaggccagagactcaaagtcctcctctcccgacttgatcttctggatgtagccgttgatcagctccagggcctcctccttggtccgggtgatcttctcctgccgccaggacgagggccgccgtgactggctgtgcttcaccagcaggtgcgagcagcggaccctggcaggctccccctgcccgtttttgccaccactgctgctgttgccgctgggccgctcccactggctggcgttagtgatgtggttgaagtagtacactcggcctgagctgcggctcatgcgcttctcccagccgggcggcagcttctcctcgtccgccatcttccctcgtgccgcagcgccctcgtgccgaattcaacacccagcctgtacctagcctattagtta

SEQ ID NO: 124599 - DNA, 378 bp, Homo Sapiens
cagtggttctgggtttaattgggggtgaaagggtgctgcacatttgctcaaagggcccatggctgggccgcatgagtgttcacctttgcgactgaacagaggagcgtggcctaactagaaacaattcggccctcgagtctgcctccagcaccctcactcagtgcggaggatgatgtggatgccggaatccgtgaacacgggcccgctcatctcccccgtccgcagcgcaaacgaggcgtcttcaaatggcttctgcatctgacctctgctgaaggcacccaggtctcccctggccttggctgagctgcagtcgctgaactgtgaggccagagactcaaagtcctcctctcccgaactgatcttcttgaatgtaccgtg

SEQ ID NO: 124600 - DNA, 930 bp, Homo Sapiens
  misc_feature (146)..(146): n is a, c, g, or t
gcagaggaagcggtgggccttaacttggaaacaaatttgggccccttcgagtttggccttccagccaccttggggggaccacgggggcggcttttgctggcccagggcctttttctttggaaacaccctttccccacccacactgnccctgggtctgggagccttcccaccccttgctgaagtcaattccttaaggggagaatcttggcggttcgcagcccccaacctggggatggacagggagtggggacccccaggggccccccaatctgggaagggccccctcccaggccattgtgggaacaataaatactgtgtgacggtggcagggagtggggggttcggccactggctggcgggcaagggggagctggccggcctagccgccctgccctgccccgaggccaggcctgggctccccaccctcactcagtgcggaggatgatgtggatgccggaatccgtgaacacgggcccgctcatctcccccgtccgcagcgcaaacgaggcgtcttcaaatggcttctgcatctgacctctgctgaaggcacccaggtctcccctggccttggctgagctgcagtcgctgaactgtgaggccagagactcaaagtcctcctctcccgacttgatcttctggatgtagccgttgatcagctccagggcctcctccttggtccgggtgatcttctcctgccgccaggacgagggccgccgtgactggctgtgcttcaccagcaggtgcgagcagcggaccctggcaggctccccctgcccgtttttgccaccactgctgctgttgccgctgggccgctcccactggctggcgttagtgatgtggttgaagtagtacactcggcctgagctgcggctcatgcgcttctcccagccgggcggcagcttctcctcgtccgccatcttccctcctccc

SEQ ID NO: 124601 - DNA, 637 bp, Homo Sapiens
tttcctaagccataaaataaattttattccaaaataacaaaataaataatctactgtacacaatctgaaaagaaagacgctctaactgctcagataggtgctgcggtccagcccccagctggaggagaccctgagtccaacccaggcctcccgagggggccagtgaagggatcccacacccaccgcccctatgtagggcagggaagaaattgcaaaggacttgggggatagatgggaatgggagggcaaactgcagcacttgttaaattaattaaagaaacaaaccagaagcacaaaaacggggaaggagaggggagaaggagcaggtccagtgttcccaggcccccaattctgggggcaaatgttgccacttttagctggaccttcccagggaagtccccctttcccccttgtccaaactgagtccaactgctcacaccactggtgcaaacctaaagagaatgggagtgtgttgtgtgagggaggggaaaaccccagatgccctggaggcagagtccttgccccctcgctctgggcaggggtgagggcacacgcaccctcattgtgtcctctctccaggcctctgcttgttattgcttgaagcccacagtcttatgcccatggagcacgtggggag

SEQ ID NO: 124602 - DNA, 942 bp, Homo Sapiens
cttgtatgaccagggctagtggttaagattatataagatttgtcttcctgggaattaagaattagagaccaggggcccccaattgtttcacttaaatgaaatcacccaacttcagcacccctccggtaactccatcagatcccagaaccatggcacggtgtacaccacaagtcacgtagatggagatagcactgtgcactagtctttatgttctcatacagcagctataagcccctgtccctccctgggctccaggctgccagacaagagggccacagtaacgtagaagaagaagagcagctctgtcctcagtcctggagagtctgtgtataagaggagcacgtgaaggtagttacagccgctcaattataatacaggcttaggtaggccacacggttccgatgctttctaaagtctttgtctgtggacagctcagcttttagggttcttttctgtagacatggaacctgagcccagtctggagatccaaatttcattggccaggcaatttttggcggtggcttcttctctgggttgtatgcaccagggctgggatagtaagtgtcctttgggtagttcttaaatcgaggcaccaagacattaaatggagcaaaattttgtttgtgtttttcctgctgaggacttactttctggtacctgcctgcatgaggtgtcatttccttctgtattggcttaaacctcacagctgttctggctcccaaagtatatccttttatactggttgggatcttagataagtcgtatgccaagccatatccatctgaaaaataacacccaggccctctgtggggtgatcccctaagagggacaaacttgttcccaatcaaattcgggggatggaagtgaggaaaaagtttcctctgttgacatgttccaaaagggtagttatccgcagcgtctgctctgctgaagcacatcgcg

SEQ ID NO: 124603 - DNA, 970 bp, Homo Sapiens
  misc_feature (809)..(873): n is a, c, g, or t
tttgtataaggacagatttgaggtttttctgtacttttaatgagctagaaaatgcatactataaatagaatatacaaatgattttacacaaatgaagcattaaaaatcacaaatcttatatttggttatccacagtctataaaataatgttcccaaattatatagtttaaaatacacaatgtttcaagttgcaagacaaaaccagggtagttttggccctaaatcatagctaacataagtaggaattataattaattttataattgtgtttaaattttaaatactctagaatctgaaaatattaaatattaaatagatggagggatcaaattatcaagttttttaacaaaattgaggtaaaaatctgcattaaattacaccaagaaaaacatttctaaaacattgtttccataactcattataaatatttcatcttccgaaagtactctttgattacctctggccttctgggtctggtaattaagttgacttaatatttgcacatagctactgattactcaatacaggcctatcagataaaactaaaatgctgcaacttaatcagaatgatgcaatcttgtcttatataaatatacaaatcacagtatgctgacactagataacttcagctttatttgccaaaggggatttagaatatactacaaaattgtatataaaataaccctttacaaggatttactaggatgactgcaaagaaaggcaaattaaatatacctggtcccatataagaattgttgcctaacctcatatactaatttgaatatgaagactcactttttatttcttannnnnnnnnnnnnnnnnnnnnnnnnnnnnnnnnnnnnnnnnnnnnnnnnnnnnnnnnnnnnnnnngcgtggtcgacgatatcccgggataccggaccggtaccagcccctgcctttgtcttgtgtaaacaaccctgtgttctaactgagtgtcactattgct

SEQ ID NO: 124604 - DNA, 492 bp, Homo Sapiens
tttaaggaaatagctttctgaggtttctttaaaaaccatcctgaaatgcacacagctgatgaagccacgtgacagtgtataaagcagtttaaagatcttaataaacgaggccctcataggccccttgcttgggcccactgcatggtgaaccatgtgcagaaatgtcttcccagctgtgatggtttcacattgtcatcgtcgtccccccgggaggttggagcatcaggggcctggactcactggactctcccctctcagaggtgcggaactatatctgtgacgaatgtggacaaaccttcaagcagcggaagcaccttctcgtccaccaaatgcgacattcgggagccaagcctttgcagtaagtgtgagtcaggaccccccccagggctgtggccctcgcaccttcttatctgcctctgtcccccaggtgtgaggtctgtgggttccagtgcaggcagcgggcatccctcaagtaccacatgaccaaacaca

SEQ ID NO: 124605 - DNA, 2060 bp, Homo Sapiens
aggttttcatgatcgaccgctacctgcagcgccacgtgaagctcatccacacagaggtgcggaactatatctgtgacgaatgtggacaaaccttcaagcagcggaagcaccttctcgtccaccaaatgcgacattcgggagccaagcctttgcagtgtgaggtctgtgggttccagtgcaggcagcgggcatccctcaagtaccacatgaccaaacacaaggctgagactgagctggactttgcctgtgaccagtgtggccggcggtttgagaaggcccacaacctcaatgtacacatgtccatggtgcacccgctgacacagacccaggacaaggccctgcccctggaggcggaaccaccacctgggccaccgagcccctctgtgaccacagagggccaggcggtgaagcccgaacccacctgaggacggcagtgaggatgagcacctctagcagcctggactccgcagtggctgtgtcagcctcacccttcgtgtgcacccgcatgggagggtcggagggtgctgcccgcccttggtgctggaggcgggcttggtgtccggctcaagtagccttcctctgctctgggaccagtggtttattttcccgcaaacgctgagtgacttggggccggacagttcataaataattgattcctttccccactaaagcagtcgaggagatttgtaatccactttttagtgcaacaagagctccatgttatgcttgtaataaattatttacacgggagctgggctggtgtgcagtggcaggtcccgtcagaagagatgaggctcctgggacaggtcagcgtcaggggcagcctgctgtctgctctggagggcggcgctcacctctgggtcgcagtccccacgatcagccagcagctctgccacgtgtgagaagctctttttcgggcaccgaggtattaactgcagcagaaaaagacgagcttttgttatcagttccacggggttgccctgacccttgagctccaggctcctgccagctggaggtgaaactgtgcttgtatccccagccacgaagagctggaccagcttcaagtacatgtccacagcaacatgcaggaaggcctcttccctgatggccgcgtcttcatggaagtaggagagaagactagaggtaaagacatagtgacaaatggctacagactgctggaaaggtagcaggtgatgccaagggatactgctcatctgtggagcagaggcacaggcaacccttcccatctggcgggacccagaggtgctgagatgggggtctgggaaacactgcccagccctgaccagccctgtgggtggaggtacctgtaaaaagcgaaaggcagcagcctggtgtgctgatccggggccacacggaggaggagccgccccagcctgaggtctgcaacaccaagaagtggctcaggcaactctggacatctctgcctattatcagtgctggggacacccctgggggtcgggacgtgtaccctgggaggcctggctgtggggatagtgtggggcgaacagcctgagctgaggatacccaggtacctgtcagcagctgggagaggatgggggggtcgacctcttgcaggagggtgggtgtggtgcagagagaggcagtccccatgataggcccattggtcctggggttgaccagtgagccagtaaattatcttattgctttaaacaagtttgtgcttaatctgtcccaactaaaatggagcttataaacttacttagcaaggaacctcaaggagggctcgttcttaaccatttgcaagatgcctctgaaaagagcggccctccgcatttgtgcctcagcagcgtgtttcttaccactctctgtcaactgaaagagtgccagccaggatatcttcctcttctctaaacactcgaggattgctgcacaaacgtggaaagcctttggcaggtctgtggtgctatttgaggtcagatgtgacgacagcaggcccatcaaggagaagaagaaaaggaaaaccaatagtcgctggcaaactgccggccttcttgtagcttctgcagttcccggggcag

SEQ ID NO: 124606 - DNA, 1945 bp, Homo Sapiens
  misc_feature (215)..(223): n is a, c, g, or t
  misc_feature (444)..(453): n is a, c, g, or t
  misc_feature (455)..(455): n is a, c, g, or t
tatttagagagtgccccgcgacaatttggggaccccgttagctcccggggggagaaaaattttccaaaaggtccatcccccaggaaggccaaatgttcgaaggcgggcaaggcatatccgggttagttttacccctttttccccttaaaaaattttatattttcccccttggagcctttaaaatttccgtagggtaagttgttcccaattatgtnnnnnnnnnaggaggtaagggttccttccccaaagatccccaaacgtaggcagttttcccaatccggagggttgtaaaacggccggcccagttccctaggctataatacgacccactatagggacccacttttcccaagaaagttgggtccccgtaaacttgggcccctcgagggaatagtctagagcggcccccccttagaatggggggtgcttggggatttgtctgcnnnnnnnnnntnggtgtcagtgcaacgcaagggctctttattgtcagcgagagcagcaggccaaacgggcactgaggctccacggggcccaggccctcttccgtggaagagaggcaagaggggtttcaggattcagaggggtcctccgctcacgcagcaccatgcaaatatagagctaaaaactttctgaatgtctctggcttgaaaccaactgggccaacaggttccacaaccactctctttttgatcactgggagacaccaaaaatgctgatagaggagctggtctgagtccacccaggccaaattcttgacaccctcgttagagtccaggtctgtggtattcagttgaaacactaggaaatggaagacacgtccatccgtgcccacgctctgcaccaccacgggctgctccaagaccttggcatcattcccatagaggagccgggcctgagccagggcactgccaaaagcaaacaggatcatcttggcccgcagctgatctggttgaaggcggtgtggtcgtaaattggctttgtccagtaagtacagggtatggggataggggtaaggatagccttcctggaatcctgtgtcatttttcacatcataaatattgcattcatgaagatcgatgatgggtgatatggggtagaaggtctctagaacatgattcttagtagcttcaatctcctctctggaggcgatggtgggcagaggatccttagtgctcagtcgggctccaccagaaccacggacttgaaggagaagagactctcggttccaggtagcagaaaacgtggagttttggacacagatcctcctggccagagaaggatgcttgagaatctgagatttacacagctgtattaggttgtccacgatgaccgggcagtaggtctctctcttggggatttcctcagtggtctgccagagacgggcgtgagagatcacattcagaacgcactcgtcttggttctctatgtggttccttggatcatcaacaaggctaagcactttctcgggaaggccttctattaacttggtcttggtgagccagagggcctgctttacaccctcgagaaggcggcaacggtggtgaaagatatagcaggcctggtctttgtacagcggatgctcgtgaagagggggcgagcggtagaaccttgggtccttgtagccgcggtcccagggcggaaagatcggccgcgccagccagggcacgaagtgcatcttccccgcaaaggtgatgggctccagtccagggatctcgtacaccctatccaggggaggaggctccgacttccgcgtggagcgcacgccccactcatacgccccgcgtctcggggccccgaagcccccaaggccgagctgcccggagccagctagcgcccgccttgcgggcccggacgccaatgccataccgatctgatagcctcaagacctccacctggaccccgccatgcctcgtgccgattcacacacccagcctcgtacctagcc

SEQ ID NO: 124607 - DNA, 1020 bp, Homo Sapiens
aggtagcgaggcctgggtggcgaattcggcacgaggcggcaacatggcggggtccaggtggaggtcttgaggctatcagatcggtatggcattggcgtccgggcccgcaaggcgggcgctagctggctccgggcagctcggccttgggggcttcggggccccgagacgcggggcgtatgagtggggcgtgcgctccacgcggaagtcggagcctcctcccctggatagggtgtacgagatccctggactggagcccatcacctttgcggggaagatgcacttcgtgccctggctggcgcggccgatctttccgccctgggaccgcggctacaaggacccaaggttctaccgctcgccccctcttcacgagcatccgctgtacaaagaccaggcctgctatatctttcaccaccgttgccgccttctcgagggtgtaaagcaggccctctggctcaccaagaccaagttaatagaaggccttcccgagaaagtgcttagccttgttgatgatccaaggaaccacatagagaaccaagacgagtgcgttctgaatgtgatctctcacgcccgtctctggcagaccactgaggaaatccccaagagagagacctactgcccggtcatcgtggacaacctaatacagctgtgtaaatctcagattctcaagcatccttctctggccaggaggatctgtgtccaaaactccacgttttctgctacctggaaccgagagtctcttctccttcaagtccgtggttctggtggagcccgactgagcactaaggatcctctgcccaccatcgcctccagagaggagattgaagctactaagaatcatgttctagagacttcttacccatatcaccatcatcgatcttatgatgcaaatatgatgggcaaaggccagatcagaaggaatctacccatccatacggattatggaagcattagacccggttacaatatgggccaaacacttgttggaaccgacccggcaagaacagttacggtgagacgcat

SEQ ID NO: 124608 - DNA, 989 bp, Homo Sapiens
  misc_feature (693)..(916): n is a, c, g, or t
aaggtagcgaggcctgggtggcgaatcggcacgagggtctctccgggcctccggctccgtatagccgcgcatcctagcccgaagctgatgctgcccggtcggctccggccttcccggctgcctgacccgccgggccccaagccccgggctccggcctgggcccagcggcctggagcgcggccttggcccgtctgcccgccgcctcgccgccacgacttcgcccgtctgtgccccaccggccgcacctttgaataggtagtcgtactcgtcgtcccgggtccccattgtcctggcgcttccggcgggatcggcgactccgcagccccaccacaaacacccgacgggggcggagccggcgccgcgcagagcggcggttgaatggcctatcagcggcgagtggagtagcgacgggcacccagcgaagccaatcagagatggaagtagtgctctgagggtgggcgccgcttggtaccaccctcctcgccctcggtgtcctggagaaaggcggaaggaatgcggacctttttgaagtgacggacgcgccagcctatcaggggcgagctcaagagggcggggcggaagactgcaggaatgaaatggattgacagaccaaataactaatgagaggcttgattgagaacctacccgactatcagaggacctgtcccgggaagagaaatggggctacgtccnnnnnnnnnnnnnnnnnnnnnnnnnnnnnnnnnnnnnnnnnnnnnnnnnnnnnnnnnnnnnnnnnnnnnnnnnnnnnnnnnnnnnnnnnnnnnnnnnnnnnnnnnnnnnnnnnnnnnnnnnnnnnnnnnnnnnnnnnnnnnnnnnnnnnnnnnnnnnnnnnnnnnnnnnnnnnnnnnnnnnnnnnnnnnnnnnnnnnnnnnnnnnnnnnnnnnnnnnnnnnnnnctgggaacatgtttacatggactttgttcactttttaaaacaaactgagggtaacttactagatctgtgaact

SEQ ID NO: 124609 - DNA, 320 bp, Homo Sapiens
ttttttttctgtacaggaagtcagattatacatttcagtaacgggcggggtgacggggacggggcaacagcgcaggggccacagggagaagaagagatcgagagctggggtttggcgtaaatcttacaaagtgtataaagaatctgtgtttctctacattaacaaaaaccaaaggctacaagagcggttgtatatacaaaacacggagatattgcttcacttgcaaacaggttccagaccagatggggagacgagacagaggagggggacagggagggccgagagggcgcgttgcgtgcaggagaggggaggggagaggg

SEQ ID NO: 124610 - DNA, 883 bp, Homo Sapiens
gctggccccctcggttttccccgcgctggtcatgtctctctctcgtgcacgcccgccttcatctcctgtggcttgctagccgccaccgaggccctcaggagggccagtgatccctggccgggccgcccggggacggcaccacgctggtgaggcgccggggtcacaggttctggcagcactgcagcttgttgggtttctgtccagtccgtggtgggcggcacgctgagtgtccaccacgttgttccccggggactcgtcgtgggcagcgcggtctgcgatctgtttctgtgacacgatgcggtagatctctgtgaggatgttcttgaatgcttcctctacgttagtggaatccaaggctgaggtctcgatgaaggacaagttgttcttttctgcgaaggcgcgggcctcgtcagtgggcacagcccgcaggtggcgcaggtcactcttgttgcccaccagcatgatgacgatgttgctgtctgcgtggtcccgcagctccttcagccagcgctccacgttctcataggtcaggtgcttggcgatgtcgtacaccagcagggcgcccactgcaccacggtagtacgcggaggtgatggcgcggtagcgctcctggccagcggtgtcccagatctgcgccttgatggtcttgccgtccacctggatgctgcgggtggcgaactccacgccgatggtgctcttgctctccaggttgaactcgttgcgggtgaagcgcgacagcaggttgctcttgcccacgcctgagtccccgatgagcaccactttgaataggtagtcgtactcgtcgtcccgggtccccattgtcccctcgtgccgaattcaccacccagcctcgctacctagccgtatattcttgttctgtgtg

SEQ ID NO: 124611 - DNA, 1621 bp, Homo Sapiens
  misc_feature (229)..(297): n is a, c, g, or t
cagtaacgggcggggtgacggggacggggcaacagcgcaggggccacagggagaagaagagatcgagagctggggtttggcgtaaatcttacaaagtgtataaagaatctgtgtttctctacattaacaaaaaccaaaggctacaagagcggttgtatatacaaaacacggagatattgcttcacttgcaaacaggttccagaccagatggggagacgagacagaggannnnnnnnnnnnnnnnnnnnnnnnnnnnnnnnnnnnnnnnnnnnnnnnnnnnnnnnnnnnnnnnnnnnncgggcttctccctgcatcaatcaacaggcagaggtgggaggcctgtgcgagctgctgtgtgcggaggagcgggtgggcgctgagagcccggggggtccgcctgccccggcccccgctgcctggttcttcgggctttggcccagagcacggttctgggtggggacgacgggctggctgggccacccggtcacagagggagggaggcaatcgctccctagagtcggccaaggaaaaggggagaaggcggcgccgtccgcccgtcctcctcgcctctggccagccccgtccatcctgccgccctccccaccccgccaagacgctgtggggacccgagtttcatgggtgcagcaaaccggggcttctagcttttccccgggcaggacggggtagcactggctcctgtccttcctgggccccggcccggccgtgcagagctcactgggagggctggaacgagccggccacagagggacagcagggaggggccagaggataccgtggcgggggcgggcggaggacgtgcacgcacgctgggtggaggcgcaggggtcacaggttctggcagcactgcagcttgttgggcttctgtccgtccgtggtgggcggcacgctgatgtccaccacgttgttccccggggactcgtcgtgggcagcgcggtctgcgatctgtttctgtgacacgatgcggtagatctctgtgaggatgttcttgaatgcttcctctacgttagtggaatccaaggctgaggtctcgatgaaggacaagttgttcttttctgcgaaggcgcgggcctcgtcagtgggcacagcccgcaggtggcgcaggtcactcttgttgcccaccagcatgatgacgatgttgctgtctgcgtggtcccgcagctccttcagccagcgctccacgttctcataggtcaggtgcttggcgatgtcgtacaccagcagggcgcccactgcaccacggtagtacgcggaggtgatggcgcggtagcgctcctggccagcggtgtcccagatctgcgccttgatggtcttgccgtccacctggatgctgcgggtggcgaactccacgccgatggtgctcttgctctccaggttgaactcgttgcgggtgaagcgcgacagcaggttgctcttgcccacgcctgagtccccgatgagcaccactttgaataggtagtcgtactcgtcgtcccgggtccccattgtcctggcgcttccggcgggatcggcgactccgcagccccaccacaaacacccgacggggcggaccgccgacgcgtgggtcgacgatatcccggaatccgaccgtaccagcctgctt

SEQ ID NO: 124612 - DNA, 475 bp, Homo Sapiens
ctcccacttttcttcccctggtttgtgattattaggagagaggttttgcaaagactcgttgctgtgaaagaatctttttttaatttttatcctagagtcagtcacttttattccaggtagtcatgctgatctacttatccaaagccagctaaccaggttcatcctaccatcctcatggaagactgtgtgtatgaattggagtaacagaactgaaatacacttaaacagtgacagcagtacttcccagggtgggggccatatttctctgtgtcctactctgagcaacttctcagagatacgagggggctagggttttcccatctgggaaatggggtgaaagtctgcagattgttaaatgaaatatagaatcagagaaaaagaaaagtcagtgatataaatagatcatttcatagaaattagggtagatttttatttcaactactactggagaatttaataaaaggccgcctcgtgc

SEQ ID NO: 124613 - DNA, 661 bp, Homo Sapiens
  misc_feature (366)..(374): n is a, c, g, or t
ttttttttcatataataatttaatatatgccagccaaacaaagtatttgtatctttattcaattaaattaaaacagacctgccaggtatattatataacattcactatatacatatgatttaggcaatgcaagataattctagatatgctgattactcaactatgtgtaaaacatgagcggtgtcagtgatgcccagcaagtgctccttttcacattgggtgcctgcatttccatggtatggttagagggatagctacgagccatgacatggactaccagtaaacttctgtgggagaaggagggaaaatgacaatctagcatagatgaacagtctcctaaatgcaaatagaatagttgacagttannnnnnnnnaaaaagttcttctgtcatgttaatgacacaaaacttctcttttttgaaggcaacaccaccacattttgtttggggtgtgtggggacagtgggggaaaaatgctcttaaaattggtacaattattcctaaaacaacaacaacaacaaaaaagtacctctttgggtgaagcctcggtacccattcagttcaccgtaataatctgtaaacaggcctgtagtacagtgccgggccttgatttcaacaaggtcaggtaccacagcctttcctcacagtcctttgagtgattt

SEQ ID NO: 124614 - DNA, 1597 bp, Homo Sapiens
  misc_feature (63)..(72): n is a, c, g, or t
  misc_feature (264)..(294): n is a, c, g, or t
  misc_feature (297)..(298): n is a, c, g, or t
  misc_feature (1483)..(1517): n is a, c, g, or t
aatttttaaatttcccttaggaagctttaaaatctcggtagggaagtttgtcccaattatgtnnnnnnnnnnggaagtaaggtttctttcacaaaggtccccaaagttaacacgtttccccagtcacggagttggtaaaaacgacggcccaggtgcctagcttaataatacgactccactataggggcccacttgtaccaagaaagcggggtacgcgtaagcttgggcccctcgagggatactctagagcggccgccctttttnnnnnnnnnnnnnnnnnnnnnnnnnnnnnnnttnnttttttgcacttacaaagcagttggggcatttattgacatttaaacaagggaggagatcctgaacactagtctcgctcagtttataaaaacttgaggccaaactctccatcatctgtacacagcttaaccacggccaggagcaagaattcgagttaaacgaattgaaccagtccaaccacaagacgataaagggaaacagggcgtggggatttccagtttttccttttacattacaaagtttccaacacaagaagccaacaataccccagtgctgcaccaagttacttcccactgtttcccaaggcacagtcaattaataatcagtagtccaagttctaagaacatttcctggaaaacaaggacgcacctcccgtggctctatgcatggcctgccactgatgaatcaaattcttaagaacctacgaccgtctgatacccttgaggagagcaccctcatagaatctccagcatcaggcctcagttttcccatctgtaaaagacagccatgcaaagtgggagatccgctaggcttccagatcgaagtcatcgcgctcctcattgtactctagcacgtgccgcttgatcttggacgagtccacccaagtgacaaagtcctccatgctgcgcgtgacaaggaaggcggggtcggtaaccacgtcagggcccacgcgtacgtgcccttgctccacaaaggccacggcagcctgaaggtgctgcgccatgcgcagcttgaggagcacggtggggaggcggcggcggcagaaggacgaggccgtgacgaagtcgcagagctccagcgaaccgcgcgtgggcaccaagccgagagcatacagcttgtccagcagcgcggccgaagcgcgcacgcggaactggtcgcgttcgggcaggtcgcgcaggcgccgcgccagctcacgcacggcacggctcagctggttgtagcgcgtgtagtcctcccgccgctgcagccggtaacgccgcagcacgcgcagctcgtgcaggttgtggtcggtgacctcccagttcaggaagtccacctgcttcagcagcttctgctcgtggaacttaagcttccgcaccatgatggcggcagccgcagccgcaggacccgaagctgagagcgcgttctggcatcccccggccgtaatggccgaattcccgggcatatgtccggtaccgtcgactgnnnnnnnnnnnnnnnnnnnnnnnnnnnnnnnnnnncggccgcttcctcgctcactgactttcgctttgccgtcctccggggttcggtctgcgggcttgaaaagaagcagccgcca

SEQ ID NO: 124615 - DNA, 1019 bp, Homo Sapiens
  misc_feature (727)..(727): n is a, c, g, or t
  misc_feature (833)..(833): n is a, c, g, or t
  misc_feature (856)..(856): n is a, c, g, or t
  misc_feature (868)..(868): n is a, c, g, or t
  misc_feature (889)..(889): n is a, c, g, or t
  misc_feature (892)..(893): n is a, c, g, or t
  misc_feature (950)..(950): n is a, c, g, or t
  misc_feature (989)..(989): n is a, c, g, or t
tttgtgattcagggtaagttgtatttggtgccagaattttaaagagcactattttgacattaaaatgtattcttctctgtattaatggcctacatcttcagagttttcaatgctttctaaaagtttcctctttggaaagaagaaatctgaaagacctatcatgccgttcttcctggcgtctatattttcctttagagaggcaaggtaggattccgtctccaagggagacacatctgagtctaatctggccaagtagcggtaaacgtaggaaaacgtcttgaaggggatgcgagcgggcccgccctccggatcgtccgtgaggatctcgcacaggtgcttcagcgcagtgttcaaggacccaccaagcatgctgcatccaagcgctaaaaagtttatccacttgattttgttttcacaaggatccagttgtaagagcgctttgaatttttccttcggcaggcacaagttcttccacttctgctcaagatctgttaattccacataccgcttgtggtgacactgcttgtgcaaaactttcaggagtccttgagtcaggcctgtgtctgttttctgggttgccgtgggcatttccattctgtcctttacaggaagtggatctcctctcgacagagctgaaaaatagcccgcggaccaccgcagcacgtcggccggctgggtgcggatggcagccttggtgaattgcttcaggatgtccggcagctccggnggaatgtggatctgctgagcgcagacatggtgtcgggaagcggatcgctctccgcagaagggacaagctggtgatcgcgggcgctgcgaggaaaagggcgctgtcngtacacgcggtggaccgctaaancgcgggcttgcngcaaggcgctccatccgtccnganngtgggcggatcgcgggtctaccgctctcgcggctcgggaaatcgacaatgcactcanaacctaactctcgtgcgatctggccgaggcaaatctaangatctataatcgacagtcaacgttccggtg

SEQ ID NO: 124616 - DNA, 715 bp, Homo Sapiens
caattccaaagtttcaatctcattggaattacactgaatttatcagctgatttggggaaaaccagtatgtggacaggaacatgatgtgtatcattgggttgacttacagaatactcttaacaggtcttcagttgattcttaggttttacaggtaggcagttttattgtctacaaataatgacaattataattcttccttatgttcctcatctggcttgttgcaggggttagtagtgccgggacactgctgaataatagcttgcccttggctagtttctgactttaatgggaatgcctgtggcgtctgactctttagaatgccatcactgttggtttctgaaacagacctttatctagattagggtgtttctttccagacttaatttactaagagttttaataagggatggattttaaatcttacgaaataccttttcagcatctatagagctatcataaattcttccctattaattgaagctgaaatgaaggctcctgcacagccatactgcctcctcatatactctacatgcccctagtcccctgtgccaggaactgaatacctctgcagatagactaaaggtgaggcttcaaggtctgcctgctaggcgtggtgctgaacgccttctcaagctgcccaagcacatggagtcttggaggctttcctttccagagaaagaaagtaggaccaatccccactctctgccataataag

SEQ ID NO: 124617 - DNA, 754 bp, Homo Sapiens
  misc_feature (154)..(190): n is a, c, g, or t
  misc_feature (710)..(710): n is a, c, g, or t
ttttgagagtgacaaaaagtttattctgtgcttctcgcagcattaggcaggggataaaactggagagagggcctggtgtggaggtggagggactctgtgggcttcactctggtaggaggagagcatcagggcaggcctttaggctgttgctctnnnnnnnnnnnnnnnnnnnnnnnnnnnnnnnnnnnnncccttagttggcacaggttcggaagggccccaggcagacatgaattctcctgagacttgaggtaggttgcttcagccagcccgggcggagaagaagggcagagagcgaacataggagtccagtcgggagcgaaagagctcactttgcacagtttggcccagcgggcacaggggattcttcaccaccagctccacatacagcgcactgtagatgtggtgcagcacatctcggatgggtcccacgcccaagtcagtattcatgacaactttgatcccagtgggcgtctcgtagtaatggagtttgtaacggctagtttggaaggccaggaagccatccttcatgtctagcggggacatcttgctgacaaacgagcggatagagaagagcatcccgtacatcagcttatactcctcctccttgggaatccctgcttgcttcttgcggtgccattcgctgtagtgcagacacactccattccggtcaaacaggtacaggttgtggacagtcatctgcagggcanggagtgtgagcctcgctccggggccgccccactccttgggctcg

SEQ ID NO: 124618 - DNA, 811 bp, Homo Sapiens
  misc_feature (46)..(65): n is a, c, g, or t
aacaccccaagaagcgaggcctgggtggcgaattccgcacgagggnnnnnnnnnnnnnnnnnnnngagagtgacaaaaagtttattctgtgcttctcgcagcattaggcaggggataaaactggagagagggcctggtgtggaggtggagggactctgtgggcttcactctggtaggaggagagcatcagggcaggcctttaggctgttgctctgggcagggggtgggggtgcgggggcttacagtggcggcccttagttggcacaggttcggaagggccccaggcagacatgaattctcctgagacttgaggtaggttgcttcagccagcccgggcggagaagaagggcagagagcgaacataggagtccagtcgggagcgaaagagctcactttgcacagtttggcccagcgggcacaggggattcttcaccaccagctccacatacagcgcactgtagatgtggtgcagcacatctcggatgggtcccacgcccaagtcagtattcatgacaactttgatcccagtgggcgtctcgtagtaatggagtttgtaacggctagtttggaaggccaggaagccatccttcatgtctagcggggacatcttgctgacaaacgagcggatagagaagagcatcccgtacatcagcttatactcctccctccttgggaaaccctgcttgcttcttgcggtgccattcgctgtagtgcagacacactccattccggtcaaacaggtacaggttgtggacagtcatcggaactgctccgagtgcccgtcaagagttacttccggtttccacggagc

SEQ ID NO: 124619 - DNA, 837 bp, Homo Sapiens
ggggaggggccaaaaaagtttaatttgggggtttctccgcacgcattaagcccagggggataaaactgggagagaggggccttggtttggaaggtggagggaccttcgtggggctccacttttggtaggaggaaaagcattaggggcaggcccttagggctgttgctctgggcagggggtggggttccggggccttacagtgggggccctttagttggcacaggttcggaagggccccaggcagacatgaattctcctgagacttgaggtaggttgcttcagccagcccgggcggagaagaagggcagagagcgaacataggagtccagtcgggagcgaaagagctcactttgcacagtttggcccagcgggcacaggggattcttcaccaccagctccacatacagcgcactgtagatgtggtgcagcacatctcggatgggtcccacgcccaagtcagtattcatgacaactttgatcccagtgggcgtctcgtagtaatggagtttgtaacggctagtttggaaggccaggaagccatccttcatgtctagcggggacatcttgctgacaaacgagcggatagagaagagcatcccgtacatcagcttatactcctcctccttgggaatccctgcttgcttcttgcggtgccattcgctgtagtgcagacacactccattccggtcaaacaggtacaggttgtggacagtcatctgcagggcagggagtgtgagcctcgctccggggccgcccccactccttgggctcgggttcccggacccacagccttccaaccaggtggggaccccacccacggactcaccggaactcccc

SEQ ID NO: 124620 - DNA, 480 bp, Homo Sapiens
ttttcaagcacaaattttagtaagaccacagttagtaaaaggttacagtttttaaaaaatctacaataaggaacaagtgctgggaaataaataacaaagcataacagcaaatagtgccttgatatattaggttaaatatcttttcatttatctcattaaatccatcttttctctaacttggcaaaggttatagcaaaagatgacatttgtcatgtgagtagctcataaaatgggagtggctatgcttctgaatcgcattcacatcaccttctaggcatattacataacacttagctatcctggggttgctccctacgaggttatcagctgatggttccaattttacaactggaaaaatggaaaccttgtccttgtaagtagtcctaatagaaatgtgacttactcatatgctcaacgggccacagagaaacaacatattatgttgtactttaattacatattatgtgtaattaaaataga

SEQ ID NO: 124621 - DNA, 649 bp, Homo Sapiens
tttaacagttgacatgacactcctttattaaaacctagggacattgttataaaaactactgtatataaagacaaaagcagagcaacagcggtcagtgaaaaacacatgattattcttacattctagtattattattaggaatattattggttttggttttcccggttatcagctctcagggagaccccatgcctgctcacatgaagtcagagtttacgggagagaaaatatttccatccccctacccctgcgctgcatgcccttgtccagctggccctggggacgacacatcagccttttgtgggaggtctcctgccttgttaaggtgactgagcccctcacccttgcagcccccacctcgttactgcacattgtcgagacactgaccacttggttatttgactgtgaggtatgccactagctttaaaacgggaaatgggaaaaataggaagaaactgcgtatgagaaactgacatgcaattccaagaagaggctctctcttgggccaccagcttggttccagctgtggccagggtggccatatcatctatagttttagatcctgtgctcagggttggcgctgaccaatgtgggatcctgcacattttggaggctggtttagggtcattcaacagggtacctcattgta

SEQ ID NO: 124622 - DNA, 2837 bp, Homo Sapiens
  misc_feature (1819)..(1819): n is a, c, g, or t
tttttttgggggaagtcatcatttatttgtcttttacatgaaaacagatttgggggagggtgggagagagaacaaggggaggagccagctgcttcgattttctgaagtcggaatgagggcagctgcttcaagacacagatctgggtccccacagtgacatgatgattgtgactggaccggaagcgggttagtgaagcaccattttctcctaagtcttattccaagctaagcaggcttaaggttacagtggaaagtgagagcacacagaggagcggacatgcagcaaggcgacgcagggcaagcagcgaggggtgggtgacccagggagtggctcagttcacgaaaagcgagcgggtgaactccacgtagtcgaacgcggtggggagctcgcggcccttgccgtccacgtagggcttcatgtgggagacgcagtagtcggcttgttcccgggtcaggttctggtagagctcctccttggtcacgtaaggctttccctctgagctgagggcccggaaggcgctctcaatctcctcgctggacttgacgttctcagtttcgcggctgatcatgaaagccatgtattcttgcaaggagacatggccatctctgttcggatccaccgtgtccaggattgcctcgaactcagggtcaggttccccttcctccaccatgggcaggtcatagcccagggagcgcaggcaagatttgaactcctgatggttcagcctgccagacttgtccttgtcaaagtgtttaaacatcatgctgaattcttgaggggcctcctcagtcacacctgttgtgttcctggcctggatctgctgctccaggttgtgctgcatgcgcatgcccagctggtccagctggtcccactgctgggcgaggcccacggtgctgtgctccgtgtacttgttgtccaggatgagggcctcctccatggcggcccccaggtcctcgatctttttgagctgacttctcatggctcggatttcctggtgcttgcgtttggtagcttcaagctgggattcgagggtccccgactcttccaccatacaggacccatcgaggaggtatgtcctggtctcttggatccactggtggaaggcgttggcgtgctgggcaaactcctggcgcagcttgtcgttctcctcctgccgccgctgttccttctgcagctccagctccctctccttgatgattttctgtaggttcctccaggtctcctccagggcctccatggtaaaccaggtgtaggggttggaggctacgcggaagctcttgatctggcggtccagctcggccagctggttgaagtcagcctgggcagagctgagggaggagcggaaggcgtcgtgggcctcgcgcaaagctttgatttcttccaaggagttgcagcgcacggggtctgttaagtcctcctctgcattttcaaaccagctgttgaaggcagaagcctttttggcgaaggtcaggaagaggtcctccaccttgcggaagtgactctgagcctccagaagcttcttcttgcgggcggctgagttggccagaagctggctccacctcttcatgagggaggcgtgccgggcctcgatggccttggactgaacgtgtttggcggcgagaagctgatctttgagggcagtgatgttggcaatgccttcctgctggaaggcctgcagcccagcgtcaaaagtttcctgtttggtgaggagcgtctgcacagaagacaggtctcggccataatcatctgtcttcaagctgttctccttttcaccgatccaggactcccaccacgtccgcctttccagttgaactgaanggaaaggccgagttctcatccagcttcgcctttctctgggctgcagctttctccaggtctgacactttcccgttcaggcccttcatctttgaagagatgttctcctcatggtgattgttcttcttaatgaggtcttgtccattggtgcagacatcattcacgcgatccttgtggacggtgaagtctgtctcaaaagcttcatgtttcttcagtaagccctggatggcggcaagagtgtcgccataatcttcgctggccaccagggtcattttctcattgatccaggcttcttcctcttccacattggctacaaactgctgatattccaaggactcttccagccgctgaccccgggcagctgccagctgcttcagctctttccagtgctccacaaactgcgccagccgctgctggatctcctctttcccgatggtgttgtcatcggacagcttcttgccagtgtccaggacaccctgaatagccggctcatgcgcagccagttctgcttccagccgcttgtgcttcttcctcaggttctgcacgccagttaggtcccggccgtagtcctctgagcccaccagcagcttcttctccttgatccaggactcctcgtcatccatgtcccggaagaactggtgcaggcgatgggattcattcagcttggctcgccgggaggccgccatgctcttgatcttctggaagcgcccgttgatggtgtccctcttgtcctttacttgggaggtgtcgaaggcactgctggtcatcaggctgtctgcctggctgttcaggtccttcaggcgatcctcatgggcagatatatctgcttccagcagttgatgctttttcagccaggttgttcacagaagccaggtctttgccataatcttcggatgccagcagggcctccacctcagacagccagaagtcaaagtccttgatccctgtgttgaagttctgctgcttgttggcttctttcagtttctggctctattccgctgactggtgcaccaagaactgc

SEQ ID NO: 124623 - DNA, 919 bp, Homo Sapiens
tttagttcgggcttggttccccggggtacaggtttctggtaagaagctccctccctggggtcaacgtaaaggcttttcccctctgaggttgaggggcccggaagggcgctcttcaatttccttggctggacttgacggttctcaagtttcgcggctgatcatgaaaggccatgtattcttgcaaggagacatggccatctctgttcggatccaccgtgtccaggattgcctcgaactcagggtcaggttccccttcctccaccatgggcaggtcatagcccagggagcgcaggcaagatttgaactcctgatggttcagcctgccagacttgtccttgtcaaagtgtttaaacatcatgctgaattctttgagggcctcctcagtcacacctgttgtgttcctggcctggatctgctgctccaggttgtgctgcatgcgcatgcccagctggtccagctggtcccactgctgggcgaggcccacggtgctgtgctccgtgtacttgttgtccaggatgagggcctcctccatggcggcccccaggtcctcgatctttttgagctgacttctcatggctcggatttcctggtgcttgcgttcggtagcttcaagctgggattcgagggtccccgactcttccaccatacaggacctaaacgtggaaggacagtgaggaaaggggcctgctcccagctggctgagagctcagaatgaaccttctctcagagagagcaatgcctggcaacctcacattccttttaaggaaaccaaacctaactgcaactggccatctttacctaatgggccccagggatcgagggatggcagggagcatttctcccgttttagagatgggaagctgctgccttggtgtgggccagggctgagcccactcgtcttgctcccaaggccaggatg

SEQ ID NO: 124624 - DNA, 1602 bp, Homo Sapiens
ttcacattagaacaacgtgagtttttattttttctccatttctgggactaaactaaagcccaccacaccccatggtgaagctcgagggtggtgcggggctgctctggcgtctgtgaaggcttatggtgttgggggcgccagctacgtcgggacgcagatccaggccagttgggtctccaggcctcagggcggcagcggaccccggacagcaggccgctctttctttttgtgttggagtcccagggcccgggccaccagccgccgggccacagtcgcatttgtctgtggcctctccttcaccagacgcaggagttttggcctctgcaaggctttgagctttgactgcttggttccctgcgtgaggggccggatcttgagcaccgagaactcccgggtcagggcttccgcagctgaggcccggcagggaaagatgccgagtgcgtgagtatcatccacccactgaatcctgaaccccttctcttggaactcagaaaacgttgccagcaggtcctccgtcttgagcgctggttcaaagtcatagatctctaccacgtgggcaaggtccttctctccaggcagctcctccacgaaggaggatgtgtccaaatggatcttctctatctgaatctccttcttcgtcaggttgtctgtgatctcctgcagcagctcactgttaatcgtcctccgagtagctgctggggccatcctcttccacctcctcttcgtcctcttcctcctctgccaccagcctcttctccagcagactctccttcccctgtgttccaggtctagctgcagggtggacccaaaccgtgtggccatctccaccatgtctcccttgcctgactgactctcaggccccagaggctcaggccaacagggtccagcagtggctcattctcacacctttgtcctgggccctttaggtcctctgttccctgagtcatcagcacagggagtccctgatcagagttggggtctccagcaccaacatctccaggctcttctgggtccctgccagctggggcctctctcttgagcaccgaggtagaggtcagcccccattcttcctgcttgcgcagcacccggggcacatacaaaggctggtcaggcttgcgtccacgataccaccggccagcccgggcacctcggggaaccgcagctgctccttggttggagatgggccgaggaccgtggtacctgctggggcaggaggcaggagcgcggcaggggccagagaggccatccgaactgggtaccctgatgtcctggtgacagatgaccgtcctcctcttccagccctccccaacggagaagctgctcaagagatcaaaattctctgctgttctatggatcaggtaccggaggcgactggagagtggggggaaaagaagaacctttgacagctgcttctgcagcagaaagcggtccagttcctcctggatccggtggacgaagtcattctcggctgaggagaggaagacaccatccaagcagagaagggccagggtgacaggtgggagagccgcggcctctcggcgcgtcgcagccgccctcggcctcgtgccgaattcaacagcccaggcctcgtacctagccttt

SEQ ID NO: 124625 - DNA, 1235 bp, Homo Sapiens
  misc_feature (1080)..(1125): n is a, c, g, or t
catataatttttgaaaatatttatcagtgcaagatactttaaattttaaagttgcagtatcatttttccttggctgaggaccactttaagtctgttgcctttaagaaacgacttacgagtgtttcttagtgctttccttctggtaggattatatcaactaaatgaatgtctctggggacaaaaaactattcttctttcatggtgatcaatattttcctggaaacaaaaggcattctcaatccaatttaactaagatgaatggactgtctcgtctatgatgcaaatgtgactcccaacaaatgtctttgagtgagacgtctagcaatgtgggaaggaagatctaaaaaatctcatgtccaacatggcatgataaaaatccaccaaaaccaaccaaagcttctttgggttaattcataggctgcctggtaagatatttgcttccctgtgctgttagaggcttagatgttgccagccctaaggcaggcttattctttgtgagccgctggaagtttctagaagcattcatttaagtctattttttcaaggttgctgttatgaatttttaaaacatttgtttgactttatgtgtttttccccctcttatcttaaaatacttgacccccaggcatcaggatttatagtttcattcttaaattaactgttcttccttccacttcccttgtgtgactcagtagcaaaataagaaagttctcttgggtcatttttgcatatttggatagaaaaatctcatgcttttggatttggaagattttatccagttcttcctttgggtctcacttgaaagccaatttgtattatttctttcctcaacttatcactatttctactaaatgccaacatttctatcaaaggtcattttgaatagaatagataaggaaaaaagatactgtcactttaaccagttaacaagaaaaccaaagttagactttggagggcaaagttaggaatttcccttatttatttatttttaaacataaagtctagtaaaatcgtttgccattcccagcaggttaaagctgcaagtttctttcctggacaatggcaaatcctccaattctnnnnnnnnnnnnnnnnnnnnnnnnnnnnnnnnnnnnnnnnnnnnnntttacatttgaaaatacattccatatgaaagaacaataagagagaatattgcagctttatacaaaagggtcaagaaacatgaaattgaactacagaaaaagcagaacaat

SEQ ID NO: 124626 - DNA, 1122 bp, Homo Sapiens
  misc_feature (48)..(92): n is a, c, g, or t
  misc_feature (94)..(110): n is a, c, g, or t
atgctttaagatcactatagcgacactttgtacatggaaagctgggtnnnnnnnnnnnnnnnnnnnnnnnnnnnnnnnnnnnnnnnnnnnnncnnnnnnnnnnnnnnnnnatatttatatgaaaatgtttaattcaactgtttctttggaatgtagtagtcatagtttggaatttaagttacagttcagttctatgtggtttttatgctactcagtgtctgagaatacaaatgtcatttaaagttaaggcttcgctgttcattttgaaacaacaatttacaagtgtcatattgtcatagaaaataataatttctgtaaaaaaaatctgcacaaaatcttatgatggtacaaaacatgaagcaataatataccagtaaaatgaaaacattttactacagaaagttttatagatttccataaagaaaaaatatgttattttacacctttaaaaattacaaaacaatctaaaacaatataaactgaacattttgtaacactgcctttacaaattaataactttataaacatataatttttaaatatatttatcagtgcaagatactttaaattttaaagttgcagtatcatttttccttggctgaggacaactttaagtctgttgcctttaaaaacaacaaacgagtgtttcttagtgctttccttctggtaggattatatcaactaaatgaatgtctctggggacaaaaaactattcttctttcatggtgatcaatattttcctggaaacaaaaggcattctcaatccaatttaactaagatgaatggactgtctcgtctatgatgcaaatgtgactcccaacaaatgtctttgagtgagacgtctagcaatgtgggaaggaagatctaaaaaatctcatgtccaacatggcatgataaaaatccaccaaaaccaaccaaagcttctttgggttaattcataggctgcctggtaagatatttgcttccctgtgctgttagaggcttagatgttgccagccctaaggcaggcttattctttgtgagccgctggaagtttctagaagcattcatttaagtctattttttcaaggttgctgttatgaatttttaaaacatcggacgcgtgggtcgacgatatcccgg

SEQ ID NO: 124627 - DNA, 2301 bp, Homo Sapiens
  misc_feature (143)..(143): n is a, c, g, or t
  misc_feature (267)..(280): n is a, c, g, or t
  misc_feature (282)..(287): n is a, c, g, or t
  misc_feature (289)..(294): n is a, c, g, or t
  misc_feature (2212)..(2246): n is a, c, g, or t
ccgacccggcccggcttgtcgtggagacgagcgcataccaccctctccgcggtccgatcttatcactgcacccgttcccgatgaacaggccgtggccaaccaatattgggttggcccctctcgccccccagcttacattatgntccgctcgatgtgttgaatgtgacgataacaattcacacagaaacagtttgacatggtacgaattaatacgactccctataggaattggccctcgaggccaagaatcgggcacgaggttttttnnnnnnnnnnnnnngnnnnnngnnnnnntcaactttaaatcagtttattgacacagtaacacaacacacttgcctccctgacatccccgtccccctcacccaatctagatctctcccccttgctctccccttagaaaaagctgtttagtgaaaacagttaagggcaggccacttctacactcccagcgctaccctaggccctgcagagcagagtctcagacactactcggaacctggtggggaggcagctagtactatactcagccagccagaagtatccagtccctaagaacggattgccccacaattcccaggccctgagttgctatatattcctcttccttactgctgtttgtgaccccaagaaggagaccttggggcctgggcctgcagccaggagcaagaactcctggcagtgatttgagaattaattagagtttggctagtgttttaaaggcccaggcatcccccaaaaaagccctggtggtgggagtaaatttcaatgcccctatttaaaatgtactgataacattaaacagattaagccagcttaaccaaatgccagaataacactaagctgtaaagaaggaggggtcggacctgcttactccaggccagacgcaaatgcacacagagaagcccaggtaagagtgtcaaaaaacaactcaaggacactgcccagggactgaaaagcctatactcaggagcccctggggtgacaggaagcaaagaaagaaaatacacaagtcttaataaccaaaacagaaagccaacagcagggaaacctgagcctgacagtgctgcccaccagccctccaggccatgcccctgaacccagacagtccctccccctctaggcaatgtcctcccctaggctagatagaacacatcacacagcgcagtttagaaagcttctaatgccagttcataaacatcttcatttactattggtgattacatgtgaataatatgtttatactgttctttatggaaaacaatttcaacgagtcaactccgagaacacaataggcaaccctcaccctgagcccctcagtgtccttccctagacagcgaggagccctctcgtctgtcccagggctgcctaacttcccctcttcccccactgtggctcttgggtaaagcatcctctatgactattagtcctcatcggacaagttctggtccaggggataaaccatgaacatcacatctggccgagaggggacacagggatggcctggacgtacaatctcaaagcccaagaagctgaaggtcttcaggagtggagctctgtcttctcggcccttcctgaagcagatgaagacatagttcactttcatcttctcttcagcaaactctagcagtgctaacaatccttctttgctcccatcagctaataatccatctgggatttctacaaacaggctctggctggacaggactgcatcccaagaagagaccttcacctcggtgacctcatactggaagtggacgatgtgaggttttccatcattcacagggaggtcctgggtcacagtgagcttctcgtccttatatattagagctgagagagaaggatccctgccgccccctcgcccaccggggatcttcgacagtgggtgaggggcatcaggagcaccacagaggccctggaacaatgtgcctgcagcactggagctggggacagttactcaaaggcaaaatactactgtcctgggtgtttatcatcctcggcggctctgctcagggtgggaggaggcggcgcagggagtggatagatggatgagtgggtgggtgtggggtcacgcgcgcggggtcgatctctgcgggctaagtccctgtcaggccgcgggccgagcgcctccttttgcctcagcgagcgcctgcctccactccccggccgtaatggccgaattcccgggcatatgtccggtaccgtcgactgnnnnnnnnnnnnnnnnnnnnnnnnnnnnnnnnnnncgccgcttcctcgctcactgacttcctgcgctcgtcgttcgctatagcgtacccc

SEQ ID NO: 124628 - DNA, 1294 bp, Homo Sapiens
  misc_feature (979)..(1062): n is a, c, g, or t
ggcggcggcggcggccgaggctgaaggaagatggcggacggcgtggaccacatagacatttacgcggatgtcggcgaagagttcaaccaggaagctgaatatggtgggcatgatcagatagatttgtatgacgatgtcatatctccatctgcaaataatggagatgccccagaagaccgagattacatggatactctcccaccaactgttggtgatgatgtgggtaaaggagcagcaccaaatgttgtctatacatatactggaaagagaattgcattatatattggaaatctaacatggtggacaacagatgaagacttaactgaagcagttcattctttgggagtaaatgatattttggagataaaattttttgaaaatcgggcaaatggccagtcaaaggggtttgcccttgttggtgttggatctgaagcatcttcaaaaaagttaatggatctgttacctaaaagagaacttcatggtcagaatcctgttgtaactccatgcaataaacagttcctgagtcaatttgaaatgcagtccaggaaaactacacaatcaggacaaatgtctggggaaggtaaagctggtcctccaggaggcagttcccgtgcagcatttccacaaggtggtagaggacggggccgttttccaggggctgttcctggtggggacagatttcctgggccagcaggaccaggagggccacccccaccttttccagctggacagactccaccacgtccacccttaggtcctccaggcccacctggtccaccaggtcctccacctcctggtcaggttctgcctcctcctctagctgggcctcctaatcgaggagatcgccctccaccaccagttctttttcctggacaaccttttgggcagcctccattgggtccacttcctcctggccctccacctccagttccaggctacggcccccctcctggcccaccgactccacaacagggaccannnnnnnnnnnnnnnnnnnnnnnnnnnnnnnnnnnnnnnnnnnnnnnnnnnnnnnnnnnnnnnnnnnnnnnnnnnnnnnnnnnnggaccacctccaggtgccccaccgacagctccgcatgtgaacccagctttctttcctccagcaactaacagtggcatgcctacatcagatagccgaggtccaccagcaacagatccatatggggcgaactccaacatatgataggggtgactatggcccccctggaagggaaaatggatacttgcaagaacgccattgacgtgaagctgaatttgaagaaatcatgattgaa

SEQ ID NO: 124629 - DNA, 2991 bp, Homo Sapiens
  misc_feature (13)..(13): n is a, c, g, or t
  misc_feature (623)..(631): n is a, c, g, or t
tttaagaagtagnaccttgcctttagatcagtagtagtcttaaatgtcaacaaaaccttttatgactatttttgtaaaagattttgtaaaaattctacttcccagattaccaatccttttactacagctcaaaattacagggctgcattgtaatatctgtaactatggtttccattttattttggaatggaaacttctgcaactctaacattacaccaatgtcatcttgctttacatcaccttattagaatgttaatgcacttcagaatgaaagtgtgccatatattttcatttcaaaaacacccacaaactaaaatagatatttaaaatctttattgtttcatcatcaaaagttttctttccatagaagaatggtaatgttgtatcagtgcatattctatggaaaattcatatctcaagtaactagcctagaaatcagagacagcactatgtcaagctagtatacaaggtcaaagacacaatgctgccaatgcaattagtatatagaaataatacgcagctgttagaaaaagtctgtggccaagtggataaaacagtagcagtgcactgcactgacatccagaacagaaaatagggaaggaccagagaatgcacttcctgcnnnnnnnnngtccagtagatcacaagcacaaagagttcccaactgtctcaccagctctctaactcatgtgtacctgcaccttcctcttgaaatctgaacattataataccacaagccactttcagcctccagtgggaaggctccagccacacggccggatatttcggtcctgcttcccgtcatctcatatctaaaagtcatggcttaagttaggcaataaaacctgtggctttaggcatctttagtaaaaaagctgaacaaatcccaaatttattcccattttcttgagaaataaacttcataaaacaacagacagctgtcatgattactgagttttggctgatggcgaaataatttttatgtaagtatactgaataaacatacaaacaaatatccttaacgaaatactgtcagaccaacttgaatgtttttataacccactcctgaaagaagtcctgataattatttagatgtaaacgaccactataaattgatcatgcctggttactgggaattttttggtcaggtatgtttctgaagctgctatatagctggacttggctactttgcattaactcacacaacaaatgccttttataaggaaacagcagatctatcatgatgaactcaaaatcaaaacagttcagaggtatacaggaaacttgtcttaaaaatacttttaaattacatatgatataaccttagagaataagaactactattaccatggtctaaatcttaaactgttaatgcatgaattatctgtaagactaacaagttacttgttaatcatggcaaggccttgcaggggagggggcactctgaatgtacggcatagcaattattttccaggtaagtaaacacttctaagtgttattaaactatatttgaaaagttattttatgtaatatatacaacataccaaataagtcaaaaggaggaagcagaggaaggttttctggcatatatgatgcaaacatacaactgtccctcatcagtagtggttccatgtatgtccattttaacagggtaaaacatgaaaggttgataggagatcacaaatttcacttataaatagaaacaggattcaaaaactggaatttcaatgtcatttcttcccacattgcaactcactctaacaataataaacataaataaaaaccttatctcaaaaatgtttttacacccttaccttaaagtttaacataaattcttctaacaattgagaagaaaagcactcctctgtagcaattccataaaataattttcaatccacaaaacatctgtctaccagtaaaaccaacaacccttaacggagggcatgggcattaacacttggcccctctgaggtataaatgcagctatatttgcactgagtatacagtctataacgtatgccaaccgtctgtatgtctgcataacattgggagtgatgtcatcctgactgactgaaaacttatttttataattttttgtaataatggaggctaaataattttaagagaaaagatgtacttgaccagtaatagagccggcggaattctgaattcctaaccaatgcaaatgattacattaaaaaagtgtttaacattgcatattgattccaaaaaaaatcaacctaacaggaaaaacacataaatatttaaattcagcaggacaccacaaaaagcatactatagataagtgtgaaatcagtcaagcttttccaaaagagaaaatccttttaatccttcagcaagtctctgtgaaaatagtatgcttacaataaaagtgagaagggagcacctaaaatacccccaagaggcttgctataccattcagcattaactgccccatctcctgtgtgcgtgaatggccaacaaatgacaggaagtccatttgacaatagttcagtaatttcttttcaccactgctgccagctgaagtcgtcattgcttccaaagaccaagaaaaagcctagtatagttgcaaagatgactgtgtttcctgtgagaacaagtgcacaagctccccactcaatcagatgtgctctggcaaatacaatagggagtccaaaagctgacacgacaatgcccgttgtaagaaagatggcaagttccttacaagcgttactcatagcatctgtatcatccactaatcttcttgctatgcagtatggaataggtgaaaggatgtaaaaaaatagaacaaagaggggccagtatttgttgtatattggaagggcacatccaagcatcaacaacatcagtccgattgctcctccaaaggacaaactaatctaagctttgatgcctgccatggcggtgacgtcgctcctggctccacgacccgaggcggcggcggcagcagcggcagccgggaaacccaag

SEQ ID NO: 124630 - DNA, 1083 bp, Homo Sapiens
tttacttttggcatgacagactttattttggcactttcacaaatattttgctttacagcagtgacaaaatatttgccagaaatttttcttttcctggcacggatattcccagcagttgttattctatgaattgaatttcactctgctttgcacagttagaggtatacccattcctaccctctgtaattgagggacacagcgtggctttagaaagctaggctatcgtttccttttagtcactctaaagtgaattggttctgtaagtgatggggcaggaatctgagaattaattaaggccattaaggatttaaagtaaacactgttccaagtgttgcttaaaaaaatgtttttaatgaattatgtggcaattccagggaatgttctcaaaatgaaatattcatactttattaaaagtaaattgtatgttggaaaagttgctttttttgctgtcttcttctgacttggacggctcacagtttaaaacaaaattagtggtaaaatagaaaaaggaaatgtttagtacagaaagtaccagccacagtaccctcataactccatctccttccccaggcatcactctttccagccacttcaatcctaaagcagtgagaccctcattttaacacacagagcctccctgcctaccctccttccctgtaacgtgagctactgtagtccatttattagttcttcggttaagcttcagtagacatttggagcacaattccaaaggtaaatcaatctataggcctaagccttagataccaacatcaggaaagccccattcagatctttggaatttacagtcttgtaagttatttgcaaaagcaggcgtctgtcttaatattgccatcagttatgcctataaaggttgcaaacttcgaaatccccgtggcagccgttccgaatatctctacctagacacacacaggataatacattcagatttcctctggccaattcagaagtgaatctggtaatagacagtctcagcgacaggctctttggtcgtgattttacagacactgtgagacactttagaatagtcatacccacgtcatccgttgtagaaacgggcggtcg

SEQ ID NO: 124631 - DNA, 1024 bp, Homo Sapiens
gcacgaggtttttttcaacatgtatagcttttatttacctacccaagttccttttacatgtgagttatctgcattccaccttgccccctctcccaggatgaatcctcttggcacagaggaaggggtgccccttcaactagggccagagcctagatgacctggtggatcccccaccatgaaaaaagcaggaagggaatggagaagaaaagtgttgatcacacctagccctcaccacaggagggggaatgaagaggtctgggggactgcccccatgctatgccccagtccttaaatacaaagcaaggagaatgaaaaggaccctccctctgaaatacagcaccgacctcagcatggaggcaaaaggacagtgggcaagaccacgtccctccgaagggagagggctgaaggagagcacataccgttagtggctgcggcacccctccctaccagggtctgatgcagcctcagcaccgggagtggggagaggggaggagaagggatgacagcactgtgccatccactcctccctgaaccccttggccccagcacaggcattcctctgcccacgtatcccaagtcaggggatgtggacagcaaacgtgtgttggaagtccaaggcccgttatctatttcttcttccgattcttgggagcagcgtgggcaaaaccatatcccccgaaggcttggtttgtcaagcaccacgacaggcaaaatggaaccaactcaatggaacaatcaggggttgtcacagccaatcatctctccataggagacctggtgaccaaggcgataagtggggttacgttaggaatccaccaggcattagtccaacacatcacaggaggtggacactgccaaaggtcactgagggcagtcccatactccagggacttggtcgcggacgaagctttaaccttcttcgtggggacagcccttggagggccatcgttacagtccgaaagttttgaccgtttgggaacggaagcacggaacagggttgaggaactacatatgggaagtccag

SEQ ID NO: 124632 - DNA, 1253 bp, Homo Sapiens
  misc_feature (135)..(200): n is a, c, g, or t
  misc_feature (1103)..(1137): n is a, c, g, or t
  misc_feature (1141)..(1192): n is a, c, g, or t
ggggggattccaagccttattcttgcccgggttttcttgggaaacagttatgcccaggttcccttccttttggggcccggccgccaaaggaaggttttgaaaaacttttgaggggcggagggggcgcgccagggnnnnnnnnnnnnnnnnnnnnnnnnnnnnnnnnnnnnnnnnnnnnnnnnnnnnnnnnnnnnnnnnnnccaaaaatatatttatttttaaaaacagaaaatcagatcagttttatagagtcaaattttcaagagacaaaccagagtttggattccagcttagagtgcaagtgaagcatcagtaatctcatgcagaagatttgtctctgcaggaggtacattctgcttgactgcaagcactcaattctctaaatctggtttgtacttctgccatcattttattccattccagcgctctggcatgcaagataatccatctctaaaattcaagacttccaaattgagatgaacgattattgggcttgggttggggtttataaccaatccgatcattgatcatttgttcccggctcttgggatcactgctaagcccaatggctccttctccatcactgcctcctacaacttccacatcttccttctgtttcttacgggtctccaggtcctttcgaatgttctcaaactcttcaatgtcatcaagctttagctctaggcgtgttggtttccgtctcagcatactgaagtcaacactaagggccaaacccagtgaactattagcaattcacaggattatcctccgcgtccaaacagatcttaaatgtgtacgtcattcattaaacaaacacttcttgtgttccagctacaaagttaaaaggtacagtcataatctcttttcaagcgggcgtagccccttcccggaacctcggctcccccccaagcgaaactactgttaagccaactggactacacttgccagactgcttggagcctctctctccgcagaacctcgtcttccgcgagcttttcctggaggttctaggagggatgcccctcaatgccacgacgccatttcgtactacccccggccgtaatggccgaattcccgggcatatgtccggtaccgtcgactgnnnnnnnnnnnnnnnnnnnnnnnnnnnnnnnnnnncggnnnnnnnnnnnnnnnnnnnnnnnnnnnnnnnnnnnnnnnnnnnnnnnnnnnntagcgccctataagagggagggggtgtacgaggaggagtggagggtatgcgaggggaggga

SEQ ID NO: 124633 - DNA, 1646 bp, Homo Sapiens
cacgcatttgctttattcgaaaagaggcttttaaaatgtgcatgtttagaaacaaaatttcttcatggaaatcatatacattagaaaatcacagtcagatgtttaatcaatccaaaatgtccactatttcttatgtcattcgttagtctacatgtttctaaacatataaatgtgaatttaatcaattcctttcatagttttataattctctggcagttccttatgatagagtttataaaacagtcctgtgtaaactgctggaagttcttccacagtcaggtcaattttgtcaaacccttctctgtacccatacagcagcagcctagcaactctgctggtgatgggagttgtattttcagtcttcgccaggtcattgagatccatccactcacatcttaagcattcttcctggcaaaaatttatggtgaatgaatatggctttaggcggcagatgatatacatatctgacttcccaaaagctccaggatttgtgtgctgttgccgaatactcaggacggacctgaattctgattttataccagtctcttcaaaaacttctcgaaccgctgtgtctcctacgtaaaaaaagagatgtacaactcaataataattacacttttagaaactgtatcatcaaagattttcagttaaagtagcattatgtaaaggctcaaaacattaccctaacaaagtaaagttttcaatacaaattctttgccttgtggatatcaagaaatcccaaaatattttcttaccacctgtaaattccaaagaagcttttgaaatgctgaatatttctttggctgctacttggaggcttatctacctgtacatttttggggtcagctctttttaacttcttgctgctctttttcccaaaaggtaaaaatatagattgaaaagttaaaacattttgcatggctgcagttccctttgtttcttgagaataagattccaaagaacttagattcatttcttcaacaccgaaatggtggggagtggtttgatcagttttcaagaaaacttgggaatataaataattttataattcaacaaaggttttcacattttataaggttgatttttcaattaaatgcaaatttatgtggcaggatttttattgccattaacatatttttgtggctgctttttctacacatccagatggtccctctaactgggctttctctaattttgtgatgttctgtcattgtctcccaaagtatttaggagaagccctttaaaaagctgccttcctctaccactttgctggaaagcttcacaattgtcacagacaaagatttttgttccaatactcgttttgcctctatttttcttgtttgtcaaatagtaaatgatatttgcccttgcagtaattctactggtgaaaaacatgcaaagaagaggaagtcacagaaacatgtctcaattcccatgtgctgtgactgtagactgtcttaccatagactgtcttacccatcccctggatatgctcttggtttttccctctaatagctatggaaagatgcatagaaaggagtataatgttttaaaacataaggcattcgtctgccatttttcaattacatgctgacttcctttaccaattgagatttgccccataggtaaacatggggtagaaaaca

SEQ ID NO: 124634 - DNA, 1729 bp, Homo Sapiens
tttctcgtttccccgactttattcagtggcacgttcacagcggggatgggggtagacacaaggtggggcctgatctgtcctggagccctgggggcaccacacaccatgcactatggatgggagggggcacaggaggggcttggtggccccacagaagcctgtgtaccagggaggaggcggtgagtgcctgggtccccctagcccaggcccgcaatgggaggggctgatactgggctgagattgaggggtggggatggggggcacaaagtgtctgctccagaagggccaagtggccaagcccttgcaagggcacaagcccacgccaagggcatgagcccacagggcagctggggacactctggacacagagctatgccactctccctcttcccctctggtgagggagaggaggattctgggctgggccaaacagctaccctgtcctgccccatcctgtcctcggccaatcagaacggcttcgatgtctgcttgaagatgaagcctcgataggcgagtgtcttcatgatgttggcaatgttcttgcagtcgtcaatgccgctgtggggccggcctatgtgttgcaggctgaggcccttgttcatgtctagaagtccattcttgggccagcagcccatggcgaagctgtaagcctttttcagattaatccactgcttgaagtaatccgccactggcaagcccaagtactggcactggcctgggagcatgacttttaagtcccagtctccacaggtgacaaaaattgacttgacgtttggatctaagaggccttccttcgccatccattcatcgaccctctccagcacttgctgcaggcttggctgaccatccaccatggcttgaataatcccggtgagctctgtacagaatggggtaagctgtggatggactacaggctggacatacatgtgaaaggtagactcaatctccatggtccggccatttagctttaggatggggaactcgatgatttcctgaggatgaatctgtggcttgtcgcacgtggcctcaaagtccagcactaaaaagtagtgatacctctggggagggaaggacaccattgccgccatggatgcgccaaagccgtgggccgccagctttctggtggatatggagcagaactccggaacaccacagggagaaaataagtgggagcccagcacttttcttgctcttgaaagtaaatacgaagaaaatcgagctgctccagtctgtaaaggtgctagcattgaacatccagaagcatctaaaactctccttacttcgaagatgccaagaccggcagctggggatgctgaaggttctgtgagagctggaaagccccaatgcccggggtgttgcccccaactcgggcccatccaagtccaggggagagtaaggggaggggcggggggccaggagaccagccctccttcccagggccgcccccgccccccgtcagcagcgggagaggctgtcgccatggcaacgccccctcctcggggccagcgcggcaggctccctccaggtgcaggccccgacgtctccctcggcctcagcaagcgctcagggcagttggcggcggcgggcgcggcccgcgccgactgcggcgccggccaggcagaggcagggccagctccgcccgctccccaccgcccgttcccggccgcctgaacagcggcagccagcaccacgagtcaccctcggccgattaaagcgaggccttactagc

SEQ ID NO: 124635 - DNA, 2708 bp, Homo Sapiens
ggcccccggtttcaggcctccagcccagagccagggtgaaagacactagttagtctgttctttattttccttggaaaattacagggttacttatcaacaaaataactgtccatccggtggggaagtgccatccggtggcttctatgtacaggcccatccctgggaaccacatttccagagggggcctccccctgaggcccccattggccccctcccaggtatccaagaataaatcacatggtgacagctgccggcatgggtgagtgggacccaggcctattacccggccagagggtttgggggcctctctcctggaagcctgctctttccacaccccctttcccagccaggctgtcttggacactcccggggctccgctgaggggcacatgattcccgctttggacttcttttgagatgtcattttaacactgaggcatcctggcctcccttcccggaagatgggttatttgcagtgctgtcttttcttttagtcccggtttttgtacaaaaacaatgatactccccattggactgtatttttgcccaagaaacaaaagtgcctcaacaggtacagttctgctggtcaatctgcttccggcagggctccatggtgacagccacgcccaccccactccggcccgatgtcattcgggtcacctcgctccaggtgtctgtatctgggtcgtaacactccacactgtccaggaacgtgtgaccatcatagcctccaaggacgtagattctcccctggtggacagtgatccccagggcacttcgccggtgcttcatgggggctacgaaagtccacgtctctgtttccacatcgtagcgctccacgctgttcagctggtcctgaccatcatagcccccagcagcatagatacagttgtgcaggacgcagacgcctgccccgcttcggatggtgttcattgctgtgatcattcgccactcgttcctctctgggtagtaacactcagctgaattaaggcggtttgtcccgtcaaagccccccacggcataaaggagacgattgaggacagccacgcccaccccgatccttcgtgtcagcattggggccaccaagtgccactcatcccgctctggctcatacctctccacactgttgtggtggatgcagccgtgggagccgccgacggcatagatgtggccatcgatgacccccaccccgatgcggttacggggcacgctcatgggggcgcagggcgaccactgattggtcatggggttgtaacagtccagggcgctggagtcggtgttgccgtcgggcgagttgttcctgccgcccacggcgtacaacagcccgcccaccacgcagccggccaggccgctccgcggcacctgcaggtccgccaaccggagccaggtgccgtcactggggttgtaagcctccaggtagctgagcgactgtcggaagtagccgcccgcggtgtagatcaggcggcccaccttgggcgcccggcagggcatcacctgcgtgggcttgtgcagggtgagctcctcgaagatcttgaccaggtagtccttgcagcgggagtcggactgcaggatctcgcacttctgcagctgcatctgcaggaagttcggcgtcaacgagtggcagcgcacggcccgcagcagcgcctggacgtagaaccgtcgctgttcgcagtcgtacttgacccagttgatgcaggcgtggaagacctcggactcgcagcgcacgttcaggtcgtcccggctgatgagggtcaccagttggcagtgggacaggttgaagaactcctcttgcttggccacctccccaaaatgcatgtagatgtactcccgggcacgctggtgcaactccacacagccaatctgctcagcgaagttggcgatgccgatggcattgctggggtccagctgctgcaccaggaagtcactgcaggcacggacaacgctgtcgatctggtacatgacagcaccgttcatgacgtggaggacacacttctcgcccatggagatggaggccgtgtaggcgaattcaatgaggcgctccatgaccttggggtggataccctcaatggacaccacctccatgccctgctcccgcagcccgttggtgaacatggccttgaagacagggctggatgaggccagcaccaccttgtgggccatgaactgggcggccggtgcatcctggtacttgacctgcagtgtgacgtcacacagctgctggctgagccgcagctcgttcatgatgccaaaggcctgcttggtatgatcctccagggtgtagctgaaggtgcggttgccatgctgggagggcgtcacctccgccttgcactcagtggaggcgtacatcaccgcgtcccctgccccctcagggcactgtgactgcaggggcaggaatcggcagcaggccccagccccgctaggcctgggatctggctgcatggggttccagaagataagcaacaccaccacctctggcactcagggaccccgccatggccgcgctccggctccgcctccaccgcccgagccccggcgcctccatcgctgcgcgtgggggaggcgcggagcgcgcgcaggtcaccatgactaagcagagccgggcgcccgccgtgtcacaataaaagtccccgggccctggcctcaggcggtagggaccgctgaggggccgctccccctcgtggggattcgccacccaggcctcgctacctt

SEQ ID NO: 124636 - DNA, 1526 bp, Homo Sapiens
  misc_feature (85)..(443): n is a, c, g, or t
  misc_feature (482)..(772): n is a, c, g, or t
  misc_feature (1006)..(1033): n is a, c, g, or t
  misc_feature (1052)..(1430): n is a, c, g, or t
gaaaacccagcaaccggccttttacggtacctgccttttgtgcctttgctcacatatccttcctgcgtatcccctgatatttggnnnnnnnnnnnnnnnnnnnnnnnnnnnnnnnnnnnnnnnnnnnnnnnnnnnnnnnnnnnnnnnnnnnnnnnnnnnnnnnnnnnnnnnnnnnnnnnnnnnnnnnnnnnnnnnnnnnnnnnnnnnnnnnnnnnnnnnnnnnnnnnnnnnnnnnnnnnnnnnnnnnnnnnnnnnnnnnnnnnnnnnnnnnnnnnnnnnnnnnnnnnnnnnnnnnnnnnnnnnnnnnnnnnnnnnnnnnnnnnnnnnnnnnnnnnnnnnnnnnnnnnnnnnnnnnnnnnnnnnnnnnnnnnnnnnnnnnnnnnnnnnnnnnnnnnnnnnnnnnnnnnnnnnnnnnnnnnnnnnnnnnnnnnnnnnnnnnnnnnaagaattcggcacgaggggagcggccgcggctgtaggcnnnnnnnnnnnnnnnnnnnnnnnnnnnnnnnnnnnnnnnnnnnnnnnnnnnnnnnnnnnnnnnnnnnnnnnnnnnnnnnnnnnnnnnnnnnnnnnnnnnnnnnnnnnnnnnnnnnnnnnnnnnnnnnnnnnnnnnnnnnnnnnnnnnnnnnnnnnnnnnnnnnnnnnnnnnnnnnnnnnnnnnnnnnnnnnnnnnnnnnnnnnnnnnnnnnnnnnnnnnnnnnnnnnnnnnnnnnnnnnnnnnnnnnnnnnnnnnnnnnnnnnnnnnnnnnnnnnnnnnnnnnnnnnnnnntgagatatttcttatgagtaatgtggatggtacgtgagtccatagagtaaggcatttattgtaaacctccagggagtttctgaaaatagtatcttctcttcaaacctaggatgaagctggaggcagattcgtcgctttctctggagaaggacagtcattgcgtaaaaagggaagaaagccctaagtgaggactgttggctgattggaaaataataaaagaatcatttgcaacannnnnnnnnnnnnnnnnnnnnnnnnnnnccctcgtgccgaattcttnnnnnnnnnnnnnnnnnnnnnnnnnnnnnnnnnnnnnnnnnnnnnnnnnnnnnnnnnnnnnnnnnnnnnnnnnnnnnnnnnnnnnnnnnnnnnnnnnnnnnnnnnnnnnnnnnnnnnnnnnnnnnnnnnnnnnnnnnnnnnnnnnnnnnnnnnnnnnnnnnnnnnnnnnnnnnnnnnnnnnnnnnnnnnnnnnnnnnnnnnnnnnnnnnnnnnnnnnnnnnnnnnnnnnnnnnnnnnnnnnnnnnnnnnnnnnnnnnnnnnnnnnnnnnnnnnnnnnnnnnnnnnnnnnnnnnnnnnnnnnnnnnnnnnnnnnnnnnnnnnnnnnnnnnnnnnnnnnnnnnnnnnnnnnnnnnnnnnnnnnnnnnnnnnnnnnnnnnnncgcagggaagacatgttagccaaaggcatcacaggccaggaccgttaaaaggcgggtgctggcgtttttccatagttcgccccccgacgacatcaa

SEQ ID NO: 124637 - DNA, 1089 bp, Homo Sapiens
tgacgtggttgttttttgcaaatgattcttttattattttccaatcagccaacagtcctcacttagggctttcttccctttttacgcaatgactgtccttctccagagaaagcgacgaatctgcctccagcttcatcctcttcaacctttttgacaaggggacgtgaatttctgatgaaagttatcttaccaagtttaaattcataattgggaattcctcttttaatatctccaggcttgattggggaggggctgggctctacccctttcttctttccatccagtctattgccagatccagagaaagcgcggaagcccagctctccagcatagccactgtggtcggcttcaccttctgtcgactcctcatgctggacttgtctttcgggttctttgtagcccaggggagcatcaaagtccacgttcatgtcacactcaatgatggacactgccttgtcgggtttggtctccatcacacgcagttcgtagatcttttcattatagttgatggcaatcacatccccggtggtcagacaggcaaagttcctaagtgcgttttctaatacggctttggggttggtgatgtccaggaagtcagggctctgaggttggaatttggagtaggtggccacttgaaggttgacgctctccacctggaccaggccgccttcttccaagagtaagttctgcatcatccagtgtgggaggtagcagatgccctcatcagccacaaactccagcacgccacaatgcgtcatgcggtccgaattcttattggtcagtttgaacagcatgggataggtaatgttaagtcggctgagttggtccagggccgagggtggcataattatcttccctcctttctccacatctgacctgtcattaggccctgctagcatggacacagagaagcagcggtactgtgtggagaagcggttttggaagaccctgggaatagggtggtcgaacatgttgaaagagaacatgatggacaccacctggcagactccgctcctctcaggcaatgcaacgaagaaaccccgccgaccgctctcccagccgccgctgccgctgccgccgcgccaaccc

SEQ ID NO: 124638 - DNA, 2651 bp, Homo Sapiens
ttttacacattataaaccagccagtttattattttgtagtaagatttagaacttttaccatgcagactgaaatatctgtgtcagcatgaacagtacattttcttcctagaggcagttacatggaaaaccaggttattatcaggttatttagcaagtatggaatccaaacaagaggagactaatcttaagacctataactcgtccatgaaggcttggggcacacttttctaccaccagaatgccttagcttccagaaagctgtggactcttccctctccgtcttggtctggctgagtaccgctactgctcagtcacttcctgcagccataccgtcaggccagcttggcctaaaagctgttatctctggtcactggtttgtgttgttacagccactgctactaacagttaaggttctgaagggggcatgtcaattgctcccaggtaccaactaggagacacaataatcctattagtttgttctcccaaacccactccagtttatcaggtaatatgctctgtaaggttctttccaaccccattagcacatacatagattacctataatttcacctaatgtaatctaccttcctactgaggattgaggttttaacgtttgttttttttccccccactttcttgatcagtgattctcaaccatgtaggaattaatgaaaccaattctgtatcaccactgcaaccaagacagcaataccaagtgatatgtatttttcaaactcatgtcattttgttctctatactgtaaaaaacgagaagatgcagtcctcaacttagaactcaatactaggaagggtcaagttgtcaaaaaatgtctttcaacagtagaaaagtttgctttcaaattaaaaaacaaagcacgtattgcaaacatcgtgtaatgataaaattacagaaaaaaatatattcagaatgacccatggcattcacgccataccagaattttgcctgtaacaaaacagagaattttatcccaaaaagtaggttaggtccatgctggctaaaaacttcagtcccagacccaataaatgaggatgaaatacatagtgcatgcttaacagacattgcatatacatcaacaattctttaatgcccctctctagggttttgagggaaggagggatgaaatgtggacatgtgcactcacaaaggcagaattttcttcctattataaaaagtcacacgtgaccctttactatgttttgggcaatagccaagattttatctgtgggaatccacctttgaaaatcacaacaaaaatcaatagtaagtgatttaatataaaatatacaaatttctcagtatgaggactttcacagaaaaggaaggagacaacaatgaaaatgaattttcttaaaaaataacattcccttattttgtccctgctactcaacactcaaaaacaagtctgtacaaaactaggaacacagaaaaggaccagagaggatgttacactgtaaagtcttaggacctactctaaacttctgtcctcatcaagaccctcacctagagacctgagggttcccaggtccactggagaaagtaagtagtctccgatcatcacccttgcttcaccgaagatggcctcaggtcactcgctgtcaaacttaatagaattgacctggacagagattgagcctccccggtagctgccccgcttcttcttggttttctcatgccgaaaggacttgcctttggtgaacttcaaaacctgattggctcgctctccccagtctccggctgcacctcgcttggcatcaaaggagttgtccgcaactcgtgaatccacctcaatttcctcctccctgacccttcggaatggggatgatgcccttttttctcctttcttcctttttggaaatgtgttaggggtctgaagctttatcttcttggcctgaggagtctctgcctccttggcagcctcattctgcttccgcttctttaatgaacctgatttggaaactaccactgccgcctttttcttttcttcttcctcctcctcactgttcttagctgcttttccattctgggcagtcagtgcagaggtgccattggccttgggggcttgtggtcttggagagcccttgcccttgagcttctcttcctcttcctcactggagtcatcagaagaagaactgttgctgctctcagcctttcctttctttgcagaggctggcttggaaggggctgcacctcctgctaccttctgtggcttcttcttaactgcagacttagatgtcttctcttcctcctcctcactgctggagctgtctgaatcagagctgctgtccctactaccctgaggagcctgcttggcaggcagagatagagctgctttggcagtcgccttgggcttagtggtggccaccatcttctttgtcttctcctcctcactggagctgctctcttcctcactggagctgctgtcagcctttctcgtcagaagcttctggccaccgcccacaggttgcttgggggctgcagctggcttcactgcaggtgacttggtggtgacagctggcttatttgaagaattcttggtggtaccagctggcttagaaggagcttcatcatcctcagagctgtcagagcctcggtgccgaattcgacaccaggcctcgtactgacctatgttt

SEQ ID NO: 124639 - DNA, 153 bp, Homo Sapiens
ccccccactttcttgatcagtgattctcaaccatgtagaaattaatgaaaccaattttgtatcaccactgcaaccaagacagcaataccaagtgatatgtatacccaaagacaaccatcattccccctaaataaattaaaaaaactcttaacc

SEQ ID NO: 124640 - DNA, 684 bp, Homo Sapiens
  misc_feature (628)..(628): n is a, c, g, or t
tttaaaattattaaaacatttaatcactgaaaacacaaatccacattaggaaattatcttttaggatacttatacaaaacttaacacaggattattgacttcactgttaagcaatgtgcatattgctactctttctccttcactaatttttctatccttggaattaaagatgtgactgcaagtcttagggcagggccagaacccaacagatttttttgttttgactcagtcaaagctgaaaaggcagcatcacataaataaacagttgaaaagggtaataaaaatttcattgccctttcatggagttctgggtaacttgtctttgcatttatccaaaactgagttacagacactgatttaaatagtgcttgtaatcctaaatctgaagatagctctgttagcttttcttcttcgaagtcggtgagattattattttggtgattcataaaagggtgaattatccacaaatttcctgaacgcaagtcttgttctggtggaaaacagtcactgaacacttgagaaagtccttccaggtgctcaaaaataatccttgtgatgtctgtcatatttaagcctgatgaatttgagaattcagaaaatgaagggaacatgtcataatcattctctntgtgtgcgcttcaacacatttttaactttctcttgaatacatcatttttattacac

SEQ ID NO: 124641 - DNA, 1709 bp, Homo Sapiens
  misc_feature (587)..(603): n is a, c, g, or t
agaaagcatactgggagtaccattttgaattattatataatcagactctagcctggcatcacggagactccaagagccacggacaatgggaaagaagtgtacttctgaatgcaattcaaagttatctgaacttttttcactgtttctagattccactttgcttgggaaactacaagaacttctttaatcagccatggccttccaaaaagtagagtgatgtggcaggcaagacagggacaagcaggcccacctggtaaaggatggctctgacattagaacctgttggctgccctctccactgccagggaaggaagctggccatgcaggtgaagaaaggcaccagccctgtttcctgcctgaagggcagcatcaaggtcatagtgtccaaaggcccggaagaggtcagtctcagatgggtgctggcagagtcctagccaagtggccaggctgaatccttcctgagccacctgcaggaagagtcaggagggcgaggctctggccactgccttgcagctcacagctggttcacacatgcatgcaaagggcaggtaactaagtaaccaacccccagaaagcagtttcatcgnnnnnnnnnnnnnnnnncccctttcaacctggttttcggctctggaagctgttcctgtgcacagttctatttcctacagttctgagaaagcggttccatcgcagatgaccaaaggctggacccctctggctataacgtagaccttccagtgggtggtgtcgacatagccgatatcccctggctctattggcatggccacagactgacaatgtcttcggcactggaagggagggatgagctgcaacatggcctcaccgctgccaatgataaataggtcaggcatcttatgcatcttactccccacaacaggttctgggtgaagaaaggagcacttgtttaaagaggcatcttttggaaatggcaggtgagtgaaaacaggaaaaagctcacgtaacatttgtgatctgttcagaggtctcctccatggataaggaaatgggaaccaccgctcaggaaagcagcgccaccacttggcgaaaaacccttcagagaagccttctgtcgcctcagggtactggcacaaaaaatgctgaatctcttcctccaacaggggctttcccgtcttgatcaccagtggatggagcctctcaaatttccttggggcgtcttccaggagcatcaccttcaggtgtttctgggcacagccagtgcagttggcaggaatgggctctgactcattctgctcacagtcgtttgtccaccaggggtcaaagtctggaaagggtctgtcttcatcacccccatgcagaggaactcccttattttctgacatgtacttcttggcaatgggcaaggacatcagcctaatgtgatggatgagtgagcgccaggtgtgagctccagaaagcactggctcaggtgctaatgggcttatacacaactataaggagaggatactgcggggggggtctctgaggttcattcttttccagcagctgtctgataaatttttcaattgccttctctgacatgccacactgatggccggtctgtctcaccaaatcaacagtctctgaaagtttgtcataaatgctgatctcgttggcagcaagatccatgtcttccaatataaaatccatgcggggctcgcgccccctcgggctcctcccgcctcggggacccc

SEQ ID NO: 124642 - DNA, 1551 bp, Homo Sapiens
ttttttttcaaccatcaatggcattttattgtggaagtttctatgtattacataggtattaacttccttcctctcctgctcctccccacaaaatccagaaagttatttttatacataaacaactgaacatataaaaatcttggacctaatttctctaaagtcttgggttaaaagaacttgagtggcgcttctcctttctgagagtactacttctcaaggaggattcatggtctgtcctttgctcactacagatttctcctcttctctgggaaaaaatggtcaatgcttctgcttccttttaataaactaatttcttgattattatacattattattattccccacttgacaccttcttagaaacttgattgttggatgtgtttttcatttggcaaaaattcaatgtggctttgcgtgggatgtctgaagtgtcagaaacagcactgttgatgttctggttttgagagggaaaatatatatagagatgcatacattccctagaagaacaaatgtaaaagactgaaatagggcgtgcacagagttaagagggctgacagacactacttggtttggaattctgtggctgtcagccatcaaggactgctgtgtaggccagaatataaatctccttaggaagaagtttggttaggcaaaaccactgagaaatgacagtggctgctacattgttcgacgtatatcagagcagacatgcacaagaagcagcattatggttcatgtgtagtaagtagtcacctattgataaacaggggcatttgtgcaaatgctctggcaacctaggcactgggggaagagaaaagaagccatcctattaaaatgttcttgccatttcttaactcacccaagatgccaggcctcctaagcttcatgacttgcaaagccaaaatgaaatttagcattacatgtcattctatgtcatctagaagctggttcactggggccatctcagaagagctgctcaagagggtagcaagtctacccagaagggtatgccttaatgatcttcacgtcgtccacagggcggtcctgggagtttgtttctaccattcccacgcgattcaccattcctatgccctgacacactcggccaaaaatggtgtgtttgccgtcaagccactgggtgggggcgagggtcacaaagaactggctgccattggtatctggccccgcattggccattgcgagaattccagcccccgtgaatttcaagtctggatgaagttcatcttcaaactgtttgccatagatagatgcaccacctcgacctgtccctgttgggtcacctccttggatcatgaagtctttgataattctgtggaattttgtgccattgtagtaacctcgacgagccaactcagcaaagttcttacaggtctttggagcatgcttccagtacagctccagcacaatgattcccatgctggtctccaagtaaacgttgggtggctgccaggaatctgggggaattgccgccatagcgaagccgacgcgtgggtcgacgatatcccgggaattccggaccgtaccagcctg

SEQ ID NO: 124643 - DNA, 899 bp, Homo Sapiens
tgtactcccacacggttctgggtgtaagatagagcacttgttcaaagaggcatcttttggaaattgcaggttgagtgaaacaggttaaagctcacgtaacagttgtgatctgttcagaggtctcctccatggataaggaaatgggaaccaccgctgcaggtaagcagcgccaccacttggcggtatacccttcagagaagccttctgtcgccctcagggtactggcactttatatgctgaatcgtcttcctccaaacaggggctttcccgtctttgatcaccagtggatggagcctctccaatttccttggggcgtcttccaggagcatcaccttcaggtgtttctgggcacagccagtgcagttggcaggaatgggctctgactcattctgctcacagtcgtttgtccaccaggggtcaaagtctggaaagggtctgtcttcatcacccccatgcagaggaactcccttattttctgacatgtacttcttggcaatgggcaaggacatcagcctaatgtgatggatgagtgagcgccaggtgtgagctccagaaagcactggctcaggtgctaatgggctgaaaggttgaatcacaaagtaggcagtgagcaagattaatcccaaggttgcgagaaccttatacacaactataaggagaggatactgcggggggggtctctgaggttcattcttttccagcagctgtctgataaatttttcaattgccttctctgacatgccacactgatggccggtctgtctcaccaaatcaacagtctctgaaagtttgtcataaatgctgatctcgttggcagcaagatccatgtcttccaatataaaatccatgcggggctcgcgccccctcgggctcctcccgcctcggggacagctgccgcc

SEQ ID NO: 124644 - DNA, 1017 bp, Homo Sapiens
gggatcgccacttggagaccaccgcgaatgaagtttgcgttttcctctgttcttgagcccagcttcttctcgtctcccaccccagcttcccggcattggaagaagggaccgtcctcttccttgtcttggccacccaaatcctggtatcgaaagggttgaacggaccggaagtgtgcagcagcgacgggtccccagctaatcgacgccggaagtagcaattactagacaagcattccgccgccggcttcgctatggcggcaattcccccagattcctggcagccacccaacgtttacttggagaccagcatgggaatcattgtgctggagctgtactggaagcatgctccaaagacctgtaagaactttgctgagttggctcgtcgaggttactacaatggcacaaaattccacagaattatcaaagacttcatgatccaaggaggtgacccaacagggacaggtcgaggtggtgcatctatctatggcaaacagtttgaagatgaacttcatccagacttgcgaattcacgggggctggaattctcgcaatggccaatgcggggccagataccaatggcagccagttctttgtgaccctcgcccccacccagtggcttgacggcaaacacaccatttttggccgagtgtgtcagggcataggaatggtgaatcgcgtgggaatggtagaaacaaactcccaggacccgccctgtggacgacgtgaagatcattaaggcatacccttctgggctagacttgctaccctcttgaggcagctcttctgagatggccccagtgaaccagcttctagatgacatagaatgccctgtactgctaaatttcatttggctttgcaaggtcatgaacgcttacggagggctggcatctggggtgagctcccaagcatggacgtacctcctcatagggatgctcttttctcttcccgcactgcctaggttgccagaccattgcaccacatggcctggcatccacaggtgacactgactaccatgaac

SEQ ID NO: 124645 - DNA, 1006 bp, Homo Sapiens
  misc_feature (825)..(826): n is a, c, g, or t
  misc_feature (852)..(852): n is a, c, g, or t
  misc_feature (865)..(865): n is a, c, g, or t
  misc_feature (873)..(873): n is a, c, g, or t
  misc_feature (897)..(897): n is a, c, g, or t
  misc_feature (906)..(906): n is a, c, g, or t
  misc_feature (932)..(934): n is a, c, g, or t
  misc_feature (938)..(938): n is a, c, g, or t
tttcaaaaattaacagccacaatagtttatttacaattgaactctttataagatatttacaagacaaccaattttacacatcagaaatggtatcaaaagttatgaattacaacacagacaacaatatgaaatgggcataaaacaaagctgaagtagacagacaagcaattttttttaatttattaacactagcttaaactttgttaaagaaaaacaaacaactatgttttaggagaactgcagggccttcagttgaagattgaattcacagtgttgtatcccatgtagggaaaaataagactaattttccccccacactctaacacactgtaattttgcacttggaactttgctaatctactgtccaacctccttctcaacaaagtcaaatcaaaggagaattaacctagaagaggggacaataaaataagaggtcctcagggagagggagaaccaaggaaatagaatctacttaaatctggccagatagcacctcgtggattcttctcagtctacttcaagtcagaaactggggagtcccctgggtagggcacaaacacaatggttaaatttgctaactcatacccaaaattaggaacccgacacatgctgaaatcaagaagaaactgagggatcaaagaacaaagtcaagagacactgattgggtcttttttctttttggacacgttacgaagaaatatcacataggtaagagtaagaaaactgaacagcctgccacattaaaatgatggagaacacagaaaatctggcccagtttttctagagatctcctccttaggtgtgagatgagagccctagtggatnnagtctattctcttacatcctgctgcnatgagttaagcangtccctanaggagccactctcctagcaatggngtacaatgnaaccatagcaacaacacacccacccnnngganaataggcacagttatccgatacacagtgtgcagatattctttaagtcatcaggagcaagtacaccaag

SEQ ID NO: 124646 - DNA, 1050 bp, Homo Sapiens
aacacaattactttattgatttcttacaatcaaatactgccaactagaattccttccactcacggatcactaaaaacaaagaagacttccttggtactttcaaatgatgccttatacaataaagttagaacttaaaatgcaccctcattaattatgtaaactggtaatttgtgttaaaaagcataactaataatttggtttctttcttcataacacggaaatttaaatatttctcctgatggtcttgaggttatcaccgttatgagtagtgcacagtgcggcacatatggtttcatctggaaaggtgtgtctcacaccttatacaaaacgccagtaacaaaatgcatacatacgtcaacgcctgagacaaagcatgtttcaaatacgaagcagcccctcaggctgccataatatttaggttttgcatgatcacttatgacataacagattaattatacataacatacttttatacattttaaccctgaagataagaaaaataattgttgcttgaaaaaattctttcaggcagccatttggttggtgtcaagagaaactgaccctccacgagtttagtgtctgccaggtcggcatcatcagctcaagtcagtgaatcaggtatgtgacacgcttcacagcgactgttccccacatcctggcaatgcgtcttctcctacagtacaccagatgacgaggcatttccaggattacccttgcctgtggctttcccttttcattttttgttgctggattaactgtatgacttagtattatttcctcttctcccttcttctatggccttccattttagttactcataaatcctttcagaatatcctcagaaagctccataaagggaagctctggagatggaaaatctgagggaaaagattgggtattggaatgtacttggctttcctggcatctgctgcaaacctctgcaaggctgaagagggtatagcagtttctgaatgcagaggcgagctccgttactctgacttttccacaaaatcagcacccacatccagctccttttctactggacctttt

SEQ ID NO: 124647 - DNA, 1321 bp, Homo Sapiens
  misc_feature (361)..(361): n is a, c, g, or t
  misc_feature (436)..(474): n is a, c, g, or t
  misc_feature (1057)..(1094): n is a, c, g, or t
ccgcgataaaatatgtgtcgtgacgaacaacgccgcagtggcacaaatcttctctggcccggaggaacatatccgacgttgtggttgtgccaccacggtgtaaaccgcctatattttctatagtgcgcccgcggtagacgccttaatatttctcttggtggagaggtctctcccacacatatgtgtgtctcccccccctcgcacggtgtgggggttccctccaaagtgcgccccgactaccagttttgtttccccatccacggcgtggtgtgtatacccgcgcactgcttccgcgttatttcgcgccctttggtgggcccctttgtgcacaaaatctcgcgggtgcctcttttgtggtgcncctcgcgggggatttttttggggcgccccccccgtttgtggttgcttgtccgttgcttgtctgtgcgtgtggtgnnnnnnnnnnnnnnnnnnnnnnnnnnnnnnnnnnnnnnnctcgggaaactggtttaataaggacaattccagaggggcctggctgtggccaaagctgtgccaaacggttgggatccagagctaaaggcacttcttgccacgtgagaccatgggcgaggctccccacgctatctccaccaccacagtcatgagagccaagcgagactggcctgtggcctggggctccacagctgcccagctccacctccggcatttactggtctcatcctgagaggcattgggtgcccactcactggctggatgctgggctggttcatgggtggcagagccagggtataccctttggggatgtccctaacccctcaggaccagaggcagcaccaagcagcatgtcacagccagtgctagggtcagctgcaccctttgctgggactctagctctcctcagagggcctcctagggccattccgggcactgtgggtggcaatggggagccccggctccctcattaggccagacaccagtctggccgggtcagggaggcccagccttgggccctgtcacacgtagtccagaatctctgtctccatttcgttttcactgccgtcggatggcttgaagnnnnnnnnnnnnnnnnnnnnnnnnnnnnnnnnnnnnnngtcattccccagactcgtacgtcagctgctcttctccgccatcagccttggctgagctggacaagagagcaggcctcttggagcggatggtctgccggatcatgagggacatggtgtccctgagctcgtcgctggtctaggggatggcccgaccatcccgttctgtgcaggaatctctggcccgtccttgccgtgaatgatcttctgccagtctccgcttccagtcg

SEQ ID NO: 124648 - DNA, 1049 bp, Homo Sapiens
  misc_feature (104)..(120): n is a, c, g, or t
  misc_feature (242)..(257): n is a, c, g, or t
  misc_feature (287)..(865): n is a, c, g, or t
  misc_feature (868)..(869): n is a, c, g, or t
  misc_feature (901)..(901): n is a, c, g, or t
  misc_feature (912)..(912): n is a, c, g, or t
  misc_feature (921)..(921): n is a, c, g, or t
tttttaatataaaacaaatcctttaatttttcaagtgtttaaaaaacaattttatacttaagccagccttgaagataagcacaaaatttaccagtttacatttnnnnnnnnnnnnnnnnncgacaacaactcaagcacccgctctgtgcatagcactattctaggtgcaataaaagggaatcttaaccttagaaatatgagttcactttctggaattgtattatctccttttccagagagtnnnnnnnnnnnnnnnngcctacagccgccctcgtgccgaattcttnnnnnnnnnnnnnnnnnnnnnnnnnnnnnnnnnnnnnnnnnnnnnnnnnnnnnnnnnnnnnnnnnnnnnnnnnnnnnnnnnnnnnnnnnnnnnnnnnnnnnnnnnnnnnnnnnnnnnnnnnnnnnnnnnnnnnnnnnnnnnnnnnnnnnnnnnnnnnnnnnnnnnnnnnnnnnnnnnnnnnnnnnnnnnnnnnnnnnnnnnnnnnnnnnnnnnnnnnnnnnnnnnnnnnnnnnnnnnnnnnnnnnnnnnnnnnnnnnnnnnnnnnnnnnnnnnnnnnnnnnnnnnnnnnnnnnnnnnnnnnnnnnnnnnnnnnnnnnnnnnnnnnnnnnnnnnnnnnnnnnnnnnnnnnnnnnnnnnnnnnnnnnnnnnnnnnnnnnnnnnnnnnnnnnnnnnnnnnnnnnnnnnnnnnnnnnnnnnnnnnnnnnnnnnnnnnnnnnnnnnnnnnnnnnnnnnnnnnnnnnnnnnnnnnnnnnnnnnnnnnnnnnnnnnnnnnnnnnnnnnnnnnnnnnnnnnnnnnnnnnnnnnnnnnnnnnnnnnnnnnnnnnnnnnnnnnnnnnnnnnnnnnnnnnnnnnnnnnnnganncctgcgctaccgatactgtccgctttctcccntcggagcgtgngcttctcanagccacgctgtaggtactcaatcggtgtaggtcgtcgtccaactgggtgtgtggacaacccccggtcagccgacgctgcgctatccgtactacgtctgagtcaccgggtagaccgactatcgcacggg

SEQ ID NO: 124649 - DNA, 2290 bp, Homo Sapiens
  misc_feature (230)..(242): n is a, c, g, or t
gctgagttagaaaatgtatttgtctctttattggtctagcttttctttaaattttcttcctctaatattgccttttcttgtacaaggcagaccaggtatctttttatgctgtttttcctttactaagaaaagtattgcatcttgaagacaaaccatttcccagagtagtgataaaaaataacactaaaaaaactttaaaggtgagtcacttacatcaccttgatgaagtnnnnnnnnnnnnngcagttgggactaagatagctaattccgaatatctgtgtctaaacaattttaaaaactgtttatttattttgtaagaatgtacccctagtccaaagtaagtatgttttaaaaaattttggccaaaaaatttacaaaaaccctttcagttcaacctaataaaagtgatatctagaaaatatgccacattattaagtctgtcttaaaaagttcagattctaaagcatttctaaggcacggtgttctggaagacaaatgtgcttctgttggcgttgtgttagatacaaagcatccctgacaggcttcaagtgagccccgacaggcaccttcttcctgatggtgtgggattggagaggagtcagacgtaggcccccagggctgcatgaaactctgttaggcactgtaccagctgctgaaacttgggcctctcctctggatctaaggcccagcaacaggccatcacagcaaataattcatcaggacagttgattggctgggctattcggtaaccatctttcaggtatgcggccatctcgaaggggtcaatgtccacgtagggagtctggcccagagtcatgagttcccacagcgtcactccaaaggcccacacatcactagcgctagagaactcgttattaaccagactttcaagagccatccaacgaactggcctgttttcattgtcccccagacagtgatagtccatggggaacaagtctctggagagggcattgtctgtgatcttaacttgaagtgtgtcatcaatgacacagttcctggcagccaggtctttgtggatgacttcccttctggccaggtagctcattccacaggcaatctgaatagccatgtgtaccaggtcttgctgagaaattgcctgtggattattggcctctactaacttgcactgtcgtaaaaacaatttaagattcccccaattcatgtaaggcaatatcaccatgggcttttctccttcttctatacacacatgagtaataggaagaagatttctgtgatgaagacctcgcagcttacaactttcagtgagcatcattgtcacctgaatttcagaagcttgatctttaactgttttgacaaatgcttgtttttctttatttggatctttttcatctattaaaatcccatggaaaatacgcccaaaagtaccttcttggagtacatcttttagagttatcctctctctggatattgctatatccttcaccttgcctttggcctccaaaagagtgacacttctcaagtcgttcttctctatccgcaaggtaggataactggtgataggagttgcattgttgggcgtgtctgctctcagatactgagtcgtctgggtggatggctgagacagcccttgggaactactgctggcactaatgctgtcatccagttcaatccttttcatactatgaaggtgcaaaacagctaatattattgctacgagaaatattactgcacaacaaacccctacactaatataaaacacacgcgtagaagtggttggagctgcatgtacaggatcataaatagttctgctagtgtttttgtccaaggctgaagtttttacttcttcaagttttttgtagcacattttccttcgtttaaaatttaagacggtaaaattttttgaagaatttactgtcaagttgagctgcattagtatcataacttcagaatctactttgccagtacaggaaagctctacccgaaacactgataaagtgcgtggaacttccccctgaacagaaatgttgacctggggcatatccattgccaaaacattgtccacttggaatcccagcttatattcaaccttggacttcgcatgccaggtgaagtgcaggaaatttgtctcactgggtactaacagactaaaggatagagcgtagtgactaataaggtcatttctcacataataaagttctgcatcaagaccgatcagccggcgcacctcgtcctcgctcaggtagagactcgcgctgggccccgcggaagcctcgtgccgaattcgccacccaggcctcgctaccttgga

SEQ ID NO: 124650 - DNA, 611 bp, Homo Sapiens
gctggaccggtccggaattcccgggatatcgtcgaccacgcgtggggttgaggagaggctccagacccgcacgccgcgcgcacagagctctcagcgccgctcccagccacagcctcccgcgcctcgctcagctccaacatggcaaaaatctccagccctacagagactgagcggtgcatcgagtccctgattgctgtcttccagaagtatgctggaaaggatggttataactacactctctccaagacagagttcctaagcttcatgaatacagaactagctgccttcacaaagaaccagaaggaccctggtgtccttgaccgcatgatgaagaaactggacaccaacagtgatggtcagctagatttctcagaatttcttaatctgattggtggcctagctatggcttgccatgactccttcctcaaggctgtcccttcccagaagcggacctgaggaccccttggccctggccttcaaacccaccccctttccttccagcctttctgtcatcatctccacagcccacccatcccctgagcacactaaccacctcatgcaggccccacctgccaatagtaataaagcaatgtcacttttttaaaacatga

SEQ ID NO: 124651 - DNA, 991 bp, Homo Sapiens
  misc_feature (180)..(180): n is a, c, g, or t
  misc_feature (182)..(182): n is a, c, g, or t
  misc_feature (197)..(197): n is a, c, g, or t
  misc_feature (203)..(204): n is a, c, g, or t
  misc_feature (819)..(853): n is a, c, g, or t
  misc_feature (856)..(885): n is a, c, g, or t
aatgtgggtggaggaaatcccaaaggcacctaggtccattgccccaggattcttccttagggaaaacaggctaatggacccatgttccactttaccttactggggccccgccgcgcccaaaacggaatggttcttagaaaggcttctcggaggggccgaggccggcccgacatgtttttntntgtttgtggtgttgntggtgnnggttttaaaaaagtgacattgctttattactattggcaggtggggcctgcatgaggtggttagtgtgctcaggggatgggtgggctgtggagatgatgacagaaaggctggaaggaaagggggtgggtttgaaggccagggccaaggggtcctcaggtccgcttctgggaagggacagccttgaggaaggagtcatggcaagccatagctaggccaccaatcagattaagaaattctgagaaatctagctgaccatcactgttggtgtccagtttcttcatcatgcggtcaaggacaccagggtccttctggttctttgtgaaggcagctagttctgtattcatgaagcttaggaactctgtcttggagagagtgtagttataaccatcctttccagcatacttctggaagacagcaatcagggactcgatgcaccgctcagtctctgtagggctggagatttttgccatgttggagctgagcgaggcgcgggaggctgtggctgggagcggcgctgagagctctgtgcgcgcggcgtgcgggtctggagcctctcctcaaccccccggccgtaatggccgaattcccgggcatatgtccggtaccgtcgactgnnnnnnnnnnnnnnnnnnnnnnnnnnnnnnnnnnncgnnnnnnnnnnnnnnnnnnnnnnnnnnnnnntcggggtcagttgtccgggctaaacaaaacgacgggtagcgccctatttacgtttgattgttccgtatttatcagagtttcttttttgttgttgtttcgtttctct

SEQ ID NO: 124652 - DNA, 1388 bp, Homo Sapiens
  misc_feature (44)..(54): n is a, c, g, or t
  misc_feature (94)..(94): n is a, c, g, or t
  misc_feature (134)..(134): n is a, c, g, or t
  misc_feature (170)..(170): n is a, c, g, or t
  misc_feature (172)..(172): n is a, c, g, or t
  misc_feature (285)..(285): n is a, c, g, or t
  misc_feature (325)..(325): n is a, c, g, or t
  misc_feature (451)..(451): n is a, c, g, or t
  misc_feature (460)..(460): n is a, c, g, or t
  misc_feature (513)..(513): n is a, c, g, or t
  misc_feature (650)..(682): n is a, c, g, or t
  misc_feature (1270)..(1304): n is a, c, g, or t
  misc_feature (1308)..(1348): n is a, c, g, or t
gcgaaggcattttcacgcggtctacctcgcaactgcgcgctgtnnnnnnnnnnntatctctgcacactgctcgccgagagaaagagtgtttgtnaacgatattttctaccaccatcgcgtctcctgtgctccanagagtgttggcgcacggcgggtcggggcgccttatnanattgattgatatcttggacagctcttccggcttgcggggcctctccccgggcgtgtatatagatctgcccccggtttaagggtccctctcgagagaaataccccagttatggngcgaagtgtgggttacacaggaacgcgtcttgtcggtgtngtcgcacctcgcggggggcgcctctttcttatatctgcgcggcggggaagaccgccccaagccccttcttggtttctttggaccaccgcgagagtattgtctccttaggggaaggcaccacagagntagtgtggncccgcactagttctcccacctttgccgcgtagcgcgggggggccccggggcgntcaccccacaaagaaggaatgggtgtgttatagaaaaggattctcttcaaacgaggtccgaggaggacggcaccgacccaggttgttcggctatcttgccgtgtggtggtccgtggtgtttctgttagtagtaggtnnnnnnnnnnnnnnnnnnnnnnnnnnnnnnnnnaaaagaaagtgaacattggctttattaactattggccaggtggggccctgccatgaggtggtttagtttgcttcaaggggatgggttggcctgtggagatgatgacagaaaggctggaaggaaagggggtgggtttgaaagccagggccaaggggtcctcaggtccgcttctgggaagggacagccttgaggaaggagtcatgcaagccatagctaggccaccaatcagattaagaaattctgagaaatctagctgaccatcactgttggtgtccagtttcttcatcatgcggtcaaggacaccagggtccttctggttctttgtgaaggcagctagttctgtattcatgaagcttaggaactctgtcttggagagagtgtagttataaccatcctttccagcatacttctggaagacagcaatcagggactcgatgcaccgctcagtctctgtagggctggagatttttgccatgttggagctgagcgaggcgcgggaggctgtggctgggagcggcgctgagagctctgtgcgcccccggccgtaatggccgaattcccgggcatatgtccggtaccgtcgactgnnnnnnnnnnnnnnnnnnnnnnnnnnnnnnnnnnncggnnnnnnnnnnnnnnnnnnnnnnnnnnnnnnnnnnnnnnnnnctccggcagagctacgccctatagtgatcgatacgacctg

SEQ ID NO: 124653 - DNA, 1371 bp, Homo Sapiens
gacgagactcgaatacaaagttatatttattttcaacaatgaaaacaacacaacaaagtggagtcaatccactaattttttaaatctaacacaatgcttagcacaaacaatactcaataaataacacattaaccaagtaacattattcttaacactctctagagttgtgtgcgcgttttaaggaaaactgaggggtaggtaaagaaagacatccggcagacttgactgagaagggctccaaaaaaagaacagccaaagagcagggtacccaaatactaagttagcaaaatgaatacagcattttcaaagcagtctagaaatcagagctcactgggggaaatgacaagggtttggggataatccgtgttcaaggcctcataattaaatcttctcctatttctagattctttatttggaatctatcccaatctaaaggagcttctgccaaaggacaggagattacttatgctgcctgaaatggcctatgcctcctaaatttcctttcactttgtcactactatagcaagggttccattccaacaatggattactactatgtagaccaactcctgtctgatttagatcttcctttcataaacacattgatacttgttcaaggacagctgtaaatacatccaatttcttttctttttatccccctctacaactctgcttggctacaaaaatctaggactcacagagcaacagcagcgatggtcagaaaataagtgccagttccaatgcaagaactctctaaagttcattggtcacaattttttttaaccacctcacctaccatgacttttttcttttctcattatcttgccaattatttctttcgaaattcaatcctccgagctacattctgagcaccaaattttttgaccaatgcctctctggtatcctcatcatctttttgcaaatctatgtcatcttgtcgggaccaaatgggatatccatcagctctctgaccagacgctaagaaggcggaagtagcctccagctcaccactattttttaggaaggcctgtgtaactgttgatagatccaagttaaacttctccattaactgccgaatgatcttaatggcagctcccacctctggttgagaaactttttcttcttcttcttcttcctcctcatcaggctgtgtttctgagtcttcctcaggtgtgggtggatcatcatcacacatagttatatgtatttcaaaatcaggagggctctcatccaccacaacctcctcaaactcccgggtgggttccacaagcatctttttgactgcttcttcattctcctggatttcttccttcacatactcttcttcaggcaaatctggagttctcttattctgtgggtccccgctatccg

SEQ ID NO: 124654 - DNA, 1124 bp, Homo Sapiens
  misc_feature (137)..(137): n is a, c, g, or t
actatttttttaggaaaggcctgtgtaaactgttggataagatcccaagtttaacttcttccatttaactgccggaatgatcttaatgggcagctccccacctctgggttgagaaactttttcttcttcttcttctntcctcctcatcaggctgtgtttctgagtcttcctcaggtgtgggtggatcatcatcacacatagttatatgtatttcaaaatcaggagggctctcatccaccacaacctcctcaaactcccgggtggcttccacaagcatctttttgactgcttcttcattctcctggatttcttccttcacatactcttcttcaggcaaatctggagttctcttattctgtggttccccgctatccgcggcctccgggtcctcctccgccttccgcttgagcttctgggaggaggggctcaccggcgcgtcccccagcaggtacttatgctcctggccccgcaggtgcttgaggtagcggtccttcagggactgccacgagtgctgcgtgagcgagctcttctccatcgctttccacaaggcgttaccggtgacggagctgggcgagcgggcattttccttcacgtaggtaaggatggctacgtcgtccgcatccgtgaaggcgatccgcccggcgtgccgctgcggctccggctccgcggcgccctcggccagggccccgggctttgcttccgagccggtgtccgccgccgaggcggggcccagccgataggcctccagctccagcctctcgttgcgctccacgcagtccaggatgtactgcgtggagatgaaatcacccgaggcctcggccagcgcctccccgggctgggccagcagcacggccccgggctcctgcactcggcacacggtgccgccgccgtgcaggatgagcgtcgacagccgacgcttggccgggctgggccgcacgtagaaggacatggagctgccgtcgtccctcacgaacagagtcgaggaatgggtgggcccgttggggtctttgcccaaatccatcgcctccgccatgtctgacgccgagcactactagaatagctaccccctcccgagcgcctggcacacagagctcaactgactgagctgtcaccgccctcgtgcc

SEQ ID NO: 124655 - DNA, 841 bp, Homo Sapiens
ttggaactcaaccataatattggaagcgcaaaagggtattctaagagtgtagggtagcaagggagtgagaatagggtaagacccaaagggccacccatccttgacttgttgtagaggaggacggagttccatgtctttctacgtgggcccagcccggccaagcgtcggcagtcgacgttcatcttgcacggcggcggcaccgtgtgccgagtgcaggagcccggggccgtgctgctggcccagcccggggaggcgctggccgaggcctcgggtgatttcatctccacgcagtacatcctggactgcgtggagcgcaacgagaggctggagctggaggcctatcggctgggccccgcctcggcggcggacaccggctcggaagcaaagcccggggccctggccgagggcgccgcggagccggagccgcagcggcacgccgggcggatcgccttcacggatgcggacgacgtagccatccttacctacgtgaaggaaaatgcccgctcgcccagctccgtcaccggtaacgccttgtggaaagcgatggagaagagctcgctcacgcagcactcgtggcagtccctgaaggaccgctacctcaagcacctgcggggccaggagcataagtacctgctgggggacgcgccggtgagcccctcctcccagaagctcaagcggaaggcggaggaggacccggaggccgcggatagcgggggtgaggaggctgagcgcggggcctcgcggatatctgcgcgggtggggttgggatctttctcctggctgcctggcgtccatcctcgtgccgaattcggcgcgccgtcgacttcatactctgtcacat

SEQ ID NO: 124656 - DNA, 951 bp, Homo Sapiens
  misc_feature (468)..(492): n is a, c, g, or t
tcatagcctcgagcttcttgtggtcccacctgcggctgggcccagggccggggaagcgcggcaatgttagcagctcccagctttgtgccgcctgtcgtgctggagaccttcccagcaactgtgaatggcaccgtggaggtcgacagtgggccgggcgcttcgacctgcccccaggtttcatgttcaaggtacaggcccagcacgactacacggccactgacacagacgagctgcagctcaaggctggtgatcgtggtgcctggtgatccccttccagaaccctgaagacgcacggatgaaggctggctcatgggcgtgaaggagagcgaactggaaccagcacaaggagctggagaagtgccgtggcgtcttccccgagaacttcactgagagggtcccatgacggcggggcccaggcagcctccgggcgtgtgaagaacacctcctcccggaaaaatgtgtggttcnnnnnnnnnnnnnnnnnnnnnnnnncatcttttgaagagcaaagggaaatcaagaggagacccccaggcagaggggcgttctcccaaagattaggtcgttttccaaagagccgcgtcccggcaagtccggcggaattcaccagtgttcctgaagctgctgtgtcctctagttgagtttctggcgcccctgcctgtgcccgcatgtgtgcctggccgcagggcggggctgggggctgccgagccaccatgcttgcctgaagcttcggccgcgccacccgggcaagggtcctcttttcctggcagctgctgtgggtggggcccagacaccagcctagcctggctctgccccgcagacggtctgtgtgctgtttgaaaataaatcttagtgttcaaaacaaaatgaaacagaaaaacaagtggtaaaaactttcaggacacatctcactcattatccagaacacctgctcgcgcctgacacatgcgg

SEQ ID NO: 124657 - DNA, 462 bp, Homo Sapiens
  misc_feature (111)..(230): n is a, c, g, or t
  misc_feature (325)..(363): n is a, c, g, or t
tggaaagatgaggtcttattatattgtccaggctggtcttgaattcctgggctcaagcttcccaagtagctgcaacaacaggcacacaccaccatgctcaactaattttannnnnnnnnnnnnnnnnnnnnnnnnnnnnnnnnnnnnnnnnnnnnnnnnnnnnnnnnnnnnnnnnnnnnnnnnnnnnnnnnnnnnnnnnnnnnnnnnnnnnnnnnnnnnnnnnnnnnnnncatgcctggcccaggtaacatgtttattgagctgtacatgcatatgagaaataagaaacttttttttcctactatcatctcttaaatatatgcgnnnnnnnnnnnnnnnnnnnnnnnnnnnnnnnnnnnnnnnataaatatcatgcacaactataacctatgggaatgatgtagtaacacagattattcatcttgttagagttgtattaaaaataaacaagcatttcaaatt

SEQ ID NO: 124658 - DNA, 792 bp, Homo Sapiens
tgattgtatcacaagaatctttaatgtttactttaaagttgactcacggtggggttgtatatgtgtttagtaaagtgtgccaagtgctcacactgagaccagtccagttcaaattagtgtactccacgagggtgttttctgtgcccagcaaggtcatgaagggccttgacttttcttggttaggccggctttgctggtgacttcttccaaactctgcaggagcagtctaccccaacacacatcatcagtcccatataaaagaataagatggaaactttctcaatgtatttcatcagtttagcacatctctggtacaaaaatccaagaaaggtagcacaaaagcgaaagcaccaaccaagcttacatataaacaaacatgcatacatcctaaatactacacaatagtacccaaatgaatacaacattgcattaaaggtataaaagcactgtactgaaaacttaaaagttacacgtgaatactgcactgtaaatcctgaatactataatgacccacccccacccttccacagccctggtgagggtcagaaaccattcatctgcctccagactttgctagtcctcagagacactgctgcgagggtagtgggcagtgggattagcctcccgcagagctctggcctcctccagagcttctctgtatcgggagggccaggcctgggggtctttcttaaagaccctggccaggaactccatgatttgcatcttggtgatttcgcggctggcccgggagccccaaaaaaacttgtatttgggcggggtcccgtatgggac

SEQ ID NO: 124659 - DNA, 998 bp, Homo Sapiens
  misc_feature (693)..(693): n is a, c, g, or t
  misc_feature (727)..(727): n is a, c, g, or t
  misc_feature (751)..(751): n is a, c, g, or t
  misc_feature (940)..(940): n is a, c, g, or t
  misc_feature (944)..(944): n is a, c, g, or t
gaaaggttacctgattcttttatttaagaaaagtgaaatacatggacctgaagtgagacagcagagggagggagtaagagcggccagggcaaggcagcttggctggccagcccccaaccctctgactgaaaagccagcagcaggctgcatctctgagggccatacctgctttgtacccaccttggggcctcagagctagctactctagaggaccacagggtgcagagagggtgtcctgagggtccttcctaagagggattcctgaggagggagctgagaccctaagggcagcagcaatcttctggttaaactgctccccttcactgtcccacctaggggtggggaagagccaggagcaatggggaatgctgtgagggctgtgggggtggggggacccagcagacctgggggccgggttgaatgtcagctgcttgaagagaggtccatggtgctggcactgaggccccgggagacctggaggggtgctgcactaggttggttcagatagttcaaggaggctgctcgcttcatgttgctgctggagggccgaggctcagtcccctggagcttcctcaccaagagttcactgcttctgcggagcacatcccggatcttgccaagagagccactcctctgcagggtcccactgccatccccggaccactccacagccacagaagcatcttcacctcnctcgaatttcacactgtctccagggccctcctgngaggtccttctaccatcactctcnccaagcagctctgccaccttcgtctggctgatagggtcagtgccctgtctccgggacgcatggcacatcctccatgtctcagcagctccagctttcctggcgctataagagctccaagttctcgagtattgtcatgtgggctgccacttgcaagctgtacagctcatatcgcaaggtgtccactcatgngcgntttgtattccccgtctcgcagcacaatggctgtgcacacaagacagtctgtagg

SEQ ID NO: 124660 - DNA, 469 bp, Homo Sapiens
gagaaaacactattgatattttaatggcaaatgacttcttgtatcaacacacaagtatatgccagtattcatgtggttcttccaggtagcttctccaccagattgtggccttctggaaaaccctagcagaggctaaacaaagtcccaggtccagagatagactggtccagagacagatgtgatcctaggtccagagatacactgtgaccatgggatggatggactctaggagccagtctttgggaggccgaggtccctgagctgatggggtagtgttgtctgtttcaggtctcccggggcctcagtgccagcaccatggacctctcttcaagcagctgacattcaacccggcccccaggtctgctgggtccccccacccccacagccctcacagcattccccattgctcctggctcttccccacccctaggtgggacagtgaaggggagcagtttaaccagaagattgc

SEQ ID NO: 124661 - DNA, 581 bp, Homo Sapiens
  misc_feature (16)..(16): n is a, c, g, or t
  misc_feature (37)..(37): n is a, c, g, or t
  misc_feature (50)..(50): n is a, c, g, or t
  misc_feature (59)..(59): n is a, c, g, or t
  misc_feature (98)..(98): n is a, c, g, or t
  misc_feature (236)..(236): n is a, c, g, or t
tgactgaaaagcccanagcaggctgcatctctgaggnccatacctgcttngtacccacnttggggcctcagagctagctactctagaggaccacaggntccagagagggtgtcctgagggtccttcctaagagggattcctgaggagggagctgagaccctaagggcagcagcaatcttctggttaaactgctccccttcaactgttccacctaggggtggggaagagccaggagnaatggggaatgcttgtgagggctgtgggggtggggggacccagctttccctggcgcctatacagagctcccaggtttctcagagtagtgttcactgtggggctgctcactttgcaggccttgtaccagcctccatactcagcagtagtgtcccaccctcatggtgccgggcttttgctcatttcctcccgctcctctgcatgcatccagatgggcttgtggtcatcatccacagacccaaactcctgtacatgggcacgggtcaggatctctttgtatagtgtctcagcctcagcatatttgccctgtttcaggtaacaggaagccaggttgttcttggtccggg

SEQ ID NO: 124662 - DNA, 852 bp, Homo Sapiens
ttttgggtgggaagacagaacagctttttattcagttaggtataaatcatatttacaaggaagaggtggggtgtactggggagccgtatcaggtccagggtcctgatgattctccttcaaggggacagtcctgctgcctcctctcatgctccctgggagactctccctcctcggtctctctggacctggcctgctgtgggcagctcagccatgcagggtagagctgggaatgcagatggggtggttaaagcaggagaaagagtgtggcaaggccagcatggggtggctgctccagggcccctgagcatagcctccttcttgcatcttgggttcaggcttcaagcgctggtgaggctggtggggtctccagggctccaggctgctcactgggctatggccctttaggggtctgtgaccgctcagtcctcttgcagcctttggagccctttcctttcttgccagtcttggaggcccccctgtccttcctgcagccctgggctggtttctgtggggatggtgtcttgtccagatgctgcatcagctgctgcacccagagctcctttgggtctgcacatagctctgcctgagagcgcttgcggggcaagaacaggatagctgggatggagcagcctaagcttggttcctgcttccggtagctgcggacaaccttggcgggaatcttcctttggctgtacttgaggcaacagtcctgagcccctccatcactgccttgggtcctggggatgccaaaggccagaaccaggataaggaggctcagagccagtgactgagccatgtctgtggtagagggtgagtaagaggccagagctgagggtgaggtgggcagctgca

SEQ ID NO: 124663 - DNA, 453 bp, Homo Sapiens
  misc_feature (61)..(80): n is a, c, g, or t
gtgcctagctaaaattaaccctcactacaagggaataagcttgcggccgcatacgcggtcnnnnnnnnnnnnnnnnnnnngggtgggaagacagaacagctttttattcagttaggtataaatcatatttacaaggaagaggtggggtgtactggggagccgtatcaggtccagggtcctgatgattctccttcaaggggacagtcctgctgcctcctctcatgctccctgggagactctccctcctcggtctctctggacctggcctgctgtgggcagctcagccatgcagggtagagctgggaatgcagatggggtggttaaagcaggagaaagaagtgtggcaaggccagcatggggtggctgctccagggcccctgagcatagcctccttcttgcatcttgggttcaggcttcaagcgctggtgaggctgggcctcgtgccgaattctt

SEQ ID NO: 124664 - DNA, 1062 bp, Homo Sapiens
  misc_feature (57)..(57): n is a, c, g, or t
  misc_feature (208)..(690): n is a, c, g, or t
  misc_feature (777)..(797): n is a, c, g, or t
  misc_feature (1051)..(1051): n is a, c, g, or t
gccagcgtatacgatagccacgtcgttgacgggttgtcaacaccagttgacgacgcntaacgatgagtactaagctagttgagaagcgcagcttccgaggagaagcgacagtaccgtagtcgcaggtcgaacagagaggcacgaggagctccaggggaaacgcttgtatcttatagtcagtcggttcgcccctctgacttagcgcgannnnnnnnnnnnnnnnnnnnnnnnnnnnnnnnnnnnnnnnnnnnnnnnnnnnnnnnnnnnnnnnnnnnnnnnnnnnnnnnnnnnnnnnnnnnnnnnnnnnnnnnnnnnnnnnnnnnnnnnnnnnnnnnnnnnnnnnnnnnnnnnnnnnnnnnnnnnnnnnnnnnnnnnnnnnnnnnnnnnnnnnnnnnnnnnnnnnnnnnnnnnnnnnnnnnnnnnnnnnnnnnnnnnnnnnnnnnnnnnnnnnnnnnnnnnnnnnnnnnnnnnnnnnnnnnnnnnnnnnnnnnnnnnnnnnnnnnnnnnnnnnnnnnnnnnnnnnnnnnnnnnnnnnnnnnnnnnnnnnnnnnnnnnnnnnnnnnnnnnnnnnnnnnnnnnnnnnnnnnnnnnnnnnnnnnnnnnnnnnnnnnnnnnnnnnnnnnnnnnnnnnnnnnnnnnnnnnnnnnnnnnnnnnnnnnnnnnnnnnnnnnnnnnnnnnnnnnnnnnnnnaagaattcggcacgaggtttatttctaacaagaggaaaataataaaataaaattaaaataggcttcagttggaaccaagtttcttgnnnnnnnnnnnnnnnnnnnnngaacaaattaattacacaccaacaatcttcttttattacaacatgaacccaggaggaggaaaggagacaggggaggacagggagggaggactgaggtggttgtgaggacaagcaccaaaagctttcttcagatcacagggagccctgttcagctccccagccaaattcctttaaaataaaaaactgtgagcacggctatgtgaagtttcctcctcctgggtggaacagtcaggggaagggagagggagaagggnggtaggaagaa

SEQ ID NO: 124665 - DNA, 1105 bp, Homo Sapiens
  misc_feature (60)..(83): n is a, c, g, or t
gtgccatgctcaaattaaccctcactacaagggaataagcttgcggccgcctgctcaggnnnnnnnnnnnnnnnnnnnnnnnngcctcaccgcagccttgccgccacctttattgggcactcagccctgaggctctacacacacgcgccgggggatgggaggggatggggtgtcactcggggcagggaccctctggcgggaggacgggtggctggtgataagagcatggccccaggggcccggcgccttggcccccggaacgctctgtgaccctcgcagctgacctggcctaagggcgtgcagagtcgtgacctggaccacccgtgggtgaactggctccccaagttctgggctcacttgggggcattgaagggcacggcccgctggttcatggggttgtcaggagagcggagccactccttcttgagcagctgtttcagctgcgacagccgcatgttggggttctcttgtttgagccgcggcagctgggcttcctcaaaggctgtgaaggctgcccgcatgcgtctttctgggtgccggtcggccgcctcctccgccacgctgagcactgcaatggcgtcctcgatggtgcgcgcctccacgctgccctcctccagcacgcggcggttcacgttctcctccagcggcacctccagatggctcttggctttctcggctgtgtccggggcctccctgagctgatggtctcggcgcagcgtgtcctcgatctgggcccgggtgaccttgctggacgtggccacccgcggcgccttgccgcccttgagcttggagtcctcctcctccagtaggcgctgcgtctccttcttacgttccagctggtcgaggcgccgcttctccttctcctccttgcgctgctccttcctcatgacgtgtttgtcgtcgtccttccagtaggcatcctccagctccttctgcttcttggcatcagcggccgccttggcctctgccctacgtgcccgggccgctgccgacttggtgttctcaccctggaacttcttgggcatccctcagcaggcttcttaccccagcgccggcccggtcgcctcgtgccgaattcgaacccagcctcgtacctagaccgtaa

SEQ ID NO: 124666 - DNA, 341 bp, Homo Sapiens
  misc_feature (91)..(111): n is a, c, g, or t
  misc_feature (162)..(207): n is a, c, g, or t
ccaaaaaatgtttctaagggttttatttctaacaagaggaaaataataaaataaaattaaaataggcttcagttggaaccaagtttcttgnnnnnnnnnnnnnnnnnnnnngaacaaattaattacacaccaacaatcttcttttattacaacatgaacccnnnnnnnnnnnnnnnnnnnnnnnnnnnnnnnnnnnnnnnnnnnnnntggttgtgaggacaagcaccaaaagctttcttcagatcacagggagccctgttcagctccccagccaaattcctttaaaataaaaaactgtgagcacggctatgtgaagtttcctcctcctgggtggaacagtc

SEQ ID NO: 124667 - DNA, 940 bp, Homo Sapiens
  misc_feature (82)..(102): n is a, c, g, or t
  misc_feature (152)..(192): n is a, c, g, or t
  misc_feature (333)..(392): n is a, c, g, or t
  misc_feature (896)..(896): n is a, c, g, or t
  misc_feature (903)..(903): n is a, c, g, or t
gtttctaagggttttatttctaacaagaggaaaataataaaataaaattaaaataggcttcagttggaaccaagtttcttgnnnnnnnnnnnnnnnnnnnnngaacaaattaattacacaccaacaatcttcttttattacaacatgaaccnnnnnnnnnnnnnnnnnnnnnnnnnnnnnnnnnnnnnnnnnctgaggtggttgtgaggacaagcaccaaaagctttcttcagatcacagggagccctgttcagctccccagccaaattcctttaaaataaaaaactgtgagcacggctatgtgaagtttcctcctcctgggtggaacagtcnnnnnnnnnnnnnnnnnnnnnnnnnnnnnnnnnnnnnnnnnnnnnnnnnnnnnnnnnnnncaggggttagtgtagcatggcctggccaggaccagaactggggagagaagggaggagagtcccccagtttgcgggatgcccaagaagttccagggtgagaacaccaagtcggcagcggcccgggcacgtagggcagaggccaaggcggccgctgatgccaagaagcagaaggagctggaggatgcctactggaaggacgacgacaaacacgtcatgaggaaggagcagcgcaaggaggagaaggagaagcggcgcctcgaccagctggaacgtaagaaggagacgcagcgcctactggaggaggaggactccaagctcaagggcggcaaggcgccgcgggtggccacgtccagcaagggtcacccggggcccagatccgagacacgctgcgccgagaccatcagctcagggaggcccccggaccagccgagaaagccaagagcccatctgggagtgccgctgggaagaaaacctggaacgcccccgtggctggaaggagggccnccctggnaggccccccaccatccgaagaacgccatttgcaatgt

SEQ ID NO: 124668 - DNA, 1475 bp, Homo Sapiens
aaaaaattaagaggggcaatattcccaaattccccaatggcagttttcaaaaataaaggcttgttttttaaaaccaaaatccccccccaggcattattttcgaggcttaaatattttggccccccaaccccaagaatttcgaggtataaacatttaattttccatctgtaaggcaaaatattggaaggacaaaaatatatatgcaaaatagcgctgggaaattatgttttcctatgcaagtgatcaaggaaaaaagcaaagaaaaaggaaacccttagcactaagtttgctgtagtgaaaatatggttaacggtgccgtgcaaaattagatttgttgaaaagtagttctattacagggagcaaaagcaaagaagcaagtttgtgggcaactcggaagaggggatcatattctcatttccttaattgtaatttaaataatcattctccataatttctctttctagagctttcttctttgtatgctatcacgtaaggtagtactatttcaccttaaaaaatggaaagacaaatttcagcctaagaatgatgtattctgagttggcaattacttaaaacaatgagagagtaaaacacatcaaacttaaagtgtttactttttgaacattaaaataaatgtcaggtaaatacagaaaaatatataatcactagttctcagcattttatcaatccctttgtttctcttcttctagaagattctatgagcattatgttgctccgatcaaaagtaacctcactactcaaataccatcatagcttcaatgtgcattatagtgatttcagtagattcacactcaaatcttttcagtgtcatacatttattaagccataaagttatgaaaccctcagctcttgtggagagatctgggcagaatttatacaagaagaagtttaatttatcacttaaaaatcatctcataattgtggtaacagatttttaaagtaaccctttggaaaaaattttacgtgatacccaaaggcactagttcacataaggggtgtggctgaaaaagcaaaacaaagccattgtgtaagtaaagagcacacaaaaaaaggatattaaaaggaaacctgttaagctttaaagttattctaaaaatggcacttttcacgttggtataaaatgaaagtgctttaagatgaaatttttatgtatttttttaaagctgatttttaaccccctgaaaatagggggttataacaagaacactgatagactctaactcatagcggcaataagtagtggatgtcactaaaatgctctgtgtgtgtctttattttttagtatttttaatgttgatagacttgctttatctatctgtgtatcattagtgagatttgcttttcaattctttactagaaagttacagctcatttaaaatagctggtaaatacagaaagcataaatatacagtaagtttacacactgattgtactaaatgcaacaatacaaagaa

SEQ ID NO: 124669 - DNA, 668 bp, Homo Sapiens
ttttacagtataaccgttacattttattattagttattgttgtcaatctcttaaggtgcctaattcataaacttaatcacaggtatgtatgcataggaaaaaacagtatgtataaggtttgttattatctgtggttttagacatccactgggggtctggttttagatatccactgtatcccctgtggataagggggtaactgctgtatcttttagtagaagcaagagcagccccatgtgggggctaacactggacactggtcagtttcagctcctcatgcaaagtgagggtatccttgtggctccagccctggggccccctgcggtcacctttggctccacagtctggttcttgaacccaagggcagacagcttgctacagcccaggcctgaggatgcacttccttcaccaggacccacaacccctgcccatgaagacctgtggagctcagggcatcccctgatgcaggttggtcaggacctgcccagcttgcaccagcaggttctgcgtctccatctgacctggcagaccttgcactcttccacccactgtggaggactaagtgtcttgaacttccagaacacagccagggccccatacttggcctggggagaagttgggaggcctaagcagatggttgggggccacagcaaggcattgcacacatg

SEQ ID NO: 124670 - DNA, 935 bp, Homo Sapiens
cagtcgacggtaccggacatatgcccgggaattcggccattacggccggggcttattgtaattttttttaagaaattcaaggtcattattattgtacaaaataagcgctttgattaacacagctatatagtttttttaatttttaaaaaacctgtggagacggtgatcttgtctttaaaacatgatagtcctttcagtataatgtcttagattaaagacgttgcctttaatatctgttgggaaggaaatgtccagacttttcaaatctcttattatatgtttcctttttttgtttacatagggaacaatgtttatagtcgtgtgtacagtgggggtctacaacaagaagtgtatattttcaaacaattttttaatgatttaacaatttttgtaaatcattttcaggcttctgcagctgtagattctcactgtgaatcccttgcttgctcatgcataagtgtatttgcaataccaaatatacaggtttagtatttttgcctgttagtgattgtttcacatgtgtaacgttttggttgagatgttaaatggtggacgagtactgtggatgtgaatgtgggaagtaattttaatcatatgtaattggtcacaaggcctaatttgcagtaactattgctgttttatttaacaatgccttgttgctttgtatgcattaatgtttggatgtaaagattgtgtgtctatccaacagggagccacagtatttaaattgaccaacctaatgttacaactactttgaggtggccaaatgtaaactaaaagccttaattaaagtggtgcaattttgtataacttagcatcagtagttcaataaatttggattgccatgcaagggcttgcattataattacttgccacttgaatgtgttttgtgtaatgttttaacagtgctagtaaataaatacgggtttaccctg

SEQ ID NO: 124671 - DNA, 452 bp, Homo Sapiens
aatgcaagcccttgcatggcaatccaaatttattgaactactgatgctaagttatacaaaattgcaccactttaattaaggcttttagtttacatttggccacctcaaagtagttgtaacattaggttggtcaatttaaatactgtggctccctgttggatagacacacaatctttacatccaaacattaatgcatacaaagcaacaaggcattgttaaataaaacagcaatagttactgcaaattaggccttgtgaccaattacatatgattaaaattacttcccacattcacatccacagtactcgtccaccatttaacatctcaaccaaaacgttacacatgtgaaacaatcactaacaggcaaaaatactaaacctgtatatttggtattgcaaatacacttctgcagctgtagattctcactgtgaatcccttgcttgccctcgtgc

SEQ ID NO: 124672 - DNA, 1269 bp, Homo Sapiens
gaagagccagtccgtctttactggagtgagtgcgggagacaaacagtttacaacaacctttagcattgtcttcaccatttgataaaaagttcactattatatttattgtataatgaagaaaaacaacacattcagggaaaaattgagattaacttatttttcttaaaaggttcatctcaaggatggcaacaaagtccagcttgtgccgccaaacggttttacatgatcaaaccgtgtacagcttcttgtgtgaactgttgactacaaacatttaccaaatacataaatctcttttaaaaaagccattttaaatatagcaaagcagtgtcttcttgcacagcaaagtgaagaaagtttctacagagaaatagaagttttacatttgtaaaatctttttcacattctaatcatctagcttaagatccaatgccaggagttttcagcttccttatttactatgtatttcttgtgcgcatgatggttaatacagaaattatgttgatgcattactagttatccttctagttaaaggaaagggtaaaacatgtattgttcttgtagaacaaacccctgatttagtctataacaaaatggacataattgggctcaaaagatggagttttgattgggaccacctgtgtacacacaacagtgacttccactcgcggtggagtggccattagagtactgaggaaggacagctgttggaaactgtactttaaccagtgcaatttaagctttttttgcttttgttctttagtaataaaatacttctggagggataaaattttcttgcaatggtgtctcatacaaaacacgagtctaaaagggtaagaaaagacggttctaaagcaacaccattagcgtcgtccccactctaggctggtttccacccagagatgtggatgtgggtgtgttcacacgtgggcgtctgggtgagagatgtctgtcaagtccatatgctccatgccacactggacgtatgggaaaaaggttaacagtcaaatattcagttcctgaaatggaatacattgttacttggtcagtgtaatttaaatacaaactccgagccttgagtagtagtattttagaaaacagtagttgtactgattataaacctgcatagaaagaaagactattgagatacagtcagaaaagccatctcataaggcacacaagaaaatagacagtaaatgtgaatgtgttaactcctattccccattctcctcctatccctcaaccccgacatcattaccgggttttcctctt

SEQ ID NO: 124673 - DNA, 958 bp, Homo Sapiens
  misc_feature (717)..(718): n is a, c, g, or t
  misc_feature (720)..(720): n is a, c, g, or t
  misc_feature (724)..(724): n is a, c, g, or t
  misc_feature (745)..(745): n is a, c, g, or t
tcaacaattacagaatatagctttatttatagaatcttacaaataaaacatttacagtccacataagttaattttcttttctaatttcttctcatacacctgagttatttaaaaaaatactgtgatggaactgcagaactgtaaagggaaataagaacaataaaatcctaacctctcttgcaaaaatcagacaactttgttttaaagtagatgcccagcatattgccatctctttggaagaggacttactatactcagctcttacgctacccaaacagagaagccttctttttaaaacccaaggttaaggaccagtgaagaatagctccaatttgacactagacacaaaatacctttgggggcaaagacaggggcaagctgtgtgccggtggtgaagtgagaaggagcagaacccctgtccctgcctcactgttcctgcacgtgacatacactttccttgctaacttattaataggagctggtgcatctggaaaatgaggtcgaagctgctaatgccaggggtgaaaaagtcctcccactgacttgctactccttagacttctaatatgtacaaatgcttgaaacagcaaattcaacaactaaaaatcaaaagaaattgccaatttttgactcatgaggcaaagctgttgccacaatcagtggcgactcaagtcagacgatgtgagcgtctccgcccctcctaagctccgactaggnntnaggnctgacctctgcgccaactacnggtttaaagaggatttccctttgaggcagctgtctatggaaggaaatttcttaaggtaatataggtgtgcacaaaaagggaaaacaccctatttcatttttcaatttgttaaagattatagttttgagctcctctcctaaactagaaatccactaactctaacataataccctttgtcttggagtagaatactaagttagagttagtattctc

SEQ ID NO: 124674 - DNA, 687 bp, Homo Sapiens
ggttttaaacctttaatgagaaaaaaatatataataccgagctcaaaaacactgtgtttggtgtcattgggtcaagggttggggatacacacggcagaattcggaaacagggtatagatcaacaaaaatacacagtcataacaagaaaaactggcgcctggcacaatcaactctcagtttcctcttcactcagcagcatgttggggatcccgcggctgatggggaacatacgtccagattccgggcactgcagggtgccctctatcacttccacctgcgggcagggagggacagagctgagcactggcagcctcagtgcgggaggcaggtggcccgggaagcaagtgatgggccgcttctcacctccagcagcaggtggtgcatggtcctcagaaactcctcattctcctcatatccctcaaccggccctttcggcacctggatcagacgcaagttatcggccgcctccaggaacgccgaccactccactttaggtatcatacgcgccacgaagttggggttgaattccacagggcagatacggacctcggtggcctggaggcgcagggggaagccacgggaccccaccccccgcacatgcgagctcagcagattgtgggtaagcagtttcatgtcgccgcacaaactctccctcgtgccgaattaacaccaggcctgactaccgat

SEQ ID NO: 124675 - DNA, 3540 bp, Homo Sapiens
  misc_feature (3392)..(3426): n is a, c, g, or t
  misc_feature (3429)..(3471): n is a, c, g, or t
taggtagcgaggcctgggtggcgaatccggcacgaggagcggccgcgatgtccttttgtgtcctacaagcagccggcggcgccgccgagtgaggggacgcggcgcggtggggcggcgcggcccgaggaggcggcggaggaggggccgcccgcggcccccggctcactccggcactccgggccgctcggcccccatgcctgcccgaccgcgctgccggagccccaggtgaccagcgccatgtccagccaggtggtgggcattgagcctctctacatcaaggcagagccggccagccctgacagtccaaagggttcctcggagacagagaccgagcctcctgtggccctggcccctggtccagctcccactcgctgcctcccaggccacaaggaagaggaggatggggagggggctgggcctggcgagcagggcggtgggaagctggtgctcagctccctgcccaagcgcctctgcctggtctgtggggacgtggcctccggctaccactatggtgtggcatcctgtgaggcctgcaaagccttcttcaagaggaccatccaggggagcatcgagtacagctgtccggcctccaacgagtgtgagatcaccaagcggagacgcaaggcctgccaggcctgccgcttcaccaagtgcctgcgggtgggcatgctcaaggagggagtgcgcctggaccgcgtccggggtgggcggcagaagtacaagcggcggccggaggtggacccactgcccttcccgggccccttccctgctgggcccctggcagtcgctggaggcccccggaagacagcagccccagtgaatgcactggtgtctcatctgctggtggttgagcctgagaagctctatgccatgcctgacccgcaggccctgatgggcacctcccagccgtggctaccctctgtgacctctttgaccgagagattgtggtcaccatcagctgggccaagagcatcccaggcttctcatcgctgtcgctgtctgaccagatgtcagtactgcagagcgtgtggatggaggtgctggtgctgggtgtggcccagcgctcactgccactgcaggatgagctggccttcgctgaggacttagtcctggatgaagagggggcacgggcagctggcctgggggaactgggggctgccctgctgcaactagtgcggcggctgcaggccctgcggctggagcgagaggagtatgttctactaaaggccttggcccttgccaattcagactctgtgcacatcgaagatgccgaggctgtggagcagctgcgagaagctctgcacgaggccctgctggagtatgaagccggccgggctggccccggagggggtgctgagcggcggcgggcgggcaggctgctgctcacgctaccgctcctccgccagacagcgggcaaagtgctggcccatttctatggggtgaagctggagggcaaggtgcccatgcacaagctgttcttggagatgctcgaggccatgatggactgaggcaaggggtgggactggtgggggttctggcaggacctgcctagcatggggtcagccccaagggctggggcggagctggggtctgggcagtgccacagcctgctggcagggccagggcaatgccatcagcccctgggaacaggccccacgccctctcctccccctcctagggggtgtcagaagctgggaacgtgtgtccaggctctgggcacagtgctgccccttgcaagccataacgtgcccccagagtgtagggggccttgcggaagccatagggggctgcacgggatgcgtgggaggcagaaacctatctcagggagggaaggggatggaggccagagtctcccagtgggtgatgcttttgctgctgcttaatcctaccccctcttcaaagcagagtgggacttggagagcaaaggcccatgcccccttcgctcctcctctcatcatttgcattgggcattagtgtccccccttgaagcaataactccaagcagactccagcccctggacccctggggtggccagggcttccccatcagctcccaacgagcctcctcagggggtaggagagcactgcctctatgccctgcagagcaataacactatatttatttttgggtttggccagggaggcgcagggacatggggcaagccagggcccagagcccttggctgtacagagactctattttaatgtatatttgctgcaaagagaaaccgcttttggttttaaacctttaatgagaaaaaaatatataataccgagctcaaaaacactgtgtttggtgtcattgggtcaagggttggggatacacacggcagaattcggaaacagggtatagatcaacaaaaatacacagtcataacaagaaaaactggcgcctggcacaatcaactctcagtttcctcttcactcagcagcatgttggggatcccgcggctgatggggaacatacgtccagattccgggcactgcagggtgccctctatcacttccacctccagcagcaggtggtgcatggtcctcagaaactcctcattctcctcatatccctcaaccggccctttcggcacctggatcagacgcaagttatcggccgcctccaggaacgccgaccactccactttaggtatcatacgcgccacgaagttggggttgaattccacagggcagatacggacctcggtggcctggaggcgcagggggaagccacgggaccccaccccccgcacatgcgagctcagcagattgtgggtaagcagtttcatgtcgccgcacaaactctcgccaggccggaaccggaaaaaggtcgtcctccgctgcctcacgtaccggggatgctccactcgatgctattggatagccaggagaaccggaagtggcgaacttgctggaacttcgtcgtgtttgtgggagctgaggtaggtagctgaaagacctgtcgggtcacgcgccgctaccggaagcgtctcagcaggaggttcctacggcgcacgcccagcttttgtttgccacaaattcttcgtaagatgcaaatcatatgcaaaatagctgcaatgcaggagctctcgttgaatgcaaaatagacacattttactcgtacacaggcgcctaacaccgtcgtcctctgtatcccactttcggttaaggggcagaaataccgccctatctgtaaattaggcccatggaagccgagccgcacctcattcctatatgcaaattagctgctccagtgccgaaagctccgccccatttgtagttgcgtcggctgtccagcacccagtgcaaacgaggcgtgggtcccggaagctctgttctgcgggtggccccccggccgtaatggccgaattcccgggcatatgtccggtaccgtcgactgnnnnnnnnnnnnnnnnnnnnnnnnnnnnnnnnnnncgnnnnnnnnnnnnnnnnnnnnnnnnnnnnnnnnnnnnnnnnnnnaaaacgcgctagcgccctatagtgatctatcattctttggttggggtggtcggtctgtccttccgcgtg

SEQ ID NO: 124676 - DNA, 635 bp, Homo Sapiens
gctcttctgcaattcggtgttttattctttccaaatctcaggcttatgcacaagatggaagagcactgttaaaataaaaaaatggacctaaagtggcttggctgacgtggctagcgggccactgagccgcgggtcccgggtcccaccctgctgtggggggagtccctgggccctggggcttcttggcactgtgtgacctgtgtgcaccccaggtgaccaggcgccgggacccctgcagggcagagcaacagggcaggggttggccctgcggggagagtgtctccagctgccgcgcacccgcaacagcccgttgtcccctcccgggccagctggtcttgcagccgtcctggcagagctgggggcagagccgtcagtcttgttcccagaggtctggagttgccgcagttggtgttgcggtgcctctgtgcctgatgacccaggccggggctacctggctccggcaccacactcagagaatctgctcggtgctggaggccgagatgtgcaggagccgccaggccgcgtaggggttgagctcgtcctggtctcggcagagcgcccacacgtacagcatccgcagcaccttgtccgggtcaccctccaccacctcgcctttggggttcctgaccaccatc

SEQ ID NO: 124677 - DNA, 643 bp, Homo Sapiens
gagtatcgatttattaggggtggcaaagaagagtgctagttagcagttttccatgtaaagttgtccttgactgatttgtccacatgtcagttgtaagtcccccactccctgcaaaaggaattatttctaacccagatgtatcacttgaaactttttagaagcaaaataatcagggaagttcctagaaaggtgtttggctttttggtttttgagggttggggtaaagaagacttcccccacaactgtcagcacaaaacagggtattgatttttaactctgatgtttctattggagttgaatactaaataaataactataatgagggaaatacatttctaataaaattccctacattctagaaacatccctgttttaatttttttatctaaatctttttgtgctttatgtgtaaagaaaaaaatgtactgagttacaatgcattttattaacactatgtacataatagctgctttgtgttcagaatggtagcagttgctttgtatattaaagtgatccttgtgaatttgtgaaatattgtcataaagtgctttttcttactgtaatctttgtggtatcaactgtcataatgctctttttacacaaacatttatgtgcagtcacataaacatgcttttaaaaactc

SEQ ID NO: 124678 - DNA, 1177 bp, Homo Sapiens
  misc_feature (273)..(303): n is a, c, g, or t
  misc_feature (341)..(394): n is a, c, g, or t
aagagggtaggtgccccaggaattgctttgggcaatcagacaagggatgtgagtgtgagtttgtgtgtcagtggctgtgtatcagaagcaaccagcgctaggagtggaccgattctattcccacaggggaaggcctccgtccatcccggttcctccaaaccactttcaggggataaattcagccactgcttccgaacaggacccctccctgggacaaaagagccaggtaggagaggatgaagtgagaaatcttgggatgaacacagggcacannnnnnnnnnnnnnnnnnnnnnnnnnnnnnnggagcccagtgtgatagaaaatgggcatgaaacctaannnnnnnnnnnnnnnnnnnnnnnnnnnnnnnnnnnnnnnnnnnnnnnnnnnnnngagggagtaagatcactcaaaggtgaaggggtcctgggtgctgaaaaagaagtgtccatccatgtggtcctccagggcatccttgtcactctcagcaggaaagcgctccttacagataggacactccttccatgtgggggtggcagggcccccagtgctggtttctgacagggtacccactgtaaagccactggccatgtcatagaaggcactgcccagttcaggaagcagtaagttggcctcctcacccccactctgcacagctgccatcaggactgacttctcatcttcagcctccgagtcagagctactgtccttagctggcccagagaggtgaggagaaatgggagccggctggctgatgacaacaaggggagaagcctctcgaggcccagcaggagaggagcctgggtctccacgctcacaaaggccatagggtgggagcctcatgtcttctggggactcgtcctctgagtctgtcagagctgccgggcagctcagccccacagcggcctcctcatcctctgtggtggcatcctcattccacttctcatctgccaccttctccaggcgggcctctagctttctcatgtactctagcaattcctgtttctcctcctgtaactgctccttttccttctggagcacacgcagggctgaccgcagctctgtcagctcccgcttactttctgacaactgtaccaggctagaatccttctcccgggccagctcagtcttgaacacttggttttgggtcctctcctcctgaactgccttctccaa

SEQ ID NO: 124679 - DNA, 884 bp, Homo Sapiens
  misc_feature (469)..(503): n is a, c, g, or t
  misc_feature (695)..(725): n is a, c, g, or t
  misc_feature (763)..(815): n is a, c, g, or t
tttacatatcatataaatatatttgttcaaactacaaagggatggatatcagggggaagcttttattgctgtggggggacctggagagggaggggggccttggaaatggggatacctgggaccacttgttccccccattcctcacagaaggcacaaatacattatttctttccatgtgaggagatgcgaggagaggatacagaatacaggaatcctcaaaaatacaaaaaacccctccaaactgaatacctaaggttatggaaaaggctagggtggggcacagaagtcaatgggggaacagaaagaggaaccaatgaaactgagaaccaaaagggacctgagaggccatgatgtccatgctgctgcctctgtgcagaccccagagaaaactcaggtaaaccaacggaaactccaaataagagagggtagggtgccccaggaattggctttggggcatcagacaagggannnnnnnnnnnnnnnnnnnnnnnnnnnnnnnnnnnatcagaagcaaccagggctaggagtggacgattctattcccacaggggaaggcctcctccatcccggttcctccaaaaccactttcaggggataaattcagccactgcttccgaacaggacccctccctgggacaaaagagccaggtaggagaggatgaagtgagaaatcttgggatgaaaacagggcacannnnnnnnnnnnnnnnnnnnnnnnnnnnnnnggagcccagtgtgatagaaaatgggcatgaaacctaannnnnnnnnnnnnnnnnnnnnnnnnnnnnnnnnnnnnnnnnnnnnnnnnnnnncgagggagtaagatcactctaaggtgaaggggtcctgggtgctgaaaaagaagtaccatccgcggccgc

SEQ ID NO: 124680 - DNA, 1040 bp, Homo Sapiens
  misc_feature (867)..(867): n is a, c, g, or t
tttttttagtttttcaacaaggtttcttttatttatttagcaagaaattactctttattgatcaaatcaccaggaatctgccgcaaaagacttaacatcttaatgaccactgaggcctgggctctgaggcttgctctgcctctcccagtccttaatggggtttagagggagagacgtcattaacagagaccaagtcagatggttgcaggtcctcctttcccagtcatcagacaagttgctcaattcttgtccagagcaggaaagagccagtacttcagtaaaattgaataaagaatttgatgttgcattataagatctctcttaacaatttagatttatcaacaatattggtccaaaactcatttgcttctaatttttttcattttgcaatttactttgtgtgtgtgttactttaataatctcactccctgtgcagaaattaatcaaccccgtgcaaagaaaaatccctcaacctggaatagcttcatcttactttggcaagagaaaacagaggtatttttgctcctcttctacccaagtgatgaacaaatatccccccaaagttcaaaatgttactctggcctcggaatgcatataaagactgctttagatgggctgattccaatcacctagaaagggcagccggaaccactatgcaggcagccttctttggaaatttcttacaatcaactcttgagaacatccgtgattgtggacaatggctctaaggtccaaacacttctgttctttcatctcacgagctaggctcagaggaggcatttgactgtcaggagcaagacagcagctgtggcccacgaggcaggacttcatactcgcggttgtcatgatccgggcgttcggttcctntttcacatgcacgatcagctggtgactctcgtctgggggatttgtttaaacaaaggagcgctgtcctgggaacatcatatccaaaaggtcacttagtctttaaaaccaacgtcatggctgctacgagcacttggatatgaaaagaacaagactcatctttgttgaagtcgggg

SEQ ID NO: 124681 - DNA, 1156 bp, Homo Sapiens
cacattttttggccacaattttaaccttcgggaggttgtggtggtttacctgttaaactaaattctgcaccttgcccctggggccggaaaagttaaatcccaccccccgggccaaaaggaaaaaatccccttcaaacctggaaaaaagcttcatctttcttttggcaagagaaaaacagaggttatttttgctctttttctgcccaagtgatgaacaaatatccccccaaagttcaaaatgttactctggcctcggaatgcatataaagactgctttagatgggctgattccaatcacctagaaagggcagccggaaccactatgcaggcagccttctttggaaatttcttacaatcaactcttgagaaccatccgtgattgtggacaatggctctaaggtccaaacaacttctgttctttcatctcacgagctaggctcagaggaggcatttgaactgtcaggagcaagaacagcagctgtggccccacgaggcaggacttcaataactcgcggcttgtcaatgatccgggccgttcggtttcccttttccacaatgccaacgatccacgcttggtgaccctctccgtacttggaggatttgatttcagaacaaaagcgagccgcctgttctcttggcagacaaatcagtaatgcccccagaggtttcagctgaggttccttgaagaagcccaaaccgtccactggccttgctgacggcagccatcttggcaattattggcagattatgaataacaaaggacacttcatttctttgttgttttgcaaggttctgggagtgtcctagaatgccaaagcctgtgatatctgtggccgcatgggcattaaatgtgtgcattaaacctgcagcagttctgttgagggtagccatattgaacatggcttcctgataggccagctccacctcttctctggagaccaccatctttactttattccatctttcaggattatccagccattggtgggcattgacagcaacctgggttcctaacggtttggttaacaccagcacgtccccaacgacggcgctgtccggcattatgaactcatttggttggcatactacagtggcaactccaccgacccggccgtaatggccgaattcccgggcatatgtccggtaccgtcgactg

SEQ ID NO: 124682 - DNA, 761 bp, Homo Sapiens
  misc_feature (700)..(700): n is a, c, g, or t
taataaaccataaaatttaaatattcaaatgaaaagaaacaaaaatagattatttaagccagcatgaatttctggttttactcttcctctagggcattgtaggcttgacttacctgggattagagtaataaagctatgatgctggtacaataatgaatgaggaagtaaaaatgggcaatgtcttcataaaatttactttcaaatctagatcagaagttcactcaagcctactgcaaaggcctgacactggttttgtctgtataaaactactctggctttttaccacactttcttcatcacagcttagtgttccctgcattctgatccttttgctcactaaagctcacttcaatctgtcaaaacatcaagggggaaaatccccaaaatgaaccgacgaataaacactcttaatgtgaacaatcatattcagaccagcctcttgtgcaaaaatacaagtcagtggattttttatccttacataactcaaatattgctatttttttcctgcctttactaaaatggcactttcgtttacatcaaccaattattttctacttgcttctaagtttctgagattgtatgctgtactggctattctttttgattaagctttacaatttccattccagaatatctggtctttgaccaactttatctaattttgtgaagacaatgtgctattaatcagtgaaaatcgcanaaggaaaaagaaaaggaagcaattaacaatagtaggatctcacttcagcatttgtataatt

SEQ ID NO: 124683 - DNA, 1504 bp, Homo Sapiens
  misc_feature (153)..(153): n is a, c, g, or t
  misc_feature (157)..(208): n is a, c, g, or t
ggggggggaagcccgacccctattttatgttccccggggtttcgttgggaaccaggtttggccccgggtgccgtttcccttatgggggccccggcacccaaggaaatgttttgaaaaagcttttttgagggcggaagggttcgaacatgttgngttnnnnnnnnnnnnnnnnnnnnnnnnnnnnnnnnnnnnnnnnnnnnnnnnnnnnttttctaccatgaacatttatttttgttaaagcagattataaattttcatcagtacaaatatatataacttacatttgattgtaaggccaacgttcaaaagtaaaaatgagatgagctctcttattgttatccgaggtcaagaggctgcaactgtcaaggggatgttctcaccaaaagggggtttgggggaagaggacacacacaaagctaataaaaccagaatccccatccccacaaaactcatgggaacaaaatttaaaggataaaacaaaacccaccaagacccatattacaaaccaatatggtaacctgtgttcccttctatggtatgattatgtcatgttaccttagtgttaaaggattaacataaggaaactgcagcaatatataaaagatatattctctatagagcatatttcgattgattccattaaaataatgacattagaattccatcataggtttaaaaccaggacaatactgcttttcctttatttaaaaaaaactacaacctagtgactgtattggtcataagcatgattgttgttgcaatgtgctacttacaatgaatgactgacagaaaacaagctagggatcctgtctgcagcttccagcctttcctctttttatttcagtaggcatcaatgataaatcaatcttatgtacaatttcttacaactaggcccctttaccctttggcaagattacttacaactcatacaacttcttaatatctgagaactatttaacatattctagatgcatacaaataaagattttggcttttgatatatataatatttattctgttactcaaaatggaagctcaacttctcccccaaaatatagctctgctgggcagttgctgatatgccctcctgggaattctggcagcatagcgtgcctctctgttccccagcctgagcacaaaccactcttcttgatctctaatacaggccactactgacaggaggcaggtgaatggcctgaaaaacaaagggagattgctttgcttcctgttgtgttttacatttcagtaaatgtgcttggaatatagattcttgttcagatactttgcctctctgttgccagagatttgtaagggggtaagggaagagggagtacagaaagcaacatttccttgacttctttagcctaattgcaaggcagcttttctctaggaatgctttttcccatgtctttcaaaatcacccctcacagtactctgggcctggacttgttccttgggacctttgggattagtgaaaagagtactaatcaggagacaaagtctg

SEQ ID NO: 124684 - DNA, 1533 bp, Homo Sapiens
ggatagaagggggtaacaggggcgggggcgaggatgattttaaatcgtgcagcgagcgcccgtcggaagcatccgcgggtaagggaacccccaggagataccccgggggaacgcgcttgggggtgggtttcacgggagggctggttcgccacgcggggtgttttttcgtttggggaatatcccaacccggtgcttatgccccatggtcttcggggagaacacggtaggggcttttccggctcgcattggggcggcgcgccacgaaaagagggttgagcaattctttcggaggcaggggccgcccgcagatgcggctgagggtgccgggagcggatggcgtgggtgcgttctccacacgtttacttttaaaaaataattgtacaaaacagaatgaattcttaaggcatatcagaaatgctgagtcccaggccggggccctgccccagccagggctgggactctgcagttgggagcttgtccagctgccccctctaatgcttttctcctccaggacacagggagcctccggaagcacagtagtccccgtgtgtcaccttaggctgacctctgtccccaggggtgacgtaatgctgtcactgtcttgaattcttcatcgtttaacagggagcccagtgttttcactttgcacattgggtatctggtcttgcctgtcctaccctgaacctgggttccctgggccatgtaacacccaggcagctctgatgcccctgggtacttggaggagctcccaggaagtccaagcctgcgccaggaatctctggctttcaaagtcttcaaaggctggagcggctgcccctgccacccacagactccacatagctctgacaacctgctttcctgaacgcctcgttcctgggtcctttcacccaccagacctcactgtgtggcctcaactctgaggcacctgccctctgaacccccagttctacaataaacggggtggattccaaacgtcactcagctctgaccttctctgacctttattcctcattcgtctgcctgctgagctcctattcgtactccaaagcctcagctaaaatgccctttccgcaaggacgccttctctgcttcctgtctggactctcacagttgcaggtctcttcttctggttctgtgatgctggaactgtctatgtctggctctgtttctcccagactgaaggctcctaggggattccagcaccaccaattggctgggaagacaggttattaaacagtctctcggatactgcactgggcattcaatgcctcacaaggacagcggtccaggtaagtcagattccagccgggctcttcctctgtcccatgtgatatccggaaggcccccgcctcactctgagacttggttccccaactttgatgcagtcggggaggtcagcccttggtccagccactccccacagtcatggtggctgaaagctggtgtgcaaccttgttcctcgaggggtccctgtgccgttcagcaagtcatgcagcgcggcctcaatcccccaagagtgggttgatcccgaaa

SEQ ID NO: 124685 - DNA, 1254 bp, Homo Sapiens
  misc_feature (79)..(126): n is a, c, g, or t
  misc_feature (1132)..(1166): n is a, c, g, or t
gaaggtagcataatggttgtttattatgaaaagagaaaaataaaaaattctaactaaggtaatgatagaataggaaaannnnnnnnnnnnnnnnnnnnnnnnnnnnnnnnnnnnnnnnnnnnnnnncaaaattaaaaataactacaacccctttaatccctactctttatgattctttaatattctttcatgtaatttactattaaaggattcaataaatataacttgcataaaagttaaagtgtcgtaacacatatttatcttaaggcattttatatgtaaaaatctcaattatgtcctatatcaaaacaaaaattttacaaagaaatattgctgaactttggagaatgacatattttaagcaagattcatcagaaggatattacagcagataaaacaattcaaatagcccactggaatgtacagcaaaatccaattcgacaatataaacaaagtcaaaataatctgcttcggtcagctacatatgctgtgactttgctatcaccagtaaggagttaactagaaactgagttcttaaacaatatatccactgtgagtataacaaaatgaagttagaatcttcatatgcaagtttaataaatcatcatggtttatttaacaaggttatactacattagagttttatatatatacatgtatatgtgatatgaagagactgatgtacaatcaataagtcttaaatctctcttccatggatttcccccatctccccacttagcagtaaaaggcatttttaggtttatataaacacattctttacaactgccttcttaacagaaaattactgtagtatataaatagcactgagcatttagtaaataagttacaggccaataagttcaattgtgcagttgtgaaatctaatgtcaaagagtttttgaaaccttaagactgggtgatctgcaatgtttccaacatgtcttcgacagccttaagagaatatttggtttccttcttacttcgacctgcaaactgataagctctgtttatttgactagctgcccaactagcatatttcatgttgtcctttttcgtttttgcacttgcttttggattagaacccggccgtaatggccgaattcccgggcatatgtccggtaccgtcgactgnnnnnnnnnnnnnnnnnnnnnnnnnnnnnnnnnnntgccgcttcctcgctcaacatactcgctgcgctcggtcgttcgcgttacgggtagccggccactatggacgggtgaggtcgagtgttc

SEQ ID NO: 124686 - DNA, 1404 bp, Homo Sapiens
  misc_feature (1287)..(1321): n is a, c, g, or t
  misc_feature (1325)..(1364): n is a, c, g, or t
gcaagtttaataaatcatcatggtttatttaacaaggttatactacattagagttttatatatatacatgtatatgtgatatgaagagactgatgtacaatcaataagtcttaaatctctcttccatggatttcccccatctccccacttagcagtaaaaggcatttttaggtttatataaacacattctttacaactgccttcttaacagaaaattactgtagtatataaatagcactgagcatttagtaaataagttacaggccaataagttcaattgtgcagttgtgaaatctaatgtcaaagagtttttgaaaccttaagactgggtgatctgcaatgtttccaacatgtcttcgacagccttaagagaatatttggtttccttcttacttcgacctgcaaactgataagctctgtttatttgactagctgcccaactagcatatttcatgttgtcctttttcgtttttgcacttgcttttggattagaagcaatatgacttgccgacatataaagtccaaacaaagctctcatatttctgttgttcagtttcaatgcctgtgcaaaatactttcttgaaagttcgaggttttcaagtccaccttgggtatacttaacttcagcatactgctgacagtataagtggttgtgtggattagtcatcattagttcctctaaacaaaaggctgcttttgcatagtcatgttcattgatgtaaagttctgcaagttcatgccaggcttcttggtctcccacaaattgttccagatactcattcagctcccgaatggcctccacatttttcccctgggcttttcgaatggcaatcttacgctttcttgcagcagtgttagttggatcttcttgtaaaatcctatcatatagctgtatagcatcatcatatctttccatggcttcaaatctcatgcctgttaatcgcttgactctgtgactgccagggaactgtcttctcagctcttgaagacaaaacaatgccaagtcatcccgaccatagtctagtgctgcaatcatcacctgttcatatatgatccaaatatcatctcccagcttagaagcatattcattaattaattcttctccaacttccacaatttgctcactatttcttgagttttcttctctccattttctcattttatctctcatttcttcccaagtgacatcgtaaagctctgagaccttcgccatcttcccagaacctagaggcagcccccggccgtaatggccgaattcccgggcatatgtccggtaccgtcgactgnnnnnnnnnnnnnnnnnnnnnnnnnnnnnnnnnnncggnnnnnnnnnnnnnnnnnnnnnnnnnnnnnnnnnnnnnnnntctgtgccgagtagcgccctatagtgagtctatacactcc

SEQ ID NO: 124687 - DNA, 1051 bp, Homo Sapiens
tttgtctggtaaatagcaactcacatttatattttactttcatctgaggcctcacctcatttcacactctctttttcaagaggaattaggaattacgtaactctgaaagcaaaaaatctcaaaattatgacaggtggtacagatatttattttctcagagcagagtttgggcctaggccacggctgcccctgtagctcccctcttgtaagagatgcaaagcttacttctggggcacacccatctccagctggaggtgcaagcaaaggccactgtgtaaggaggcaaaactctcccttactgcctgaaggatctccaacaagcatattctggagagctctgacagggagcattttacaaggtcccactggagctgaggcttgaggtcaggtccaagtgcaggcctccttcccatcacagcttccgagccttcctggggcggcagccgttgtgtgggattggggtgttgtctgtgattgagatcacttccaggccgcccatgatcagtccgtgcatggcagacaagcgtcctggccccaggcctttcaccacaactcggatgtggatcacgcccttttgtttagctctcgccgctgcggctatgcctgctgtctgtgctgcgatgcctgtgcccttcttggcattccgaaatccctctgtgccacaggaagcaaaggcaaggggctcattactagcagagactacctggatctgtgtgttgttgtgggatgctttaatgtgtgcaattgggatctcctcaaatttctttcctgcccacctcagagagctctcctctcctggaatgggagggtaaatgctgaacttggtgtggctgggagccgcgttctgttcaactttctgcttggccgcagcgtcttggagctgtcgagcgcctgtgcagatggtcccggccggcgttctggccacgaccctgccggctgtctggggccaagtccaggaccgcaggaaccgcgaccccgcgtttctcacagcctgcatgacttgaattgaccccagtcagtttccgtctgcagcgacagtcacagctgcccc

SEQ ID NO: 124688 - DNA, 1177 bp, Homo Sapiens
cctcattggtattttttaatagcacattaaaaacacacagctaataagcagagaaaatcacaagcctcttaaattctgtttgtatgcctttcctccttgctgtgtaaaatgtggtcactgttcttttatttcagtgccatatggacagttaagagctgcaaatgaaggtgatacggaatttaatttcacaaaagaaatgagagacaaaacaagaaacaatcagtagtttgctaaatgccctgtttattctgcaaacaaggcttagaaatgtatagacacaatttgtaggctgagaaatctctgtgtagttgtgacttccatacttccgcaaaagtagtaaggacagcgacttctgaacacattaacctaccactgttttgtttagagcgaacacagtgagaatggattcctaacggcctgtttctctaagtgatcgtcgcagttcgctgctctagtctttaagaacaagtggagccttcacttgagccgccacctccttgccattcagggcttcaacaattgcaagcgcaaactcgaagctggtcccaggcccccggcttgtaagaatcaggccgtctttttccacacgattctcagagtaggtgtaatgacctccattcatcattttgtctttagcaagagggtgtgttgtaactttacttccaaaacctatttcatgagccaacagagcagtaggacctgcacagatggcggctatcaggcccttccggttttcctgctccttcagtatctccttcacagcagcagactcagataaattctgtgcgcccagattacctcctggtagaaccaccacatcatatggtccctctttttttgcatcttcaaggctggcatcaggacaaatgaccacatcacggctacactgtactgggtcttttccagccaggcctgcaacggtgaccttaatcccagctcgcctcatgacatctacagggatgaccgtctccatttcctctgctcctttagccaggatgaccagagctcttttggaagccatttttatgttatatgtttacaagcctgcaccccgcgcctcttcctgcggacgcggcgccccggcccgttggtaccactcaccccacaccaggctgaaagtgaacgcacgccagcacgcacgcgcgccgtccggcctccctcagccccacactgcccc

SEQ ID NO: 124689 - DNA, 712 bp, Homo Sapiens
  misc_feature (97)..(97): n is a, c, g, or t
  misc_feature (585)..(585): n is a, c, g, or t
  misc_feature (604)..(604): n is a, c, g, or t
  misc_feature (637)..(637): n is a, c, g, or t
agttggctaaatgccctgtttattctgcaaacaaggcttagaaatgtatagacacaatttgtgaggctgagaaatctctgtgtagttgtgacttccnatacttccgcaaaagtagtaaggacagcgacttctgaacacattaacctaccactgttttgtttagagcgaacacagtgagaatggattcctaacggcctgtttctctaagtgatcgtcgcagttcgctgctctagtctttaagaacaagtggagccttcacttgagccgccacctccttgccattcagggcttcaacaattgcaagcgcaaactcgaagctggtcccaggcccccggcttgtaagaatcaggccgtctttttccacacgattctcagagtaggtgtaatgacctgcaaagtagaaacagaaaaggtgacatcctccattcatcattttgtctttagcaagagggtgtgttgtaactttacttccaaaacctatttcatgagccaacagagcagtaggacctgcacagatggcggctatcaggcccttccggttttcctgctccttcagtatctccttcacagcagcagactcagatnaattctgtgcgcccagatnacctcctggtagaaccaccacatcatatggtcnctctttttttgcatcttcaaggctggcatcaggacaaatgaccacatcacggctacactgtactgggtcttttcc

SEQ ID NO: 124690 - DNA, 901 bp, Homo Sapiens
gttttattttttgccaaaccaggggttttggaaattgtattgggcccccattttgttagggctggggaaattttctggtgtaggttgggactttccctttcttttccgcaaaaagttagtaaggggccaggggactttttgaaccacattaaccttacccctttttttgtttagagggaaccacagtgaggatggattccttaacggcctgtttcttctaagtgatcgtcgcagttccgctgctctagtctttagaaccaagtggagctttcacttgagccgccaacttctttggcatttaggggtttcaacaattgcaagcgcaaactggaaggctggtcccaggccccccggcttgtaagaatcaggccgtctttttccacacgattctcagagtaggtgtaatgacctccattcatcattttgtctttagcaagagggtgtgttgtaactttacttccaaaacctatttcatgagccaacagagcagtaggacctgcacagatggcggctatctggcccttccggttttcctgctccttcagtatctccttcacagcagcagactcagataaattctgtgcgcccagattacctcctggtagaaccaccacatcatatggtccctctttttttgcatcttcaaggctggcatcaggacaaatgaccacatcacggctacactgtactgggtcttttccagccaggcctgcaacggtgaccttaatcccagctcgcctcatgacatctacagggatgaccgtctccatttcctctgctcctttagccaggatgaccagagctcttttggaagccatttttatgttatatgtttacaagcctgcacgccgcgcctctttctgcggacgcggcgccccggcccgttgggtaccacgtcacg

SEQ ID NO: 124691 - DNA, 852 bp, Homo Sapiens
ggaaggcggacggcgcgcgtgcgtgctggcgtgcgttcattttcagcctggtgtggggcttgtaaacatataacataaaaatggcttccaaaagagctctggtcatcctggctaaaggagcagaggaaatggagacggtcatccctgtagatgtcatgaggcgagctgggattaaggtcaccgttgcaggcctggctggaaaagacccagtacagtgtagccgtgatgtggtcatttgtcctgatgccagccttgaagatgcaaaaaaagagggaccatatgatgtggtggttctaccaggaggtaatctgggcgcacagaatttatctgagtctgctgctgtgaaggagatactgaaggagcaggaaaaccggaagggcctgatagccgccatctgtgcaggtcctactgctctgttggctcatgaaataggttttggaagtaaagttacaacacaccctcttgctaaagacaaaatgatgaatggaggtcattacacctactctgagaatcgtgtggaaaaagacggcctgattcttacaagccgggggcctgggaccagcttcgagtttgcgcttgcaattgttgaagccctgaatggcaaggaggtggcggcctcaagtgaaggctcccacttgttcttacagactagagcagcgaactgcggacgatcacttagaggaaacaggccgttaggaatccattctcacatgtgttcgctctaaaacaaaacaagtggtaggttaactgtgttcagaagtcgtgtcttactacttttgcggaagtttggaagtcacactacacagagattctcagctacaaatgtgtctatccttctaagctgttgcgata

SEQ ID NO: 124692 - DNA, 850 bp, Homo Sapiens
  misc_feature (102)..(102): n is a, c, g, or t
  misc_feature (154)..(154): n is a, c, g, or t
gcaaattttgtagggcttgaggaaaattttccggggtaagggtggggaatttcccataacttcccgcaaaaagttagttaagggccagcggcccttctggancaccattaaccctaacactttttttgtttagagcggaccccagtgagaaatnggtttcctaacggccctgtttctttaaagtgatcgtcgcagttcgctgctctagtctttaagaacaagtggagccttcacttgggccgccacctccttgccattcagggcttcaacaattgcaagcgcaaactcgaagctggtcccaggcccccggcttgtaagaatcaggccgtctttttccacacgattctcagagtaggtgtaatgacctccattcatcattttgtctttagcaagagggtgtgttgtaactttacttccaaaacctatttcatgagccaacagagcagtaggacctgcacagatggcggctatcaggcccttccggttttcctgctccttcagtatctccttcacagcagcagactcagataaattctgtgcgcccagattacctcctggtagaaccaccacatcatatggtccctctttttttgcatcttcaaggctggcatcaggacaaatgaccacatcacggctacactgtactgggtcttttccagccaggcctgcaacggtgaccttaatcccagctcgcctcatgacatctacagggatgaccgtctccatttcctctgctcctttagccaggatgaccagagctcttttggaagccatttttatgttatatgtttacaagccccacaccaggctgaaaatgaacgcacgccagcacgcacgcgcgccgtccccg

SEQ ID NO: 124693 - DNA, 1033 bp, Homo Sapiens
aacaggacgaagtggggaggcagaacgtggttgaaagagaggggcgggggagagagttgggagaaagtggaaggatggggcaagagagggggtgatggatggatcttgccgacttgggttaaaatagccctggtttattttggcaaacaaagggcttaggaaatgttataggacacaatttggtaggcttgaggaaatttctggtgtagttgggactttccatacttcccggaaaaagtagtaagggccagggactttctgaaccacattaaccttacccactgttttgtttagagcgaacacagtgagaatggattcctaacgggcctgtttctctaagtgatcgtcgcagttcgctgctctagtctttaagaacaagtggagccttcacttgagccgccacctccttgccattcagggcttcaacaattgcaagcgcaaactcgaagctggtcccaggcccccggcttgtaagaatcaggccgtctttttccacacgattctcagagtaggtgtaatgacctccattcatcattttgtctttagcaagagggtgtgttgtaactttacttccaaaacctatttcatgagccaacagagcagtaggacctgcacagatggcggctatcaggcccttccggttttcctgctccttcagtatctccttcacagcagcagactcagataaattctgtgcgcccagattacctcctggtagaaccaccacatcatatggtccctctttttttgcatcttcaaggctggcatcaggacaaatgaccacatcacggctacactgtactgggtcttttccagccaggcctgcaacggtgaccttaatcccagctcgcctcatgacatctacagggatgaccgtctccatttcctctgctcctttagccaggatgaccagagctcttttggaagccatttttatgttatatgtttacaagccccacaccaggctgaaagtgaacgcacgccagcacgcacgcgcgccgtccggcctccctcagccccacactgcgcaccc

SEQ ID NO: 124694 - DNA, 3238 bp, Homo Sapiens
  misc_feature (680)..(689): n is a, c, g, or t
caactaataatggccttttttatttatgtggttggaaaggttaaaataggtgacacgtgaaaagtgccttgccatagaaagcactctattaattgagggggatattattgttactgttcattgttagtagtagcattaaaactgatatgattgctaatgaagaaacagacttaaagaggaagcaaacctcgaacagatgccacaataaagcaacaaaattgctgattcttcagggctctttctacaggacagagggactagagcttactctcccctgaggttctcttgctgtttactttggaagctctgacctttccagcagacaccatcacctgtgccctgcagggagcagagattcggactttttaagtttccgcttctggctgggtctgtggcccttgtctaggctctgctaaaacagatggcaaacacggccactcagtaggtgtctttattcatacttgttgacatttcccatggggaatggttgaagggaggggcagggagggctgagcgggaagccacggcttggttttcctccatccagtggagaagagactcggtagggacatgctaagtagagtgaacaggggaaccatcactatgtgggctgagatgcactgtgcagtgacttcagacaacctgagtccttctgtcaggaaatgcaatttctaagtggnnnnnnnnnncaagacccgaaggaaaaaacggagtgcatacaaagcaaactgctaatgtaagaaaggttctaaggcagccagcagtgaaaagccaggggtctggagtggccacctggccatgccctgtcccactgccctgtgccaggctgtcgggccaccagtgccctcttgagacagtctccattggctccaagggttctgtgagccacagaaggttgtgaaaggagaagagcctgaagtgtggcagcaccagggcagcccaaagcagggctgcgttgaaaatatcaaagtatctctttaggggtggctctgagggttggtgggattggagggggaaggggcgcctgggaggagtacagtcagcatctattcttgggcaccgggaggagccactctctggaatcttaaattaccaggtaggagtgagaatgctgattagctgtagagctgaaggcacggctgccaggcccctccgggtccttctctagttctccaggcccggtgtatcgaaggcagtggagaggaagggcctgtgggagccagggccagctcagcagcctagccagtcggatttgatgcttccaaacttcacgctcttcagactttggttctccagcttcaggtaataggcacccttgaagaagtagctgtgaccgccgccctgcaggtccacgacggcatccaggttatcggggatggcattccaggcatctgcgatgagcttggggaagccaggatccattttcttcttcacctcattgtatctccagaatttgtctccagcaaagatgtatgtcttcttgtttttgctccagttaaaggcggcatccactcgctggacatcagggggcagtcccaggctggtcagtggcttggggtaccctcgctccagggtgctggctgagtagatccagtattcattccctgcaaagaacacagccttctcctcctgtggggcctcgtataccgcatcaatcttttccgggagctcaggccagaatgtggccaccagcaggggccccatgggcttgtcacgtggcgtcacagtccgccaaatgaaccggtccttgaagaagaagatctcaccacggatctgagcgatgccatcaaatacaatgtcctgtttgcagatctcaggagtgacagggcccagtgtgggggtggggccggtgccaaggtcaatgtcaggagaggccccatagagctcctgaatgcccttgatgtcatcctgggacagacggaagttcttggtgtaggtgtaaatgggtgccatcagggccccagggtcttgggagtgctccagccccatggcgtggccaaactcgtgggctgccacgaggaacaggctgtacccttggtcagggcagaagccccacttgcggtcgtcatcgtagttggctgtggtcgcacaccacatctttccgtcactgcggccggcgctggtgcagctctcatatttgttgcccaggaaagtgaaggggaagacacagggggcaccttctgagttcccaccaacagtggacatggcggtctcagggcagaagccatacttcttgtcgcggtcgtagtcctcagtggtgccgcaccagcggtagccatccgtgcggccctcagtggtgcagctgtcataggatgtgccctggaagcggaatggaaacttgcagggctgtccttcagcgttgccgcccatggtgaacaggggttcagtgggacagaagccgtacttgccatccttctcaaagttgtaggtggtggagcacccagaggaagccatcgctgcggccggtatcagtgcagctgttgtactccttgccattgaacaagaaggggaacttgcagtactccccatcggcgttgccatacttcacacggaccacttggccttctcccaaggtccatagctcatcgtcatcaaaatgggagtctcccccaacaccagtgcctggggcgaaggcatgagccaggagtccgtccttaccgtcaaaggggtatccatcgccatgctcccagcggccaaagttgatcatgatgtctgcctctccatcatggattcgagaaaaccgcagtggggtcacatcgctccagacttggaaggcacgagcaaaggcatcatccgcagtggggtcacatcgctccagacttggagggcacgagcaaatgcatcatccactgtatctgggtccagatcaggtgtgtcgccactgatcctgtatgtgatctggttcttgtcccacttgggcttgcgagggaagaagttgtagttggccacatgtgggttgccgcagcgtggcttccgcatggtctcgatggtattctggtcaagatcacctgtctggggcagtccaaagaacttctgcatcttctttagtgtgtccttcagcacaaacaggttgcagctctccttggggcagccatagaaggtgttcagctatagcaccgggacctgtttgtcgtgcccggggccgacatcgccggcgacctcgatgagtcagcgacggcgcgggggtgctgccctcgtgccgaattcggcgcgccgtcgactttcattactctctccc

SEQ ID NO: 124695 - DNA, 1079 bp, Homo Sapiens
  misc_feature (154)..(154): n is a, c, g, or t
  misc_feature (977)..(1016): n is a, c, g, or t
ggtgcgccatggacagctcagggacgagcgtctgcatctttcaagtgtagtgtgagcacaaggagcatcgtgcgccgtatcagtgcagtgtttactcctgcattgacaagaagggaacttcagtactcccatcggcgtgccatactcacacganccactggccttctcccaaggtccatagctcatcgtcatcaaaatgggagtctcccccaacaccagtgcgtggggcgaaggcatgagccaggagtccgtccttaccgtcaaaggggtatccatcgccatgctcccagcggccaaagttgatcatgatgtctgcctctccatcatggattcgagaaaaccgcagtggggtcacatcgctccagacttggaaggcacgagcaaaggcatcatccactgtctctgggtccagatcaggtgtgtagccaatgatcctgtatgtgatctggttcttgtcccacttgggcttgcgagggaagaagttgtagttggccacatctgggttgccgcagcgtggcttccgcatggtctcgatggtattctggtcaagatcacctgtctggggcagtccaaagaacttctgcatcttctttagtgtgtccttcagcacaaacaggttgcagctctccttggggcagccatagaaggtgttcaggtattgcactgccaactctttgtccgttttgggggcgacatcgccggggaacttgatgatgggcgacggcgcggcggcggcgtggctcagcaggcagcccaggagacagagcgccctcaggggacccgtgagcgcgccccgggccattagcgcctccatcgtagcgctccctggccccgcgcgtcgcccgggggtcgctggctcggtgcgtgtggccgcctcgccgcctggttggagcctgctccgcggcgcagggctgcgctccgagggtccgctggctcggtggcctggggtttgcccggctcagcggctcatggtccgnnnnnnnnnnnnnnnnnnnnnnnnnnnnnnnnnnnnnnnnaggtcctggcaatccctttgtatgtttaaagcccccagatgcgcagcctccagccaccgcctg

SEQ ID NO: 124696 - DNA, 880 bp, Homo Sapiens
gagagagtatgaagtcgacggcgcgccgaattcggcacgaggccggcgatgtcgcccccaaaacggacaaagagttggcagtgcaatacctgaacaccttctatggctgccccaaggagagctgcaacctgtttgtgctgaaggacacactaaagaagatgcagaagttctttggactgccccagacaggtgatcttgaccagaataccatcgagaccatgcggaagccacgctgcggcaacccagatgtggccaactacaacttcttccctcgcaagcccaagtgggacaagaaccagatcacatacaggatcattggctacacacctgatctggacccagagacagtggatgatgcctttgctcgtgccttccaagtctggagcgatgtgaccccactgcggttttctcgaatccatgatggagaggcagacatcatgatcaactttggccgctgggagcatggcgatggatacccctttgacggtaaggacggactcctggctcatgccttcgccccaggcactggtgttgggggagactcccattttgatgacgatgagctatggaccttgggagaaggccaagtggtccgtgtgaagtatgggaacgccgatggggagtactgcaagttccccttcttgttcaatggcaaggagtacaacagctgcactgataccggccgcagcgatggcttcctctggtgctccccacctacactttgagaagatggcagtactgttctgtcccatgaggcctgtcacatgggcgcacgctgaagacgcctgcagttcatttcgttcaggccatctagaactgccatgaggcgccgatgcccctgtgcgacctagatcacgcaagagatgtcgctgaccatgcc

SEQ ID NO: 124697 - DNA, 1169 bp, Homo Sapiens
acactttctctggggctgatcgatcatcttcggagcagcgaagtgcccccaggcccatggcttcacgggctacatccgcaatgacgtcctgagaagagatctcacacgatctgagcgtgcatcaatacatgtcctgttgcagatctcaggagtgacaggcccagtgtggggtggggccggtgccaaggtcaatgtcaggagaggccccatagagctcctgaatgcccttgatgtcatcctgggacagacggaagttcttggtgtaggtgtaaatgggtgccatcagggccccagggtcttgggagtgctccagccccatggcgtggccaaactcgtgggctgccacgaggaacaggctgtacccttggtcagggcagaagccccacttgcggtcgtcatcgtagttggctgtggtcgcacaccacatctttccgtcactgcggccggcgctggtgcagctctcatatttgttgcccaggaaagtgaaggggaagacacagggggcaccttctgagttcccaccaacagtggacatggcggtctcagggcagaagccatacttcttgtcgcggtcgtagtcctcagtggtgccgcaccagcggtagccatccgtgcggccctcagtggtgcagctgtcataggatgtgccctggaagcggaatggaaacttgcagggctgtccttcagcgttgccgcccatggtgaacagggcttcatggggacagaagccgtacttgccatccttctcaaagttgtaggtggtggagcaccagaggaagccatcgctgcggccggtatcagtgcagctgttgtactccttgccattgaacaagaaggggaacttgcagtactccccatcggcgttgccatacttcacacggaccacttggccttctcccaaggtccatagctcatcgtcatcaaaatgggagtctcccccaacaccagtgcctggggcgaaggcatgagccaggagtccgtccttaccgtcaaaggggtatccatcgccatgctcccagcggccaaagttgatcatgatgtctgcctctccatcatggattcgagaaaaccgcagtggggtcacatcgctccagacttggaaggcacgagcaaaggcatcatccactgtctctgggtcggcgcgccgtcgacttcatactctctccccc

SEQ ID NO: 124698 - DNA, 1030 bp, Homo Sapiens
gtattatatccaagagtaaacgagccttgttcccacaggagagttcggcgaacaattttagttattttcaggtacgacatggaacctcctcgcctcatggcagtgtctagattcctggagcggatgaacttgcaggcgtcatcagcgtgccgccatgggaacagggttcatgggacagaagccgtacttgccatccttctcaaagttgtaggtggtgagcaccagaggaagccatcgctgcggccggtatcagtgcagctgttgtactccttgccattgaacaagaaggggaacttgcagtactccccatcggcgttgccatacttcacacggaccacttggccttctcccaaggtccatagctcatcgtcatcaaaatgggagtctcccccaacaccagtgcctggggcgaaggcatgagccaggagtccgtccttaccgtcaaaggggtatccatcgccatgctcccagcggccaaagttgatcatgatgtctgcctctccatcatggattcgagaaaaccgcagtggggtcacatcgctccagacttggaaggcacgagcaaaggcatcatccactgtctctgggtccagatcaggtgtgtagccaatgatcctgtatgtgatctggttcttgtcccacttgggcttgcgagggaagaagttgtagttggccacatctgggttgccgcagcgtggcttccgcatggtctcgatggtattctggtcaagatcacctgtctggggcagtccaaagaacttctgcatcttctttagtgtgtccttcagcacaaacaggttgcagctctccttggggcagccatagaaggtgttcaggtattgcactgccaactctttgtccgttttgggggcgacatcgccggggaacttgatgatgggcgacggcgcggcggcgccctggcaatccctttgtatgtttaaagccccagatgcgcagcctccagccaccgcctgaggaagtccctcgtgccgaattcggcgcgccgtcgacttcatactctctcgccctt

SEQ ID NO: 124699 - DNA, 854 bp, Homo Sapiens
  misc_feature (467)..(555): n is a, c, g, or t
  misc_feature (558)..(653): n is a, c, g, or t
  misc_feature (686)..(779): n is a, c, g, or t
atttttaaagagtatgaagtcgacggcgcgccgaattcggcacgaggcttcctcaggcggtggctggaggctgcgcatctggggctttaaacatacaaagggattgccaggacctgcggcggcggcggctgctgctgggtctggtgcgcgggggccagactattgaacctcagatccgggcaaacctcaagccacctatccatttgaacctcaaatctaagccttgctgttatttatcatgctccaatcatgtatattaatcctgtaaatatcatttattaatatatatccttattattctttaattataaagatatttaatctaaatctatttaattatcttatattatttcatatttactttttaaatgtattattatctaatatcttttatctattacattttcatttatatatataatattcccttttttcctaatttctaacttatatttcattaatgatgnnnnnnnnnnnnnnnnnnnnnnnnnnnnnnnnnnnnnnnnnnnnnnnnnnnnnnnnnnnnnnnnnnnnnnnnnnnnnnnnnnnnnnnnntannnnnnnnnnnnnnnnnnnnnnnnnnnnnnnnnnnnnnnnnnnnnnnnnnnnnnnnnnnnnnnnnnnnnnnnnnnnnnnnnnnnnnnnnnnnnnnncttattatttttttcttactcataactatattnnnnnnnnnnnnnnnnnnnnnnnnnnnnnnnnnnnnnnnnnnnnnnnnnnnnnnnnnnnnnnnnnnnnnnnnnnnnnnnnnnnnnnnnnnnnnncaatatttaccatctttttcaatatttgctatattacttaaattttattatattattatttcataaatttattta

SEQ ID NO: 124700 - DNA, 902 bp, Homo Sapiens
ggctgatccacagaggtcagcgacaatctgcgtgattcatgcgacaggtactctgcgctcagggagctctagatgctgaagcgatgaactgcagcgtcttcaggtgcgccatgtgacaggctcatgggcagagcgtactgcatcttctcaagtgtggtgtgagcccagagaagccatcgctgcggccggatcagtgcagctgtgtactccttgccatgaacaagaaggggaacttgcagtactccccatcggcgttgccatacttcacacggaccacttggccttctcccaaggtccatagctcatcgtcatcaaaatgggagtctcccccaacaccagtgcctggggcgaaggcatgagccaggagtccgtccttaccgtcaaaggggtatccatcgccatgctcccagcggccaaagttgatcatgatgtctgcctctccatcatggattcgagaaaaccgcagtggggtcacatcgctccagacttggaaggcacgagcaaaggcatcatccactgtctctgggtccagatcaggtgtgtagccaatgatcctgtatgtgatctggttcttgtcccacttgggcttgcgagggaagaagttgtagttggccacatctgggttgccgcagcgtggcttccgcatggtctcgatggtattctggtcaagatcacctgtctggggcagtccaaagaacttctgcatcttctttagtgtgtccttcagcacaaacaggttgcagctctccttggggcagccatagaaggtgttcaggtattgcactgccaactctttgtccgttttgggggcgacatcgccggggaacttgatgatgggcgacggcgcggcgggtcccctcgtgccgaattcggcgcgccgtcgacttcatactctctccccc

SEQ ID NO: 124701 - DNA, 891 bp, Homo Sapiens
agggcgaagagtatgaagtcgacggcgcgccgaattcggcacgagggcggtggctggaggctgcgcatctggggctttaaacatacaaagggattgccaggacctgcgccgcgccgtcgcccatcatcaagttccccggcgatgtcgcccccaaaacggacaaagagttggcagtgcaatacctgaacaccttctatggctgccccaaggagagctgcaacctgtttgtgctgaaggacacactaaagaagatgcagaagttctttggactgccccagacaggtgatcttgaccagaataccatcgagaccatgcggaagccacgctgcggcaacccagatgtggccaactacaacttcttccctcgcaagcccaagtgggacaagaaccagatcacatacaggatcattggctacacacctgatctggacccagagacagtggatgatgcctttgctcgtgccttccaagtctggagcgatgtgaccccactgcggttttctcgaatccatgatggagaggcagacatcatgatcaactttggccgctgggagcatggcgatggatacccctttgacggtaaggacggactcctggctcatgccttcgccccaggcactggtgttgggggagactcccattttgatgacgatgagctatggaccttgtgagaatgccaggtggtccgtgtgaagtatggcaacgccgatgggtattctgcaagtcccttcttgtcaaggcaagggtacacactgcctgatacgccgcacgaggcttctctgtgccacctcacacttgaaagatgaagacgctcttccctgaccctttcctggcggacctaagagcctgattcattcctctgaaccttaatcgcaatcgacagggacttgg

SEQ ID NO: 124702 - DNA, 783 bp, Homo Sapiens
gacacagagagcatcgtgcgccgttcatgcgctgtgtatcttgcatgacagaagggaactgcatactcccatcgggttccatattcacacgaccactgccttctcccaagtccatagtcatcgtcatcaaatgggagtctcccccaacaccagtgcctggggcgaaggcatgagccaggagtccgtccttaccgtcaaaggggtatccatcgccatgctcccagcggcccaaagttgatcatgatgtctgcctctccatcatggattcgagaaaaccgcagtggggtcacatcgctccagacttggaaggcacgagcaaaggcatcatccactgtctctgggtccagatcaggtgtgtagccaatgatcctgtatgtgatctggttcttgtcccacttgggcttgcgagggaagaagttgtagttggccacatctgggttgccgcagcgtggcttccgcatggtctcgatggtattctggtcaagatcacctgtctggggcagtccaaagaacttctgcatcttctttagtgtgtccttcagcacaaacaggttgcagctctccttggggcagccatagaaggtgttcaggtattgcactgccaactctttgtccgttttgggggcgacatcgccggggaacttgatgatgggcgacggcgcggcgggtcctggcaatccctttgtatgttaaagccccagatgcgcagcctccagccaccgcctgaggaagtctcctcgtgccgaattcggcgcgcctcgacttcatactctctcgccctta

SEQ ID NO: 124703 - DNA, 1073 bp, Homo Sapiens
  misc_feature (63)..(102): n is a, c, g, or t
caggcggtggctggaggctgcgcatctggggctttaaacatacaaagggattgccaggacctnnnnnnnnnnnnnnnnnnnnnnnnnnnnnnnnnnnnnnnncggaccatgagccgctgagccgggcaaaccccaggccaccgagccagcggaccctcggagcgcagccctgcgccgcggagcaggctccaaccaggcggcgaggcggccacacgcaccgagccagcgacccccgggcgacgcgcggggccaggagcgctacgatggaggcgctaatggcccggggcgcgctcacgggtcccctgagggcgctctgtctcctgggctgcctgctgagccacgcggccggcggggcggtggcccatcatcaagttccccggcagatgtcgcccccaaaagggacaaagagttggcagtgcaatacctgaacaccttctatggctgccccaaggagagctgcaacctgtttgtgctgaaggacacactaaagaagatgcagaagttctttggactgccccagacaggtgatcttgaccagaataccatcgagaccatgcggaagccacgctgcggcaaacccagatgtggccaactacaacttcttccctcgcaagcccaagtgggacaaagaaccagatcactttacaggatcattggctacacacctgatctggacccagagacagtggatgaatgcctttgctcgttgccttccaagtctggagcgatgtgaccccactgcggttttctcgaatccatgatggagaagcagacatcatgatcaactttggccgctgggagcatggcgatggaaacccctttgacggtaaggacggaatcctggctcatgccttcgccccaggactggggttgggggaaaactccatttgatgaacataactatggaccttggaaaagccaattggtcctgggaattatgcaaccccaagggaaatactgaattccctttcttttatggcaagaaaacacactccctttaaccgcccaaaatggtttctggtcccccccctaattttaaagagggaaagggtttttcctaaaccttttcaggg

SEQ ID NO: 124704 - DNA, 1080 bp, Homo Sapiens
tcctccgcggtatgcgaagacagctgtccacgaggtcgaacatgtggtgtctagcgacaggactcgcgctatggaggttgaggctgaggatgactcagtgtctaggtgcgcctggacagctcaggacgacgtactgcatctttcaagtgtagtgtgagacagagagcatcgtgcgcggatcaggcagtgtgtatcctgccatgacagaaggggaactgcagtactcccatcggcgttccatactcacacggaccacttgccttctcccaaggtccatagctcatcgtcatcaaaatgggagtctcccccaacaccagtgcctggggcgaaggcatgagccaggagtccgtccttaccgtcaaaggggtatccatcgccatgctcccagcggccaaagttgatcatgatgtctgcctctccatcatggattcgagaaaaccgcagtggggtcacatcgctccagacttggaaggcacgagcaaaggcatcatccactgtctctgggtccagatcaggtgtgtagccaatgatcctgtatgtgatctggttcttgtcccacttgggcttgcgagggaagaagttgtagttggccacatctgggttgccgcagcgtggcttccgcatggtctcgatggtattctggtcaagatcacctgtctggggcagtccaaagaacttctgcatcttctttagtgtgtccttcagcacaaacaggttgcagctctccttggggcagccatagaaggtgttcaggtattgcactgccaactctttgtccgttttgggggcgacatcgccggggaacttgatgatgggcgacggcgcggcggcggcgtggctcagcaggcagcccaggagacagagcgccctcaggggacccgtgagcgcgccccgggccattagcgcctccatcgtagcgctccctggccccgcgcgtcgcccgggggtcgctggctcggtgcgtgtggccgcctcgccgcctggttggagcctgctccgcggcgcagggctgcgctccgagggtccgctggccctcgtgccgaattcggcgcgccgtcgacttcatactcttcagacata

SEQ ID NO: 124705 - DNA, 899 bp, Homo Sapiens
ctctctctggcgcgtgcagttcttgtgccagatgaggagcacagggccttgagtccaccacagtgactgcgttcagcagagcatactctgtcgcgtgtagtctcagtgtgcgcacagcgtagcatcgtgcgccctcagtgtgcagctgtcataggatgtgccctgaaagcggaatggaaacttgcagggctgtccttcagcgttgccgcccatggtgaacagggcttcatggggacagaagccgtacttgccatccttctcaaagttgtaggtggtggagcaccagaggaagccatcgctgcggccggtatcagtgcagctgttgtactccttgccattgaacaagaaggggaacttgcagtactccccatcggcgttcccatacttcacacggaccacttggccttctcccaaggtccatagctcatcgtcatcaaaatgggagtctcccccaacaccagtgcctggggcgaaggcatgagccaggagtccgtccttaccgtcaaaggggtatccatcgccatgctcccagcggccaaagttgatcatgatgtctgcctctccatcatggattcgagaaaaccgcagtggggtcacatcgctccagacttggaaggcacgagcaaaggcatcatccactgtctctgggtccagatcaggtgtgtagccaatgatcctgtatgtgatctggttcttgtcccacttgggcttgcgagggaagaagttgtagttggccacatctgggttgccgcagcgtggcttccgcatggtctcgatggtattctggtcaagatcacctgtctggggcagtccaaagaacttctgcatcttctttagtgtgtccttcagccctcgtgccgaattcggcgcgccgtcgacttcataccctctcccaccaa

SEQ ID NO: 124706 - DNA, 888 bp, Homo Sapiens
  misc_feature (94)..(94): n is a, c, g, or t
  misc_feature (144)..(144): n is a, c, g, or t
  misc_feature (152)..(152): n is a, c, g, or t
gggtcatgcgagagacaggctggtccacagaaggtcgcgacaattgtggtttctaggtcgacaggacatctgcgctcatggcagtctagattcntgagcgatgaactgcagcgtcttcgcgtgcgccatgtgacaggctcatgnacagagcntactgcatcctctcaaagtgtaggggtgagcccagagaagcctcgctgcggccggttcagtgcagctgtttactccttgccatgaacaagaaggggaacttgcagtactccccatcggcgttcccatacttcacacggaccacttggccttctcccaaggtccatagctcatcgtcatcaaaatgggagtctcccccaacaccagtgcctggggcgaaggcatgagccaggagtccgtccttaccgtcaaaggggtatccatcgccatgctcccagcggccaaagttgatcatgatgtctgcctctccatcatggattcgagaaaaccgcagtggggtcacatcgctccagacttggaaggcacgagcaaaggcatcatccactgtctctgggtccagatcaggtgtgtagccaatgatcctgtatgtgatctggttcttgtcccacttgggcttgcgagggaagaagttgtagttggccacatctgggttgccgcagcgtggcttccgcatggtctcgatggtattctggtcaagatcacctgtctggggcagtccaaagaacttctgcatcttctttagtgtgtccttcagcacaaacaggttgcagctctccttggggcagccatagaaggtgttcaggtattgcactgccaactctttgtccgttttgggggcgacatcgcccctcgtgccgaattcggcgcgccgtcgacttcatactctctcccccctaa

SEQ ID NO: 124707 - DNA, 1338 bp, Homo Sapiens
cagatttaaaccgtctttatttctacagcaacatctgaaaatagagagcagccgcctcacccgcaacagggggagcccctcctgccaccaggggaccgtcgccgcccctcgcgagaagctgcaggcgtggggggaggcgaggcaggatggctcggtgggcggtgcccggggcggggtcggccgtgcctgggcggggccgggtgggaggggcagtgcataaggccgggatgcggggcagggcccggcggtgggaggacggactaaggggaggtccccgtcctgggccacggggcgatggcgcgggtaggacgcatccctcagaggccaggaggagcgcgagaaggtcccaggacccccttgggaggcgccgctcccgagaatgtagagcctgggagataccaccgcacggaatgggggtgattaaggcctgggcggtaccactagaagagggacgaggggaggcccgggtagtaccgtggactgaagggaggcgcgcggccaataacttatttctctatatacagaagcaacggccgggttgagtcgggagggagggcgagggtgccgaagggccggcgagtgcttagtgttcttggctctggggtctggggaggccaggccactgagtctatggtggagactccagccggcacctcctgctggcccgaacctagggaagagggccctgctggaaggaataaataagggatggagctggagtgggcaggcccagcctccagggctcaggctgagatgacaagggagaaggttaccctgagattgaacagaaaagacaggggctgtgggagagacaggcgggacaagcagcaggcccatgcgcagggctggggtgaggggggtgtgccaggtgggcgctctggtgactggctgccccttcagcattagcccaccagggagcttcgtcgggagaggtccatggagctggagctgagagtgcggctgtcagagagacctgtgcctccaggctgggtcggctcttccacgctcttgttgaggaagttgagggaactggcccgcttcatcctggggttagggggctcctggggggtgcccccctgcagcttctttaccagcatctcactgctgcgcctcagggcatcccggagtttcccaaaggaaccgctgcgcctcaaggagccactgccatccccattccactcagctgtaggtcccacgtcctcgaggtcagactcagaccgaggcccggcacccccagccatgtctcggctgctgcggcggtctccccgcctgccactgccatctttccctcgtgccgaattctcaacccaggcctcgtaccttagaccgtatatttgt

SEQ ID NO: 124708 - DNA, 927 bp, Homo Sapiens
gagttctgcagagaaaagaacaagattttatgatagctcgcagcagcgagtcttgtctactggtcaggcaggacttctgtgaggaaatgacaaactgaaacctgagggaagaaatgaaccagcctccaggaaagggaggcaggggagaagttgcatgtgcaaaggtcctggggtaggaaagagcttgtggtggaggaactcagggaagaactgtgtgactggagcttcatggaagggagacagggacagaagaggcctggggagaagccaagaaccagatcatggcctggttggtttgggttttattctcaggaaatcagaaagcctctggagggctttaagcaggcaggcaacacagtctgacttgagtttctaaaaactctctctggctgagatgtggagaataaacctcagtgggtcgaggatggaatcactctccaatgagtggttaggaagccactgctggaattcaaatgagagctggtgcttggaattaaggggtggctatgacggtggagaaaagggaccagttctggatgttctggaggtaggtccagcaagacctgggctggttgcacaggtgatcttggcattgtcgagccacctgggggctgtagaatcagagaagcagaagctgcgggcgcaggtgcggcgtctggtgcaggagaaccagtggctgcgtgaggagctggcggggacacagcagaagctgcagcgcagtgagcaggccgtggcccagctcgaggaggagaagcagcacttgctgttcatgagccagatccgcaagttggatgaagacgcctcccctaacgaggagaagggggacgtccccaaagacacactggatgacctgttccccctgttgcgggtgaggcggctgctctctattttcagatgttgctgtagaaataaagacggtttaaatct

SEQ ID NO: 124709 - DNA, 902 bp, Homo Sapiens
  misc_feature (794)..(794): n is a, c, g, or t
cggcccgcgctcctttaaggcagcgaacgggccaagagaagcgtgttcggcccctccgaggccaccgaggcccggcgccgcgcctgcccgcagcctcgtcctcacagacgccacagccatggccatgatggtgtttccgcgggaggagaagctgagccaggatgagatcgtgctgggcaccaaggctgtcatccagggactggagactctgcgtggggagcatcgtgccctgctggctcctctggttgcacctgaggccggcgaagccgagcctggctcgcaggagcgctgcatcctcctgcgtcgctccctggaagccattgagcttgggctgggggaggcccaggtgatcttggcattgtcgagccacctgggggctgtagaatcagagaagcagaagctgcgggcgcaggtgcggcgtctggtgcaggagaaccagtggctgcgtgaggagctggcggggacacagcagaagctgcagcgcagtgagcaggccgtggcccagctcgaggaggagaagcagcacttgctgttcatgagccagatccgcaagttggatgaagacgcctcccctaacgaggagaagggggacgtgcccaaagacacactggatgacctgttccccaatgaggctgagcagagcccagcccctagcgcaggaggaggggatgtgtctggtcagcatgggggctacgagatcccggcccggctccgcaccctgcacacctggtgatccatacgcctcacaggccgctacgatgtactgtgcactctgcagcagcactcgagactgnagagactcagcacgacacctgacttgcacatgtgacatctgcatgtcttcggataaacatcaagagcgccacgccatgacctgctcggagaactggcagacacactgc

SEQ ID NO: 124710 - DNA, 692 bp, Homo Sapiens
tggtagctgactgaatcaaagatttttattgattctcctgccaaacacaactgatttccatctacaattactttttaaggtaagaaacagtaagtcaactgaacaaagagctgggctttgggccctggaacgtgattacacaccgactgagaaatgcaggacctcagggtggggtctagtcaggctggccgcagcagggcacgaacctgcctcagtgggccttctccaagaacgctctgcagcacctgacacactgctggtacaccgtctcaaagtcagagtcattcccataatagggatcttcaataataagttgtttttgtggatcatagctcccaagtagttcaattttagctttgcaggttttaacttgattactttttctattcaaatctctcagattgctttcatccatacatagtatataatcaaatgtggcaaaatcttctttggtaatctgtcttgctttatgggctgtgtgaatgccatgatttcttaggcagctcacagctcttgggtctggggaccggcccacgttccagtcagaaacagcaccgctgtcaatgacccaattctctgagatgttttgatcggttacaagtttcctgaaaactgcttctgcaatgggtgatcgacaaatgttacccagacacacaaacagcacggacttggtagcctgcctcgtgccgaat

SEQ ID NO: 124711 - DNA, 1176 bp, Homo Sapiens
  misc_feature (64)..(64): n is a, c, g, or t
  misc_feature (132)..(132): n is a, c, g, or t
  misc_feature (222)..(224): n is a, c, g, or t
  misc_feature (245)..(245): n is a, c, g, or t
  misc_feature (248)..(249): n is a, c, g, or t
  misc_feature (1069)..(1103): n is a, c, g, or t
tcgcgttcttttttaatttgtgggggggagaatattccccaaggcccctttattgtccagtgtncccacgggtttttctcttaaggggaaacccacggttatgggccccactgtgttccctcttccctctancgggggccccgcgcgcgccccaaacgcgaaatggtgttgagaaaagtcttctttggaggggccggaaggggcggccccgacattgttttnnntttttctttttccttttcttnctnnggtgggaatcaagaggattttttattgatttctccttgccaaaccaccaactggatttccaatcttacaattaccttttttaagggtaagaaaacaggtaagtccaactgaaccaaaggaggctgggctttggggccctggaacgtgattacaccccgactgaggaatgcaggacctcagggtggggtctagtcaggctggccgcagcagggcacgaacctgcctcagtgggccttctccaagaacgctctgcagcacctgacacactgctggtacaccgtctcaaagtcagagtcattcccataatagggatcttcaataataagttgtttttgtggatcatagctcccaagtagttcaattttagctttgcaggttttaacttgattactttttctattcaaatctctcagattgctttcatccatacatagtatataatcaaatgtggcaaaatcttctttggtaatctgtcttgctttatgggctgtgtgaatgccatgatttcttaggcagctcacagctcttgggtctggggaccggcccacgttccagtcagaaacagcaccgctgtcaatgacccaccggaagttgccgcgctgtctaccctccaattctctgagatgttttgatcggttacaagtttcctgaaaactgcttctgcaatgggtgatcgacaaatgttacccagacacacaaacagcacggacttggtagcctgttccgccatcttcccgcgcgcagaggcgccgagacaccgcggcgttcccccggccgtaatggccgaattcccgggcatatgtccggtaccgtcgactgnnnnnnnnnnnnnnnnnnnnnnnnnnnnnnnnnnncggccgcttcctcgctagatagctcgctgcgctcgtcgttcgctgaaaggatgggccatatgtgtattagttt

SEQ ID NO: 124712 - DNA, 1949 bp, Homo Sapiens
  misc_feature (42)..(59): n is a, c, g, or t
  misc_feature (107)..(121): n is a, c, g, or t
  misc_feature (131)..(285): n is a, c, g, or t
  misc_feature (1834)..(1868): n is a, c, g, or t
  misc_feature (1934)..(1934): n is a, c, g, or t
gtccgcgggtgtttttttgtggaaagaaaaaaggaaacctgnnnnnnnnnnnnnnnnnnggggggggccggcgcgccaacaagggttgtttaaaaaatgtttttttnnnnnnnnnnnnnnncgcccccaannnnnnnnnnnnnnnnnnnnnnnnnnnnnnnnnnnnnnnnnnnnnnnnnnnnnnnnnnnnnnnnnnnnnnnnnnnnnnnnnnnnnnnnnnnnnnnnnnnnnnnnnnnnnnnnnnnnnnnnnnnnnnnnnnnnnnnnnnnnnnnnnnnnnnnnnnnctagttgtatttttataactccccagtttattttgaaatattcatgattttgacattatctcaaaatacacagaaattaccttacatctgcctatacatttattaaatgctgatgaagaatacttattcaatatttaagcatgccaaataataacacttttcccaacttttaaaattattttaaaaaataagccaatttatattggacatttgggttacatgtgcatataaaaacagtcatattcctcaactgaccatagactagcatacaagtgtccttctttctggatgtaattaagtttcagaggcaaagtggttcagatgggagccaatgggctgacctcctcatgaagtaaactcgacaaaaatcatgaagtattgaaggtgccaacgactgattccataaatgtttctctcttccctatcttttcaatatacaagtgtgcactatgggtgtgtagaaattaaaacacttctaatctagactgtgagctcctacggaggggactactgtcaatccacaaaaggccctagggaagagagaggtagcactggggagcagagggcacctgccctccaggccatccacacaaacctactgaagaggtagactcgattatctaagtctcaacaggcttagatgttgacctgggccttcaagtgaggttttccttcattgttttatgttgcttgttctactatttttgtaactggggcaaagtgagatgttcaactagtctaagaatgcttaaaataccccataagctgtctgaatcaaagatttttattgattctcctgccaaacacaactgatttccatctacaattactttttaaggtaagaaacagtaagtcaactgaacaaagagctgggctttgggccctggaacgtgattacacaccgactgagaaatgcaggacctcagggtggggtctagtcaggctggccgcagcagggcacgaacctgcctcagtgggccttctccaagaacgctctgcagcacctgacacactgctggtacaccgtctcaaagtcagagtcattcccataatagggatcttcaataataagttgtttttgtggatcatagctcccaagtagttcaattttagctttgcaggttttaactcgattactttttctattcaaatctctcagattgctttcatccatacatagtatataatcaaatgtggcaaaatcttctttggtaatctgtcttgctttatgggctgtgtgaatgccatgatttcttaggcagctcacagctcttgggtctggggaccggcccacgttccagtcagaaacagcaccgctgtcaatgacccaccggaagttgccgcgctgtctaccctccaattctctgagatgttttgatcggttacaagtttcctgaaaactgcttctgcaatgggtgatcgacaaatgttacccagacacacaaacagcacggacttggtagcctgttccgccatcttcccgcgcgcagaggcgccccccggccgtaatggccgaattcccgggcatatgtccggtaccgtcgactgnnnnnnnnnnnnnnnnnnnnnnnnnnnnnnnnnnncggccgcttcctcgctcacagcttcgctgcgctcggtcgttcgactacaacgcgatgcgccatatnaggtcgatacgttgg

SEQ ID NO: 124713 - DNA, 825 bp, Homo Sapiens
  misc_feature (15)..(15): n is a, c, g, or t
  misc_feature (25)..(25): n is a, c, g, or t
  misc_feature (37)..(37): n is a, c, g, or t
  misc_feature (42)..(48): n is a, c, g, or t
tccggaccaggggcncaggttttcntccttgctcctnttttnnnnnnnaggtccgaattcaaaagattttttattgatttctcctgccaaacacaactgatttccatctacaattactttttaaggtaagaaacagtaagtcaactgaacaaagagctgggctttgggccctggaacgtgattacacaccgactgagaaatgcaggacctcagggtggggtctagtcaggctggccgcagcagggcacgaacctgcctcagtgggccttctccaagaacgctctgcagcacctgacacactgctggtacaccgtctcaaagtcagagtcattcccataatagggatcttcaataataagttgtttttgtggatcatagctcccaagtagttcaattttagctttgcaggttttaactcgattactttttctattcaaatctctcagattgctttcatccatacatagtatataatcaaatgtggcaaaatcttctttggtaatctgccgggcaacgtggctcatgggaatgccgtgcctcttcatgcagctctgccctcggtagtcaggggggttccctatctcatacccggaagttgccgcgctgtctaccctccaattctctgagatgttttgatcggttacaagtttcctgaaaactgcttctgcaatgggtgatcgacaaatgttacccagacacacaaacagcacggacttggtagcctgttccgccatcttcccgcgcgcagaggcgccgagacaccgcggcgttcccccccggccgtaatggccgaattcccgggcatatgtccggtaccgtcgactg

SEQ ID NO: 124714 - DNA, 843 bp, Homo Sapiens
  misc_feature (172)..(183): n is a, c, g, or t
  misc_feature (783)..(783): n is a, c, g, or t
gagcaataatgtaactcttatttaaacttaacttgtcataatttgttattaatatacaaagacaacaaacttttaaaacattacatttactaagattctggcaataagacacagcataccaggcttgccactcaacttgttattgtaagtctcagcttcaatatgaagccgnnnnnnnnnnnnaatcaaaaccctgctttttacatgctaaatatcttggcaagtaggccattaaacatagtaatgaacttaagacagcaagagtgaggagttaacaaaagctaaacattgcagcctaaacaaaattcatacaaaaaaataaactatcactagttacataaaattttcctgactggttaaaacttagtataaaacatgcattttagaatctttagctatcaagttcaaaaagtaccaatgtctatttaaaataattcctctcccaagccaaagtgtagtcaaaattaattcaaatgacataacacattctaatgctaaaaaatattcattattactaaagtggaggtaaatcccagagcttttggggctttctcatgctgcaaatggctgtttctctggttcactcaaagcagcatatgacagcatccaaagatgacactaagctcagtaaagggcaagactgctggtagccagctctgacctccccgtgaagcatggctactgtgtccataatacaggatgtgtgaggatcaaaggcacactattctgctagctaaagagatagcaaaccaccccccaaccctaaaagctccttccccaggnttaataaaagtatacgaggggaaaaaattaaatacacttatctacagagtaagggttttg

SEQ ID NO: 124715 - DNA, 689 bp, Homo Sapiens
  misc_feature (676)..(676): n is a, c, g, or t
cgggaggtcaacaaaaagatgagtggtttattgaaggtttggtctagatacttataaaaatacaaactggcatgaaattcaacctcatgaagagtccgtcttcatagaagacaagtgagtgatcccctggggagggcaaggtgctgccccagggaaaaggcccacagggcacagatggcagggcttcttctttgccctggtccagcaatcgacctgtccccaggtcttcagcctgggcccccagctggcttgaggatttgatcataccaaatcccagtcctcctgggggatgggctgagaccctcagagcagcctgcaaagcgcctgtgtttgtcttgcctctgcttcagagtgtccagggctgtctactgctcttctttagcctgtgatgaggggacaggctcctgcaagagtcacctcagaccctctgatctcccccatcaatgctccatcttgtcggtctgaattggcacccccagtgcaggcagcagggatccctcctcctccaggggatcttgggaggactctggctccttgggatgagagggaaggtctgcttggctcacagaattcgcagaagacgaagaatcagaagcagcagtaatagcaagagacagagggggctgggagtgtcccccctcgcaccctgatgtgcactctctccaggctcccacangatgggctgactc

SEQ ID NO: 124716 - DNA, 939 bp, Homo Sapiens
  misc_feature (98)..(174): n is a, c, g, or t
  misc_feature (216)..(216): n is a, c, g, or t
  misc_feature (229)..(301): n is a, c, g, or t
  misc_feature (348)..(386): n is a, c, g, or t
  misc_feature (395)..(415): n is a, c, g, or t
caggtattttgggtatttttgcgctctggctgaaagcccagtttcctttcggaaaaaaagaagttggtagcttcttgatccgggcaaaccaaaccccnnnnnnnnnnnnnnnnnnnnnnnnnnnnnnnnnnnnnnnnnnnnnnnnnnnnnnnnnnnnnnnnnnnnnnnnnnnnnggatcacaaaaaaaagcccgctcattaggcgggttaaattcnccgggtactgcannnnnnnnnnnnnnnnnnnnnnnnnnnnnnnnnnnnnnnnnnnnnnnnnnnnnnnnnnnnnnnnnnnnnnnnnaccactttgtacaagaaagctgggtcaggaaacagctatgaccatgnnnnnnnnnnnnnnnnnnnnnnnnnnnnnnnnnnnnnnngcctcgagnnnnnnnnnnnnnnnnnnnnnggggagggcaacaaaaagatgagtggtttattgaaggtttggtctagatacttataaaaatacaaactggcatgaaattcaacctcatgaagagtccgtcttcatagaagacaagtgagtgatcccctggggagggcaaggtgctgccccagggaaaaggcccacagggcacagatggcagggcttcttctttgccctggtccagcaatcgacctgtccccaggtcttcagcctgggccttcgtagtgggggcagacaatgtctaggtaatcgttgaggcccagctccaccacggcgtctcctcgaagcaacctggggttactggagttccagtagactacgtggcggaggctggagcccccgcgcagaggggagccgaggaacgcggcccagaggacagtccgcagcaggggcagcagccgcatcgcccccgaggtccggtttggtctggcctggcaggtcccggcccgcttcacagtcgcctcgtgccgaattcgccacccaggcctcgctacctaggaccg

SEQ ID NO: 124717 - DNA, 1183 bp, Homo Sapiens
tttttcagaggttttaaaatgtgtattaaatttcatgggtatgcacagtagagaaggcatcctcacagaggcaagagttccaacctggtgacaatggcagtgagccacccgtctagttttcaaccatctaagatagcagcagctggctgttgcccctggactgagatttcttcctctttgctggtggggggcggctggaacggatgggagacacagtgggaggctgaggccccttgggggtatcattctgtttctggaaggcagctttctcaaaaggctgctctggcaactgctgcttctcaacccccttggcccttccaaggggctgatgatggtccttaggtttcagggtggcctgagtcttggatggggataacacagccggtgtttgtgtgtctgtgcccttgggaggggcattctgcctgaggaaagcaactttcttggaggactgtaatttaggtgatcgttgctttagcttcccagtcacctttggctccctgatcccttcggcttttccagctggctgactgctatcctggaagctggaggaagcttgggtctttgtgacagaaggtacagtggacaattctgagtctgcccctttggagatgccattcagcttctggaaggaggccttcttgggatgttgctgtttctgcagctgctgctttgtctttgcagcccccttggctttcttggctggctggctgctgttctcagacttggggatgacctgaggcaagtctacatttgtaggtgtggctgtttcagaatttcctgtctgggactgagggatagaattggaaaatttcttgaacttggcaatgaagaacccatccatattgtgggtatgagggtagaagcgtcgggtagaacgcagactggggtggaagcgcctttctcgaaagcgggtaaaaccttcctggccaaagtctaggcccgtgggcaccagtcgcacattcctcgtttttcagagcatagtctaccacccactcattctcgttctactgtgatagaacaggtgcagtaaaccaggtagcctcctgtcttggaggtcgcattgacagagtcaatagcactcaggagcaactccttctggaggtgagcacagcgcaggatgtccttctcatcctcccggccgtaatggccgaattcccgggcatatgtccggtaccgtcgactg

SEQ ID NO: 124718 - DNA, 703 bp, Homo Sapiens
tttgttttttgtttttggcccatataaaaataacatattgcaactcaaagtgcatcttttaaaataaaccatcaactatctttatcaaataaaatatttacaccatttggtttctagtgaggaaagctctttcaggctatcaccatggggacgtcatctgaaaatccagttatcataggggcatcttcatcatcttcccccaggtcatccccagaggagaagattgcggaccccagcctggagctgtagtggctgttggcgaaggcggtgaagctgctctgcagcctccggtgcttcgtgtacaggatggcaaaccccacccccaggctcagcagtatcaggaataagatgggcaccaccacagcagcaacatccgtagatctggcagcctgcgttgcagatgcatctgcaccagaccccagctcatcgtacagcaggatggcaggctccccacagatctggttgccaaaaaggcatcttgcttggacggtgaacgtgtaattatgacccatcttcaggttggaaattttaaagaaattgtcagtagtattcccaaggtaagctgtgatattcatggcactatcaaacatgtgtatctcatagcccctgctttcattaaaatgcttttcctttaaagccaggcttttccaaaacagaagaacatgatcattttctgttatgatttttaaggcatcaggtgctg

SEQ ID NO: 124719 - DNA, 3466 bp, Homo Sapiens
gaattggtacaaagtttactaggtcatacgacacggctcacaaagcggtgggaaattccagtgatggcattgtttgttggttggttccttttatccaaatggagacaagacacatttccgcaggactgtccacctccccccacgagacaaacagaatgcaagactgtcacacgcggctaggactggttccacggacacacgattttgtggcattgacacaccacgatgcgatgccaggccacagtgggtgccaggaggggaggaagcagctaatgctatgcccacactcgccttcaggcagtgcccccgggagggaggcccggcagtgtctgctggtgataatacatttcacacagggggggaccaggtcaaaatcaaaccatgcaaagtggcagggcaagtgaggagggatccgggtgagagatattatcaacagcacacgctctattctgtaccctactatatataccattagttggattttgctttcctccccgcgccggcaggccctggcgccagcgtctcccagcgcaactcgctgggagggtagggggtcgccgcttgaagagagaagtgctggagaggcagtaggctggggatcccggactcttagctgcttgcctctgtgcgtaaccgcacgcccacggccgtgatgagggcggcccccttgccgctgccatcctcagacaggaggaaggacacgttacattttggtgacagttccttcaccgtctggtgcatgattctggagaagtgtggatgaagcttgtagagtgtcccgtccactcccacagtcacattcagacggtccagtcctctgttctcgcggatcttatccacaaccgcagccatgcctgcgccacacagctgtgcggccctcctggacaccaccccgcacactgtcttgacgaggatactgtcatcgcaggtgctattcagacctagctgctggaggatagcccggacctggagcagtgctaatcggtcactctcgatctgagagagaaacttggtctcaaagatgccccgggtcttcagcgtctcagagatctgccctcggaagaggaatcccttcttggtgaagtcgattaagatgttgcggacgatttcacccaggtacataccactgatcatcttctcatacctttgtttcccagcatttagggaatattcgtccaccagtctgtcgtagtgtgtcctgatatcatccagacacccgttgtccccaaaggccccccactccatgttgatgcacatctgcccctggtccccctccaccatctccacgttcttcatctcctccatgtagcaggcattgctgccggtcccaacaatgagtccaacctcacaggtgggctcctcataagcacaggtcatcatggtgcccactgtgtcgttgaccacagccaccacgtccaggtcaaattcctctctcctttttatcgcatcccttagtaaggtgactacatcgtggcccacgcagtctgttgccttaaaaccctttgtccacgtgatcaagattcccgcgtccagactcgtctgctggcagggaaatgagaacgtgaagcccagaggcatcctggggcctttgatccccatgtagtccaagaagtcagagatgcaggagacaatgtgatcaaacagctcttccccagtgccctgcatgatttcaataggaatggcgtagatcttgttgtgcatttccaccgttctctttttcccactacggattttcaccagcagcacacggaaattggttcctccaagatccagggccaagaagtcaccattctcggtcccgtcgggagttctccggacgaaggagggcagcatcttaaccacggcattgttgtgcgtctgcttcctcagccccagctccatctcggcccgcatcctcttcttcacctccagcagcatgtctttggtgaggtggaaatgagccagggtctcctctatctgccggtgttgctcggccaagcggtaggccaccgccgtcaccatggcagcccccttgccgctgccactctccgagaggaggaagcgcacatcggagtctggcaccaagcgccttagagtcttgtggaaacgccgggaatactgtgggtgcgtcttgtaaagagatccgtcgacaccaaccgtggtccgcagcctgggtgtgcccttgttatcacgcaggcggttcaagatggcgcccagtgtggcagccaccaagttggctgagcgaaatgagacaatggtgcaaacgtgctggactgagacacagtcatcatcggacggctccactcccaggcgggtcaggatttctttggcattgtggaggccttccttattcttttcgatggctgacacatcactggtgttaaacttccctcgggtgagcagctccggggtgatccgcccttcaaataagaggccctccttggccatcttgactaggatcagtcgaaccagctctcccaagtacatgccactgaccatcttctcaaacagctgttttccagggttgagggatccccggtctatctccctgtcaaactctgtccggatgtcttctaatgatccatcgtctccaaaggctccccattctgtattgatacacatcctcccctcgtctccttccaccagatcaatgtgcctcagttcctccatgtagcaagcattggtgccagtgccgatgatcaggccgacttcacagtgctggtcgtcatagccacaggtcatcatggtgcccactgtgtcattcaccacagctacgatgttggcatcatagtcccctcgctttttgatggctttgttaagcagtttgaccacatctgctccttccactccgctcgctttaaatcgctttgtccaggtgatcaggatggcctcatctattttggattgttggcaaggaaaagaaaacgtgaatcccacaggtaacttcttgtccttgatcttccttttctccatgaaatctcccaggcactcagcaacatgatcaaaaagctggcttccactgccgtgcacgatgttctctggggtgtcataaacctcggactccatgtgaacattctggtttttctcatgattcacttgcacccgcagaattcgaaaggaagacccaccaagatccagggcaatgaaatctcccttttcagagccatcaggaatggaccttacgaatgttggcaacatcttgactgtggctgttggattaaaatcccgggagaggccattcttcatctccttcctgaagcgagtcatgatatctatgagagtttcatcggagagccgcatggcatagagatacttgtcaatctttttgacctggtcatccttcagctccgtgaagtaataggccaggagctgcgcggcgatcatgctggcggtcggggtcgcggggcggcaggcgtggggacggtcggtcctccgcagccctggcgagccgtggtcctccggcggctgctcggcggctcctcctccc

SEQ ID NO: 124720 - DNA, 1547 bp, Homo Sapiens
  misc_feature (223)..(232): n is a, c, g, or t
  misc_feature (454)..(482): n is a, c, g, or t
tattcaaccgcggcccccgtggtaaaaaaatgttttctaaaggcaatagctcccgggtaggccccaaacttttcaggccgtcctggcctcaatgtcgagcctttaggtgttttaagcccccgttataacacccttagaaatttttaaaaaattttcccccttgaggcgctttaaaaatctctttgataaggggataattttttctccccaatatatgtctcgnnnnnnnnnngaaataaaggggtctcttccgcccaaagggtcccgccaagggttccacggggttctccccagcgtccgaccggttgggttaaaacagccggcgcccgtgccctaagcgcgtaattatatcggcgccccccatataggggcgcacccttggtgaccaacaaaacctgggggaacccggaacctgggggccccccgggggaaatttttggccgcgccccccccnnnnnnnnnnnnnnnnnnnnnnnnnnnnngaattggtacaaagtttactaggtcatacgacacggctcacaaagcggtgggaaattccagtgatggcattgtttgttggttggttccttttatccaaatggagacaagacacatttccgcaggactgtccacctccccccacgagacaaacagaatgcaagactgtcacacgcggctaggactggttccacggacacacgattttgtggcattgacacaccacgatgcgatgccaggccacagtgggtgccaggaggggaggaagcagctaatgctatgcccacactcgccttcaggcagtgcccccgggagggaggcccggcagtgtctgctggtgataatacatttcacacagggagggggaaccccaaggatgggctttggaggcccagaaggcctgtcaggtggtgtgattttccatctccagccaataaataactctgttggatgaatgcatacattagaaatggatgccactacacttcacacgtgggggaccaggtcaaaatcaaaccatgcaaagtggcagggcaagtgaggagggatccgggtgagagatattatcaacagcacacgctctattctgtaccctacaatatataccattagttggattttgctttcctccccgcgccggcaggccctggcgccagcgtctcccagcgcaactcgctgggagggtagggggtcgccgcttgcaagagagaagtgcttgagaggcagtaggcatggggatcccggactcttaggcttgcataggcatcatgagacgtaacccgtcacggcacacgacccgtgattgaggggggaccccgtatgaacggattgcgatcctccgacagaggaggacccgttagagtttggtgacagtccatcaccgactggtgctgatctgacacacgtgggggaccgtgggtcacgatatccgggatcggacggacaacatcgttgtgaaatctgcaaggtacgaatagcaggaaaggacggggaaggacgagcggaaggaaatcgaaggaggacggcaataagggaacgggggcacgggagggaacgtaacacacgag

SEQ ID NO: 124721 - DNA, 581 bp, Homo Sapiens
ccctcgcgaacgtgttatcccacaggtaacttcttgtccttgatcttccttttctccatgaaatctcccaggcactcagcaacatgatcaaaaagctggcttccactgccgtgcacgatgttctctggggtgtcataaacctcggactccatgtgaacattctggtttttctcatgattcacttgcacccgcagaattcgaaaggaagacccaccaagatccagggcaatgaaatctcccttttcagagccatcaggaatggaccttacgaatgttggcaacatcttgactgtggctgttggattaaaatcccgggagaggccattcttcatctccttcctgaagcgagtcatgatatctatgagagtttcatcggagagccgcatggcatacagatacttgtcaatctttttgacctggtcatccttcagctccgtgaagtaataggccaggagctgcgcggcgatcatgctgcggtcgggtcgcgggcggcaggcgtggggacggtcgtcctccgcagcctgcgagccgtgtccctccgacgctgtccgatacacgttctcgaggaccgacttatatga

SEQ ID NO: 124722 - DNA, 575 bp, Homo Sapiens
ctcgcgaacgtgttatccggcagccgccggagtaccacggctcgccagggctgcggaggtccgaccgtccccacgcctgccgccccgcgaccccgaccgccagcatgatcgccgcgcagctcctggcctattacttcacggagctgaaggatgaccaggtcaaaaagattgacaagtatctgtatgccatgcggctctccgatgaaactctcatagatatcatgactcgcttcaggaaggagatgaagaatggcctctcccgggattttaatccaacagccacagtcaagatgttgccaacattcgtaaggtccattcctgatggctctgaaaagggagatttcattgccctggatcttggtgggtcttcctttcgaattctgcgggtgcaagtgaatcatgagaaaaaccagaatgttcacatggagtccgaggtttatgacaccccagagaacatcgtgcacggcagtggaagccagctttttgatcatgttgctgagtgcctgggagatttcatggagaaaaggaagatcaaggacacgaacatacctttgcatacacgctctcaggacgga

SEQ ID NO: 124723 - DNA, 477 bp, Homo Sapiens
  misc_feature (206)..(214): n is a, c, g, or t
tttttcatgtttaaagcagtaatttattctgagatttacttttgtctgttttctttccagtccaggtatcaatattttcaagaatattaaagtataataatcaaacattcaattcataacatatatgcttatcagaagcttttacaaaatggaaattttatgttagaagatttgggctaccagtaatattcactgtgcatattttnnnnnnnnnggtgaacagagttcattgtttagggaaaatgattatggagaaactaaaatcaagagcaattttaatgtggatattaatgacagtgatcactttcatatccatgactttatctgttcctaaggactaaagggatgaaggcagattatgtaccttactgtcaagaacagggtcagaaaaggtcaacaatattaatttaagaaatgtttattaagcatctactattggctacgtactccactaggtgttgaggacatagaaataag

SEQ ID NO: 124724 - DNA, 1175 bp, Homo Sapiens
  misc_feature (13)..(13): n is a, c, g, or t
  misc_feature (46)..(80): n is a, c, g, or t
taacccttcactnacaagggaataagcttgcggccgcctgctaggnnnnnnnnnnnnnnnnnnnnnnnnnnnnnnnnnnnatgtgaaagtagatttttattacagagcaaatttttctatcaattcaatgctttaaataaaacaacataataccataaactgacaatgacctgggagcatgtaaatacttaaggctggagaggcatttttattcttgataaatttatataataaattcttatgacacttgattccaaattgtatgtacgaattggcttgacataataaacataaacataagggcaatttaaacattggcagtagtttatgtaagtcaattcaaggtcagtgactggagaactatattaagagaaacctgaggtaaaaaaaatctttaggaagcagccctgtaacaatgtacatttgtagatcaggggctaaaaatccactctgaatgaataccaagaagcaaaggatgtacaacatccatcacacatctgtttcaaaaacagcatgtttctaaaatgataatctctttacaagtaaacgttacagtattaataactatagagacaccattgggatgagctccagatgccctgctgacttccaccaagcacccctgggccatcgcttaaggcatccatcttaatcctggggctttaagaacatcttctttgctttaattggtgttatgtctccattttcatcttcttcataattggcatggtctctctttctggcaactttttcccaattgtccccaccaaggtctcatatcttctagccatctcttcatctgacacatcaagctctactgtttcatcttcaacttcttctgctttgtgcttagcattcatctgaagcatcaatttctcaacctcaggattaaatcctctgaatgacattcttccatagagaagatcttcacatagtaagaaactctgctcttctattatgaaactctctttctctttaagctctggcaaatccaagtaccagtgctcttcactaatgattttcttttcttcttcttctagttgtttcttggtttctgagtccagtcccctttgcataaacttcatgcgcagtagattcttggacaaccttgtctttcgctcggccgccatggtagcttccgcccagcgccgcactccggccgcgagcctctcccc

SEQ ID NO: 124725 - DNA, 785 bp, Homo Sapiens
  misc_feature (61)..(109): n is a, c, g, or t
gtgccaagctaaaattaaccctcaactaaagggaataagcttgcggccgcatacgcggtcnnnnnnnnnnnnnnnnnnnnnnnnnnnnnnnnnnnnnnnnnnnnnnnnngttttaaagttttatttgcttacaaaagaaaatggaaataggtttgcgaaaacttatctgcatgtacaaagtaatccccgtagataaggagaggcaacccctggaacaaactgctggataaatcgttcattaaaattatatctctttgcatcagagctggtggaaaatcattatttcacatgagttaaaaccactgaaaaactaaatctgtttcttaaactaccaaattcagaaagcttaaatccaaatgctgatttttggatacacatgaaaccagttaccaagtgatctcagagttggacagatcaattaaacaagaggtagtttctccaatattgtccctttttttcttatcagcaaggttattcctatagcaagtaggagtaagtgacatattctttgaacctctttgaattcttttcctgctagggacatatttccctcaaacacaatcatatctgtttgttcattttaggacttgagagagaagattccagagttcaatttatttttcccaattcctctttgagctctcttctctggaaaaacaaattatctgacatgccattaagacaccaaagggaaatcattgctaccatgtcatagattaagggaactttttaaaaatatatattttttgttaataatactaataatattaacattatccaaggag

SEQ ID NO: 124726 - DNA, 1669 bp, Homo Sapiens
  misc_feature (1545)..(1586): n is a, c, g, or t
ctagcggacgcgccggactccaggctccaagcacatccacccatggtggctttattcagtcacgtccccacgcccacggctccctccaccaggcagacagaggggaggccaccccactgcaaagggtcccagccagtgggcaccaacctcaggaagacgtggtccccacctggagcttccctcggctgccctggcccttgagcccgtcctgaggatttgtgctttgactctgacagggagcagcaggaagctgccagcccactgcctccatgcgggtccttggagggcagacggtggagcggcgcttcctcagctcccgcggtcaggccccatcagggatggtcacagtccagccacaggggcgactctgcccatcagtccccctggggcagcgaccagatcctggctggggcagcaccgggacaggccctctctatgggcctaaggtcaatgcaggtgggggcttgctgggcccaggccaatgaacccacccgtaggagccctcactgggcagcagggccaggagggcaccagggactggccgcagagtccactcagggcaggcgtctgtggcttggaacctgccctcgccaaggcactggggggttaaggagcagatccctcagacggccttgggccagaagctccctggagagctgggcacctcgaggagcgtctgggagcctcaccctgtcccagtggctcctggcacccctgggagcgtcagcaccaccccaaagctgggtgcctgtgtcgccactaaacagaagggaaaccgaggcaggggggccggctggcagtggagcattctggcagcgccgggcgaccaagtcccgactggcagcggctggagtttggttttcagaagcgaaggctggcgttggcacacagggaaggctgcccgatgacgtgcctcgactgtgttacatttactgaaggagagcggcctcctgggcacgccactcaggcacggtgaggctctgtggcaccaccagccgcatggcagggcagagagtggcgccgtcctgcatgccccccacagcagaccagagtcccgtcctcacgctgcacagtgggtgatgtgagtttcaaaactacgcctccagaccgagaaaccctcccagctgtcagcaagccgtggcgccgagctgccgggcacctgctggctgctctccagtctcaaggagctgggacagcgggcatggggaggagctggcctcgagcccaaaggtcgtagggagccaggcagggcccaggagcacccggcacttcccgaagccggactctgtagaggacgagcgtggagggtctttcgggtgggggcagccccagctgtgtgccccgaggccccgggaagtggggacgggccgaggagggagccaggagcacggccttcctcctgggtgtctccaaggctgggcttcgccgccgagcctggttcacgtggggccgaggaccgcgtctgcaggcggctccagcaggcagcacgggctctcggcagggcctctgccctagacgtgctccatctccgggtccgggtcgggnnnnnnnnnnnnnnnnnnnnnnnnnnnnnnnnnnnnnnnnnnagcgaggccttgtccagcggccctccccgtaacgggccagctccctcggccgaattagacgcgagctcgtactagcctaagtt

SEQ ID NO: 124727 - DNA, 1084 bp, Homo Sapiens
  misc_feature (148)..(166): n is a, c, g, or t
gggctggggttttcccccgcgaagccctggttccacgtggggcccgagggaccgggtttgacagggcggttcccagcaggcagcaacgggctctcggcaggggctctggccctagacgtggtccatctcccggttccgggtggggggnnnnnnnnnnnnnnnnnnnggttttcctgcgtcgtcgtcctcagcgcaggccttgtccagcggcgcctccccgtcacgggccagctcctccacgtgcgccagcatgtcggccatcagcgcctcctccagccgcttccgcacctgctgcaccagctcttcctgcttcctgatgtcctcgtcggtcaccatgaaggctttgcacaggggctgcgtggtgttgagccatacgccggggttcttctccacggcggccgagagctgtcccgtgatgggcatggtgctagtgtgcagggcgctggcgatggccgacagcagcgtctcatccgtgcagccaggtcccaccccctgcaggcccttggggaggtccatggtcttgaccagctcctcagcaatgtcgaaggcgttcaggccgctcagcttcttctcccagaagagctggcgcggctggtccaccgccttctgcgggtcgctcttgaccttgttgctggggtggttggtaatcttggtcaccggctgcttgaagatggacgccgtctggcgcacgggcagcgccgtgttcaggtcgggcttgcccttgacctggttggaggagtcgtagcgcacgcgctggcggctcttgttcatcttgctcatcagcatcttgcccgtgcggaagtcgaaggtgctcaggtccatggagccgcccaggtagcgcgccagctgcggcttgctgcggaacttcttcccgctcgggctgcggggaggcgggacggtcggcgccccgggcggaccccagaccccaaacccaggcctcggccgcagacccaaacccagtcccagccccagcttcaggtcgcgaccccagccccagaccccaacacggccctgaccccaaacccaggcaggccctggccccagccccagaccccaaccctggcgagaccccagaccttcatcc

SEQ ID NO: 124728 - DNA, 1067 bp, Homo Sapiens
  misc_feature (39)..(39): n is a, c, g, or t
  misc_feature (151)..(151): n is a, c, g, or t
  misc_feature (159)..(159): n is a, c, g, or t
  misc_feature (176)..(176): n is a, c, g, or t
aggccccagttttttgtccaagagttgggtcacaagttngggtttgtggttggtaaagaagttccaagtgaatgaggttccttaaaaatgatgtttcttttatatgatttccttaattcaaaggtcatttttagctggcccccaaccaagnaacaatcnaagcaaggaacttgaanaagtataagcatttgtaaaaatgtgatttcttggatgaatttccccattggtaactatgattttggcagaatagaggattggctcatcagtgaagcgcagtatcttagctctagattctattttcatgcatcacagagtgctatacggtaggtctgttgtgctcagtcaagaactaagaaatagtatgaattgtaagtcaagatgggcaactcagatggagcagcttagtctcacagtttgcttgtctatttattttatttagtgccaaatgtattccattttaaaagtaagccagagtgagtcaaggcatatacacactttctcacaaaacttcctaaacagatttgggggtttaatatgtccaactcctcatgaaatatattcaatccacttaaatatattccatctttttaacataaaatgtaaagcttagcacccatcattaatttatgtctctgttttatccagtggttaaaaaaggattctgcctctttagtcctcactgttaaataaaacccaatcatagtaagtgattaactagcaaaaagtaaagctatttatagcaaatttctagatcattagaaaagcactggtagttgtacaatatcagtgttgactttgaacttctttaacgagatcatgaattcttttcccttagccaaaacatgaaatatttaacctagttgtctctaaaagttttgtaatcatgagttagatatatgtcatctcctattcattgcttttatgtgatcaataaatcttttacaaacccaactactcatttccttcctagtaatactttgcctttttcactgtgtatggaatgaaacatgtaaagctgtcacaatcaatgtttttatctgataatattaaatattttttaacttaaa

SEQ ID NO: 124729 - DNA, 685 bp, Homo Sapiens
gggtataaaaaggtttattactcacatactgagactttccagggagatagggcaggctcccaggagggtcgagaaacggcttaattggtttggcttttatccgtcttagagtgtgaggctggggtgaagcttcctgcatgcatgccagggcttgcgtgatttgaacttcctgctggggccaaaggaggaggcacccatgcttccatcagcttgcccagatgtgcagcataagggagaagggaaaggtgagtcttgaaagatgtcagcagtcaaacattaaaaacggcattgaagtctttattacagtcaaatgaactaaaaccccggcctataaaagcgtatatttttcagtctctaaggcaatctaggtctaaaagtctgcaccagcaagcaggggctgcaaaagctgcgatgtccctcaaaagtttcagacggggccacagaagctgacgagcaagactttcctagaggtcaaactagtggccacagaagacaatggacaagggagtttctcctagatagcagattcatgatttcaccaaggaacactttctgctgggcaagggatctccatcatgcctgctcagcagattatcacggcatgggccattggctgctatcatttttgtctttaactctagtattcattcgcctctttttagctttagtaatagaccctttccct

SEQ ID NO: 124730 - DNA, 1026 bp, Homo Sapiens
  misc_feature (421)..(432): n is a, c, g, or t
  misc_feature (935)..(935): n is a, c, g, or t
tgtactatgacactatacacttttcttttgggtggcatttattgatttcaacactatcttcatgacctgtttgtgttcagagtggctcacagataaggaaccatttttgccccagtcttaagttcatggaagataaataggaagagtaattaactgcagcaaaaggttaggacaaaacatggcattatcagggcttgaaaggactttattgtggctgtggtgaagcaggccctggtcttggcagatgataccagaagggcactgagtgccagcgtgcaacttgaatttgatcccataaagtcaggcatcaggaagccattcagaatttttcaccctgtcagatgctcagatttgctagagaactctggtagtggcaagaaccagagctgttactcagaattgggacagaggcattgtcccnnnnnnnnnnnngcccaaatcagagcagtggcaatgtaagtgcagggaggacatgatgtgggattatttagaaaacaggccaaatgacatgcaactactctgcggatacagacgaagcaggaatcagggacccaataagtctcaggtgctttcaagtaagagcatgtaggtggaaaggggcaggactctgggttccattctaagtaactgagactgaagcaacagtggaacctccagatacagataacccctgacagactgaaatacgatctggcgacagcaaggaggtggcagcttgagagaggtctacaacccacctaatggtttagagccacctgactaccaggcctgtgtgtggacgggaaagtcctgaggattggactctggaaaaccatcacacttaagagacagaggaaaaagagcagtcacggaggtaggtcacgaaatgggtcaacaggacccccgaagagttcaagatactggaaagcactggccatgagtgccagatctccagnacacacatcatgaatttgcttctccccagaggaaaagaagctccttcagggtggtgcctggctcagggtagctggtcaacaactagctttt

SEQ ID NO: 124731 - DNA, 1524 bp, Homo Sapiens
agctgccaacctgctcatttcttaggttccactggtgagagcagctttaacacacaggcccaaggcactacggtgcacctcacaggccagtaagaaacaggccctttaactggagattttaaaggttacaggttatagctttaactccttctgagacagcatccatttctcaagaggcctgagcaggaagctccgggagaaccaagcatgcggagctgctcagggacgtccactgggaagcctggtgtccactcccacctgcttgggccctgcaactggggtccctggagctggccaggctgtggggcgccagagagcacagcaccctagtgaccagcatggagcttctggaccgggtgagctgtcttgagcctcaaccacccaggtcaggaggtctgggaggccacatgcctccggccctccctacccggacaagttcagggcaaagtctcagccggggggtggccccgcaggacgtcgaggtccagcatcacggaacccagcagcccacggcggaaagtctgcaggaagtcacgggctgccgcaggatagttaggctgaataacgttcacgttacccgtgcccgtgagcaccttcaccttctgcgtcttccccagcttcacagccacactcttcagcacgcgctctacgttgtcacaggcactgcccaggccgtagtgctgcacgtacccaaagcgctggtgtttgttgagggtgtacagcaggtagtcagccatggtctcctccccgaccaggtggtccagcaccgttccacacagggccagcttcaggcctgtctccacactttcaatccgaggagccagcacgccaggagtgtccaacaggaacatcaggggccgctcagagacctgaattttggacatcacagctctggtgatcccaggctcgccacccaccctggtggctttccctttcctgaggtgctgcctccggagggagttgatgagggaggacttgcccacgttggggaccccaatgaccatgatacagtactccaggttctcttttcggtggtagcggtggcttctcccaatcagttcagtgaccatcgggatgatctgcttgacattttcatcctttacacagttggtaaaaatgacattttttaggccttctccttctaagtgttgcataattttctgctgctctgtaagatccgccaagtccatcttgttgaggaccagcaagtgaggcttaagcccaagggtttcctgaaacagagggttgcggcctgaaagtgggatccgggcatcgtggacctcgatgatacagtccaccagcttcaggctgctctgcatcttcttcagccccttggccatgtggcccgggaaccagcgcgccacgtcgcgaccgcacagggggaagttctcccgccaggcggcctgggcggcgctgcacagcgcgcgcggggtcaatctcatggcggcaccgtccccggaaacgctcccgcagctgacctcctctgcgccgctgcgacccgcctctgaggttccggcgctgcgg

SEQ ID NO: 124732 - DNA, 896 bp, Homo Sapiens
tgatctacaggatgcctgacaggaactggggtgcaggggtgggtctaggagggaggtgggggactgcgtggaaggagcagctcaggtctgacctccgcagtctgacagtgcctttccagtcctggggagttaggttctggtgcatttgttgaagaatctcagtctctgtgtggcttggaaagtgcccttgctgtgagctggtttgtgactgaaagtgaaacaaattatagccttgggaagctcatctggcttttagtttccattttggccagatatgtttgttacatagtctccctgcttggctggtaagttgtgtttgttacatagtctccctgcttggctggtcagatgtgtttgttacatacgtctccctacttgttctgcagcttctgtgtttagtatacatttgagcctccttttctccttttcctacagggaaagccaccagggtgggtggcgagcctgggatcaccagagctgtgatgtccaaaattcaggtggagtcctcaggggccaggcccagcactctgtcaagagctctgcaggcgtctggcacctgccgacctctgtgtggcttccggctgctgaccacgcttccctcccctccactcagtgtccccgctgagcacccccggggcaggcactgcccctgcccttattccacagtcgtcatagtctttgcgccaaacctttggggaaggcacgctgttttccccatttccagatgaggaggccactgtccaggccatgcagtggtcaggacagacctgagtgtgggccccgcgcccacctccactcccttccttgtgttctccttgggagcagaagacaagctgtgggacctgacgcttttatttattctccaaattaagtgggaattagatcctctggggaac

SEQ ID NO: 124733 - DNA, 810 bp, Homo Sapiens
  misc_feature (1)..(1): n is a, c, g, or t
  misc_feature (4)..(7): n is a, c, g, or t
nttnnnngccaagggttaaatatttattaggtttgttttaatcaggaataaatacatgatttagcaaagtgtaatgcttcccactgagaaatccctctgggtgctccccaaatgttccaatcacattcgtcacaacggaaaacaacacataagatactgtgcagacatctggagttcagggggtcaccctgccttatgcgggaagtcaatgtccacagtgttacattcatttctcatacgttggctggttcctttgaaatagccttttggaacggttggggaaaccacagatgtctccttgtataaacacactagaatctatgatacagaaaactgtgtaactgcacatacacataccagtagcacgatgagctcagatggacggaatgcttatgtgagcagacagacagggagagatactgcaagcatgttcccctccttccccaggatccctttgaaacagggaaacatgagtcacagattcatctgcagcccactctcttcctagtaggatttggatgggagcttctccttctctggctatacattgtgttttctcccttgtctcttaaaattatgcatgacatcattaatccacttggactccccatctttcctggagctgagcatttttcctcatatggatgccagacccttcttagaataaagtaccgggtgagttaatctttagactgtatccatttcttttctaaaaatcctaagcatgagctgattctctttttaacatttgtttaaaattttttccctgtctaactgtgacacctcgttgggctcgggcgaatcctggcc

SEQ ID NO: 124734 - DNA, 1184 bp, Homo Sapiens
  misc_feature (167)..(184): n is a, c, g, or t
  misc_feature (992)..(992): n is a, c, g, or t
  misc_feature (1068)..(1068): n is a, c, g, or t
  misc_feature (1144)..(1144): n is a, c, g, or t
  misc_feature (1173)..(1173): n is a, c, g, or t
tttttaagttgacttttaatgagtaaaaataaaaacccctcacaagtcaagtttactcagtagccaatagcctaaaatgaaattttaattttgcttgttcacataattttgggttttttttccccttctctgttctgacttctctcagtcgagccttggcgacaggnnnnnnnnnnnnnnnnnnggcgtatttctcttcatgcccctctcaccccagtaaaaagtaggagaaaaagaatacacagattaaaacagaattgtattatacattcacttttgagttatcaggtgaacttaattcactccagaacaatcacagagacaaagacaggcaagctgggttttaggctctcacccttgacactccaaattgtgctgggagtggccaaggctttgttagaaatggccctaagggtatatacactgcctcagctgccttgggcttcatgccctgggctcctccaccagggccagccccaataggtctttagttcgaggtagaggttctgctgttatttcccaggtgagctagaagcaggtgagtagcaagcactctctaagactgctttttattgtgtggtgacaagtttcacaattgtgctgatgatccgggatcctcgaggacacgtacacagatcaatgcttgggtttttaattttatcctggagaagctgatcaagttcacaacgaagctcctttaccagttcagccacctgatgggaagcagctacaaaacggatccaaccatcatccagggagacaacgaactctcctctttgaagctgcacattcacttggcctcctccaaacaagaccagcgggtgcacagacaccatgctgcagtctcgggtgaatactcgactagtttttatcttctcgtggtacaacaggtaggggctgtcaaagtgtctcacctgatagttcactgatgaagggtgaatgtgtacatatccatcgttcttgggtgacaaacttcaactcagctgattttnggttgcattctgacagctccagtacttggtcttcttgaaattttccttctggggcttttcacctgcactacatttnggatacaaaggcaggcacacagcatttctggatatcagcttgggggttctcaggcatttgaggtttgcctcttctnctgtgggcatcttagggcaccatcttctncttgggggcct

SEQ ID NO: 124735 - DNA, 1359 bp, Homo Sapiens
tttcccccaaacacctctatcccttttattccttcccaggctattgcaggaaaagtcttgtttcccaaacgctgtgcctttctcctcttgccttcaaccctggaggggcccaactacacaagtggcttatttggagaagggaatgaggttgaataaagaaagctcagcttccagaacaccacactctcttggttttctctgaccttaaggtaactccttctcagtcctttggctgatttcccatttcccagagagcccaagggctccatccatggctcttttctgttgcttctcagtaatactcagagacaatctcagtggcccctccagctgcatggctttaaatgccactgacatgctgatggttcagtagggggcgctgtggtgccctgccagatcccttcacacagccagtgcccaggacccccacccccaacacactaccatgcatggtagctgccagatgcctacagcctcttttccagagacttgccctcaactgaagtcacttgccttcaaatgtacccacactcccagagaacttctcacagccaataaatgactgataaaggctttcacaggttccttctgagagcacccccaacaataaaccaagtgcattcagatccctgtctcgagctctgctgcagacctgacctgagagaactctccactttgatttgcagccagaacctcccattccaaccacagacagcctgctttgcaccaaattccttacttacccagcccatccttccctatttcagtaactggtaactccatctttcctgctattcaggccaaaaaccttaatgtcatcattaactcttccttctcttacactccacattcaaactctcagcaaatcctattggctcttttcaaaataaatctagatatttgaccactgctgttgctgtggcccaggcccaagcctggaaccttgcagtagcttcctaacaggtcttccctcttccttctgcccttgtccactaaagtttttcacaatattgcagctagaatgacccttgcaaaatataaatcaatcaaggcactcctctgttcaaaccctccagtggttcccatctcacttagcagaagccaaggccctccaccacctgtcctccccaagccgcctctccttccattctacccctgcccacgactgctgcttggtctgccctgctctcttcctgaccacgtagagcaagttctcactttgggggcagtgcacatcctgttcctctgcctggaatgccattgtgccaggagtccacattccacgttacgtctctggtcaaagtcacattcccagtcctcgtgccgattcacaacccagcctcgtacctagcctaaatt

SEQ ID NO: 124736 - DNA, 510 bp, Homo Sapiens
tttagagattttcagaaataattttatttacagaaaattcacagaggattaataaaatgtcatgaatacaattttgttggtaataattagcagaatcaagagtagattaatatataaggtaacatgatatattaataatacaaactaaaatatcaattttatgctagctttatccattagtttttcatattccaattttaaacaaatctagaaataagacagtatatatgaaacaaatttgctaaatatttttaaattatgccacctcagatattacctcaattttaaaaccatctgtaaattaaatgaccttcccattataatttctaaatataaagaagcaccagctggaactcaaaatgcataaaagatattgttatatattttaagaaaatattatattagcaatatcataaatcaacaaagaatccaaagaatattgcatgaggtaaggtacattaaatgttttatgcctagaatattatctacctgcattcttatccatatagt

SEQ ID NO: 124737 - DNA, 1233 bp, Homo Sapiens
acaaggttttttgttcatttgtccttagtttttaaaaacaaaagtgttaactagaatctaacaacagatcaaatccaaacacagcagtccagtggagaatcaaaacttttccggctttattctctgggaaaacccctggtctgttttcattcctattggtccaggccaccattctatgatatgaaggcctaaattaggaaagctaggtgagctgtgcaaattcagggtgtctgagccacctgttgtttggtgtgtgatgggggtggaggcgcacacagtggtgttctcgctagtgttcaaatcacagaaacagggacgtaactagggtgaggtgagcaaagcactcaccttgggcacaaaatttaaggagtgccaaaaaacccttaaattttgcaacttaggggagtgctcatctcataccaggttccagacctgcctagacatatacacatcccttcctttggaatctcactgcttccttaacacaaatctattttcaaagaaaaccctaagaattaatagccataggaaattattaaatcagatttggaaaataggtgacttctgagtttgttgaggagaaaataacctttataaaccgtgagcatttccaacaaggacaatcttgactggctaccgaggaggaaaacacacacacatatgcacgcacgcacatgcatgcacgctcaagtgctttagatcaaatgtggcagtcctcagaatgctcaggctctgcatcacctcctggctatacttgctccctccgttaccaacagactcagctgggggcttctcagacacaggcccatccccagctgcctcctccttgccacccttccagctcttcagtgagtttttcttcttcttctccagtgtctcagtgccgctgcttcctcccaaccctgtccccacccctccaggctttgaacccttgctgtgcatcaggccccccatgttcttcttgagcttgctgcccaaggttttgccaaagctgcccagtttgttagccacagaatctgctctcttcttgtccttctcccgatctcgctttgacttctccttccgccggccgccctcgttgctggtggaactgctgccaactgactccttgtctgagtctccagactcaggagtggaccggggctcatctccagctgaggcggtgggggactcaggctgggccagaggagcctgtgcatcagaggacagtgggatccacttcacattcatgta

SEQ ID NO: 124738 - DNA, 586 bp, Homo Sapiens
gactaagtatggggatgaatccttcttatttaaatttttgatacattgtccatcatagactttttgcattgattgtgattttttaaaaatgttgcattaaaatagtatttatcttggttactgggttttttggcactccttaaattttgtgcccaaggtgagtgctttgctcacctcaccctagttacgtccctgtttctgtgatttgaacactagcgagaacaccactgtgtgcgcctccacccccatcacacaccaaacaacaggtggctcagacaccctgaatttgcacagctcacctagctttcctaatttaggccttcatatcatagaatggtggcctggaccaataggaatgaaaacagaccaggggttttcccagagaataaagccggaaaagttttgattctccactggactgctgtgtttggatttgatctgttgttagattctagttaacacttttgtttttaaaaactaaggacaaatgaacaaaaaaccttgtatcatgtttgtttttatttataagttagccaatcccaattccgtttgctttattttcaaataaaaaaagatggaaattttg

SEQ ID NO: 124739 - DNA, 391 bp, Homo Sapiens
ttcgagctccggtagcccctgtgtgccgccagaagcccaccctgaactttgcacagctcacctagctttcctaatgttaggccttcatatcatagaactggtggcctggaccagtaggaatgaaaacagaccaggggttttcccagagaataaagccggaaaagtttttgattctccgctggactgctgtgtttggatttgatctgttgttagattggactttagagtcaggagaccatgcgggaagatactgtgtgataagggcctgctacatgttggttacagtgagactagaaatgggataaatccagagctgtttcaccagtagacttgcctgtatatcctgtcttactgattatggatcagcagcaaagaagggttctgggcacat

SEQ ID NO: 124740 - DNA, 1215 bp, Homo Sapiens
  misc_feature (1005)..(1046): n is a, c, g, or t
  misc_feature (1156)..(1156): n is a, c, g, or t
tttttttctgaaaaacaaaataaacatttatttctgtaaactgtctgagtgcagagatgttctttacaatcccaatacagtacagatttcttccccaaaacgaaatgagcaaggaaaaacagaaaaagagctatatcaaatgtgctcatgaagaaccaagccaatctcacctttctttaaaaacaaaacaaaacgatccttttgaatgtgtggtgcagacgcaggactgaagccacaggcttttggggtgctgtgagcccagggctttgctcagctcacagctagcgcggcgggcagagcaacccttcggcccaagccatcctcgcagcttgcacagaagcttcctgaacctaagggatccgttcccagctctccttaaattcccagtccccaccctgggcctctctccctaacgatcttgtcgctttgggagcccctgaagtgaaccctgaaatactccctccgtcaactctgggctcagacctttgcccttctctgtgtcacaaggaaatttcggtcaagagggtgggaacaggtggtttcagaccgtgcagcaaagccactgccaggtaagttttaaggcaaattttatctcttcttattcagtctgagccggacctaaccttctcaccaccgagcaatcctgcctatgctggacatgcatcttgggcaactccggatggaggtgggatgagggagcccggggcagataccaggaggtctgggccttagtagggaatggacgtgtgtgcttatgaaggctgcaggcactgggcacagctcctggcccagctgcccctcagtggtacacaggaagcagggcccaggaaaactgagatggcaaaataggcccgggctctggaaagcaacgtgaggtcatgcagatctcactaggcagacctcgtcgcgtggaagagaaatgccaggaaaaggggtcactgcaggaggcacctcggatctgatggcaggcaggaccttgcatcaaaatgacttttctttagaacnnnnnnnnnnnnnnnnnnnnnnnnnnnnnnnnnnnnnnnnnngttccatgagcgtcatgagataggacacggcagggttctaagggaagcgggaaggtgggggctgtggacacagggtggcgggcgctgcctctcatggcttcttttctccntggtgggctggtgggctagtagctgaggccggcggtcctctcccccggggagcaggcag

SEQ ID NO: 124741 - DNA, 1478 bp, Homo Sapiens
tttggggggaagccccccgggaggagtggaaaacccccggggaaatagctccccttccccgtcaagcttgttggggcttcaggcccttttgccctttcttctgggttcccaagggaaattttcggtccaagaagggtgggaaccagggtgttttcaggcccgggcagcaaaagcccactgcccgggtaattttaagggcaaattgtttctcttcttattcagtctgagccggacctaaccttctcaccaccgagcaatcctgcctatgctggacatgcatcttgggcaactccggatggaggtgggatgagggagcccggggcagataccaggaggtttgggccttagtagggaatggacgtgtgtgcttatgaaggctgcagggcactgggcacagctcttggcccagctgcccctcagtggtacacaggaagcagggcccaggaaaactgagatggcaaaataggcccgggctctggaaagcaacgtgaggtcatgcagatctcactaggcagacctcgtcgcgtggaagagaaatgccaggaaaaggggtcactgcaggaggcacctcggatctgatggcaggcaggaccttgcatcaaaatgacttttctttagaacaggaaagagggggagaaaagaaaaagaagatcaaagaaagaggttccatgagcgtcatgagataggacacggcagggttctaagggaagcgggaaggtgggggctgtggacacagggtggcgggcgctgcctctcatggcttctcttctccctggtgggctggtgggctagtagctgaggccggcggtcctctcccccggggagcaggcagatgactttggcaaggggtggtgtggcgggggctggggttactccgtctgggcgtcgtaattggctccccccgccttcttcagctcgctcttgatgaaatcttcctccagctccttccgatcactgatcacaaactccttagcgaaattctgtacgacctccttcaccagggtcttgtccgtcccggttttggcgcgctgcagcccgctgacgttctcaccgatccacgtgatgagggcaaacttggacctcttgctcatggcatccccggtggtgaagcgcacgaaggcaaacaaccggacgtcatctgtgcactgctggatgaagtgctggtactccgctccctgctcgccggggacgatggtggagccgtcatatttaaaagtcacccagatgacggccgagccgtcgtcgcgcaccaggttgtacgccgcccggcaagcctctttgtcgatcttggtggccatcgccgcggagccgcagcgggacactgtccggggcggccgagcgcgcccctggccggcggcggggatgggagcgcggcgggtacgcgccgagggcgcacgggctggcggcggtggcgacggctacgcggcgcctgcgagctgcgcctcgtgccgaattcgccacccaggcctcgctactta

SEQ ID NO: 124742 - DNA, 1028 bp, Homo Sapiens
  misc_feature (713)..(753): n is a, c, g, or t
gcccggaaagcttttccctggaaacctaaaggggatcccgttttccccagcctctctccttaaaaatgccacaggtcccccaccactggggccttgtctttcccttaaacaatctggttcggctgtggggagccccctgaaagtgaacccccgaaaatacttccctcccgtcaaactctgggttcagacctttgcccttcctctgtgtcacaaggaaaatttcggtcaagagggtgggaacaggtggtttcagaccgtgcagcaaagccactcccaggtaagttttaaggcaaattttatctcttcttattcagtctgagccggacctaaccttctcaccaccgagcaatcctgcctatgctggacatgcatcttgggcaactccggatggaggtgggatgagggagcccggggcagataccaggaggtctgggccttagtagggaatggacgtgtgtgcttatgaaggctgcaggcactgggcacagctcctggcccagctgcccctcagtggtacacaggaagcagggcccaggaaaactgagatggcaaaataggcccgggctctggaaagcaacgtgaggtcatgcagatctcactaggcagacctcgtcgcgtggaagagaaatgccaggaaaaggggtcactgcaggaggcacctcggatctgatggcaggcaggaccttgcatcaaaatgacttttctttagaacnnnnnnnnnnnnnnnnnnnnnnnnnnnnnnnnnnnnnnnnnggttccatgagcgtcatgagataggacacggcagggttctaagggaagcgggaaggtgggggctgtggacacagggtggcgggcgctgcctctcatggcttctcttctccctggtgggctggtgggctagtagctgaggccggcggtcctctcccccggggagcaggcagatgactttggcaagggggtggtgtggcgggggctggggttactccgtctgggcgtcgtaattggctccccccctcgtgccgaattcgccacccaggcctcgctcc

SEQ ID NO: 124743 - DNA, 688 bp, Homo Sapiens
  misc_feature (688)..(688): n is a, c, g, or t
gaaaaagtcaggtgtaattattatctgttcttaagataattgcaaatattaaatattatgatatatcaattcatgtgtttggcataccagtgaatgatgaagaacatgagattaatttaatttatcttcggtaacttgacattctggagagagactatcttctggagttgagtacaagcacagaaacatctttacggtggcatcatctcattttttaggaagacatgataatactgcccatcatattcatgtgtaactactgttctttcttctgctttcttcaccataataaactttggacaaccaagcaagctctaaccgcaatgccagatggccttgtccgagggcctagtgtttgcacggcagtgggaactgggcctttcctacaggacaactggcaagtttgctgggaagtcaaataatacattccacctggcagctgaaggcagccagtcagtctgtcccagaaagggcccttttcagcacccaaagctgggctggctgggatgcctctggctggtgaagttctcacataggctgatttaaatccagcaaaggtctatagaaaaaggcttgcgtgttcgttgagtaatcattgtttcattttcatttttacgagagtttgaaaatagacacactgttaacacttctgccagttttttctgatctttccagccccacccccttn

SEQ ID NO: 124744 - DNA, 972 bp, Homo Sapiens
caagttttaagattatgccatttctttcagatctttatttctcaaaaggatcaaaagccttcaacagagatgttttaaatcccaagctatcaaataaaaatacaatatatattagaacagtggagaaagattatcataacattttgttttgtttgtgcaaattataacagggaattagacactgggaatctaaaaatccaaggatactaactaaagtcagtattttaggtccagcacactgcttagtggtatcatggagacaaataatgtgggaaaactcaaaaatgtgccaagcagcagaaataaaaggagtgaaaataaaaaggttgtatctttctattaaaatatgtacgtactggtacctgtaaattgaatgcaaatgtcccaaaattctgaaattgtgactttaaaaaaagtaatggtgatagataaatcatatgccagagtgaaattttaaaatacatttcatatttccagcatcataaaaataaatccctctgtaggcaattatcctaaaatattttttatcagaaatatagctttagtaacaaataaccatttgatagttacataaacatataacagatatgctctacatgtgtaatttaagtacattaatatgagcattctttatgggtatacatcatataaaaataaatcattttcatacttttttaaatgttggcactgtaagtcacaagaatgagctactcagtcagtctccctatttcaggaagcctttgcatggaaggacagagtctctgtgaagttctctgggaagtaaaggaggcgctgatagggactgaaggctgccttagctcagaagagctcaaggcaacagggcaatttggggagagtcacaggcacaggaagggcgtagatagaagatacgtaaaatcaaatcaggaagttttgttatattgttaaatgatccaatctccactccatgtccttcaagaaatgttgaaagaa

SEQ ID NO: 124745 - DNA, 1277 bp, Homo Sapiens
  misc_feature (427)..(481): n is a, c, g, or t
  misc_feature (579)..(618): n is a, c, g, or t
caccagcaatggtgaaagcagcaagcaggaggccatgcagaagacctgcaagaacagcgacatcgagaaaatcaccgaagattcagctgtgaccacgtttgaggctctgaaggctcgggtcagagaacttgaacggcagctatctcgtggggaccgttacaaatgcctcatctgcatggactcgtactcgatgcccctaacgtccatccagtgttggcacgtgcactgcgaggagtgctggctgcggaccctgggtgccaagaagctctgccctcagtgcaacacgatcacagcgcccggagacctgcggaggatctacttgtgagctatctgccccaggcaggcctcgcctccagcagccccacctgcccccagcctctgtgacagtgaccgtctccctttgtacatacttgcacacaggttcccnnnnnnnnnnnnnnnnnnnnnnnnnnnnnnnnnnnnnnnnnnnnnnnnnnnnnnngcaggactctggagccagagtagaggctgtggcccaggcactacctgctggctcccacctatggtttgggggccatacctgttccagctctgttcccnnnnnnnnnnnnnnnnnnnnnnnnnnnnnnnnnnnnnnnncacggctcctaagatccagcccccatactgacagacggacagacagacatgcaaacaccagactgaagcacatgtaatatagaccgtgtatgtttacaatgttgtgtataaatgggacaactcctcgccctctacctgtcccctccccctttggttgtatgattttcttcttttttaagaacccctggaagcagcgcctccttcagggttggctgggagctcggcccatccacctcttggggtacctgcctctctctctcctgtggtgtcccttccctctcccatgtgctcggtgttcagtggtgtatatttcttctcccagacatggggcacacgccccaagggacatgatcctctccttagtcttagctcatggggctctttataaggagttggggggtagaggcaggaaatgggaaccgagctgaagcagaggctgagttagggggctagaggacagtgctcctggccacccagcctctgctgagaaccattcctgggattagagctgcctttcccagggaaaaagtgtcgtctccccgaccctcccgtgggccctgtggtgtgatgctgtgtctgtatattctatacaaaggtacttgtcctttccctttgtaaactacatttgacatggattaaaccagtataaacaaaaaaaa

SEQ ID NO: 124746 - DNA, 1538 bp, Homo Sapiens
  misc_feature (297)..(318): n is a, c, g, or t
ttgtttatactggtttaatccatgtcaaatgtagtttacaaagggaaaggacaagtacctttgtaaacatacacggtctatattacatgtgcttcagtctggtgtttgcatgtctgtctgtccgtctgtcagtatgggggctggatcttaggagccgtgccccactactcccccaacccccacctccctgccccaccctgggaacagagctggaacaggtatggcccccaaaccataggtgggagccagcaggtagtgcctgggccacagcctctactctggctccagagtcctgcnnnnnnnnnnnnnnnnnnnnnnacgcatgtttgagtatgtgcatgtatgtacatggggaacctgtgtgcaagtatgtacaaagggagacggtcactgtcacagaggctgggggcaggtggggctgctggaggcgaggcctgcctggggcagatagctcacaagtagatcctccgcaggtctccgggcgctgtgatcgtgttgcactgagggcagagcttcttggcacccagggtccgcagccagcactcctcgcagtgcacgtgccaacactggatggacgttaggggcatcgagtacgagtccatgcagatgaggcatttgtaacggtccccacgagatagctgccgttcaagttctctgacccgagccttcagagcctcaaacgtggtcacagctgaatcttcggtgattttctcgatgtcgctgttcttgcaggtcttctgcatggcctcctgcttgctgctttcaccattgctggtggatggcatctcatcactggcccatttagagaactcaggtgtgatgcgcgtgctgggagggccgccatttaggactgcgccccgaagtgcctctctctccttggcttcaccaggctcctcgcctgtgcaggggatgacatcagcctctgtgtattgtggcttcccatactccagagtgtcatccccatccacatccaagtcagcatcactgtccgggttctctttgccgctgcacatgatgaagccagagcctcggaagccaccttccaggagagtggtggcccgtatccgcttctgtccacaccactcatactcctcaaagcggttgttgttctcatgctcgatgtccacagcatcatcctcagccatgcaggagccttccctctgcccttcatcttgcttcctccgtttcattttcccaatccgagcattcagtcgggtctgccggttggctcgtactcgcagaaaggtttcctccctcccgccggcccctctgctcctccggccgctccgggctctcggcatagccgccgggcgctgctctaacgggaccccgtggccgctgcgcggtgccgccccagccctggcctccggcgctctgggccccacggccgcccggccggcgagggcggcgatgcgggcggattccccgtggctgcccggcggcggcggcacttcagctccaagcggcggcggcggccatgcctcgtgccgaattcgccacccaggcctcgctaccttagaaccgtaagagtactgccg

SEQ ID NO: 124747 - DNA, 399 bp, Homo Sapiens
tgtgtgtaaggctggcagagggatgactcctggcgtccccccaacacaggagcgtgcctgcctgctcacagaagctgcctatgcgtccccagcctgggctgacaggaccaaggtctcagcacacactggtgcagagagacatggctgcaggcccaggtgctcacatgcgcacaacatggctcattgtgtagaccagagccctccctgttctccctgcagggtgccaagaagctctgccctcagtgcaacacgatcacagcgcccggagacctgcggagggtctacttgtgagctatctgccccaggcaggcctcgcctccagcagccccacctgcccccagcctctgtgacagtgaccgtctccctttgaatacttgcaacaggttcccatgagatact

SEQ ID NO: 124748 - DNA, 1240 bp, Homo Sapiens
ttttgccaattcaacataaatttatttttgtgtttattttacaaaaagactttagaacacatgaggaacactagatgatgagagtgagcagccttttcagcctttgtttctttcttctttaaatacagatgttgacagtaaagatggattagatgcagtccactttttcctcagttggctgatttttttcggaattataaaccatgaaactaaactgagtaaatgttgaaagtttattgcaagcagcaccgtaacttccagtcacattggcacatataacagccccaaagaattctggaaaatgcttctggattcttgaaatcactttttggcaagctatggttggatcttctcctcttctcatgtattctacagcttggtagcttggcaggaagcgcatcaatatatcaccattcccagtggctgcggctgcccctgcagtatcgtcagcataggctccagctccaggtattggtgagtctcctacacggccatgtattttgaattttataccatttgtagatgtaccagcagcaatatgtcctgtcttatggattacaaccatgccaatagtgtcatgaccacgatcatcttctgtttctttatggataggaatatcctgctttaagataccaggtggtttgtagggtccgcagtattttgagggatctggtataacattcctccaataatttggctggcaattccgagcaagccaatctgaatgaagagcttgagaagcactggtagataagtcttcattgataaaccccatactttgagcaaatgtggtggctgactctcctactaaaagtgtgtgtgttgtatgttccagtactttccgtgccacaccaatagcatttttaattcgtctgagatctcctactgctcctacatccatagtagtgccatccatgatcatggcatctagtgtggtttctccaagttcatcaggacttcctccaaagcctacagagccgtcacactgctctctctcacacatggcacagccgctctccactgcatccagggcagagcctccagatgctaatgccctccacgctgcttcggttgcattcttaaagggccaagtgttgacgaccaggggcagagggctggagcagcgcactagggcctggcagagcagaaacggcacgagaagcacaggcaagttcgacttccgcgccatccctgaccaccgaagagaccagcgcgagaaaagtcccggcagccagcgatc

SEQ ID NO: 124749 - DNA, 1092 bp, Homo Sapiens
  misc_feature (31)..(32): n is a, c, g, or t
  misc_feature (70)..(111): n is a, c, g, or t
  misc_feature (690)..(690): n is a, c, g, or t
  misc_feature (714)..(714): n is a, c, g, or t
  misc_feature (790)..(790): n is a, c, g, or t
  misc_feature (911)..(911): n is a, c, g, or t
  misc_feature (916)..(916): n is a, c, g, or t
  misc_feature (918)..(918): n is a, c, g, or t
  misc_feature (926)..(926): n is a, c, g, or t
  misc_feature (945)..(945): n is a, c, g, or t
  misc_feature (993)..(993): n is a, c, g, or t
  misc_feature (1035)..(1035): n is a, c, g, or t
acagggtattgggggatagcggatcggcgannggtcaaaaaaggcttatttattgagagcagcgagtgtnnnnnnnnnnnnnnnnnnnnnnnnnnnnnnnnnnnnnnnnnngacaacaataaaagtgtggggtaaggatggcccaccctcctcatctccagggcccacccctacctcccatgcccacccaccccacgctgcaattacatataaaagccgcccgtggtgcatacaaaaagggcggtttatatagtgtcaaaagctcctgaaaactccttcatctgccaggcacttaggatgaggaaaggagagaagggtggggaagacgtgggtctgggtcagtgtgcacaagcccagagtggggaggactcacttgctgtgtcctctataatcctggtctagacccccaagtgggaccagtgggccaagagactcattaaccctgtgtgcccagaacttgagaatattaaggaactccccacaaacccagctcatcccaagcctagccctccccaggcaaagttggcagatgagtggcagagttggacccggtcaaggggagaagttgaaggccagaaattggggttacctgtggcacccacactgtccctgatagaggaagaggtggcagggaaaactgcccagctcaaagccctagtcgcccagtttgggtccaagtcagcctcgcanaggatgagggtgagggaacatganggaaaggccatgccctgctcagacctcagcaatgcctgttgcactaaggcaggggctcatggccaagaggacaggnatcgtgccatcatgctgtgagctccctctagagatgtcctccctgcccaggcatcctgagcgggtccttctcacggctgctgtcacggtgctgtctccaaggcgctggcatctcactgaangaggncngtcctggngctgactcgtgcggattcntggctcgagggcaatccctatatgagtctataactcgtatcagtctanctgtcctgtgtgaatgtaccgtcacatccaacacaacagccngacataatgtaagtggggtgctatgatgagcactcacatatgcatggccatgcgctc

SEQ ID NO: 124750 - DNA, 818 bp, Homo Sapiens
  misc_feature (91)..(91): n is a, c, g, or t
aagtggggaaggacctcactttgctggtgtccctctataatcctgggtctagacccccaagggggaccagtgggccaagagactcattaanccctgtgtgcccagaacttgagaatattaaggaactccccacaaacccagctcatcccaagcctagccctccccaggcaaagttggcagatgagtggcagagttggacccggtcaaggggagaagttgaaggccagaaattggggttacctgtggcacccacactgtccctgatagaggaagaggtggcagggaaaactgcccagctcaaagccctagtcgcccagtttgggtccaagtcagcctcccaaaggatgagggtgaggaagaggaggaaaggccaggccctgctcagacctcagcaatgcctgttgcactagggcaggggcctcagggcccaggaggacagggatcttgcccatcatgctgtgagcttccctctagagatgtcctcccctgcccaggccatcctgagcgggctccctcctcacggcttgctgtccacggtgctgtctcccagggcgctggcaatctcactgaaggagggccggtccttggggctgagggcccagcagcgctgcatcagccgatagagttttggaaggggcagccttcggggctgaggaagtctagccttcccagcctgcaaatctgccagtacttcatcatctgcctgcccaccatggggcatctctccatgtgtaaacacttcccacatcagcacaccgaaggcccagacatcagacttgtagagaagtcacatccggagaattccggaccggtccagc

SEQ ID NO: 124751 - DNA, 1110 bp, Homo Sapiens
  misc_feature (1002)..(1036): n is a, c, g, or t
gcctgcataaaatactgtttattttgtcctttaggaagactaaagtagtccagctcccctacagcccagtcttgcccccaccctgcactctgtcgccttagttcctggggaccaagcatctggcatttctcaagcagaccctctccttgttgctccttttcagtccctggagtctggcttcccaaagccaaagctggaggagagctcattgctgaggaagcagggttggagcctgaggagatgcagagggcctggacccctcgctggatcccagaggcccaggggcagagatgctgggacagggctctaggggaccactgggtgactcttgaggggctagaagcagggctgggtgacttttgctacggtgggctgcaacactgtctggcttctcaaagcgcttgccgcagaattcacaggggaagcgcaaggcagccaccgtctctgcatgcttgcgctggtgccagttcagggaagccttctggcggcaggtaaacccgcatatctcacactgcaggggtttttctccagtgtggatacgtctgtggatgacaaggttgctgctagtgcggaaagaccgggcgcagaactcacagatgtagtcccgggtgtcactgtgcagcttcatgtgctccttcaggtgtttcttaaagttgaaagacttcccacaggctggctctgggcaggagaaagacttctggtggatgtgctggtactttttgtggtgattcaaatactgccggtttggagaagatccttccacagccagggaagtcacaaggcatcagctctcttcttggcagctttcctaattctcttggggccaatttgtgcagtgtcctcatcccaggccggggttaggacgcagactgggcctgactcccagtggctggccagggcctcagtctagctgggccgcttgaggggtcctgctgatctgtggctgcaccccccggccgtaatggccgaattcccgggcatatgtccggtaccgtcgactgnnnnnnnnnnnnnnnnnnnnnnnnnnnnnnnnnnncgccgcttcctcgctcacagctcgctgcgctcgttcgttcgctaaacgcgggcccatatgagttcagatatgtt

SEQ ID NO: 124752 - DNA, 1160 bp, Homo Sapiens
ctgcgccctctccttttagaccccgcgggcgaacttgggcgcttgggtctacccgtggaagcctcccccggtccacaggcactttttgaatccgccggcccattcctgccctagggtccctgaccttgctccacctattcctcagtggagactctgaactcaatgaggatgctgccaagccgcccagcagagactgagatgctgcaggctggtggtgtctcccctctttaggtgtgcagtgacaggggaagcagtatctggggcatcaggctcactatcatctggggaggagctgtaggtccataagctggcatcactgagcatctcctcttcatcctcatcattgtcctcttcttcctcaccctcttcctctcctggaggtgggaaggtctctggtgggggtcccaccctcctgggcaacctggcactcttgagtcctctcatcatgctcagattcccaatccgcaagctcctgcccactcgtggcctcggaacaccaacttctccgagtagtatgtggaagggaggctggctttgggtgcctctgaaggtgtagggctcaaagagggtccccaggagaaggtatggcctgctgagcactcccacacaagccccccatccttgccgccaggcccccgaagcccgggcaccaggctgcactctcggctgtgggcatgagacaagagcaccagatactgcagaccttttggaggcaaaggctcaggacctgcacagaggacacagcctgaagaagtgtaccggtccaacaggaacttggcgagctgcgagtgcagggagaagcccagccgctccttgaggaggcaccactgctccatgtggccgcccaggcggatgcggcacttgctgcggcgcgcgtccagctgcacgccgcttctcccgccgcctgcaggacacgtccaccgccggggaggaagccatgtgcaccagaggctgtgcgcccccacgcgccctcacccccactgcgcctgcgcactgcgcctcccgggcactagcgagcaggcccggagctgctggaagacaggggcccaccatcgcgcgcgcagcgtttctcttttaagaagaaaccggtgcctctacggcgtcggctgctacctcgtgccgaattcacaacccagcactcgtacctagccgtagtttct

SEQ ID NO: 124753 - DNA, 1111 bp, Homo Sapiens
ctctgggggaaatggccggacctttttggggaatcaaaatactgcccggttgagaagatccttccccaagccgggaagtcacaggccatcagttttctttggcagctttcctaattctcttggggccaaatttgtgcagtgtcctcatcccaggccggggttggagcagacttggcctgactcccagtgcttgccagggcctcagtctgctgggccgcttgagggggtcctgctgagctgtggctgcaccctgacttctgcaggtggaggagctctgggactcaatgaggatgctgacaaggccggcacagcaagaggactggagagtgctgcaggggctggtggtgtctccccctctttaggtgtgcaggtgacaggggaaggcagtagtctgggggcatcaggctcactatcatctggggaggagctgtaggtccataagctggcatcactgagcatctcctcttcatcctcatcattgtcctcttcttcctcaccctcttcctctcctggaggtgggaaggtctctggtgggggtcccaccctcctgggcaacctggcctcttgagtcctctcatcatgctcagattccaaatctgcaagctcctgcccactcgtggcctcggaacaccaacttctccgagtagtatgtggaagggaggctggcttgggtgcctctgaaggtgtagggctcaaagagggtccccaggagaaggtatggcctgctgagcactcccacacaagccccccatcttggccgccaggcccccgaagcccgggcaccaggctgcactctcggctgcacagaggacacagcctgaagaagtgtacctgccagcaggagaagaggcaagtcaggactcaggtggccagccaccctcagccctgggcactcacacatgtaaggggccagccctaagggccgctattcgctgagaccatgaggaggggagcaggaccctcggaggccacaagtcacacaggccgtcctggtaaagtgagaaacctgagggtggaaaagagcagcaggacaggccctggagaggaggctaggggctgctgcctgggtccctcccccaagcccttctcccatcccgggaattccggaccg

SEQ ID NO: 124754 - DNA, 923 bp, Homo Sapiens
ttttttatttccacaattgcttaaaatattttattaaaggaagaatacaatttaacaaaaagtgtttattaaaggggaaaatatatagtaatatgtttaaggcacatggcaaacttttggcattaaattgcaagaaaaaagaaatacaaattatcacaataaatttcagaatctgtttctttagtccaaatagttttttttaaaaaagtctgaacagcagcagcagttcactaaggaaggcacatcatggcttggtatctccgtgcgagagcagctgctgcctggtgtactcccagatcagcagggctccactcacatggacattcagggagcggataatgccctgttgaggaatttccacacaaacgtccaactgttggatcagatttgctggaattccctcacgttcatttcccaacaagagcagagatttctcaggaaagcaatattgggttaggtctaaacttttggcagtttgttccactccaatgatggtataaccttctgttttcttctgctgcagataatcaattagctgaggtggttttacctccactagaggaagccactgttctgcagagacactgaggtgctgaaactgtttgtcgctgatacactgaaggctgccaacaacgagcactgaagccccaaatacctcacaggtcctgcacagtcctcctaaattggtcggtttgtcgatgagcgaggccacaacgatgagtctactaattgactttccaagtctggcagcacgatcctgaaacaggagctccaggtctaagtcggaaacacgactgttccacgggataatcttcttctgaacgtcggtccactctgcttggttatctgcttcaaccaaattagtacctatgtcttgccggacgcgtgggtcgacgatatcccgggaattccggaccggtacc

SEQ ID NO: 124755 - DNA, 1018 bp, Homo Sapiens
ttattgattaattgagtgattttagtcaagtgaatattgatacatggctgaaaaagcatgaaaataaaatgaacacgtacgggaattactattaacataagcgataacatcaaaacatctggtaaaatgcagttaaaaaaacaacacaaatgaaatggaatgtaaaacattttcacagtattcaaagcttttgtaagagacttaggatctaaaagaggagtactacaggaagaaactagaggaaacgggaatttcatccatgtcctgtgtatctgctggcaacaggtcagaacggccagtatgttattccctgcaggctgcctagggtgctctcctcaaacagatcacctgagcctcctgcatctatgaagttatgacacagcaaccagttactcagagtctgatgagaaaaacagattttaggtttgggaaatgggattactgtaatttacacatccaaatgcaaactggagctctgattgaattctaccctggggagaacttgatgctaacccacaggtaccaagagccaagtgttacacaggatattttaaaaataaaatgtttttggaatcctcacctcccatgctatcttctaagataactacaaatattcttcaaagatttaactgagttctgccaaggacctcccaggactctatccagaatgattattgtaaagctttacaaatcccaccttggccctagcgataattaggaaatcacaggcaaacctcctctctcggagaccaatgaccaggccaatcagtctgcacattggttttgttagatactttgtggagaaaaacaaaggctcgtgatagtgcagctctgtgcctacagagagcctcccttttggttctgaaattgctgatgtgacagagacaaagctgctatgggtctaaaaccttcaataaagtaactaatgacactcaaggtcctgggactctgagacagacggtggtaaaacccacagctgcgattcacatttccaatttattttgcctcatgccgaatc

SEQ ID NO: 124756 - DNA, 719 bp, Homo Sapiens
  misc_feature (687)..(687): n is a, c, g, or t
ttttttcaggttttggaaaaattttattgcattttgtttccatgtggaagcactgacagaattgaaaagtggcagcatgttccacttacttttctgaaaaatcacatggctagattaactttcgccctacccaggacaggattgaataaaccttaactcctacccccaccccaagcaaaagctaaaaaagggggtttctggcaattgcttaaaaaacaaatcaatgtgtgagaattccccgatggtcaataatcatatttgttatttttgcacttggagggcactccctacctccttcacctctatccaccatcaccacctccttcaaacaagactgacacaggaagtgcctctcaaatggaaaatctattctgtcccagtgccacaggcttaggtgtgtctgtggattctggccaatgggatggccatatgtcaactttgaaagggtggggactgtgaggtaaccccagcatcatggtcatctccatgccaggacaacagtctcccaggttaaaatatagataagacacaggtacgtgcacatttatgggggttaactatcagaaagtgaatccactttgaggtttataaaatgagaaggggatgatggtggggctgtatgtgttgggcactggtgcctattgcagtcagaattcacactgcttaattgacatcttgctggggaanagagggagatggggtggtgagagaggaagcag

SEQ ID NO: 124757 - DNA, 1067 bp, Homo Sapiens
  misc_feature (784)..(784): n is a, c, g, or t
  misc_feature (839)..(839): n is a, c, g, or t
  misc_feature (862)..(862): n is a, c, g, or t
  misc_feature (922)..(922): n is a, c, g, or t
  misc_feature (935)..(935): n is a, c, g, or t
  misc_feature (1003)..(1003): n is a, c, g, or t
tttgaggttattacacaaagaaaaagattttattgtcttcttagtcaatatccctggtgaaattagaggcatagcttgagactggtgacagtgcaacacagaccttcaggagctgctttgaggactggcctgcccagatgcctgctgttaagccagcagccccctcactccggcccctgccatcttgacagatggagctgccatggtttcagggacactcagcagggcatctgggttggtccctcccacatggaccttgtaaagttgctattcaggggaacctggtatcgtttcaggcaaaacacagaaccatattagcacttctaagccccctgccccggccgcctccccggaacatttgggcttgtcgcacattccaggagggagcaggagcacagctgcagccacagctgccaggaacaggcctgggctcccgccctgtgtggggggagggcagaggctgagggcttcctctgggggccctgagtaagctcaccctcaccccacctctctgacttcatccatccaaggccgcttggccaagagcccaggcagggtgaggggctgtctcccagaccaggcctgggctgcctatcagaggtgggggagggggagcttcaggcctagcccaactctccagaaaccaggggtagcctgctgagctctgaaatgccagaagtttaagaaaagagggaagggggcaagaggtggtggtggtagtggtactttgctatttacaggtagacgaatgcaagggagtaaactttttttctccatttgttgnttggcgaccccatggagatttcaggaggcatgcaggatgacatcatgttttacanctgagacatctcaagtattctgntaaatggagtccctgcctgctccatgttcctgcttcgtgccgattcctgggctcgagggncaaatccctatantgagtcgtataaattcgtatcatgtcacagctgttcctgtgtggacttgtatcgctcacattcaccanctacgagcgggagcataatgtaagctggggtgctatgatgagtactcaattaatgcgtgcgccc

SEQ ID NO: 124758 - DNA, 1013 bp, Homo Sapiens
  misc_feature (749)..(749): n is a, c, g, or t
  misc_feature (774)..(776): n is a, c, g, or t
  misc_feature (788)..(788): n is a, c, g, or t
  misc_feature (801)..(801): n is a, c, g, or t
  misc_feature (827)..(828): n is a, c, g, or t
  misc_feature (843)..(843): n is a, c, g, or t
aattttttgttatttctaagcaaacctcttttgtacttttcttacttctaatatccatccctggactttttgtattccaaatgtttgtgatgctgagaagtgaagttcattttatgtgatcttcatgcgtcgtaatctacttttggtagataattaagattattaaaccctcatttaaatgtgacataaaatacagctttaagcacataaatataaagcagcttccatcaggaacatggagcaggcagggactccattttacagaattactgagatttctcagttgtaaaacatgatgtcatcctgcatgcctcctggaattctccaatggggtcgccaaacaacaaatggagaaaaaaagttttacttccttgcattcttctacctttaaatagcaaagtaccactaccaccaccacctcttgcccccttccctcttttcttaaacttctggcatttcagagctcagcaggctacccctggtttctggagagttgggctaggcctgaagctccccctcccccacctctgctaggcagcccaggcctggtctgggagacagcccctcaccctgcctgggctcttggccaagcggccttggatggatgaagtcagagaggtggggtgagggtgagcttactcagggcccccagaggaagccctcagcctctgccctccccccacacagggcgggagcccaagcctgttcctggcagctgtggctgcagctgtgctcctgctccctcctgnaatgtgcgacaagccaaatgttcannnggacgcggcggngcagggggcttanaagtgctaatatgggtctgtgttttnngctgaacgatacaangtccccctgatagcactttacaggtcatgtgggaggacaaccactcgtgcgattctggctcgaggcaatcctaaggatcgataatcgatcagtaacgttctggtgatgtacgtcaatcaacaatagacgagcaatgtagctgggcagagacataatatggtggcagcgtg

SEQ ID NO: 124759 - DNA, 994 bp, Homo Sapiens
tttagactaagtatatattttaatttctacaaggtcccctttcaagttttagggaaatttaactgaagtgtatacaaattagacattgctaatatgtacaaaagtattttatacagtttttgaacgatactagctatttgcaataaacaggatgttacaaaaacagtccaataatgcatttcctattaagaagcacaatacacaacataattcaattttattaaaaaataacttcaaaatgtagaacaatcccctttaggaagaaaagctatttctgtagttcactctgtcagtaaacacacaagttgaacgctgcagcagagggctgtccttttccatggagaaaagaaatgaggcttctagggcctatcttttctgggtaaaaattccacctacagctgagatgggcagttattgcctgtggtaggcagaatttgaaaatgcccctcccactttcaatgagctaatctccagaacccgtgaatatgatgagatgagacagtactcctgcaattatgttctatcgcacaatcaaccttaaaatatatctgtgggcttgagctaatcatatgcccctaaaacaggaggacgggagagagatatgaagcatgagaaagagcaggaaggctggtttgaagctggaggggaccacataagaaggaatgcaggcagccttgaggtgagagaggggcctccagctgagagccagcaaagaactgaattccgccaacaacctgaatgaacttagaagcagattcttccccagagcctccatgaaggaatgttgtcctgccacccgttatggttgtctagacctttaagaccctgagcagagaatccagccacactgtgccagactcatgagctacagaactgctatgggtattgttttttacactgctcaatttggggtaatttttcacacagcgataggaaactcataccccggccgtaatggccgaattcccgggcatatgtccggtaccgtcgactg

SEQ ID NO: 124760 - DNA, 380 bp, Homo Sapiens
aaggcagaactgccaaatgtaattaggttaagaaaagttaccctgggcagtgtattagttttctattgctgtgtgacaaattaccccaaatttagcagtttaaaaaacaatacccatagcagttctgtagctcatgagtctggcacagtgtggctggattctctgctcagggtcttaaaggctgaaataagggttggcaggacaacattccttcatggaggctctggggaagaatctgcttctaagttcattcaggttgttggcggaattcagttctttgctggctctcagctggaggcccctctctcacctcaaggcttgctgcattccttcttatgtggtcccctccagcttcaaaccagccttcctgctctttctct

SEQ ID NO: 124761 - DNA, 1039 bp, Homo Sapiens
tcattttaatgagacacaaactctcaactttttatttaaaacagaaatgcagtagtaagctaaaccttttgccattcatagggaaacaaatatcagtaatcctctttgttctaaacaaaaattcataattatttatacattttaaaatattatattgtttcaaatgttgttagtggggcaataaatcataaagagatacaaccagtcgaaattagacttttaaagaattactctcaaagacattgcaacaactccaaagtccagggatcttataagactaatttattagtaacaacatttacaaagatagctttttaatgctgagttgtatctgatttaatgcagtcagaaagaaaaaagaaacatttatctcattttgctgatctgtcagattttgcttaagttaggagagcctgcaatttcaagcccagataactggaattccatgaataaacacagaaagacaggagaaaggcaaggaagttcaaaaatcacagtctggggggaaatcagtagagtaagattaccaataagtgaaatattggtcatatgatttcttagtttccattagttatgcaaatattttactgttaatatttagattagtgttttagaacgttttgtagagactgaaaagcaaataaataattgcattagcattgttaagtatcagtgttttctgtttgacaaataatcgtacagctgtgttctcaggctgcaataacaaaacaccagagactgagaagctgaaacaaacggaaatttgtttctcacagtctgggaggctggaagtccaagacagagtccaagactctcgccagcagcgaagagtttgatttgtgaggcttctcctcttgggcttgaagggggctgcccatctccctggggtggctcccatggccctcttggttggcatgcccacggggaggggagggaaaaaagcccgggaacccgggggtccccaaaaataccccgggaaattcccggaacgggtccccacccctgttttttgggacaaaaccgggtgtctaacggggaa

SEQ ID NO: 124762 - DNA, 759 bp, Homo Sapiens
  misc_feature (255)..(293): n is a, c, g, or t
tttagtataggcaaatttatttctatggtagaagcatttatttcagatatagaaaaataacactatttcaaagtcagagtaagtaaacagaagtatattttttccttgcatacccatcctcaaatgtcaacacacagtttccagccattcttacaaggaacaaatgcaaaattaaagtaataactgtcaacagaagagctgtattaaagctatgtatcaaccttgaaaatcagaaaacacaaagtgatctagtgnnnnnnnnnnnnnnnnnnnnnnnnnnnnnnnnnnnnnnnattgtggaaaaagcaccttcagagagctgaaggaaaatcatcaggtcaagcaagcccttggtctcagaataaatatcaaaaagactaaagatacgtgctttgttcctcagggaagagggaaggacaaaatatactacaatatagaagatcagccatttactctgtgtcacttctctgagcttcacattcagaaataacgacagatacaaactctcaagaattgttctacatattaggttagatagtgtaataagtgcttctccaatccataatacatacctactatcattatttcaacatcattattatttgatacggagtacatcttccccacctaccccctactcccaaatggctgctattacttattttaaaagtcaaacaatcagtcattgggttcaagctcatggactacaagtaccatttttatactggtatcatttttactagcttcaactattcactt

SEQ ID NO: 124763 - DNA, 580 bp, Homo Sapiens
  misc_feature (265)..(296): n is a, c, g, or t
aagatatatctgtatttctttgtcgttgtttaaaaataaatatgtactacggaatatctcgaaaaactgcactagagacaaagacgtgatgttaatatcttttccccacaattattacggataaacagtatcaccaataaataaatgataacaaatattaaaattaaaaaaggagagagatttagtatgtagaattctctattttttcttgttttgtttttacatataaaaaacagaatagcaatgtctattttatcagaatcannnnnnnnnnnnnnnnnnnnnnnnnnnnnnnncacacaaatacaagttgccaaatatatatatagtatgtagatgtatattgaaaccttatttcaaaggaatgtgtgctggggagccaggggatcggggagggcagagctgagtgttagcaaaattaaatatctgttcaagataagctagtgactgtcaccgatcagggagagagagattggaaacatgaattttatatacaaaaaccggtacaaataagagagcatgagagagcaaaagatacatctcataaatagttgaaattaaatattaaccaagaatactg

SEQ ID NO: 124764 - DNA, 485 bp, Homo Sapiens
  misc_feature (265)..(328): n is a, c, g, or t
  misc_feature (392)..(392): n is a, c, g, or t
aagatatatctgtatttctttgtcgttgtttaaaaataaatatgtactacggaatatctcgaaaaactgcactagagacaaagacgtgatgttaatatcttttccccacaattattacggataaacagtagcaccaataaataaatgataacaaatattaaaattaaaaaaggagagagatttagtatgtagaattctctattttttcttgttttgtttttacatataaaaaacagaatagcaatgtctattttatcagaatcannnnnnnnnnnnnnnnnnnnnnnnnnnnnnnnnnnnnnnnnnnnnnnnnnnnnnnnnnnnnnnngtatgtagatgtatattgaaaccttatttcaaaggaatgtgtgctggggagccaggggatcggngagggcagagctgagtgttagcaaaattaaatatctgttcaagataagctagtgactgtcaccgatcagggagagagagattggaaacatgaa

SEQ ID NO: 124765 - DNA, 406 bp, Homo Sapiens
  misc_feature (271)..(350): n is a, c, g, or t
ttttttaagatatatctgtatttctttgtcgttgtttaaaaataaatatgtactacggaatatctcgaaaaactgcactagagacaaagacgtgatgttaatatcttttccccacaattattacggataaacagtagcaccaataaataaatgataacaaatattaaaattaaaaaaggagagagatttagtatgtagaattctctattttttcttgttttgtttttacatataaaaaacagaatagcaatgtctattttatcagaatcannnnnnnnnnnnnnnnnnnnnnnnnnnnnnnnnnnnnnnnnnnnnnnnnnnnnnnnnnnnnnnnnnnnnnnnnnnnnnnntgaaaccttatttcaaaggaatgtgtgctggggagccaggggatcggggagggcag

SEQ ID NO: 124766 - DNA, 2184 bp, Homo Sapiens
  misc_feature (104)..(125): n is a, c, g, or t
  misc_feature (181)..(181): n is a, c, g, or t
  misc_feature (187)..(188): n is a, c, g, or t
  misc_feature (232)..(232): n is a, c, g, or t
  misc_feature (234)..(235): n is a, c, g, or t
  misc_feature (242)..(244): n is a, c, g, or t
  misc_feature (246)..(248): n is a, c, g, or t
  misc_feature (250)..(253): n is a, c, g, or t
  misc_feature (255)..(275): n is a, c, g, or t
  misc_feature (277)..(277): n is a, c, g, or t
  misc_feature (279)..(309): n is a, c, g, or t
tttttattgggggggagaattcccaggccccttatgtttattccccgggttttttcctggggaaaccgtgttgggccccagtttgcccgttcccttacgggggnnnnnnnnnnnnnnnnnnnnnnggtttttagaagaattttttaaagggcccgaagggcgccccacaaaagggaggagnaagggnngggggaggagggtttcaaaggggaaaagagaaggagggggggangnnaaagggnnnannngnnnngnnnnnnnnnnnnnnnnnnnnngnannnnnnnnnnnnnnnnnnnnnnnnnnnnnnnaccaaaactagctttaatttgtccaaaagccacacagagttgtgtagaaactgatcctgggagggaagctgagagagtccatgatgcgcagggccaaggtgcctctagaagttctccagcaagcccaggatgcgcttttgctcgttctcccggaactccgggctccggccgtccccgatgttctctgcatactccttgatgatatgcctgacaattttgatggagcttcctcgcatgtttaggatctggtgaaccctctggcgaatctgggggacattggcattgcagatctcggccatgatgtagcagatgtgctggagaacaaagagccccgcatccaggcgccggaggtagaactcctcctcggtgtcattgtcgatgatctctcctcgccggaccatgtcgtgtttttccccttcaatcttcttgtccgccacctgcattgcacccagatatttaaaatgcaactccattagtctgtcaaccttctcactgtcattttcagtgaatttattcagaagccgggtccgctgctgccctctcaggttccgcaggagggaagccaggatcgaacagacatgctcttcatgttccttctcagtggttcccactttcttgatcttcctgggagatttcataaagaggggaaagatggttcgtaagccaagaatgtcaacaaacttatggcagttgtctgtgccttcgggggccaatcatggcatggtccagcactttcagggcactgctccgggagatcttcttttccctgagcatgagattcatcagctgaagaccctcgcccttcaggaagcgctcacgattggaactaagcattagacaggagcagagggaatcaaacagattctccatcatctcctgctcctcagccgtgctgggattgtgtcttttaaacacggataactgctgaagaagcacatcgattccatccagctccccaagcaattccctgttttcatcattgtcctggagcaatatggccagcacttcactgcaatacagtttgttggcatcaaaaggcatctttgccttcagcctcttcaacagccactgtagaagaccctgctgggcaccctctgtacacatctcaggccggaactcagccattttttccacaatagccagagtgttgtggacgccatctgcctcctctttcacagactcatccaggcgctccagattctgtaccagcagtgctaccacctgcccatccaccagagcatcgatgagcacttctgctccctcttcactctcatggagggtgtctatatctgttaattcctgaagcaaatcgaccacagctatggacacatctgtattatcgtgtccgagcaagccgagaagcgactgtacagcattcagctccaccagaaggtggtacaggtctggcatggtggccaccacgtgcatctcctgaatgatgtcatttaggtccagctcggattccatgaacttctctggattgtctggaaacttaatccgcaattcttggtttttatatgatctcttttcaaatgtgaggatcattttcttcactgagctttcatccaatggctcctcctcttcctcttcctcttccccatctctgtcaataatctgcagcagcctttttttgtcatcatccgcttcctccaccacagtcatttcttcttcccgatagcggccgcgttctcgagtaccagtttgtttccgacgcatcttctgctcctcctcttcatcatcccggggacgttttgtgcccctattgggctggtagctcagaagttcgcccacgtccatggtacccggcccagcaaatactccacttccctgcactcacgcccagaccgcgggcccgtcagccgcggctccagcccc

SEQ ID NO: 124767 - DNA, 1025 bp, Homo Sapiens
  misc_feature (62)..(62): n is a, c, g, or t
  misc_feature (65)..(65): n is a, c, g, or t
tccggtgctgcccttttcaggttccggcaggagggaagccaggaatggaaccagacaggctnctncatgttccttctccaggggttcccccctttcttgatttttcctgggggatttcataagggggggaaagatggtttttaagcccaagaatgtcaacaaacttatgggcagttgtctgtgctttcggggccaatcatggccatggtccagcactttcagggcactgcttcggggagatctttttttccctgagcatgagattcatcagctgaagaccctcgcccttcaggaagcgctcacgattggaattaagcattagacaggagcagagggaatcaaacagattctccatcatctcctgctcctcagccgtgctgggattgtgtcttttaaacacggataactgctgaagaagcacatcgattccatccagctccccaagcaattccctgttttcatcattgtcctggagcaatatggccagcacttcactgcaatacagtttgttggcatcaaaaggcatctttgccttcagcctcttcaacagccactgtagaagaccctgctgggcaccctctgtacacatctcaggccggaactcagccatgttttccacaatagccagagtgttgtggacgccatctgcctcctctttcacagactcatccaggcgctccagattctgtaccagcagtgctaccacctgcccatccaccagagcatcgatgagcacttctgctccctcttcactctcatggagggtgtctatatctgttaattcctgaagcaaatcgaccacagctatggacacatctgtattatcgtgtccgagcaagccgagaagcgactgtacagcattcagctccaccagaaggtggtacaggtctggcatggtggccaccacgtgcatctcctgaatgatgtcatttaggtccagctcggattccatgaacttctctggattgtctggaaaccctcgtggcgaattcgccacccaggcctcgctacctaggagttataga

SEQ ID NO: 124768 - DNA, 678 bp, Homo Sapiens
  misc_feature (530)..(557): n is a, c, g, or t
attcggcacgaggcgacttccaacgtggcatccgtgagatctgtccacattaggcgaagcaggagaacactgagagcagcaggatgggtttggaaagagcatgcctctggaaacacagcttcctgggaattcacatgaggccagtcctacagagagcaagatgcaccccaggatttcttcattttctaatagatgtgggagtgctccattttccccgacagcgaatttcccctgagaaacgatgctagaccctgggtttgcccaccttgtaactcttccttatctcctccttttcatccctaattcatcctccctctggcatggaattgacgcccgtgcagtacatttgccaagtggcaccttctttcaatttatgttttattttgctatggtggtgattctttatttgctggttgtcttttctcacacatctttctctctgtctctctctttcctgctctttgtttttctgcccagaaaaacctgacttcgataccaaaaaaagatgaaactacagaaactcaaatttnnnnnnnnnnnnnnnnnnnnnnnnnnnntactcaacgattctttcagctttattaacattttccattgtttcttgcgacttgtgtctcgttctttgtagtattgatgatgaacatttgataatgaatgttcttgtatattcagataaag

SEQ ID NO: 124769 - DNA, 2168 bp, Homo Sapiens
  misc_feature (657)..(666): n is a, c, g, or t
  misc_feature (1045)..(1054): n is a, c, g, or t
  misc_feature (1285)..(1304): n is a, c, g, or t
  misc_feature (1336)..(2105): n is a, c, g, or t
  misc_feature (2142)..(2142): n is a, c, g, or t
  misc_feature (2150)..(2150): n is a, c, g, or t
cagtcgacggtaccggacatatgcccgggaattcggccattacggccgggggacatgtctttacattcaatggaagttgtaaatcgactaactacagctgttgatctacctcctgaatttattcacctttatatatcaaattgcatctctacttgtgaacagattaaggataaatatatgcagaatcggttggtgcgtcttgtgtgtgtgtttctccaatccttgatccgtaacaaaattattaatgtacaggatttgtttatagaagtgcaggcattctgtattgaattcagtaggatacgagaagctgctggtcttttccggttgttgaagacattggatactggggaaacaccttctgagaccaaaatgtcaaaataatacctcatcagaaccatcccatccattcactgttcagctgtactgtgatttagtttttacaccgttaaaaccctgagtggattgcttggtttaatgcatataaacagtactttatctacttaaagcaaagttttgctttcttgaatgactttttctgtgagatgaatttttgataagaactagggaaaacatgtcttttaggtgtcttgctgatgactatccataggaggaatggctatcccaaaaaaagttccgcaaaaaagtagatgagtttcnnnnnnnnnnaagcactaaagaacaaaatgcatttttcattaatacaggcttctgatgaaccaggaatcctgttttcgtaaagttccaatgttgatgagagtaaattcttaagcatttgtcctagaggtgaaagcagctgaatgtttctgaaccatcaagaggcaaacaaacaggagtttgtttcttgaacctgcttatgcacacagctcttaactcctcatgaggcacacagctcttaactcctgatgaaccaaggatttactcataactttctccttgtcatggaggcttaatagacaacagaataaatgcatttcttgggcctcttataaacttgggaattcttagaaagctgcttctattaccaggctgtaatagctggtatagnnnnnnnnnncttctcttaagatgttctgttattagtctgagacagccatttttttgttttaaggaaaaatatcagtcagtgctccgggaggtaatttcctgtggggtctgcaccctcctgtctgggtggtggatgtgggtttgagaagtaggagagcagggtggtaccgtgtgggctcttaccctttatgtgattttggacaacagtgccttccattaaagttctttttatcaactgttnnnnnnnnnnnnnnnnnnnncctagcaggcgccgcctcgtgccgaattcttnnnnnnnnnnnnnnnnnnnnnnnnnnnnnnnnnnnnnnnnnnnnnnnnnnnnnnnnnnnnnnnnnnnnnnnnnnnnnnnnnnnnnnnnnnnnnnnnnnnnnnnnnnnnnnnnnnnnnnnnnnnnnnnnnnnnnnnnnnnnnnnnnnnnnnnnnnnnnnnnnnnnnnnnnnnnnnnnnnnnnnnnnnnnnnnnnnnnnnnnnnnnnnnnnnnnnnnnnnnnnnnnnnnnnnnnnnnnnnnnnnnnnnnnnnnnnnnnnnnnnnnnnnnnnnnnnnnnnnnnnnnnnnnnnnnnnnnnnnnnnnnnnnnnnnnnnnnnnnnnnnnnnnnnnnnnnnnnnnnnnnnnnnnnnnnnnnnnnnnnnnnnnnnnnnnnnnnnnnnnnnnnnnnnnnnnnnnnnnnnnnnnnnnnnnnnnnnnnnnnnnnnnnnnnnnnnnnnnnnnnnnnnnnnnnnnnnnnnnnnnnnnnnnnnnnnnnnnnnnnnnnnnnnnnnnnnnnnnnnnnnnnnnnnnnnnnnnnnnnnnnnnnnnnnnnnnnnnnnnnnnnnnnnnnnnnnnnnnnnnnnnnnnnnnnnnnnnnnnnnnnnnnnnnnnnnnnnnnnnnnnnnnnnnnnnnnnnnnnnnnnnnnnnnnnnnnnnnnnnnnnnnnnnnnnnnnnnnnnnnnnnnnnnnnnnnnnnnnnnnnnnnnnnnnnnnnnnnnnnnnnnnnnnnnnnnnnnnnnnnnnnnnnnnnnnnnnnnnnnnnnnnnnnnnnnnnnnnnnnnnnnnnnnnnngtagaacgactatcgcactggagcagcactggtacangattacanagcgaggtagtaggcggc

SEQ ID NO: 124770 - DNA, 2368 bp, Homo Sapiens
  misc_feature (151)..(159): n is a, c, g, or t
  misc_feature (261)..(269): n is a, c, g, or t
  misc_feature (402)..(498): n is a, c, g, or t
cccccccgttttcccgcgggggcaaatttttttcccccagggcaccaaggtgttaaccccccgggagaatcaggttcaacaagccggttgggaggggctccccggcggcagcattctttaataatttccccccttcttgaataggcggcannnnnnnnnataaatttatatagaacttcggtggacccctggtgaaaactcccataaagtcctcagaactccctttggatttttttaaaaccgttggtttcccccgggggnnnnnnnnnggggagaataccaacccttattatggccaggtttttttaagaaacaagtatgacccttttctctttccttggggggccccgcccccaaagaattgtttaaaaaatttttcggggggcgaggcggcccacaaannnnnnnnnnnnnnnnnnnnnnnnnnnnnnnnnnnnnnnnnnnnnnnnnnnnnnnnnnnnnnnnnnnnnnnnnnnnnnnnnnnnnnnnnnnnnnnnnctacagcaataagtcttttattttttgtacagggtgccactgcaggtaaccatcagagaacacactgctattttcaaatatacagaactgaacaaaagcattttagcatgctgccttactgtacacagaaaactggtgagcatcttcagacactaaggacaggaaataaaatgggttaatgctattggttgatatgtttatgaatcactcagcagtgttgagatagcctatctttacctgaaaggagaattacactcactcactctggcagcactgggcaattctaaaattcaggtctcgtgaaaggtacacaaccaacaagcaagcaaggaacagatgccatgtctgcttctgaagggagtgactgattttgaaccaggctctgcagattttaagaactgatacagccatcttaatatcttgagtttcccttactttgtatgttggcagtcaacaaaagtgagaatttctgaaacaagctaaataggattaaaaagcagaacactgtccatataacagaattgctgcttcacaacttttgcccagttctcacctcttatcctaaaaaagcctctcatctgataagttttaatgaaaacctctagcaactgtaacagacttttctcaacccagctctagatactaagtatcagaaacaaggcttgtgaagtggatgtgttcacagaaaaatgcagtgtttctactggaggtaagtgtcaagtttcctcttgatgttgtcaaaggaatctgctcccatataatcagcctggccctgttcccatcgttccttccgttcttccgaggatacaaacggctgtgccatagctgggatctccccaagggacagatgtgatatggctcctgagacatcttccacatttacatatgagcaggtgtctttgacaaggccaaattgttgaagcagaggtaaaacgttggtggtaaagatgttccaccacaggatgagaaactctggatgagtcatgttgggatcatgggcctcacttttgacactttttgttttgggatcataagtataattccatggtttgactcgtcccaggaaatgcacaactttggcacttgcaccaaacactttaaatgccgggaggtaggagtatatagagatgctgcttaggttataaataaacggcaggtgttttctgatatctgttgttgcccagctgctaaaaaatgtgttcagtatgccttggtccccaccatcaaaactaccttgctcagaagcaagatgcaacagctgattgtatgtttcaactgaaggctgataaacgaagactccggaattgaagcagtcaggccaccctgggtctggtgctgctgacaattcttctctgtcaaaaagatcatcaatatttgctaggaccagagtatctgcatccatgaatacacattttgaatactgtgtaagcgaccagcagtggagctttgtcagcgtgacacccaactctggcctcttcattaaggttagatgagcagaatcgccactgtccaagacatctaccatgatgacttcatcaaagactgtctctaaaacttttctcatggagtctgagacctgaggggtggcgagcacgaccagcctcctggtggtcctgtgctgtttcagagatgatcccaggaccagggcacctttggcgtaggcatcgtttgtggttagtgtcacaaaggcctgatctgtcatggtgctgccgggtgcgcaggcggccggggcagcctcaggttggtgactcagagaagccggcaccgggagggagcgcggccagcgaggaggcacggcggggaaccgagcgtctgccccccccggccgtaatggccgaattcccgggcatatgtccggtaccgtcgactg

SEQ ID NO: 124771 - DNA, 866 bp, Homo Sapiens
  misc_feature (790)..(799): n is a, c, g, or t
tttcggtttcacaactttattaaaaataaatttataagtaaacaaatcgtaactttatagattaaagttgattgggattaaggagaacctgggtataagaggatctggtacagagaggtctcaggatcttttcctgagtgggagtacatacgaggtagggaagagaaaacaacaaaccagaacaaagttgctgctcccaggtcctctttcgtcctccaccttcccacacagcattctgacagcccctgagctctcctcaactgcactacaaaagggcaggccacccccagcacagtcaagtcctgagctccctctgcttgtagccaggcaccatgttagtgatttccacctcagggctttccttttaaaatccacaccccacatgcctttgcagtcagctctctcacctctccatactcatttcactcttccccaactcccccagcccaccttctgccagctccttcactcactgtattttcctcttctactatacagaacattattcatcaagcaagagccatgccatgcagaaacgcatctggtatgctacttaaatcatgccgtttcacccgtttttccccagatttgctcctctcacctttaactcaaagctatctttctcagtgaagaatgtagacagctattttgaattccatcatctactccattcttattttctctaatctcactttacggttattgtttagcctatttggggagcagagaaaactcatgaaaaagggaatgacagcagactcaaagaggaaagaaaggggaaaagaaggtnnnnnnnnnntgctacatacttccatttgacattatttaaataaaaaatgattttctcggcaggatgcagtggctca

SEQ ID NO: 124772 - DNA, 1108 bp, Homo Sapiens
tttcttttttggtatgttttaagaaaagcaaacccagtaaaatgcatgtccctttatgaaatttcttaaaagagttcttttaaaatagttgtttctgttcttaaaaaaacaaaacaggtaggcatggccacattcaccctgtggcctggagcacggagtatcctcactttcagctcccagggagctgaggacaggcaggtcccctgaggccagaggttccagagtgcacaggcgggaggcaggcagaggccagggctacctattgcagagtctgtgcagcatgctgtacacgtcgtcctcccggctcaggccctcaaagaaggggatgaggtccagcagctccgtgtccgtcatgtcatcgaaccaggactgcacaggcactgcattctcaggatggaagatgtatgaggcaggggaattgtcaacaatgatcactttgctcagctcccgcccaaggcgactcaggtccttcacgtagttcccacgatgaaaaacacatgattctctgaagagccgggcccggaacacaccccagcggtctaggaggtcagccacagggtctgcatacttggccaagctggcagtaaagagcacacattcaaaaagctgccccatcctctggaggaactcgtccacatgtggccgcttcagcacatacacctgatgtatagttccatcgatttcaaccggaacaataaaatcagcattactaataggcttaaacgaactgtgcaccaatgtttcatctaaatcaatgaccacacatttctttccatagtcaagcaccgtcacctctggaagaaggtacttagctggtggacttggtatgggaatgacctgcctctggtcacccttctgaagcccaccattctcctccaccagtggcggaagcacactggggctgctgggtggaggggcctccacattgtaatcacggaagcagcagaagaaggagctaaggatgctgcggctcctctgcttctttaagctgacgttgcactgggaggctttctcgcccgcgcccggcaaccggccctcgtcctccttggggttggtcacctgggtgatgatggccgggccgtccatgggtgcgcggcgcggcggccgc

SEQ ID NO: 124773 - DNA, 478 bp, Homo Sapiens
  misc_feature (37)..(37): n is a, c, g, or t
ttcaaaaagctgccccatcctctggaggaactcgtcnacatgtggccgcttcagcacatacacctgatgtatagttccatcgatttcagccggaacattaaaatcagcattactaataggcttaaacgaactgtgcaccaatgtttcatctaaatcaatgaccacacatttctttccatagtcaagcaccgtcacctctggaagaaggtacttagctggtggcttctgaagcccaccattctcctccaccagtggcggaagcacactggggctgctgggtggaggggcctccacattgtaatcacggaagcagcagaagaaggagctaaggatgctgcggctcctctgcttctttaagctgacgttgcactgggaggctttctcgcccgcgcccggcaaccggccctcgtcctccttggggttggtcacctgggtgatgatggccgggccgtccatgggtgcgcggcgcggcggccgc

SEQ ID NO: 124774 - DNA, 1717 bp, Homo Sapiens
  misc_feature (240)..(240): n is a, c, g, or t
cccggctctattttgttagaatgtgagcgataccatttcacacagaaacagctatacatgtttcgaattaatagactcctataggaattggccatagagcccaagaatcggcaagaggcctgaggagtttcggagcagagggcagccatctcagaactgatcctgaggaagtgggatcagaggccaaaggcagaagcacttaggaacccaggcagcctgggactatctaaccacgtgtgntaaaacacaaccagcaggtccatggccagcaggcctctgccccccggacgccaggaggaggagaatgccaaagactccgggcggaaaccctcaccggtgcggccccgaggctgcctgcccagcattgatgaggcccgaccggcaggtccaggtccagccccgccctcgcgccggggctccatgatgggcctgaccgcgtccttctcccgccgcaactcgctggtcgggccaggcgcgggtcctgggggtcagcggccatccctgggcccggtgccccctctgggctcaagggtcagcttctcagggttgcccctggcgcccgcccgttgggtggcgccctcctaccgcacggagccagtgcccggggagcgctgggaggctgcgcgtgcacagcgtgccctggaggcggcgctggccgcagggctgcacgacgcgtgctactccagcgatgaggccgcgcggctggtgcgggagctctgcgagcaggtgcacgttcgcctgcgcgagctcagcccgccacgctacaagctggtatgcagtgtggtgctggggccgcgcgcgggccagggcgttcacgtggtcagccgtgcgctctgggacgtggcgcgcgatgggctggcctcggtctcctacaccaacacctcgctcttcgcggtggccacggtccacgggctctactgcgagtgagggggagtccaattctgcaaaattgtttattatcctaggaggaggcccccctggggctcacatcccaataaataagtgtctgacaataaataaaagtggtccataaataacgccccctagctgggagctaaggctcaggcttatcttggagatggggtaggagccagcgaagacaagccgcccccaactccagtaaagctggtccctgattccctgggggattcggcccaaagcccccagtgaggcaccaaaggaagggggaaggccacaaaggcaagggccagagcctgacaggcacaggcctcaggcctcagggcttgggtcctaggctgggctgcggtcccggagcaggcgcagagcatagcggagtcgctgccgcaggtctggagagcagcccagctgccgaaggtgggaagcgaggtaagtacaagcactacgatttcgggccacaaaagtcacaaggaggggctcccagccactgagaatcagcttggtgtggtccccgtagaagttcacctggacagtgccatcactaaacagcatgaggagagcctgatccgtcttgacccactgcagcagcaagggcggagcaggtacctctacctcttccacactgggcagatctccacccttcatgaggtgctgctccatgtaggaggcgaagtaccgcaggatacccagctgaggctgcagggcccggggcacagcacccacggagaaggagaagtgctttgtgctggtgggattgtagtgcacagtctttctgttggccgacagggccatatgtgtg

SEQ ID NO: 124775 - DNA, 1370 bp, Homo Sapiens
  misc_feature (83)..(91): n is a, c, g, or t
  misc_feature (122)..(136): n is a, c, g, or t
  misc_feature (145)..(336): n is a, c, g, or t
  misc_feature (1182)..(1182): n is a, c, g, or t
  misc_feature (1212)..(1212): n is a, c, g, or t
  misc_feature (1240)..(1240): n is a, c, g, or t
ggggagaaaaacaccccctattcttttttcccggggtttctttgggggaaaaaaattatatccgtctttctcttttctgggtnnnnnnnnnccccaacaaaaagtgtgagaaaaaatttttnnnnnnnnnnnnnnncgccccccnnnnnnnnnnnnnnnnnnnnnnnnnnnnnnnnnnnnnnnnnnnnnnnnnnnnnnnnnnnnnnnnnnnnnnnnnnnnnnnnnnnnnnnnnnnnnnnnnnnnnnnnnnnnnnnnnnnnnnnnnnnnnnnnnnnnnnnnnnnnnnnnnnnnnnnnnnnnnnnnnnnnnnnnnnnnnnnnnnnnnnnnnnnnnnnncacttcagactaaattttattaaatatggtgtcatttggctacaatcggtttgtctttataaaactaagtaacttattttgtagtaaaaacaaccccaacccactgcccctctttggcagcccttgaaactcagttcaaagctaggcctggctcccggccatggcccctgctgccttcacctgctgagcgctctaggaagcctcccaaatcccaagtgtcaggcccccggagtccatcacctctgcctcaaacagccaagcccaggggctttggggccgcaggtatgaaggcccctccagtagccacacctgtgtcagggctgtgccctggggcctggccaacatcccccctccccttgaaccatcaggaactgggcaagacgcccaccagaggcttgaccacagggggcgtgcatccccttctgagcctgggagaccctaggggagtgggtagcctgggctggacccctggtgggcttgtgttctggatgtcgctatggcactttggtcctcaactcaaacccccacccctacccaggagtctgagacctcggccttccctggacttgttgggcagaaaaaggcaccaaggacaggatgagaaacccggaggggcagccccacaaatgagggcgctctgacctgtcctcccattgccaccccacccaggaacagcccctcaactggtcacagccaccaggaagcctcaggactgctctcacaccacagcagtgccctcttctccattccacccctcaggatctactcagggtcctccaaggcagccagggggcagctccatgacagggcaggagaatgtggttcaaggtctgggacgtaactgangggtgggtatgctccagagaagtatggcanatgggccacatgacgaccactggggtanaccagggtctccaggaatggctcgggggacacctgttctgtgttgaagcccctgcgaatctgggccgagggcaatcctataggagtcgataattctatcatgcaactgttctgttgaatgtaccggccaa

SEQ ID NO: 124776 - DNA, 1984 bp, Homo Sapiens
tggtccttggccacattcccccctccccttgacccatcaggatctggtcaatactgctcaccagagctctgtcccacaggtggtcgtgcatccccttctgagccctgggagacctctacggcgtactggctaaccctgggctggaccccctggttgggcctcgtgttctggatgtcgctatggcactttggtcctcatctctttcccccaccccttacccaggagtctgagacctcggccttccctggacttgttgggcagaaaaaggcaccaaggacaggatgagaaacccggaggggcagccccacaaatgagggcgctctgacctgtcctcccattgccaccccacccaggaacagcccctcaactggtcacagccaccaggaagccccaggactgctcccacaccacagcagtgccctcttctccatcccaccctcaggacctacccagggtcctccaggcagccaggggccagctccaggacagggcaggagaatgcggtccaggtctggcacgtaactgagggtgggtatgctccagagaagtaaggcaaatggcccagatgacgaccacctggggtagacccagggtctccagggaatggctcgggggcagacgctgtgtctgtgtgtgcaggatctgcccccaccagcaggaaaggggcaggagggaggcaaagaggaggtgcccaggacttgtaccctggctgccaagcagggtggggtgttttcatgaggattgcttttaaccaaaagtcctcagccttctgcagacccagggcagaggcgagttgctctacatcatgtgctttaagtagagccctttgccagccaggaggcccagccacccccttccctgccctgtggctttgcggggagacacagagtcacctcaaggccccagcccactcagcgcacggtgcacacatccaggatgcagaagcgtgcgcggcaggtggggcagggcacgcggctggccagccaggtgtcagggcgcagggggtcctggcggctggcgaaccacttgcccatgcaggtgaggcaccacatggggcggcagtaacactgctggcactcgcctgtggctgcctcctggcaggtcttcaccagcttcacgctggcacgtgtctgcatgcagcctatgcaggcctccagctcctggctgctgggcactgagtaggccgggttgacctctaccagggaggcaaatgtctccaggaacaggtcgcccaggctctggtggatgaccacatgggctgccctgcggatgggtgcccggagcttctcgcagagctccccgtactcagtggagttcagccagatgtcaaaggcctgcacagcagggttggtgctggccacacggatggtgaggagctgcacgggcaagttcgagtctggcgagagctcatgctgccgagactccgtcacagtcaggtgcacgtcctgctgctgggccacgtgcactcggtaggtggttaccttcatcacccacgtgtctgtcacaatcacacgggcacctggtgcaccggtggcaaacttgtcaatccgccggaactcagtgttgacagaggaggcaacagcctgccagccagactgtgggagggcgtagagggccagggtgcgcgccagtgggtggcaggcccaccggtcacgggaccagtagtagatcaggatgcaggcgatggaggggagggtcacggccagcagcaggaagagccgccaggcctcaggggcctggctgagggcgtggagccgcttttctgaagccgcaaggcacatgcccacatagtagccgagcggcagcagcgagtggcacaacagcgtggcggccgtgcggcgcaagtggaagggcacgaaggcggcgtcctcgctgcccagccagcccgacagcaggttctgcaccgtgagccccgccgcgtggaactcgttgggcgtgaacacgaagcacacggcgaacaccagataggcgagagtgaaggtca

SEQ ID NO: 124777 - DNA, 694 bp, Homo Sapiens
ttcaaggaacacagtgcttatgacattctttattcaattcacatagaaaagcatgcagtattaatgtaaaacagtacaatattaatgtaaaatgttcagtgcacattaaacagcatacatacccatttttaaagacctatataggcataccaaatacgtttagaacaatacactttttcagagcctaaattaaaaattgtgcttacctcttacctatcttcaccccctcaacactcttcacagaaaagttttgtcctacataaaagatattctatcagccaactgaaacctctttttcttaagtatggaaaacacagcaagcaaaaatgctaccatgcatagtttccacaaagaacaggaacatgcaaacaagaaacatactactcaaaagaaaactcccctggaatgcaagtggatcaagaacttggcgatgagctctttcaaacctgttacatctggaacaatgaagctatgatgttttaggttcctctaaacccaagtgctccatgccttctttccatagtatgctaaatttctgattttacacacatacacacacacgcagaggagaaaatgtaagctacctaacataaaacaaatgtcttcatatagaaaatgttttctttcatactagcagaaattttcacaaaactggacaaacacaatgctaaaaaatgcaacatatacataaaac

SEQ ID NO: 124778 - DNA, 371 bp, Homo Sapiens
  misc_feature (294)..(302): n is a, c, g, or t
tttggttccatcggtgattttaagaatttcatttaggctacagaggttcataggaggactcagagttccaggccctccaaggagactctggcctgtaactgatttaatcccagggcagtaaggtgagcagcatgtaaccccttgtcaaataaggcagtggaataagggttgacagaggccagcactcaggctgtgctgctcaatgacagtgaactcttccaggcacagatgatgagggtctgttgctctcagacttggaacatgagaacagcaactgtctcttgtccattaagnnnnnnnnngccaaatttcttctctgggcaatatccaagcccaaggtgtaagaagaaagcttccttacactttcagca

SEQ ID NO: 124779 - DNA, 1946 bp, Homo Sapiens
agagtcatttgcttccccatcccaaattaactatgcaaattaattgttttgaagatgccatgcccaaatgtggaggtgactcagagcttggaaactcagaagctctaaggtgagcctccagacagggaaagtctgcaacatggtgactgagagggtagtagaaattcacttgctatttaactctctcttgagatttattcttggaggacagagcaaaagtccactcttcagcagctctcctagggtcattccttcacaacgtatattccgtttccagttctttgcgttccttccttttccttcgacttcaaattcatttggtgttaaccaagttccatcctcattccgaatgcacttcactgaggatccgtgtttcattttcttcttatataaaatccctttcgcctcaccacaggtcacggggagcttagaacagtgaaaatccacagtgtcacttttgggttttcctcttcggtgaatatttttctgaaatctcctttttgagcttgaacagatatctttctcctttttcttttctttcgatctggactttcgggcacatttagttcttgccttttggaccctcatcatgacctctgagttccaggttgagtcgtctttcctttgagtcaccttatccaccacttgggagcttctcttgggatgccatgcccaggtgaggctgccccttgtgtgacccttcgtggtgtactaggcgtcttctgggacctctttccttcattcatttctgaagtgccatcaatgatctcctctgatctcgactttcgggcacattcagttctcgccttttgggcccttgtctctaccgtggagttacaagttgagtcatctttcttttgaggaacctgatccacccttttgagcttcttttggattccgtgtctagatgaggctgtccctcttgggaggctttttttcttatgtctcctttttggagttgaccagatacatcttttttccttttctttcctttcttgtctgaaggtgtgctggacacctcctggggctcttctgggtcatttggttctggagaattatctcttatctctggcatagagcccaagggagagtggggcatctcttgagggtcttctttatctcttatttgggggatcaggttgtcactggccacttgcacagtgctagtgaggaggctgggcatctcttctgagtcttcttccgcattcattttggatgttaacttgtcattggtcactgaagtgcttcttccttcctggatgagtgcagggagaggcaggacagggtcagatgggctgggcgactcactcaggatctcatcgctttgctgggaggatgttccaggctcactgactcttggcgcacagggtgaacagcttggttgagggggttgtggtgggggcagcgccagtggggtatggagggagcttccttctgctaggccagttggggcttcaagtaggattggtgtgtctctgctctgccgttcataggaagcaccaacacgtttgaagcttctgtaaatcgtcaccagattgggatattcacgcaggttaatttgactgaacaatgtcaccagaagagacaggttaaaagtcctctccagttgggtgagaatgttgtgcaccactctggatacagggatcaaatttctacaggcttccagagattccatgtacattctcttagtgatgatggagttgtctaggaggccttcaaagaagggaaatggcttgtgtatggcataggcgatccccagcttctggtgcatgaagtgctgaaaaagagcctcttccatggctcttgtcatggtgaacatcctggactttgagtttgtcgttcctgcccctttccaggggctgggacagggatcactcctcaagattgggagagttacagggagatgccggacgcgtgggtcgacgatatcccgggaattccggacc

SEQ ID NO: 124780 - DNA, 1263 bp, Homo Sapiens
  misc_feature (1026)..(1036): n is a, c, g, or t
ggggagtgccagacaatctttttattgttcactgaaaaatgcaggtctgcaaagagtcaattgcattgtatattgaatgcaaggtctgatattgcaagtatatatgacatggtataacatataaaatattacatattttacacagtgacagtacccgcctcttctaaacactaaaatttaatagaatgaagtaaaaagcctattaaataagaaacaaacactgcaatcataaacaaaatgcactaagcaaaatactttaaaattgttgtgtgtgacatctatcttgtctacctggagttaggaatggtggagcccagaaaaaaactgagctaacaaaaacagccaacaccctccaggaactcttccctggaatcaggccgctggtgcccgtcacaggctgcccccatctgatgacccagccaggcttcagggctgcctgagggcccacactgaatgctaacgcctgtctggggctgggctgaggtgaatgggaggagtaccaggtaggaagaagcttctctcccaactgcttattctgcatccatgctatggatatgaacacctagtgtttctggtgtgaatctgccactctccacaaacattgaaatgtgattgagaagaaaatgttaacgctgggaacaaaagccattttctacgcagtctgcagatatcatcattaattcctttcatccatgttttcattaagatgctctaaaagaggctgctgctattatacagccagtcaggcaagccaggatagaggtaacaaaatttctccagttataactagtaattcaaatgaatcaaaaataaatatagcttatactagagagcaacacagtctctattattcacatggtaatatattcaagaattgcaacaatattcacaattctctaaggtcaacatatttccctccaagcagaaaatcctgaatggaagggagtgtataacatcaataactcctgtttgtctcacataatatcagggctcagaaagctcattatagataacaaatgcaaaatnnnnnnnnnnngcatttcaatatatgtacagcaacagaggaagactaggccctccctctgggcctccttggcataaggcaaagcatggctatttgcgacaacagtgtctaagctgactctggaaaggctcatgttttacgataaatcagaattacaaagttccttcattcacaggtaacaaaggattattaaataatttcctgaactaagacaacagtctcaccatcaaagaaaattt

SEQ ID NO: 124781 - DNA, 896 bp, Homo Sapiens
  misc_feature (64)..(64): n is a, c, g, or t
  misc_feature (755)..(755): n is a, c, g, or t
gaaaatgtaaacattggttctcacagagctgtacaagctgctccagcacactctcagcccaccncagatcccctcataggaagaaggcacaagtttaaaggcagactgggtagggatggtatgaatttaatattttttagtattacaatatattcttataaaaaaggtgcaagtgaaaaaggacactgtagattatgtccattagcctcatttgtcatctgaggcagctggtgagaacagccttggcgtgaaggcatccctggtagaagtcgggggagatagatagtcacagttccccagttggtggaaatgggatgggagtagggagaggctggaacagacccttccccattcacctggagaattttctcctcccactgccctaaacactttatttccatcacaggggagaaatgctgctgagaaggttgtgtttgttaggttgatgacgaattttacattggccacaaaattagctagagaaacttatctaaaggtggcaggagcagtggggagggcatgaagaaagcaagaccaagaaacaacctattaaggaccagctcagccaccccgactgggcaccagccccttcttactcagttgagtatgagtccatggtccaaggcactgttggagatctggctacagtggcatctagcaccagagccactggccagatgtagaaaataaatagaaaaatatctttcttttagagtgagaaggctgagctctggaacaacgtatttgtgtcctcntgtcaacagttgaaccaaattctgcttttctgaagatcaaatgtatcttgaacagcttccatagtccttttgtttccaggtgcgtatcagtcttcatggtgggtgggaatgcagaccgcttgtggagcctccctgttcctg

SEQ ID NO: 124782 - DNA, 709 bp, Homo Sapiens
tttttacttttaatatttaataggaatttgtgttagttgtaacaatgtgtgtattggatccaaaacatgttatattttaagcaatggcttggagagaactaatcaattcatattctgcatttccagccaaagggacataggcacaactgactggtggcaccttcctgtgggaagcctcttccatccatctacagcattgatacttttataaagtatgaatttatcttgcttgaagagttaagtctcattttccatggttaatgcaggattgctcataccagctttgcattttcctgggtttatgctgctctccgtccaagactgagaatcagtaagaaggtggctctgggactctctcaatggctttgcaggaaactgatggttttcgagatttttagctgtggaattcagccctgcaggagtagatgcttgttcaggatcctggttaacaaggcaagttggaaaggagcagccatcacctagacttgaaaaaatgggtagcaaccagtacttcttctcatcaccaaaaacttgtcgcatgtttttactgaaacccaagctgaatccattcttatctgttccatgtcgaaatactggacttctgaatgcctctaatgtagatttatgttttgctgactagccaacaatgatagccagacagagaagacaagctgacagaaaacatagctgcagccaagaataaaaacat

SEQ ID NO: 124783 - DNA, 871 bp, Homo Sapiens
  misc_feature (45)..(61): n is a, c, g, or t
  misc_feature (70)..(254): n is a, c, g, or t
gggtgggggcgccgcccccaaaaagagttttttgaaaattttttnnnnnnnnnnnnnnnnnccggaaaannnnnnnnnnnnnnnnnnnnnnnnnnnnnnnnnnnnnnnnnnnnnnnnnnnnnnnnnnnnnnnnnnnnnnnnnnnnnnnnnnnnnnnnnnnnnnnnnnnnnnnnnnnnnnnnnnnnnnnnnnnnnnnnnnnnnnnnnnnnnnnnnnnnnnnnnnnnnnnnnnnnnnnnnnnnnnnnnnnnnnnnnccaggaggccaggaaatattttattgacaaccagggacacagtcataagagagggaagcacacaggactgcaaactaacacccagtagccagcaagggccctctgggccaggaatactgaatcctgggatcctcacagtctcccaccagtagacatacattactgggcatccaggggagggggcagtggctatggtgtcccagagagtgagaggatatatgatgcctcattatgagcgacagggtaaagaggtaaaatggagggtccatcactgcctaagaccacctcctcctctcagagccaacaccaggtgaaggactgaaccacctaaaatcttgtaatcagctgctgtcttctcatcattcatctgcttgccactgtagatgagcctctgctgttgtggggggattccctctttctcctccacacgctccttgattcgctccaccttgtctgtaggttcaatgtcaatctcaatctcctttccggtcagcgtcttcactttaattagcatcttctttccagtttggggctgcacacggataaattgctgctcctaccgctccggtcgccgctgccgccctccagcactcttgcctgcaagggccacttctact

SEQ ID NO: 124784 - DNA, 566 bp, Homo Sapiens
tttactggttattgagcagtttattaccatcaacctgtccccagctttccagcacaacagccagcccacactctagacacgccttcactccagtccattctggcacctagcctcagtcttcaccctcctccctcctccacacactccttcccccagccctccaaggcagcaccaggcctgagggccacacctcagctgggggaggggagggaagacagtgagacagacagaagctggggaaagaggagccagggttggccccaagcttctgtagccaccactccaggaaggagggaaagggggaagggctgaggctggggctggggttgccaggtgatgacagttcacgtggttcaggcaggaggctcttctccaggaggtgcagggaagccactcaggtctcggccaatgatctcactcaccctagtctcagggaacatccgcaggcccggtctgtaggatggtgggggccccgtctgggggtacagagggggcatgccatagccgaagccttctgataggtaaggagtttcgcaaggcagggtcttcattgggataggaggggt

SEQ ID NO: 124785 - DNA, 716 bp, Homo Sapiens
  misc_feature (605)..(605): n is a, c, g, or t
  misc_feature (635)..(635): n is a, c, g, or t
ttttcactggtcattgagcagtttattaccatcaacctgtccccagctttccagcacaacagccagcccacactctagacacgccttcactccagtccattctggcacctagcctcagtcttcaccctcctccctcctccacacactccttcccccagccctccaaggcagcaccaggcctgagggccacacctcagctgggggaggggagggaagacagtgagacagacagaagctggggaaagaggagccagggttggccccaagcttctgtagccaccactccaggaaggagggaaagggggcagggctgaggctggggctggggttgccaggtgatgacagttcacgtggttcaggcaggaggctcttctccaggaggtgcagggaagccactcaggtctcggccaatgatctcactcactgtaaaggaggggcagttgagagactgggctagaggtgggtcccctccttttccaaagacccacccccaatccattccaggcaggccttaatctaggaggcctctagattcctcctctactggcttctattccactgggcctcagtttccccaacacgtcttgacacctgctccgaatcanatcttgcccaactccctccatgtgggctcncaggcacccgtcctagccctttcctgctggcttagcctggaatgtcaggggaatcggtatcagcaggggcagagatgggtg

SEQ ID NO: 124786 - DNA, 676 bp, Homo Sapiens
tttcactggtcattgagcagtttattaccatcaacctgtccccagctttccagcacaacagccagcccacactctagacacgccttcactccagtccattctggcacctagcctcagtcttcaccctcctccctcctccacacactccttcccccagccctccaaggcagcaccaggcctgagggccacacctcagctgggggaggggagggaagacagtgagacagacagaagctggggaaagaggagccagggttggccccaagcttctgtagccaccactccaggaaggagggaaagggggaagggctgaggctggggctggggttgccaggtgatgacagttcacgtggttcaggcaggaggctcttctccaggaggtgcagggaagccactcaggtctcggccaatgatctcactcacttcctccagcgtgataccctggatagggacactgtctcggaagccgctgctgtagccacccctggatttctcctgctccggagccccctccccagggccatagcctggccctaccttattgtatccctcagcaggtaggggatgcacatcactctgggaagggaaggggccttcaagcggtggggatgcaggaagaggaggcgggcgaagggggctgcggagagaatgcagcccccaggagaaagagagcccc

SEQ ID NO: 124787 - DNA, 680 bp, Homo Sapiens
ttttttgcaagagtagttaaaatgtgtttattcatttacaaacccagtaacatgagaagaaactcagtggaaaccttgcttggtggagacagtgcacagtgttagtgccacattcacaggggcagaaatgctcggtcaccctgtgcacccaaagtcacccaggatctctagaaaagatcccacttactgaagtgcctcggatgtcttcagggccagattgtaactacacaggaacagggaagggctaagctgaactgcacactgacaaacacaaacgatgagtcacaggactctacagtagttacaatggcatttttatatgtcccaagtgttgactggagagtaaagtgttaactgagctgctagaacacccttcactgaaagagctttctaccccacgcccattgttccgaagaaggagaggctatgtggggcggatgggaacccacacaccgagatgaacttttctctttcttccaatctgcacccaccatctgacattctggagtgtaaggcactagaacctggcttagagaatagtggggctctaagctccagttcttggtgtgcaaaggaaattctgacatacatcttttgaaagagatgctaaaaaaccctccctatctcctgtaatttctgtctttgacagacaggaaaataagaaggcaggagatggtctg

SEQ ID NO: 124788 - DNA, 812 bp, Homo Sapiens
  misc_feature (118)..(130): n is a, c, g, or t
  misc_feature (797)..(797): n is a, c, g, or t
ttttgtgccgaattaagttcttttaatagattgcatatatagatgtttagccatactcttagatcaactctttaagagcagaactttatatccaatttacatgctctagataccaccnnnnnnnnnnnnnacagtaaggtctggtattcaaatacccacttgtacactgacagctttaagaaaaacaggacacagagggagttgtcatttttagcagcaatgaaataccactaacccctttttacataccgaattcaagtcactatcagaggtgagtgcaccacaaagtcaccaggtacaaaattgctagttcatttttaaattaataacttgaaattacccctgccccccaccccattacatctttttataaacagcaaacattttgctattttatacataggctagcaggcttgtttcaatatgaaagtgctaattcatttacagatttttataatcagttatgtagtgctacaataaatgtccaataatctacataggaacaatgatgaaaatgatgaagactgaataaggctatcagatgaccttatcttatttacatataaagaatagatacccaatggtgaggaagagacagaaattggacaaatactcataggtgtaaaaattacatctacctttgagttttatactgtaaatgagacattttaaatagtcctgtagcccatgcctattttttcctcagaaaaagaaaagctgccttcatgacatcccctcgtttcagatttccacagtgtcactttgaagcttcagagtcaggatcttactttcttcanaaaataaagaaatac

SEQ ID NO: 124789 - DNA, 1525 bp, Homo Sapiens
  misc_feature (349)..(363): n is a, c, g, or t
  misc_feature (1144)..(1144): n is a, c, g, or t
  misc_feature (1342)..(1344): n is a, c, g, or t
  misc_feature (1409)..(1409): n is a, c, g, or t
  misc_feature (1469)..(1469): n is a, c, g, or t
gcatgggaataactaaaacctttattagatatgattttccattaacaataatgtgaaaattagaattatgaattcaaaaagcagtgaagtctgaaaatttaaaaagtagactaggtattaggggattaaaggtaaaggaagacgagaatgtttctttaatactattcattatttcccctctgtacacaatgttgcatatatacaactacttcatttttattgactttatataatagtgaaatccctttaagcaacctagggtatacagttggtgtccaactttcaggggattttcgggggggagtagaaacacttgattaacagttttcacccacacatgttagacaannnnnnnnnnnnnnngccaagattttagtagtaaattcataaatataggaaatactttcactccttcagtgttaaaacagaaaaccaaacagtgccaacagtagtggcttaattattggtatacaagaaaaacacaacaacaatgggttttcttaattacgcattttaaatatcaatatgtgcatttgtttttacagttataaatttttttctcacctgttttagacaacagcttgtaatagttttgaatccattaagatgttgctttcaatttgaaatattttgtgtatacatgtatataaaaaataacccaatgtatgactcatctgaccgatgtttaagatcaataacggcttatttttcaacatgcagttaggaagagagggaagcaagccaacctctctacagtatctttttgctggcttgtttttgtagtggtatcaatagtggtttttggagggaaccatgtgccttcagcctatctagtcaagatcagataccacgatcaacaagagcggtagaagagatggggaaaggggagtgggtaagtgttaaatatcaattttgtaaagtgtgcattttgtactccttctaggcacaggattaaaaacaggccaatgaggaaaaatttgttataattaggaaaaaactgcaatcaaatcaagacataatagccgaattaagttcttttaatagattgcatatatagatgtttagccatactcttagatcaactctttaagagcagaactttatatccaatttacatgctctagataccacctttttatttttntacagtaaggtctggtattcaaatacccacttgtacactgacagctttaagaaaaacaggacacagagggagttgtcatttttagcagcaatgaaataccactaacccctttttacataccgaattcaagtcactatcagaggtgagtgcaccacaaagtcaccaggtacaaattgctagttcattttttaattatannnctgaataccctgccccccacccatacatctttttataacagcaaacatttgctatttatacatangtagcaggctgttcatatgaaagtgtctcgtgcgaattctggctcgaggcaatccctaangatcgtataatcgatcatgtcaacgttctggtgaatgtatcgccacatcaacacaa

SEQ ID NO: 124790 - DNA, 1074 bp, Homo Sapiens
  misc_feature (275)..(285): n is a, c, g, or t
ttttatatttgtaaacatttattctcttgaactgaaaaaggcttgcatcagcacacattgtacagccttgcaaattacacagaaattgaaaagaaggttccttgttcataagtgcaatgaatctttgatgtccagtgatccgctgcaaacaatgaaaacaaactgtaaagcacttaagaagtttccagcactcatcaaatgcatttccttaggtgacaaaaaatccacaaggagaatgcaaataagtggcatttagttattagagagatacttgnnnnnnnnnnngtggaagtattttcctgcttagaatgatttctgttcccctttgaatgtaagtggtttaagaggcattaagaacataatttattttatacttaatgttcacactacctaaatgaataaggaaagggccctacaaggaagagttatgtattttttggtaattgtttctgagtttagagattcaggggaagagtaatcctctatttgtgggctcttcttagcatccctaacccccaaggagatagtacatggttttgacttggttatttcactcctgcattctttttcccccaaattttaagttgggtcacattgtgctggctgcaaaaagaaatacagggtgcaactggttataatcattttgaagaataatttgctgtacaatagagctttggatctgatacaagaatttagaaatattaaacacaataactatcaaagttaggaggcatttgaatggcatttccttggaaaaacctgctaactctgtatcattctgatgtggattcctagtcatgtggggtgacatgcatatttttccccctttgctggatcactggcctttcttcaaaagctataatgccatgaacacacatcctaggagtctctataatgttaacagaagctccaaataccaagccaatcaaagatgggagagggcaggggaaccataaaggcgaagggtccaaaggtggctgttactgagaacttgccctttccaaaatgtgaaagtcatagtgcttcttgcttgttctcagcttaaacttgttaactgagttaatttgtttcttc

SEQ ID NO: 124791 - DNA, 862 bp, Homo Sapiens
aaacggtcaacacaagtttatttattctcacataacaatactgagtggatatttaggtcagtaaggcacagttctcctccacttaggaatctcccatcttcaggccttgccttctccagagcctggtcaccatctgcttccagttggcagaaggagtaacagcacaggggagcacctgttggaggtctgtatgggccaggcctggaaactgcacacctcttctggtcactttccgctcagcatcctgtttatgttcttcttagcatcagactcgggctttttcctgtttattacctacttcgttttcctgaaagatccatgtgccggtaccatgtgttgttcctactgtttctccaatgtctagtagatttggcacatactgatgtgcaattaatacgtgaatgaagaaccattgacagacgattagtcaaaagctcttgcaaagccctttgataggttatcggtggagagtagggagcacaaacctggggtcccattctagcttgaccacttctcggctgtgcacaaactagtctagctctcctgagcctcagttacctattttgcaaattagggatgggaacatccatacctcacgacgccaaacggctaccttgtaaagacgaaaggaggaaatgcaggaaataactccacgtaaggttaatgctccgtaaacagagctgctactgctattatatattctatacaatcctgcgcccttaacggcaggaccctttcagtgcttcagtcctgtcttctctctcctgggttgacctccacagatcctctcagaagagcgttttccaggcgtgaatctccgcagagtgcctcgtgccgattcagaccccaggccttacctagc

SEQ ID NO: 124792 - DNA, 1055 bp, Homo Sapiens
  misc_feature (606)..(716): n is a, c, g, or t
  misc_feature (776)..(776): n is a, c, g, or t
  misc_feature (790)..(790): n is a, c, g, or t
  misc_feature (797)..(797): n is a, c, g, or t
  misc_feature (810)..(810): n is a, c, g, or t
  misc_feature (849)..(849): n is a, c, g, or t
  misc_feature (873)..(873): n is a, c, g, or t
  misc_feature (886)..(886): n is a, c, g, or t
  misc_feature (904)..(904): n is a, c, g, or t
  misc_feature (933)..(933): n is a, c, g, or t
  misc_feature (963)..(963): n is a, c, g, or t
  misc_feature (969)..(969): n is a, c, g, or t
  misc_feature (973)..(974): n is a, c, g, or t
  misc_feature (991)..(991): n is a, c, g, or t
  misc_feature (995)..(995): n is a, c, g, or t
  misc_feature (1007)..(1007): n is a, c, g, or t
  misc_feature (1032)..(1032): n is a, c, g, or t
ggcacgaggttttaaacggtcaacacaagtttatttattctcacataacaatactgagtggatatttaggtcagtaaggcacagttctcctccacttaggaatctcccatcttcaggccttgccttctccagagcctggtcaccatctgcttccagttggcagaaggagtaacagcacaggggagcacctgttggaggtctgtatgggccaggcctggaaactgcacacctcttctggtcactttccgctggggagagcataggcacagagccacacttaaattttactttgaggaatgcagtgtaggtgtatgtccgacaaagaaaacaataattcggtagacaaataagtctccactccaatattcaattacttacttaacttatgctctggtatgtctcaaattaacctagatagaaatgaactctgaatcttccacttccatcaagtttttcactcactcagtggcatcattatccatccagttgcttaagcatacatttgaaagttatccttggtctgtttcttatccttcccttccacatctaatccttcaggaagtcctgacaatgttacctccaaaatatgtcttaaatccatcttcnnnnnnnnnnnnnnnnnnnnnnnnnnnnnnnnnnnnnnnnnnnnnnnnnnnnnnnnnnnnnnnnnnnnnnnnnnnnnnnnnnnnnnnnnnnnnnnnnnnnnnnnnnnnnnnaatctctcagcatcctgtttatgttcttcttagcatcagactcgggctttttcctgtttnatactacttcgttntcctganagattcatgtgcnggtacatgtgttgttctactgtttctccatgtctagtanatttggacatactgatgtgcattnatacggtgatgangaacattgacagacgatnagtcaaagctctttgcaagcctttgatangtatcggtggagagtagggagcacaactgnggtccnatcnnagctgacacttctcggntggnacaactagtcanctctcctgagctcagttactatttncgcaatagggatggacatccaac

SEQ ID NO: 124793 - DNA, 1038 bp, Homo Sapiens
  misc_feature (761)..(761): n is a, c, g, or t
  misc_feature (768)..(768): n is a, c, g, or t
  misc_feature (821)..(821): n is a, c, g, or t
  misc_feature (866)..(866): n is a, c, g, or t
ttttttgcacatcactcctttattatactgatatggaaaaaggatttagtacagttatgctcagatgaacactggacccatgtggcagggtcaagcaactagaacatgattcagaaatcagtgaaagatacacttggacaggaccaagaggcatttcactgccatgaaacaaggcaggaagggattctaatacacacaccaggaagcactcctgcccctcagaggtcaaggagctgatcctatattggtatgaggaatggcttattttctgatgaccacatgtgggactatttcaaccgccacaagaaaccccagaagggttattgttttgtattatatatactatacttttttaataaaagtaaattaacacataacgaaattcaggattgatcccaacctagagccagatcctctggggtcagggaggaaacagttgtcacatcaccacgcaggttacattcgtcttccactggaatgactagagcccccaggcagtaggcagtgacctgactgcagaagagcagaggacagactccgctcatggggacagacaggctctgttgcttctcctcactggtcatggcttagcatggttcctccccaaagtccttagtaaacaagcactcgcaaaaacccaagtcactactttttaactcctgttggatagggggagcttttccatagcttagactgagacctgtgctctagaactgctattctgactagatggtatgaagggagtggggtgcaggcgacanatggctnaaatgaaatgggagcactggtccccgtctgcagctacactcaagtttctacanatgtggtcattgtgacatgctgcagttggagggggcaaaggacanacggcaggagggtgtcctgggacatatctcccgccgcttcactcttggctggcttgggagcacacttcatggtttggaccgtcctcatccccaaactgcagggtgaaggttcaatcttgtcatcaaaacatgggaacatcggagttagtcctatacctccaaaactccaatg

SEQ ID NO: 124794 - DNA, 880 bp, Homo Sapiens
tgccatgaaacaaggcaggaagggattctaatacacacacccagggcagccacagcttccatggctttgcgcaccgtctcttcatcccccagagactgcatgggcttgatgaggcttcaagttcttgtccaattcatagacaatgggaataccagtcggcaggttcagctccatgatagcctcttcagagagaccctccagatgcttgacaatgccccggaggctgttgccatgggctgcaatcagtacacgtttcccctccttgatctggggaactatttcttcattccagaagggcagagctctggcaatagtatccttcagactctcacaggagggtagctgatcttctgtgaggtctgcatacctgcgatccttactgatgttgctgtagaaaggatggtcgggctccatcggaggtggtgggacatcataggagcgcctccagatcttcacctgggcctcaccatgctttgcagcagtttctgctttattgagaccggttagacccccatagtgccgctcattgaggcgccaagtcctcaccactggcagccacatctgatcaatggcatctagcactgtccagagggtccggatcgctctcttctgcactgaggtgaagcagatgtcaaactcatagccagcatctcgtagcgcctgcccgccgcgcttcgcctcctcgtggcccgccgggctcaggtcggcgtcgtaccagccgctgaagcggttctccaggttccatgcgctctcgccgtgccggatcagcaccagtttgtaggcggccatggcggcgggctggggatgcggcaccgactgggattagcctcgtgccgaattcgccacccaggcctcgctaccttaaaccgtatagttactg

SEQ ID NO: 124795 - DNA, 988 bp, Homo Sapiens
caaagggggtcaggggggacattgccaggtgggagggccagagggcccaggccgggcagggaggggtgttctgggggacagatcttccccggcgggctttcattttttggccttgcccggggcagccacagcttccagggctttgcgcaccgtctcttcatcccccagaactgccatggcttgataggcttcgagttcttgtccaattcatagactatgggaataccagtcggcaggttcagctccatgatagcctcttcagagagaccctccagatgcttgacaatgccccggaggctgttgccatgggctgcaatcagtacacgtttcccctccttgatctgggggaactatttcttcattccagaagggcagagctctggcaatagtatccttcagactctcacaggagggtagctgatcttctgtgaggtctgcatacctgcgatccttactgatgttgctgtagaaaggatggtcgggctccatcggaggtggtgggacatcataggagcgcctccagatcttcacctgggcctcaccatgctttgcagcagtttctgctttattgagaccggttagacccccatagtgccgctcattgaggcgccaagtcctcaccactggcagccacatctgatcaatggcatctagcactgtccagagggtccggatcgctctcttctgcactgaggtgaagcagatgtcaaactcatagccagcatctcgtagcgcctgcccgccgcgcttcgcctcctcgtggcccgccgggctcaggtcggcgtcgtaccagccgctgaagcggttctccaggttccatgcgctctcgccgtgccggatcagcaccagtttgtaggcggccatggcggcgggctggggatgcggcaccgactgggattagcagcggacgcgtgggtcgacgatatcccgggaattccggaccggaccagcctcttttgacagggggccgtttgtggaggggacgggg

SEQ ID NO: 124796 - DNA, 991 bp, Homo Sapiens
  misc_feature (941)..(951): n is a, c, g, or t
acaaagaccgggccaggggagggtggctccctggggacaagtatccttccccggcggggggccttcattttttgggccttgccctgggcagcccacagctttccatggcttttgcgccaccgtctttttcatccccccagaaaacctgcatgggcttgataggcttcaagttcttgtccaattcatagacaatgggaataccagtcggcaggttcagctccatgatagcctcttcagagagaccctccagatgcttgacaatgccccggaggctgttgccatgggctgcaatcagtacacgtgttcccctccttgatctggggaactatttcttcattccagaagggcagagctctggcaatagtatccttcagactctcacaggagggtagctgatcttctgtgaggtctgcatacctgcgatccttactgatgttgctgtagaaaggatggtcgggctccatcggaggtggtgggacatcataggagcgcctccagatcttcacctgggcctcaccatgctttgcagcagtttctgctttattgagaccggttagacccccatagtgccgctcattgaggcgccaagtcctcaccactggcagccacatctgatcaatggcatctagcactgtccagagggtccggatcgctctcttctgcactgaggtgaagcagatgtcaaactcatagccagcatctcgtagcgcctgcccgccgcgcttcgcctcctcgtggcccgccgggctcaggtcggcgtcgtaccagccgctgaagcggttctccaggttccatgcgctctcgccgtgccggatcagcaccagtttgtaggcggccatggcggcgggctggggatgcggcaccgactgggattagcccgacgcgtcggcggacgcgtgggtcgacgatatcccgggaattccgaccgtacagccgctgcnnnnnnnnnnnaaacaccagcccggggttctatagttactagttgcccctt

SEQ ID NO: 124797 - DNA, 1053 bp, Homo Sapiens
cgctctttaatgtgtgtgtgatccgcttcggttcccgcccccgggtttgtggtttgccggttccccaaccgggttgtggaaaaacgttaagtacccgatcggtgccccctgccacttcggtccggagacatggcaacccaccggtcctttgtccctggatgactagccccggcgtggcagtgccctgctcagaagccagagccagctcccctcatggacaacagcttctgtgctttcctcactggtcatgcttagcatgttcctccccaaagtcttagtaacaagcactcgcaaaaacccagtcaactacttttaaactctgttggataaggggagcttttccatagcttagactgagaacctgtgctctagaactgctattctgactagattgtatgaagggagtgggtgcaggcgacaaaatggctaaaatgaaaatgggagccactggtccccgtctgcagctacaactcaagatgtctacagatgtggtcagtgtgacatgtgcaggtgggaggggcagagggacaagacgggcagggagggtgctcctggggacagtatcctccccgccggccttcacttcttggccttgcctgggcagccacagcttccatggctttgcgcaccgtctcttcatcccccagaaactgcatgggcttgataggcttcaagttcttgtccaattcatagacaatgggaataccagtcggcaggttcagctccatgatagcctcttcagagagaccctccagatgcttgacaatgccccggaggctgttgccatgggctgcaatcagtacacgtttcccctccttgatctggggaactatttcttcattccagaagggcagagctctggcaatagtatccttcagactctcacaggagggtagctgatcttctgtgaggtctgcatacctgcgatccttactgatgttgctgcgacgcgtggtcgacgatatcccgggattccggaccgtaccagccctgcttgttttgttcacaccactggggtctaatagtgttcacctattgcatttccccgtgcgt

SEQ ID NO: 124798 - DNA, 908 bp, Homo Sapiens
cgggccattcctcccccgcttcatttggcttccctgggcaccccagcttcatgccttgcgcaccgtttcttcatcccgcaagaactgcatggctgatagccttcaagttcttggccaattcatagacaatgggaataccagtcgcaggttcagctccatgatagcctcttcagagagaccctccagatgcttgacaatgccccggaggctgttgccatgggctgcaatcagtacacgtttcccctccttgatctggggaactatttcttcattccagaaggcagagctctggcaatagtatccttcagactctcacaggagggtagctgatcttctgtgaggtctgcatacctgcgatccttactgatgttgctgtagaaaggatggtcgggctccatcggaggtggtgggacatcataggagcgcctccagatcttcacctgggcctcaccatgctttgcagcagtttctgctttattgagaccggttagacccccatagtgccgctcattgaggcgccaagtcctcaccactggcagccacatctgatcaatggcatctagcactgtccagagggtccggatcgctctcttctgcactgaggtgaagcagatgtcaaactcatagccagcatctcgtagcgcctgcccgccgcgcttcgcctcctcgtggcccgccgggctcaggtcggcgtcgtaccagccgctgaagcggttctccaggttccatgcgctctcgccgtgccggatcagcaccagtttgtaggcggccatggcggcgggctggggatgcggcaccgactgggattagcagattccggagtagcagcccgccccgtcggccgcgcactgagcagctcagcaccgctccctcgtgccagaattacaacccaggcctcgtacctagca

SEQ ID NO: 124799 - DNA, 859 bp, Homo Sapiens
gctcctgggacaatatcctcccgccgccttcacttcttggtccttggccctggcagccacagcttgcatggcttgcgcaccgtctcttgcatcccccagaaactgcatgggcttgataggcttcaagttcttgtccaattcatagacaatgggaataaccagtcggcaggttcagctccatgatagcctcttcagagagaccctccagatgcttgacaatgccccggaggctgttggccatgggctgcaatcagtacacgtttcccctccttgatctggggaactatttcttcattccagaagggcagagctctggcaatagtatccttcagactctcacaggagggtagctgatcttctgtgaggtctgcatacctgcgatccttactgatgttgctgtagaaaggatggtcgggctccatcggaggtggtgggacatcataggagcgcctccagatcttcacctgggcctcaccatgctttgcagcagtttctgctttattgagaccggttagacccccatagtgccgctcattgaggcgccaagtcctcaccactggcagccacatctgatcaatggcatctagcactgtccagagggtccggatcgctctcttctgcactgaggtgaagcggatgtcaaactcatagccagcatctcgtagcgcctgcccgccgcagcttcgcctcctcgtggcccgccagggctcaggtcggcgtcgtaccagccgctgaagcggttctccaggttccatgcgctctcgccgtgccaggatcagcaccagtttgtaggcggccatggcggcgggctggggtgggcctcgtgccgattaaaccaccaggcctcgtactagcacta

SEQ ID NO: 124800 - DNA, 1313 bp, Homo Sapiens
gtcctcccccgtcttcttccgtggttttgctgccgtcctgtgctcctgcgctcgcggcgctggccgctctccttcatggccactgctcgtgtctttgctcctgggtcctgcttgcctggttctccccaaggccgttgttcatggcactcgcgtgatcccttgtcacgtacttgtagctctggtggattaaggggacctgttcccatagcgtagactgaggaacctttgcttctagactgcttattctgactagattgtatgacagggagttgggtgcaaggcgacatatggcttacatgaaaatgggagccactggtccccgtctgcagctacgactcaagatgtctacagatgtgtcagtgtgacatgttccaggtgggaggggccagagggaccaagaccgggcaggggagggtgctcctgggggacagtatcctcccccgccggccttcacttcttggccttgccctgggcagccacagcttccatggctttgcgcaccgtctcttcatcccccagaaactgcatgggcttgataggcttcaagttcttgtccaattcatagacaatgggaataccagtcggcaggttcagctccatgatagcctcttcagagagaccctccagatgcttgacaatgccccggaggctgttgccatgggctgcaatcagtacacgtttcccctccttgatctggggaactatttcttcattccagaagggcagagctctggcaatagtatccttcagactctcacaggagggtagctgatcttctgtgaggtctgcatacctgcgatccttactgatgttgctgtagaaaggatggtcgggctccatcggaggtggtgggacatcataggagcgcctccagatcttcacctgggcctcaccatgctttgcagcagtttctgctttattgagaccggttagacccccatagtgccgctcattgaggcgccaagtcctcaccactggcagccacatctgatcaatggcatctagcactgtccagagggtccggatcgctctcttctgcactgaggtgaagcagatgtcaaactcatagccagcatctcgtagcgcctgcccgccgcgcttcgcctcctcgtggcccgccgggctcaggtcggcgtcgtaccagccgctgaagcggttctccaggttccatgcgctctcgccgtgccggatcagcaccagtttgtaggcggccatggcggcgggctggggatgccgacgcgtgggtcgacgatatcccgggattccgaccgtaccagcctgcttttttaacaacttgttctatattcactagc

SEQ ID NO: 124801 - DNA, 2219 bp, Homo Sapiens
  misc_feature (224)..(234): n is a, c, g, or t
  misc_feature (250)..(308): n is a, c, g, or t
  misc_feature (311)..(366): n is a, c, g, or t
  misc_feature (468)..(481): n is a, c, g, or t
  misc_feature (492)..(653): n is a, c, g, or t
gtaccgcccccttgttttgctccgccggggagcggggagatatgtattttgtggcggaagcgggaacgaaaaagaggtttgggaatgagccccccgggtgcggggaggttaagagggtcttaactacaccccggctttgtaaagggggggttccccccgagcggggcggaagaaagtctctaaagaggttgttcccacaacttttttctaaagagaaggacgcnnnnnnnnnnncgggatttggttattnnnnnnnnnnnnnnnnnnnnnnnnnnnnnnnnnnnnnnnnnnnnnnnnnnnnnnnnnnnctnnnnnnnnnnnnnnnnnnnnnnnnnnnnnnnnnnnnnnnnnnnnnnnnnnnnnnnnccccaccctttgttttacccggggtttctttgggaaacaattggccccttttcctttccccttggggcccggcccccaaagggagggtttaaaaaatttttnnnnnnnnnnnnnncgccccaagcnnnnnnnnnnnnnnnnnnnnnnnnnnnnnnnnnnnnnnnnnnnnnnnnnnnnnnnnnnnnnnnnnnnnnnnnnnnnnnnnnnnnnnnnnnnnnnnnnnnnnnnnnnnnnnnnnnnnnnnnnnnnnnnnnnnnnnnnnnnnnnnnnnnnnnnnnnnnnnnnnnattgcacatcactcctttattatactgatatggaaaaaggatttagtacagttatgctcagatgaacactggacccatgtggcagggtcaagcaactagaacatgattcagaaatcagtgaaagatacacttggacaggaccaagaggcatttcactgccatgaaacaaggcaggaagggattctaatacacacaccaggaagcactcctgcccctcagaggtcaaggagctgatcctatattggtatgaggaatggcttattttctgatgaccacatgtgggactatttcaaccgccacaagaaaccccagaagggttattgttttgtattatatatactatacttttttaataaaagtaaattaacacataacgaaattcaggattgatcccaacctagagccagatcctctggggtcagggaggaaacagttgtcacatcaccacgcaggttacattcgtcttccactggaatgactagagcccccaggcagtaggcagtgacctgactgcagaagagcagaggacagactccgctcatggggacagacaggctctgttgcttctcctcactggtcatggcttagcatggttcctccccaaagtccttagtaaacaaagcactcgcaaaaacccaagtcactacttttaaactctgttggataaggggagcttttccatagcttagactgagaacctgtgctctagaactgctattctgactagattgtatgaagggagtgggtgcaggcgacaaaatggctaaaatgaaaatgggagccactggtccccgtctgcagctacaactcaagatgtctacagatgtggtcagtgtgacatgtgcaggtgggaggggcagagggacaagacgggcagggagggtgctcctggggacagtatcctccccgccggccttcacttcttggccttgccctgggcagccacagcttccatggctttgcgcaccgtctcttcatcccccagaaactgcatgggcttgataggcttcaagttcttgtccaattcatagacaatgggaataccagtcggcaggttcagctccatgatagcctcttcagagagaccctccagatgcttgacaatgccccggaggctgttgccatgggctgcaatcagtacacgtttcccctccttgatctggggaactatttcttcattccagaagggcagagctctggcaatagtatccttcagactctcacaggagggtagctgatcttctgtgaggtctgcatacctgcgatccttactgatgttgctgtagaaaggatggtcgggctccatcggaggtggtgggacatcataggagcgcctccagatcttcacctgggcctcaccatgctttgcagcagtttctgctttattgagaccggttagacccccatagtgccgctcattgaggcgccaagtcctcaccactggcagccacatctgatcaatggcatctagcactgtccagagggtccggatcgctctcttctgcactgaggtgaagcagatgtcacctcgtgccgaattcaaccacacggctcgtactagtctat

SEQ ID NO: 124802 - DNA, 1022 bp, Homo Sapiens
  misc_feature (115)..(115): n is a, c, g, or t
gcccgggcgcccaaaaggggctaaaaaggaaaatggggagcccctggttcccgtttcggcagttccaactcaaggatgttctacagagtggttcagtgtgacaaggccaggtggnagggccagaggggacaagccgggcagggagggtgctcctggggacagtatccttccccgccgggcttcactttctgggccttgcctggggcagccacagcttccatggctttgcgcaccgtctcttcatcccccagaaactgcatgggccttgataggcttcaagttcttgtccaattcatagacaatgggaataccagtcggcaaggttcagctccatgatagcctcttcagagagaccctccagatgcttgacaatgccccggaggctgttgccatgggctgcaatcagtacacgtttcccctccttgatctggggaactatttcttcattccagaagggcagagctctggcaatagtatccttcagactctcacaggagggtagctgatcttctgtgaggtctgcatacctgcgatccttactgatgttgctgtagaaaggatggtcgggctccatcggaggtggtgggacatcataggagcgcctccagatcttcacctgggcctcaccatgctttgcagcagtttctgctttattgagaccggttagacccccatagtgccgctcattgaggcgccaagtcctcaccactggcagccacatctgatcaatggcatctagcactgtccagagggtccggatcgctctcttctgcactgaggtgaagcagatgtcaaactcatagccagcatctcgtagcgcctgcccgccgcgcttcgcctcctcgtggcccgccgggctcaggtcggcgtcgtaccagccgctgaagcggttctccaggttccatgcgctctcgccgtgccggatcagcaccagtttgtaggcggccatggcggcgggctggggcctcgtgccgaattcgccacccaggcctcgctaccttagaaccgttatagttactgcc

SEQ ID NO: 124803 - DNA, 1288 bp, Homo Sapiens
gagggcggtgggtgggacggccaaggggagcgggaccgtggtggggttgtttcgctttcctgctgtggaggccccgccgtcttcgcgctgggggtgtcactgagggtgggtcggtggggggtgtcgtttccgtcggctttttcgtgggtcgtttgtttttcagaagattcttttattaaaactgggtaacatcaataaggggacagtacaaaaaaaagtttggtccatgaaaaaaacaattcagttaataaaaacagttatcaacagggacactgtgggaagtactgagcttccttctcatggttccagccaggaggcggccagggctcagctgccccaaggttgtccagtgtcaacctttcaagggagggaaaatggcaggaaggggaagacggggagaaaattctgctgtccccagtgtagaacagggagggatttgggggtgggggtgtgctcgcaggagcctgaggagggggtggggaagcaggggctttgtcagttctgtgggtttagagcccatgctgaacggaattccccctttgtgcccagctgtctcccacccttgctgtgttgagtctgcgagcctgggatatgctaactcgggggtgatacaacctggaagaagaatgtgaggctctcctggaaagatgcaaaaaccatctcagatccaaggggccaagatcacaaggtcctgctgctacctgaggggtctgtaagctttgaggtgcaggggctggggagtcacaatcctgtgaggcagggagagggaagagtcccaaacccaactcagcgctattctccagccctaggcgctttcactcctcagtgccctagaagtcaccagtaggtgtcaactgggcagacaagggacaggaagacagggatggcccagggctttttacccgtttggttttaggcccgtttctccattaagggatgcagaggcagggtggagtgagtgaatgaatgagtcacatctccaaacagcaggaaggaacagcctctgctggcaatgacagttccccagatgagatccctggggctctgaaagggaaaggcaagattcccccacccaaatgcccgggattagggcagatctgagggaatcacaaagggcagccacagggagtgtctgggagggagcaataaagaaccaaactccaatactgatgtggaccccaactaaggagtgagagaagccctgaccactccccaacccagagggctggggcctcgtgccgaattcgccacccaggcctcgctaccttagaaccgttatagttactgc

SEQ ID NO: 124804 - DNA, 851 bp, Homo Sapiens
ccccgcctgcacttgtgccgtgccctgggcaccccaggcttcatgcctgtgcgcaccgtctctcatcccccaagaaactgcatgggcttgataggcttcaaggtcttgtccaattcatagacaatgggaataccagtcggcaggttcagctccatgatagcctcttcagagagaccctccagatgcttgacaatgccccggaggctgttgccatgggctgcaatcagtacacgtttcccctccttgatctggggaactatttcttcattccagaaggcagagctctggcaatagtatccttcagactctcacaggagggtagctgatcttctgtgaggtctgcatacctgcgatccttactgatgttgctgtagaaaggatggtcgggctccatcggaggtggtgggacatcataggagcgcctccagatcttcacctgggcctcaccatgctttgcagcagtttctgctttattgagaccggttagacccccatagtgccgctcattgaggcgccaagtcctcaccactggcagccacatctgatcaatggcatctagcactgtccagagggtccggatcgctctcttctgcactgaggtgaagcagatgtcaaactcatagccagcatctcgtagcgcctgcccgccgcgcttcgcctcctcgtggcccgccgggctcaggtcggcgtcgtaccagccgctgaagcggttctccaggttccatgcgctctcgccgtgccggatcagcaccagtttgtaggcggccatgcggcgggctgggcgacgcgtgggtcgacgatatcccgggaattccgaccgtaccagcctgctttttaaccactgttaagcc

SEQ ID NO: 124805 - DNA, 880 bp, Homo Sapiens
tttttggttgcaacatgtttaatttctgctgttcacactggacactgcatcatactagtgtcggcccctgagggcaccccttcctcgcctgcacaaaggaggacgagagatgaacattcagaggcagaaaagggcaataaaaaaagagctgtgtatgtgacctccaactactcagaggtgggggaaaacagccccatctgtcttgcactaaaaggctcaccaagggcaggtgaggggcaaatggtaatactgggagggggtaacacaaggagaagcgacatgagtacaccaagatgtcaaagctgcgacgggctggatgagggagccccaagagggcatatgctcagggtgccagccggctgcttttccttgtgacagccttgcaaggaagctgtgaggccaggacactaggccagtggcatccacactgcgtccttcaggaggcgaggcctctgcgcctcattctccaggagggaaaaccagggaccaccccgagctctcccaagtggcaggagttcaaatcagggccagtggcgaaaccaggaggcctgcctgaccaactgcccttcacatgatctctcttcaatctgttgcccggggccccgaccatctgggcagaagcggatgtgctgacttcactttcttttgtcctctacacacacgtgcaggcgttaaggaggcaagcaggtgaggggaaaggaacacaagttgacctgcccagcctgacaattctgaagaaagactgtttcccggggcatgaggaaaaagaagaaaagctgcggcagagtctcttcggaggcagcacccaaggcatccgttgtactcggggcccagcctttcctcccctgtgagtcctccaccaagtccacagcaagcaacg

SEQ ID NO: 124806 - DNA, 1842 bp, Homo Sapiens
ggtccggaattcccgggatccgggggggtgcggtcctggtcggaaggaggtggagagtcgggggtcaccaggcctatccttggcgccacagtcggccaccggggctcgccgccgtcatggagagcggagggcggccctcgctgtgccagttcatcctcctgggcaccacctctgtggtcaccgccgccctgtactccgtgtaccggcagaaggcccgggtctcccaagagctcaagggagctaaaaaagttcatttgggtgaagatttaaagagtattctttcagaagctccaggaaaatgcgtgccttatgctgttatagaaggagctgtgcggtctgttaaagaaacgcttaacagccagtttgtggaaaactgcaagggggtaattcagcggctgacacttcaggagcacaagatggtgtggaatcgaaccacccacctttggaatgattgctcaaagatcattcatcagaggaccaacacagtgccctttgacctggtgccccacgaggatggcgtggatgtggctgtgcgagtgctgaagcccctggactcagtggatctgggtctagagactgtgtatgagaagttccacccctcgattcagtccttcaccgatgtcatcggccactacatcagcggtgagcggcccaaaggcatccaagagaccgaggagatgctgaaggtgggggccaccctcacaggggttggcgaactggtcctggacaacaactctgtccgcctgcagccgcccaaacaaggcatgcagtactatctaagcagccaggacttcgacagcctgctgcagaggcaggagtcgagcgtcaggctctggaaggtgctggcgctggtttttggctttgccacatgtgccaccctcttcttcattctccggaagcagtatctgcagcggcaggagcgcctgcgcctcaagcagatgcaggaggagttccaggagcatgaggcccagctgctgagccgagccaagcctgaggacagggagagtctgaagagcgcctgtgtagtgtgtctgagcagcttcaagtcctgcgtctttctggagtgtgggcacgtttgttcctgcaccgagtgctaccgcgccttgccagagcccaagaagtgccctatctgcagacaggcgatcacccgggtgatacccctgtacaacagctaatagtttggaagccgcacagcttgacctggaagcacccctgcccccttttcagggatttttatctcgaggcctttggaggagcagtggtgggggtagctgtcacctccaggtatgattgagggaggaattgggtagaaactctccagacccatgcctccaatggcaggatgctgcctttcccacctgagaggggaccctgtccatgtgcagcctcatcagagcctcaccctgggaggatgccgtggcgtctcctcccaggagccagatcagtgcgagtgtgactgaaaatgcctcatcacttaagcaccaaagccagtgatcagcagctcttctgttcctgtgtcttctgtttttttctggtgaatcgttgcttgctgtggacttggtggaggactcagaggggaggaaaggctgggccccgagtacaacggatgccttgggtgctgcctccgaagagactctgccgcagcttttcttctttttcctcatgccccgggaaacagtctttcttcagaattgtcaggctgggcaggtcaacttgtgttcctttcccctcacctgcttgcctcctttgtgcaggcgaggaaggggtgccctcaggggccgacactagtatgatgcagtgtccagtgtgaacagcagaaattacacctgttgcaaccaaaaa

SEQ ID NO: 124807 - DNA, 1028 bp, Homo Sapiens
  misc_feature (879)..(879): n is a, c, g, or t
tttttaacatgtgtcaaaagattttattaaactaattcaatttgttagggaaatggtaagatgttacaactggttaagaggagcattaaaagtgcagacatatattcaggccatcaagaatgaggaaatgaatttgctaaattgatgcaacatcaatcaatagccagggcctgtcattcacagacaatcactccaccacacgcacacatacattcctacagtttgtccacaacttccagagctgaagagtagctcaaggacatcaaagggcagaggcccctaggaagggctgagccacaatgaagcagtgctccttcactcccgatttccatggctaccaccgtttttctctggcaaatcagagacgaattttaaagactgagtaaatctataaaagcgattaatcacagaagttcaatgtctgataaattattccaaaagtgttcctgggcactgagactcaccaagcatacattctgaaatcaaattctatttctatccaaaaagtgcagcccatcagtgttcttaaaggaggcaaatggttgttgtgaggtagcaaacattttccaatgcaggtaaggatgtagataccaggtaaatgttacagttgtgttcatactaacaataaactatggatgacgtggcacagagtcagtcaatgaggaaagatccagagacattctgaggtcacaaaaagaatttaaatgttatgtagtagcgatgtgctcatcaatccctacgactttcgtattcatattgcaatccagggcacactattatttggtctttatccagttgccactgtctggttgatatcatactgtacgccacccttgcactctatccctcttgctacctgtttttacacctcgctttttncccctttcctgtatttgtattacattttacattctccactttttgctgtattcgtggctcttatggcatatctcttgttggcgttccgcagcccgtattatgcatcgtgctccctggtgtaacggttgttggtaaatgtcccatgatag

SEQ ID NO: 124808 - DNA, 824 bp, Homo Sapiens
  misc_feature (807)..(807): n is a, c, g, or t
ggtacacaaaagccagtcctgatcgagacaagctctattttgttttttaaatacattttattgtgtatatttgaggtttacaacatggtagtttgggatgcatagaaataataaaatggttactgtagggaagcagatttacatatctatcattctcacacaactactttttgtgacaaaagcagctaaaatctacttagttaacaaaatccctaatacaattttattaaccttagtcctcatgttatacattaactctctacacttgttcattctgcatatctgctattttgtatcctttgacctatatctctgtttcctcctcctgttccctaccatggtcgccatgttttattctctgtgtttttgagctttttcttttatatatattctacatataagtgaaatcacttttctttctgtgtctggcttatatcatctagtataaggtcttccaggtccatccatgttgtgacaaatagtaggatatcgttttttaaggctgaataatattccattatgtatatatacatgacattttctttatccattcatcaacaactaggttgttccatatcttggctattgtgagtaatgttgcagtgaatatgggagtgcagatatctttataaggtgataatttcatctcctttgggtatatacccagaagagggattactgggtcatacagtagttctacttttaatttctttaggaacctatatactgttttccatcatagcccataccaatctacatccccactgacagtgtactagggttcccttttctccacaccccttgcancatttattatctattga

SEQ ID NO: 124809 - DNA, 722 bp, Homo Sapiens
  misc_feature (692)..(692): n is a, c, g, or t
gccatacaggttcattttattgagtggaaagcttacaaaaggtccactggccccttccctccccacgtgacactcattccttccaatgcaaactctggtgtatccacactcacttctgcgtcaccggtttcccccaacaaggcacaaagggcgggtgcttccaaaggatcccttgctcctggcagcgggactttcagtgctgggtgtcttgtgcaaatggtggctgaaagcaggactgttagttcactcagacactgggatcttccttactcctgaagaggggcttggctccaggcccacagtactcgttgtagatgagcttgaagaggaagaggtggaagagggtgattagggaggccacgctgaaccagaagaggaagggcagcccggggtcctgctgggccatgtgctcatcatgggccaggatggccttgaggtgcagcgtgtgccgcaggtcctgcaggtgtgtgaggtcggtggagatgtagagcagtggcgtgatgggctgtgtcaccatgaccgagaaggtgtggcccgtgggcgccgaggtcagctccactggctcgtccaggcagcctgccttgcaggcatagatcttgacaggctggccacgggactccacggacacgtgtaggtagggcttgccctcggcatccgccagcacggccaggttgatatggtcgttcttgtancggatgccatgcaatgcatagctgttgtgc

SEQ ID NO: 124810 - DNA, 667 bp, Homo Sapiens
cagcttgcagttatttttaaatgctgagatttatgatgcgggaggaggggagggctgccctggaaagccagaagaccatcaattcacacctggatttccagctttcccttcctcgtcgtctcctctcaaaacacttgcgcgcgctctctggtgtcaagggctgagggcatcaggacacccattcctgcccaggcctcaccccccctcgccaggctagccccttccgagacacagggctgagagcaaggccaaggcctcgggtttcgaccagatggcggcttcctaccttactcctgaagaggggcttggctccaggcccacagtactcgttgtagatgagcttgaagaggaagaggtggaagagggtgattagggaggccacgctgaaccagaagaggaagggcagcccggggtcctgctgggccatgtgctcatcatgggccaggatggccttgaggtgcagcgtgtgccgcaggtcctgcaggtgtgtgaggtcggtggagatgtagagcagtggcgtgatgggctgtgtcaccatgaccgagaaggtgtggcccgtgggcgccgaggtcagctccactggctcgtccaggcagcctgccttgcaggcatagatcttgacaggctggccacgggactccacggacatcccaggaattccggaccg

SEQ ID NO: 124811 - DNA, 826 bp, Homo Sapiens
cctggatggaatttttaatttatttatcatgtttgtaagttacagacatttatgttttcagcaacagtttataatagttacatctcatacttcaactattagaacagagagaacattaaagtacaaagaaagacttcaaaaatgaggttactgtgatgtatcataaaaggagttaaaattcaaaatatcaaagacctcacctatcggactaaacataaatcttaaaacctcctatgggcctctgagcctaaaattacaaaacttagcaactgcttaaaccaaggaattaacggttctgtgttttcaaggtaagaaaacaaaaaatgctttggtaaactacctttaatactagtttaaatgtttctgccttgtttgtatctctcttgaaagactgtatataagtacaggcacagcatatatttgagaaaacatctcacaaatttcatttactataggtttctcaataatctttacatttaatcaatgagaaaagtgattcagtctcttgaattttaagttaaaaaaattaaaaagtatttccagggactcttaaagctctctcccaaagtataaaatattatgtactttcaaaatcttaagcattcacgttctttctgagaccaacgcaggatacaaacttactctcaacatagatgcttatgtgcttttgggcacacatagtctttcttagaacagtggtcaaacagctcacaggaccctgtactcctcttcatcctggactgtgatggtggccacagccagaccagccccctccccccggccgtaatggccgaattcccgggcatatgtccggtaccgtcgactg

SEQ ID NO: 124812 - DNA, 1416 bp, Homo Sapiens
  misc_feature (52)..(52): n is a, c, g, or t
  misc_feature (240)..(240): n is a, c, g, or t
  misc_feature (1311)..(1345): n is a, c, g, or t
ttcgaggcctaaatttcaaaactatagcacctgcttaaacccaaggaattancggtctggggtttccagggtaggaaaacaaaaaatgctttgggtaaactcctttaaatactagtttaaaagtttctgccttgtttgtatctctcttgaaagactgtatataagtacagccacagcatatatttgagaaaacatctcacaaatttcatttactataggtttctcaataatctttacatntaatcaatgagaaaagtgattcagtctcttgaattttaagttaaaaaaattaaaaagtatttccagggactcttaaagctctctcccaaagtataaaatattatgtactttcaaaatcttaagcattcacgttctttctgagaccaacgcaggatacaaacttactctcaacatagatgcttatgtgcttttgggcacacatagtcttagaacagtggtcaaacagctcacaggaccctgtactcctcttcatcctggactgtgacggtggccacagccagaccagccccctcccatctgccttccaggtcagattccctggcatttattaagctgtcactcttcaatgggttcttccttgggggactcaagctcattcaataagtctttgccagctgctccggcttttgaagcaaagagaactgctccctgcttaaaaccgaggttcttcaaactccgggcataatctgcatatatagcagtgatgagtttctctgtgtcctcagtgacttcaaatgctccatacttgaggcaagcttccacaaataaggctgctctatcaaagtatcctcatgctgtgaagcgtctctgccacgctaaaaaagcagcccagagagaggagaaccaggagagcctttgatttctgattgacttgtggagaacaaaggtggtcaacccaccgccttaaaacatcggcacactcctcaggattcaaacggacttttgccagccatgcagcccgattccactcgccgtatgtctgcaggtagcggcaggcgtctgcagccttatctatcaggcagagcaactgaacgccctctgccaatttgccattggcaatcatattcgttgccaccaacttaatggtgctctgagaggggcctgacgaggtgacagtagtgactaaacaggctttcagtgaatcacagtaataatgctggttatctgcacttgtttccaacagcaactgcacagctctgtctgtttgacccaagagcagtagctggtctgtacatttcccccggccgtaatggccgaattcccgggcatatgtccggtaccgtcgactgnnnnnnnnnnnnnnnnnnnnnnnnnnnnnnnnnnncgccgcttcctcgctaactactcgctgcgctcgtcgttcgctaagaggagcgccaataggtcatatagtct

SEQ ID NO: 124813 - DNA, 1178 bp, Homo Sapiens
  misc_feature (55)..(91): n is a, c, g, or t
  misc_feature (719)..(941): n is a, c, g, or t
  misc_feature (1079)..(1079): n is a, c, g, or t
  misc_feature (1130)..(1130): n is a, c, g, or t
gcacgagggtttaatccattttaaagaaatctcacatgatgttctgtcgggattnnnnnnnnnnnnnnnnnnnnnnnnnnnnnnnnnnnnncacagaaagaagctcgcacagagtcaggcgtgcagcaacgtcacacactcattcctttctgtttcctctggacactcaaaatgtgaaagcaagtaagaggggggtggttaaccaaaccttttggtccaaggaataaaatttctttaaaaaatttaaaacgtcaaaacctgccagaataagacaatagaagagcgtatcgtcaggcgctgggaatggcaccacgacaaggcattaatgtggattcacttgcacagctgctctcataaaagctacacgattcagaggtaaccctaactatccgcaatcccaaccaaagtcatgttcatgccgctgtcctagtctggacaatcatctgtcactcatccaacacagttatatacagaatgcgcagtcccagcaacagtgtagattacagcaggcgttctctacctggactcatgattggatttcatttctaaattacatcagagctttcaaagattgaaatacacaaatctgcactacccaagcctccttgcctgtacgggaaacaaatcagaagagcatttattgggaactgacacgtcaggcctcacaggtgctgggcaggaatcacagaggcttgctctgccctcgtgccgaattcttnnnnnnnnnnnnnnnnnnnnnnnnnnnnnnnnnnnnnnnnnnnnnnnnnnnnnnnnnnnnnnnnnnnnnnnnnnnnnnnnnnnnnnnnnnnnnnnnnnnnnnnnnnnnnnnnnnnnnnnnnnnnnnnnnnnnnnnnnnnnnnnnnnnnnnnnnnnnnnnnnnnnnnnnnnnnnnnnnnnnnnnnnnnnnnnnnnnnnnnnnnnnnnnnnnnnnnnnnnnnnnntgatcggcaaccgcgggagaggcgttgcgtatgggcgtctccgctctcgtcatgatcgcgcctcggtcgtcggctgcggagcgtacactcactcaagcgtataggtatcaagatcagggtacgcagaagcattgacanagcagcaagcagacgtaaggcgctgctggttcaagtcgccctgcacacaanacagtcatcaagtgcgacgcagcataatcaggtccctgatctcgggcc

SEQ ID NO: 124814 - DNA, 1287 bp, Homo Sapiens
  misc_feature (53)..(53): n is a, c, g, or t
tttccatcccggtgtgcctagtttggaacaatcatttggtcatttcatccaancccagttattttccagaaatgcgcagtcccagcaacagtgtagatttccagcaggcgtctttaacctggactcatgattggatttcatttctaaaattacatcagagctttcaaagattgaaatcacacaattctgcactacccaagcctccttgcctgtacgggaaacaaatcagaagagcatttattgggaactgacacgtcaggcctcacaggtgctgggcaggaatcacagaggcttgctctgcatcatgtcttccgttaacctgaagctttgggtttattgtgtttggcaaaccactcgtcacttttatctgctgccattgcatcatccaacaatttgcttccctctggatccatcttagaaagttctcgaaatgcttcatccccgacaaagcaaatttcatgtccgtcagggtcggccagaatgaccacctgtactgttgctttccctggggtgtccaggctcaccaggggagtcagaatcttctggttctcccttttcatcaagtcttctaagtctggcaactctttctgggggcaagagaaggcaattcttccaaaagctgctgcatggtccaccccacccttgacgccctgtagctccagcttacactggttatcagcatagcccagcaaagccctttgcttttcttcatctttttcataaattttcattcccagtagattacaccagtagttcaaggacttttgaagatcagacactgctagagttacttttaatacaggatctgactgaggcagactgcgattctgcaaatagaacttatatcctcccggggcctcggtttcaaaaacaccttctgcaacttccgtcagtggccactccagcttcctggcgttgctgacagcctggctagaagcgagcgtgattcccataaagtcattgccaagcttgtagtctccgacgccataattgtaagtcagttctgcgacaaaatgatcatcctcaggcccaaatcccaccattgttttactccatttcccatcataaggcccattacaggcagctttgcagccttcttcaaattcctcatgccgcagaaccttcatccccaggacgtcccgatagaaacgcgccgtctggaagcggtttcccactttgaatacgaagtgcagagctctgcgagcagccatgattcccgccgcacgcagccgtcacccccggccgtaatggccgaattcccgggcatatgtccggtaccgtcgactg

SEQ ID NO: 124815 - DNA, 1238 bp, Homo Sapiens
ttttttatactttcttccctcagtaagtattttattgagatttaaagcacaaaataggtgaacaaatcgggaggaaggtggtaacacaggaatgggaacgtaaaagtcaaagtaggcaggactcaaactggccataaaggcactacggcatgttcataaacaccatcaagtaaaagaaaggggaatcaagatgttctcacttcttttctgctccaccttaatactccatctagccactggtatggagcatgtcatcaactcattcttctcacaagctagcaagggaattaaacattttatcagtcaaccctatgctcaccaagtgagccaatgttacacagtgattttgtgcatccagtgactgagaactacaggcaaggataggccctgactgttaataaattggtcgtggctattactagaaaattatgggtgcaggcatttacctatacaatgacctgcttactgtggcagctaacaatatagtcaaaccagtctattaccatatgatgtcctattaacaagagagcccagttgaaggatgtttcatacttttagaaagcctaatttcttactgtaatatcctcccatccctcttttaaaaaggctgtagttcaaaaagcttttatgttctttccctgaaaacaagagaactttggtcaaagccaatttttaagagtcatcacttctgctgagtaggcaaaacaatgaactataacaacagacatcattttctttccttaaattctgaggtttatgctggaaaaataaacccatttctttataaacatctaattaaataaagtatcaaagaaaataagataatggaagaagcatccgccttttggggcactatattcctaaggttgggctttaagattttttaacaggaaacccaggagtttctgaaaaacaaggcctttttcacattaccaagaactcacagctactctgtgaatgccctagatatttgactcaaatttttcactcaatcttattaggtatatttctggattatttgaatctacaaaccaaccctagaatatcatgctttccagtcacacctgtggcacaatgagcagtgtacgaccatgccccatcacaatccaaccctttggtaccctacattgtgacacctcctagaaaggtattaaagctgagccaattaatctatattttgatttcagactaagattaataaatgcttttaaataaagtaacttttaaggtatctgaac

SEQ ID NO: 124816 - DNA, 635 bp, Homo Sapiens
tgttttggggtgctaatgcaacaatgtcttttattatgtatgcggttttaaaattatttcttgaatctctccatacacaggcaaaaataagtgtgttacttaacatactggaaattgcctaacttaatcattgcctaaagaagagaaaattatccccaaaacgtgcttaaccaggaggccaatgcatttgccgacctccaagaacatggagatgaacgtgatagacagactgtccaccatctgaaccttcattcaccaccattcgataacccttattcaggcccagatcagcagcacatttcttgccaacaatcattaagtgtccaagaagactttcatcatcatcttctgccacagaaatctgggatatatgtttcttgggtatcaccagaaaatgtgttggtgcttgaggggaaatgtcatggaaagcaaggcactcagcaggcgagagaggtggtgcccagtacctacccggtcatcctcaaaaatgattttggctggtatttccttgcggatgatcttcccaaagatcgtgtcgccaccaggccgagcgacctgagccttggcaatctcatctgccatctcggcctctctcccgcgcggcggccagaggagaggctcggaagaagggaccc

SEQ ID NO: 124817 - DNA, 1407 bp, Homo Sapiens
  misc_feature (82)..(90): n is a, c, g, or t
  misc_feature (145)..(145): n is a, c, g, or t
  misc_feature (431)..(461): n is a, c, g, or t
cccagcggggggccgatatatatttttattattctgcggccaagaggggcggaacacaaaaggggtgtggggtgtataacgnnnnnnnnntgtggggcgggagttttcacaggggtttttccacaccacaaaccccacccttttntgggagagggggcgtttctcccaatgttgtgcgcggcggagaaaaattcttctaagcagagaaattttcgcaccaccctcgttcgtttagaaaataaaagagcgccccaagagggccgccgggccgctaaatattttaaatattttcgaaggcccccgcccctgttggagcccctccccgttgggaataagtatccccccagtaaagggtccccccgcgaaggacgtccgcctctttggggagttttgtgctccaaaaaaaccacttcggggtttgcgcccccgcnnnnnnnnnnnnnnnnnnnnnnnnnnnnnnnaaattccccgagcccctttatgtccatgggcccggggtgttttcttttggggaaaacaggctatgggccccttttttcccttttaccctagtgggggccccgcggcgccccaatccagaaggggttttgaaaaagttttccccagggccccagaggcggcccccacaagggttttgccgttccccgcgcgcgttgccgttttgcccgttttgtggcgcgtttggttttggcgtggttttttcggtgcctgttccctcttccgttgatgccgtttgttttttttttttagccatgcaacaatgtcttttattatgtatgcggttttaaaattatttcttgaatctctccatacacaggcaaaaataagtgtgttacttaacatactggaaattgcctaacttaatcattgcctaaagaagagaaaattatccccaaaacgtgcttaaccaggaggccaatgcatttgccgacctccaagaacatggagatgaacgtgatagacagactgtccaccatctgaaccttcattcaccaccattcgataacccttattcaggcccagatcagcagcacatttcttgccaacaatcattaagtgtccaagaagactttcatcatcatcttctgccacagaaatctgggatatatgtttcttgggtatcaccagaaaatgtgttggtgcttgaggggaaatgtcatggaaagcaaggcaccggtcatcctcaaaaatgattttggctggtatttccttgcggatgatcttcccaaagatcgtgtcgccaccaggccgagcgacctgagccttggcaatctcatctgccatctcggcctctctcccgcgcggcggccagaggagaggctcggaagaagggaggaacccgcagagcgtgcggcgcgagagggcgcagccaagcctgcgcaggtgccccggctctggcgccccccc

SEQ ID NO: 124818 - DNA, 875 bp, Homo Sapiens
  misc_feature (68)..(77): n is a, c, g, or t
  misc_feature (644)..(665): n is a, c, g, or t
gagacggagtttcgttcttgttgccactgcactccagtctgagtgacagagcaagaccccatctcttnnnnnnnnnngtttaattgaacagcagattttatttctaatttgtttcttgaaattagtaatgataaatacctaatcttaatgagtctccagttgtagattatgctctgttgggattaagagtttccaaatatttgctcaaagggttgtgtttcaatgagagttttaagatttgatatttcagcttgacagtttgttatttaatggcaagaagtaataaattgcctgtgcctaagaaactttttttccttttccagcttcttggacacttaatgattgttggcaagaaatgtgctgctgatctgggcctgaataagggttatcgaatggtggtgaatgaaggttcagatggtggacagtctgtctatcacgttcatctccatgttcttggaggtcggcaaatgcattggcctcctggttaagcacgttttggggataattttctcttctttaggcaatgattaagttaggcaatttccagtatgttaagtaacacacttatttttgcctgtgtatggagagattcaagaaataattttaaaaccgcatacataataaaagacattgttgcatggctnnnnnnnnnnnnnnnnnnnnnncaacacacaacccaaatccaacaccatctactacccacaccccctcctaataaaacccctgtgccggccgctctcgccccctccaaaaccttccaaaaccatctccttttggcccgcggcccccccttaggaaaggggaaacttggtcataaccctgttccccagggaaaccccgggttatgaactaagcgctttgaattttcccccaat

SEQ ID NO: 124819 - DNA, 372 bp, Homo Sapiens
  misc_feature (185)..(208): n is a, c, g, or t
gagaaaaactcaacacacattggattttaatgagaaaataactgtatacttgcattgaatgcctcacaatcactctaaaaccaaagcaggataataacatttaagtggttaacatacacaggaaaaccagatacagagtataatttccaaacacagtattgctgcttttttcccctcctcccccnnnnnnnnnnnnnnnnnnnnnnnntaatttgggtaaagagcaacacaaaatcaaaattggcagctcactgaatgcttaaaattcaggaaatttgttctttaactaaaatggaatatattcaccatctctaacacttaggctacttttttttcaatacatagtttaattaaatccattctttagttggg

SEQ ID NO: 124820 - DNA, 1656 bp, Homo Sapiens
  misc_feature (578)..(608): n is a, c, g, or t
ttgactcgtgggccgtgcccctggtggttgcgtagtgtgctccgggggcggggggcgcgcgagaagtggtgtgtgtctgttgttcgtgtgttggttgtggggttggttgtctgcttttgtgcttttgctttatccgacctcctacacacacttgggattctgatgagaaataactgtatacttgcattgaatgcctcacaatcactctagaccggagcaggataatgacatttaagtggttaacatacacaggaaaccagatacagagtataagttccagacacagtattgctgctttgttcccctcctccgccctaatagaaagaaaggacaaagaataaataatttgggtaaagagcaacacaaagatcaaaattggcagctcactgaatgcttaaaattcaggaaatttgttctttaactaaaatggaatatattcaccatctctaacacttaggctacttttttttcaatacatagtttaattaaatccattctttagttgggaaaaaaaaggtttaattatttgtcttcagagacaagaatcaacactgttttagtgttccttgttacacttnnnnnnnnnnnnnnnnnnnnnnnnnnnnnnngtggacattgatctatatacggcttatatgtcattgtctagggtgagcagcatgcatgggtatgaagaggcaagtaaactgcattgtgtcatccaagtaaaacacagcacggcctcctgccactgacagaccctgtttccataatttctggatgagaaagccaagtcatgtcagtagttaatcagctctggaggaaagtgaacacctataaacacggcagaatgcaatacttccagaaaggcttttaacacctacagaatctaaacattttgtaagaggtggggttaacaagcttgtgtgctatttgggggtggggctgagcatcagaggcaaagtttttcgtaagcctctttctctcgatggattaggcaggaatgactttcctccaggggacggtcccatcttcagaaagttaaaagggtccatttgggatcccagagcctagcacggtgctatgtacaaagcggtggcccaaggtttcttgaatgaataaaaaactcaagagcacagagaaaatctggctctcccaagtaaactgtaatttacattttcatgggattataataggatcttcagtgagtggagcaagaagatagacagcagtaatccggaaggcagcataggagtaatagcaaaagttaagagatgtaggggccacagtgaaaacagctttgtgactgtgggagagtcccagaaacagtatttctttccttatccacacacggagcatggcccaagaacccccagctctagaactctgttattctttaagcaataagtgctctggttcaatcaactgtggtcaaagaccacttcatctgcctctaaagccattccgcgaatagtgtggcctcttaagcttttctcttagctgtacattctcttgtcaactgtaggtttcatgaagcacatggtttccttcaaaacagaacaaaaaactttaaggtaagtcataaggatggtttcctcttgtgaaaaatggggaagttagtctatatcatgtctatggtctctaccagatccatgagtcagagaaaacatgaagcgc

SEQ ID NO: 124821 - DNA, 1074 bp, Homo Sapiens
  misc_feature (45)..(58): n is a, c, g, or t
  misc_feature (71)..(89): n is a, c, g, or t
ttagggctaggtacgaggcctgggtggtttaattcggcacgaggnnnnnnnnnnnnnnactagtctcgagnnnnnnnnnnnnnnnnnnnggaaagccatatttgggtatatttgaagtggaaagtgtgtatgaataacagcaagggaagagcattcttacataggaggtatgcatcttcccctgagccttgagaacctgtctcaacacgggggcggggagggggcagctgttggttctttctaaccctctccaggtcagggaacaaatttgcccctaaacttccacaggaggcactctaccctctgggccagagctgggcacagtggcaaagtcagattagaatttctagagttctaacagcgattcccaaccatttcctcaacttttcttctgtttcccacatcccaaggcagggaaatccctgctgcctctcctcatcttctaactcagctgtaaggcggtttaggagccgctggcagaatcaatggcatcgaccaagggagggggggtggcaagggattttcctgtgcttaactactgatcacggctaagtggaaatcctataaacacgagcggaaatcaatggaggctgcttagcggccaggggagaggggcggcccacagattgcatctgacggatgagcgagaggaagcagccagggagggctcaaggaagagtagcttagaggagggggaagaaacaggcagcgctggagagagaggagtcactgtcagaagggacactgaggggagaggcacagtgggcccaggagtggactccgttagacccagagttcccttccccttctaggaagtgacacccctagcccaggcagtggtcaggatcttcagtctcctgtggcctctctctggagctgttcacttctagcaggcgctgatagtcttgaggccggaaacgctgtagatacacaatcagcttggctggtgctgtctcctgtgcaggcacacctcaaagcccgagagtctcctcgcgggacccacagagggggaagggagcccacgccatacactccctcgtgccgattcaacacccagcctcgtactaagcctta

SEQ ID NO: 124822 - DNA, 1063 bp, Homo Sapiens
gttgggccacaattgtagttccgctgtgagttccttatactccgtgtggctcctaagacacctgctgctccaggacatttgagctcccatccactatcctctcgtcgtcgcagccagtggtcagcctgcatgaggctcagctcaggggtgtcatagtaggtgtctcggaaggtgacccggtactccagggtgcccccctactcctgcagcctgtcctctgtgccaggccctggaaggaactttcgttccacggtcaatcaagccttgggccatgctacctgcaatttggctgaacaaacgtttgctgagttcccaaggatgcaaagcctggtgctcagctcctggggcgtcaactcagtacagaacccctccctggaaaaacttatgaggggcacactgtgtcgcaatagtctctagggctactgcccttttctctctacctcggtgacattaaggccccgtcggtgatattttaaggctctgacagtgacaggtctccagtaaaatcccttccactgctgctgatgtcctcaatccaaagagacccctagaaagcaggccgggtagcgggtgtcctttcaacgcccccctctctacaccttgccaccccaggaggctactggctcacgacccgggaggacctgccctttcctgctacactaccggccagcggaacttcaggtctcacctcaaagcccgagagtctcctcgcgggacccacagagggggaagggagcccacgccatacactcgcgaggaatgccgggagcagttccggatcccggacctcggcccgaccctccgcgcgcccggcaggtcccggcaccagcggccatattacgcccgttgtggcggtgccgagagcaggccagggctcgagacacgcgctatgtaatgggaggccgcgacccccgcggtggccaggggagcgaggccgccccttgcattctgctcctcattgttggccccgcacggctcccgggggctggtacaggtctcatgcctgaggctgagccctcgtgccgaattcgccacccaggcctcgctacaaatccaccgtata

SEQ ID NO: 124823 - DNA, 1225 bp, Homo Sapiens
  misc_feature (143)..(257): n is a, c, g, or t
  misc_feature (945)..(945): n is a, c, g, or t
  misc_feature (978)..(978): n is a, c, g, or t
  misc_feature (1029)..(1029): n is a, c, g, or t
  misc_feature (1060)..(1060): n is a, c, g, or t
  misc_feature (1066)..(1066): n is a, c, g, or t
  misc_feature (1122)..(1122): n is a, c, g, or t
  misc_feature (1125)..(1125): n is a, c, g, or t
  misc_feature (1169)..(1169): n is a, c, g, or t
  misc_feature (1213)..(1213): n is a, c, g, or t
ggggggaacccaagccccttgtcaagtccccggtttttcttgggaaccaacgttaggccacatttccctttccttttgggggcccgccccccaaaggaaaggttttaaaaaaatttttgaaggggcgaaggggggccggcaannnnnnnnnnnnnnnnnnnnnnnnnnnnnnnnnnnnnnnnnnnnnnnnnnnnnnnnnnnnnnnnnnnnnnnnnnnnnnnnnnnnnnnnnnnnnnnnnnnnnnnnnnnnnnnnnnntatttcaaagtgtagtacacatttattttcatttgttattttctttcatagcagattacagagaaagaaagaaacctctggtttcatgttctccctggaaatattagcattgatacccattttatcctccaacttatgggggaagggaaagtaaaagtgagggagggaagagccagaacctttgggtgagggcaactttgggtcagactgccaggctacagagttaagggaagctggccccagaacagtcctgtggcgattctgttctacttcctgcattccagcagacttgacactgggctcccagacgatccaggacacaatgcctcactgttatgcacacgtatcagctgctctggtaggcttgacaagggtttgctttaaatgaagggtttgctaatttgggaccctccctccatatagttggcctgtgccccccagagcagacattccttgtcctgcatacctgacacagcttgtgagttccctgcatgtacaccagcattacaaatgatcctgtaaaggtgagactttcaactaggcacaagctagaagacgaggccagagcagctttcatagtaattagcagtgtgggaactgagggtccagtcaacacagcagaggacttcaggtgatgaggggccgtccccaggtggagtgcagggcctaacctagccttaacctccanaggcacctgggggtggggagacagctcctcccnctacacaggaaagacaaaagggtcttttactactcttaatcctatcccctnattccccttggggttgggaacgtgcgtggtngactantcaggtaactggcttgagaaattgcctcgtgcgaatcttggctcgagggcaatccntanatgagtctattaatcgtatctgtcaagctgttctgtgtgaatgntattcgtcacatccaacacatacagcggacataatgtaactggngtgctagatgac

SEQ ID NO: 124824 - DNA, 812 bp, Homo Sapiens
gtgtaaataccaatgccaaatgccaatcccagactgccctctcccccccaaggctgcgttgggagttacagtcacctcccggcaggagtctgacttggagttatacaccatcagcttcaagggcttcccctcatgagactcgatgagcgtaaagaagtcctcggactcctggagaatctggtccgaaccaaccacatagtctgtgtaggggcgcaggccggcaagggcagcaggtgaagatggttccacatccagcacatgccacacctgctcactggccctgcggaagctgcagaagcgcacactggcacccagtaggccctggccgccccacatgttgctgggcaccacctccacctcgcgcaccctcatggtcttcatattgaacacctccagcttcacgggcttctccacattggctttcagtagtgccttcagggtgtcattctccttgttcagcctcgagtgcccaatggtgatgatgaagtcaaagtagggctccaggcccgcctgctgggctggggagttctcctgcaccccgtggaggtggaagccctcggcgccgcctgcgggctgctcagcgctgacgcccaggcccatggcagcggctccgctcggcacccaggtccagtcccgctgcgcctacccggaccgacccggcgccagtagcaccgactcgctctctcggcgctcgattcctgcgccttgtgacgtgaggcgttttgttcctcccactccagacactggacgctcctagcaaccggctagcagctcggtttccaaggactgtaacgccttcaaccgcccgccgc

SEQ ID NO: 124825 - DNA, 1025 bp, Homo Sapiens
ccccccttccccaatattttaggccccttcggggctggcggggtccctcccccagcctaaagttcaaagcagtttcgggggacaaccccatttttttggtgaggcctgcagaggtgagactgtcaggaagagtcagctgaggcaggtggtccgcctgggctttgggcacctgggctgtccaggaaggagacctcaaactctgacccagaccatgtagcctcaccaccccggttcatgagaactgctgctggagcagatgtcctctggccctgaggttgagacagctgtggtggtcagttctgtggaagagggcaggctgggccacacactggcattgctgttgtccaagagagaaattcccgacacgtccaggaagcctgggtccataactcgctgcactggaggtgggggctgaagaggagtctccatgaaatggggaagtccatcagggtctggagcactgtggctgggactcccaggcccaggaaggggatcctccatggaggagccaggtgcctgcagcagggcctccatgtagtcactctgcctggaacctgtctccagggaaggagagtcctcgggggtgggtccaggtggtagagcatcaggtggtggggcaccaagtggtagagcagaaggtggtggggtgccaggtggcttcttgtggtagctggggggctgagttgggatccggtgtagatacccatagccaatgccacatcccagactgccctctccaccccaggctgcgttgggagttacagtcacctcccggcaggagtctgacttggagttatacaccatcagcttcaagggcttcccctcatgagactcgatgagcgtaaagaagtcctcggactcctggagaatctggtccgaaccaaccacatagtctgtgtaggggcgcaggccggcaagggcagcaggtgaagatggttccacatccagcacatgccacacctgctcactggccctgcggaagctgccctcgtgccgaattcgccacccaggcctcgctaccttga

SEQ ID NO: 124826 - DNA, 747 bp, Homo Sapiens
  misc_feature (712)..(712): n is a, c, g, or t
ttttggtgctggttaggttttattttaacaggatgttttctcttatttttcaaaatatcagttatatcaatattagaagtgtaaacaggtacaaaatatacagtacatagaaacaattttcttaactagtctatcgcctaataaaagtatgcatgagggggctgaatgaatgggcactgccaggtccctccgtctgcaggggaaacaagaggaccagtggctgcttcaacaaaacaggaatggatatttgtgtggtaggaacagcactgtggtcgaatcaagaaatctgggcccacctttatgatgttagatgctggaatgaacaagccacttggcccccaaacccagcctcgcgagctgtgccctctgagagtgcacacattaaggaggctggggcacaggggaggcggctgctacaagcagaagttcctttgaggcctggtgactggactcttgtcggtgtgggacaaatattttaagagggaaaacctggaaatctctgttcacccacagtgatgttccagtagaatgaggcatctcgcctgttgctcttccccactcatggcacgccacgtgtacccacagtgagaggctgaggtgtgtcccctctgagcagtttgcacctctaaaaagaaatccctgtcctgctgcttcccaaggtcacagtaatgatcaaatgagatgcattttgaaaataagaaactacacacanagtgaacaggagacagaagatctcacggagtggga

SEQ ID NO: 124827 - DNA, 1090 bp, Homo Sapiens
  misc_feature (842)..(851): n is a, c, g, or t
tttttttaatgaacttaaatgtttagaatggtaagttcacggctccctaaggagtgttccttttggattgctctgtttggctccctccctgaaatcctatagtcagccactggtcccctcagagagttttacctctgatctttggggtgattctttgttcatatttatctgattggctttgttcttccaaaagtgtctgcacaggactgctaagagaacctaggcaagtcatttaatttttctgggcttcagtttactcattagcttcttttagttcccagatgctattactggaaagaataactagtaatggataaaaacctacataaatatttcctattttgccatcaaagtgctgggttcattttggtgtatttggcatccaagtacaaattaacagtttcccaaaatcctgattctttgacttttttatcttgatgatggaaaggaaggacacgtttacttgctttagtttctttccccttaactacccacttgctgagaggggtaggagcagggattggctttagagaaacaagatacagtgtagattagctaatgtttgcgcttaacacaacttgtcctgtttaacttacctgagggttctgcagcctaccgcagtaattttagttctagctgttttcagatatattgccttgtatcttcgttctttcgtctcctatcctttttagaaatttatcacctgtttctctttcagcctgacttacaaaatctaatttttggcctaaaaatttcccctagcttggtactagtccttttatttctgcctgtgattatattttaaaattaaacttaaatgaatctaattcattggatatatnnnnnnnnnngtaagtggcttgctttgcttactctggttttccatcctcattcctggatataatcaagattgcagtaggctaacaatcttatgctgaaaacaagaatgaaaaacataccatcttttcaagttactttggacccatagagagaaagtggattggtacttaataccttccctgaatttaacagaattgatgtggactgtacataaaatatgttgaaaaataaaactatttttttggcaaaa

SEQ ID NO: 124828 - DNA, 812 bp, Homo Sapiens
gggccacctgaagcaggactttttcccacactgaagtcaccaactgacagcagaaacaggtcccccatctttgggatatctcccagttctgctcccagtagaatgtctaagaaatctttgaatgaccagtgcaatctgtggaggttatacacttggaggaagggacagcacacgctgatggtttgcagtggtgggaagaccatctgatccagaggcaggaagataagtaaaatgacttcttagagccccttcctgctttcccagctcccctcccccatctcaagcatctgatcccagacctatttcagaatctcctatctctttgctcagtggaagcagtgatatgacatgatgtgatctcatttgagggctaaataaagccattgtgtgagacccagccctggcctctcccctgcaccatttcctgagctcaagaggctaagggaaaatgggaggggggctaggagagttaatctaatggaaaaagaagcaacacgatgatgggacccccagtttgaatttcagacagtggaggagggaatattgctaggagggagttgaggaagccttgttaaacctcatctctttgagggacagaataaaaagtattggcatcatagcatagccatttagaaacaagttctagggtgggttggaaaatctccaagagccctgacctcatcttccacctcagcaaccatgacctgaaacctcagcgtgaatttgggggatttttcagtggaacccttgcccccaaatgtcgaccagcccccaaatgtcgaagaattttcttcttgccaattttgttgttt

SEQ ID NO: 124829 - DNA, 1356 bp, Homo Sapiens
  misc_feature (981)..(1007): n is a, c, g, or t
  misc_feature (1019)..(1128): n is a, c, g, or t
  misc_feature (1132)..(1132): n is a, c, g, or t
  misc_feature (1134)..(1161): n is a, c, g, or t
  misc_feature (1163)..(1163): n is a, c, g, or t
  misc_feature (1219)..(1273): n is a, c, g, or t
gctggtaccgggtccggaattcccgggatatcgtcgacccacgcgtccgcccacgcgtccgatccttggatacctggggccatttaagaagctaggggaattaggccacaacaccccctgggacatccgaaagctacaccacagatgccagtggttcatgccttcttcccgcaactttaggaaaatttatttatttattgtttattagttatggggggagaggggagatttaaaggaccagggacatgggaaccaagccatagggatcagagggccttgtccttgaacactactggggtatattcaggctcatccacgcagctgctgggttcttgccctaacggccctcccctgcaacatccgtcttggaggagaggctgcagccacagcaccctactgccctttaaataaaggagggctgtgggcagggccatgtccctttctcctctcccctcaacctcttactgctgttctccctttctccgtccttcatggaagccctgggagataacctggcttcctggagttgatggaataaaggttggggtggccataatggtttgttgggggtgagggaaaaaacccacagggaccagaatgttctgttgttcttttgttttcttttttgtaccaaagtcaactgcacgtgttttatatttttaagagatcgtaggcaattagagatcgaagcctcctatctccacatctctgaagaagttgaggggtgggggagagaatgacttctgccttcatctgcagtaacggggggacctatactgacctcttccccagccatttagaaacaagttctagggtgggttggaaaatctccaagagccctgacctcatcttccacctcagcaaccatgacctgaaacctcagcgtgaatttgggggatttttcagtggaacccttgcccccaaatgtcgaccagcccccaaatgtcgaagaattttcttcttgccaattttgttgtttannnnnnnnnnnnnnnnnnnnnnnnnnncctggaactccnnnnnnnnnnnnnnnnnnnnnnnnnnnnnnnnnnnnnnnnnnnnnnnnnnnnnnnnnnnnnnnnnnnnnnnnnnnnnnnnnnnnnnnnnnnnnnnnnnnnnnnnnnnnnngaanannnnnnnnnnnnnnnnnnnnnnnnnnnncnttgggggggccgcccctcggccccctccaaaaaagttttttttagaaaaccttttnnnnnnnnnnnnnnnnnnnnnnnnnnnnnnnnnnnnnnnnnnnnnnnnnnnnnnnccaaaaagcgttggtttccccaaagagaaaacccccggggcacaagaaaaaaagagggggtgtggtgggatttcccccacacc

SEQ ID NO: 124830 - DNA, 1307 bp, Homo Sapiens
ttttttcaaagggaaacacgttgagctcttaaagctccagtgcatttaattccttagaacaccacagaatcatggcagcttttcatgatgccagaaggtaaagcacgggggaatacagaggtggagtcctgctttttttcaaatcctaccttctattacagggaataaagaagagagaggcaccagcttcttctcaaacaaaggaactgagtgtaactatattaaaattttagcattttccaataaagtttattcaatcttctttaattagtgatttaagatggtctaggtgatgctctcctatgaaggattctgcttgattcaaagcttttattttcaccaaaataagaattatttcttcgacttcatccctgaattcacttctagataatttatgtgcagactgcaataaaaactgaatgaagttttctagctgtggaatagatgtcctcatggcagaattttcaaaccatttttctggtagacatgctgctacctggttgcactttttaaccacatctggcccaggtgtggcattgagaagtgctataataaggtaacgatttagcagcttccctagtcctagttcttgcaaggtgtcatctgtaaggagtccattccaaagaagaatattgcggaaagagctttaggcctgaccagaactgtctttcttggaactttgaatgaggtgatgttttgttttctacagcactctttggatacagaggaataaaaacatcatcttctactgcctttttcattcttgaaacaatggatttaagtaaatcctgtctgcttttactaacttcattttcacaagtggaatgttcttcaagaatcactctgcaatgtgttattaaacttgttgtctgtgaggttgacaaaggatcccaaaggaattctacaaagtctgtaagtcggggaataattgttttgttgatgattgcagacaagacttttttatctgaactactttccttctttgaatcttccacactgctatccataaattcttctacagatttgaaccatggcatctcttttaaacctgtggattccaacttaagaggattccaatcaatcaactgaactcgtattaggggatttaaaagctttggtatgcataaactaatgaaagcttcataataggagtcaggaaacttttctcgccattgctgaaatttcaacaaaatattctggatgttacaaaaatcatcttgcacttcttcaaaaactttcttctgtttctgtaaaatgtcaccttggcttttttggaagtcaatcatctctgctgaaggcagttcccc

SEQ ID NO: 124831 - DNA, 1163 bp, Homo Sapiens
ttttttatttgggcctctcttatataatttgtcactacttataaaaaacattctgttgcaaacagtggtgttgcattgaattgaactttggcaatgagaacacagcacacagctcccttttcaaaaagggtctcaaccccagtgtgtatttttgtacatcaacatttagaatacttatggcagataagtaaggcatgtcactgtgtccttcagtaacctctctcagtaactggtttctttatccctaacatgaattcatttctcctttgaagtcatttattattttataaattgagaacaaccacaccaccaaatgtcacaccttcttataaagtgtgaacaaggaaggtcatgtttttgtgggtattttgtcagacttagaggtttcatttcagggcatagtcaaaggcatcatcctcccaactacccacttgattatgtatttcagatccctccgtgggggccttcttctgacagagaattctttgaggtacgcagtagtgcttttgtcagcacagactgctaatctacatcttgctgcgttctgtttgctgaggttgggcttattcatttaacacgtaccaaccattatccagaggcaccatggagagttagtcatggaataaagcactgtccttgcagatgaaaaaagtctccagagcagacttctgacaggaaaggtttagatgctggagagttgaagaggtgtaagaagagatcgtgccctcatttttcacttatttttttggttattcatttataataaaaggttggcattgatatggtacaacctgcaaattacttgcagttctgagtttcagataaaacattataaaacattaaattcaatacatactgctcctttgaaatttgggtaaaaaattgtacaaccgtatatatagtcatttttgtattttttctatgttgtgaaaaccaaaattgtaattttataagtctttgattcactaaaattatataatttaaatgtattttttgtatatttagaaataaggagtccagagactacgcttaactttctatgcatgcatttgaaagctgtttttacctgataatgtagtaataagttgtattcataaaatactgatctgtgttgcatttcaaaataaactggtgtgtgctctgcctggatttgaaatacctaa

SEQ ID NO: 124832 - DNA, 1049 bp, Homo Sapiens
  misc_feature (811)..(811): n is a, c, g, or t
  misc_feature (818)..(818): n is a, c, g, or t
  misc_feature (877)..(877): n is a, c, g, or t
  misc_feature (909)..(909): n is a, c, g, or t
  misc_feature (933)..(933): n is a, c, g, or t
  misc_feature (937)..(937): n is a, c, g, or t
  misc_feature (941)..(941): n is a, c, g, or t
  misc_feature (957)..(957): n is a, c, g, or t
  misc_feature (966)..(966): n is a, c, g, or t
  misc_feature (968)..(969): n is a, c, g, or t
  misc_feature (1000)..(1000): n is a, c, g, or t
  misc_feature (1002)..(1003): n is a, c, g, or t
  misc_feature (1030)..(1030): n is a, c, g, or t
tgcaggtcagaggctgtttctttatacaaaggcagacaacatggacacctcagcatgctgctgcagttcatgggggcccatcccaccgcttctggggagaggaatcggggtgggggcgcccgcagcaggggagagacactacacaggcctgggaccgccaagcacaccagctgcgagctcctgaagggcagacacatggacacacggacactgaaaccacgagcacggcacagccacagggaggaatggtggagctggggacagacatcggcagctactgccaactgctgccctcttctgccacgagttccttggcgaggagccttgtccgtgttactaaagagccacgtgactttatctgatggcagaacgtctcgctttctgcatctgtaagctgggccagtacaccgtactccacagggctgccgtgagtacagatgagactgaaacaggggcattgatcaaagtacccaacacagagcctggcacatagaggtgttcaataagtaacttttgtcaggagactcttagggaggaccttcagaaggccaagtgagatgacttccctagaaattctctcagggcatggggaccctggaggactccttggagcctgcagcccctggtgtgcccaaggccccagaatacaccgtgccagggctgttcacaggcgtggggggctggatgcccagggaggtgcccgcagaagctgggtagacactggaggaggtggggtttggacaaagtggttctgcacatagcacaagccggaggcaggctggtacggaggcaaggtgggcatgtgcccggnggtgcangagggcaggaggcagcttctgacactggcgtgctgcgtctgggaacaaggtggcttggngacaggtgagggtggcactctgtgtggggtangagcaggcacgggttcagttctgnatgnacangaagaaatgtcttcancgagtctgnanngtcatgatctgtgctgaggttgcccgcttcnanncacagctgggagtttctgtactgtccnatacaatgggaaaagtacc

SEQ ID NO: 124833 - DNA, 854 bp, Homo Sapiens
tctgatcgaggcttcagcgccactcgctctgagaggtcgatggaatagcagtaggtgaggccataggccagcccgatggacagcccgcagacattactgaggaaagaggtctggggaatgagccacgaggcacccagcaggagccacggaaccaggactgagggcacaaccatgccaaacaccagggcccgcctcatccgagaacggacggtggtgactcccagcatggcaaaggccactggggtgaaacctctggcatcctccacttcccccagctttgacagtgatgacacagcctcgaatgacaggaagatgatagcggagaagatggcgaagatcacggtgaagaagcagtggcggacggtgcccacggttctctcgaaattgccagcaaagcgccagatgatgatagcgccgcagagcagggagatgggattctcgtagacaaagatgtaggttaccagcctgtaaactcactgggcagtttgagggttaattaagtgtaacagcttcggggtggattgagtgggtgtcacttaacactctgtgtgccagtctcctctgctgtaatcctgacccctccttccatagtggcttgccagttgcgaagggcctcggacttcagcgtgaggcccgagggcgccaggggctgctgcagcaggaacaggcgaggcccggaaaccagcagcgagagcagcgcagtgaagaaggtggcggatggcacctcgggacacaagcaccagctgcgacacccgggccccgaggccgccatggccgccgtcgttcccgcgccccgcctcgacgccgctgcccctcgtgccgaattcaacacccagcctcgtacctaggcctta

SEQ ID NO: 124834 - DNA, 1514 bp, Homo Sapiens
gagaattgtgaccttgggacagacaaccgcagttactccaactgctgccctctttcgcccacgaggtccttggcgaggagccttgtccgtgttactaaaagagcgcacgtgactgtatctgatggcagaacgttctcgctgttctgcatcctgtaagctgggccagtacaccgtactccacagggcttgccgtgaggtacagatgagactgaaacaggggcattgatcaaagtacccaacacagagcctggcacatagaggtgttcaataagtaacttttgtcaggagactcttagggaggaccttcagaaggccaagtgagatgacttccctagaaattctctcagggcatggggaccctggaggactccttggagcctgcagcccctggtgtgcccaaggccccagaatacaccgtgccagggctgttcacaggcgtggggggctggatgcccagggaggtgcccgcagaagctgggtagacactggaggaggtggggtttggaccaaagtggttctgcacatagcacaggccggaggcaggctggtacggaggcaaggtgggcatgtgcccgggggtgcaggagggccaggaggccagcttctgaccactggcgtgctgcgtctgggacacagggtggcttggggacaggtgagggtggcagctctgtgtggggtaggagccaggcaccgggttcagtttccggctctgggctgccctcctctcggctgaagaccctgagacgtacttgaacacggatatcctcctcatcaggctgaaggggaaggtctgatcgagcttcagcgccactcgctctgagaggtcgatggaatagcagtaggtgaggccataggccagcccgatggacagcccgcagacattactgaggaaagaggtctggggaatgagccacgaggcacccagcaggagccacggaaccaggactgagggcacaaccatgccaaacaccagggcccgcctcatccgagaacggacggtggtgactcccagcatggcaaaggccactggggtgaaacctctggcatcctccacttcccccagctttgacagtgatgacacagcctcgaatgacaggaagatgatagcggagaagatggcgaagatcacggtgaagaagcagtggcggacggtgcccacggttctctcgaaattgccagcaaagcgccagatgatgatagcgccgcagagcagggagatgggattctcgtagacaaagatgtaggttaccagcctgtaaacttgccagttgcgaagggcctcggacttcagcgtgaggcccgagggcgccaggggctgctgcagcaggaacaggcgaggcccggaaaccagcagcgagagcagcgcagtgaagaaggtggcggatggcacctcgggacacaagcaccagctgcgacacccgggccccgaggccgccatggccgccgtcgttcccgcgccccgcctcgacgccggctgccggtcctctgcatccctacatcccggccgtaccgcc

SEQ ID NO: 124835 - DNA, 1760 bp, Homo Sapiens
ggtaccggtccggaattcccgggatatcgtcgacccacgcgtccggtctgtggcctagaagacctcatcagcccccgagaggaggccttgcattacctcactgggacctgtttgggggccatccctgcggtccaccctctgaacccccagcatgtttgtcctgtttctcaccattgggttaaggggtgccgagcactagctagacttccacatagtcccaccccaagtgggcggcagtgttcctggcatgaccaggattcctgtgaaagcaggagcagcagcaagccgtcccgggcctgcctttcccatcctttggttctcctttccagtctgggttcacaccctgaaaagggatgggtgtgtcctctgagcactctggcatttgtcattgctgagcccatatcagtaggtcctgggacttgacaaagtatgtgggaggggaaggaaggacagaacttgactggctccatttcatggaccaactgatcaattgccagtactaagccactcattgttatggcttcctttttgaaaaccacctgtctcaaggattcaggtttctgctcacatccccagctgatgctcaataaaactcagccaggagcatatggagatgctgacagccaggtaatgggtgagactgtggggtcccttttcctctaaagcctttactctgaggataaggtcacaaagtagggtgtgacttgaaagtatcgtgaccatgtggcccaccagcagcctttccaaaggggaactccagagacatttcataatgcaaacagcactgttgctttaagaacaaggcctttggaggtggctaaacttgcacgcacgtgtgtgaaaagccatcccatcttctgcctccagttggagctttcagctgttaaaacagtcagaaactattgattcttccctttaggaaaaaatgctcaggcagaacggggtacatccacaggaggaatcggacgagaggatgtgacattcggtccaggagagaaagagcagtttctgttaaagatgtaacaaatggatttccaaagtctacatgacattcacttttcaaacttcccaccagttgaatttctttttttccttaagaaacaggtgatgtcttggaaaacagctccttatgtctctctgtgcatctccattttcctagtctctggagtctcaaaaagagtggcaaagcactttacagtagtaactgaggaatcagagtctctgcttcagcgatatctagtttgtacagttgggtgatcttttgtaattcctaggaggtaatgcatttttaatgttttctgaagctttgtaagtgtgagagagggacaagaagtgcagttctgttctggaattccttattgctttcaacggacactctttgtgaaaaatccaagtaatattttagttcaaacttgatcttgagccaaggcccactgccacctctgggatgggagtcggacctacataccaagtgacaagttcaccttaacatctgcttccagaatggctttgattcagccgtgccaggcaacagaacagggtcagactcctgctctgttattggcttgaagactaggatcccaaaggggttggaggcagggaatatttgaaaattcagactggaattccaggccaaaagctcaagaccaccagcctctcctcctgcctggaaaaataagcctttgtgaaagactgatttaccatgtacaattgtgattgtgaacgttgttgagtaaacctccagactttctctaaaaaaa

SEQ ID NO: 124836 - DNA, 1497 bp, Homo Sapiens
  misc_feature (1381)..(1415): n is a, c, g, or t
tttttaaaaggtcaattctattttattggttctgagagggaggattcacccagtggatccttttccctacactctcccctcccccaatattgaggctctctcccaactactgcctattcagcattctctatctaaccctccttccccttctacttcctatactatcctacccctggccagcagtaccccaaggccaggccctcagctgtgggggcgtgtgctgagcaccaagcagagggagctgagcccggcgccagccttctccagttctgagcaggacacaggtaccagggtgacatcagagagcttctgcagtgcctcctggctgttgggcagatccccacctccacggtgcaggaggaaagggggcacaccaggcaacccaggacgaagaaagagacagtcagcagctgcgtcatctgggagggtcagggaggcatatgggtgatctgtcagcactgccattgcccggacagccttttgggcagcgtcgctgctgcctgccacaacagtgcgaggtccccccatgccgcagagaccgcgcaggtgggagggacccgagactggcacagtggagacggcgaagtcccggaacgtgtccgccacgatctcagctcctcggtgattggtccatttggagaggcctacgaaaaactcccggccggtgaagagaacgtcagtgccatccagcgtcgcgttctcgtctcctatttccacaattcggagccccaggtcttgcagggctttgcggactccatcgacctctggcctacgagcggggctccagggccgcgtgattagggccgtgtccccttggatcacggccgtgtcgccaagcagcggtcccagcggcaatgactcctcaggtggcagttctagcagctgtagccccagtcgttgcctcagtttacctcccagcaccccgtgctccctttgagctttggccagatccagagcgggaaggccagcccccgcaccttcccccgacgccaggctctctgggactccccggatcagggcatgggagcagcggcccagcccctcccccggcgtccccatcccatccacacagactccccctccaaccgctcggatttcttagttttcttgtttcttcacctgtctccagcggccacccccactcctgtcgcgctgtgatctcggctggggccccaccccccgaggacagagttggtggagaagggagtccccgtcttcaagcctcggggactgggagctctggcttttagcgggggtccttgtgtaggcgagctcatatactacgatggggcaggggcgcgacggtctggcggctccggggcattgtctccccggccgtaatggccgaattcccgggcatatgtccggtaccgtcgactgnnnnnnnnnnnnnnnnnnnnnnnnnnnnnnnnnnncgccgcttcctcgctcatctactcgctgcgctcgttcgttcgcttatgaccggagcagcgccctatagtgatcttacattct

SEQ ID NO: 124837 - DNA, 1282 bp, Homo Sapiens
ctggttatactaggtcgcgctaggggcagcgtgaccagccaggtcggagagaggatgcttaactccttaggctcgaactcctcccttcctacccacctctctcccttctcgttcgggtattcaggacttccattccccagcccctgcctctccagctttctccttctgtcccataacccctgcgggtcgcgggctggacttccagtccctgcggtagcgagcagctgagggttaagggggcggggctgctgcatttttggggagtgagcgcatcctagtggctgccaagaggggcgcccgacagggacctcacaagcccccaagcaggggcaacaggtgttttggagattagagaccctagccttgttcctcaggctcctcttaaagaatctgacccctgagggtgctgggtagagtgaggtcgacaggagcggaaggtctggagtgggtggggcggagtgggagggacgcctagagatggcaggaggaagacctgggcgctcttaaccacccccaacgcccttgtctgcatgtctttttctctgtctcctccttttctgtttcttctcccagacaggtgaagaaacaagaaaactaagaaatccgagcggttggagggggagtctgtgtggatgggatggggacgccgggggaggggctgggccgctgctcccatgccctgatccggggagtcccagagagcctggcgtcgggggaaggtgcgggggctggccttcccgctctggatctggccaaagctcaaagggagcacggggtgctgggaggtaaactgaggcaacgactggggctacagctgctagaactgccacctgaggagtcattgccgctgggaccgctgcttgtgcgacacggccgtgatccaaggggacacggccctaatcacgcggcctggagccccgctcgtaggccagaggtcgatggagtccgcaaagccctgcaagacctggggctccgaattgtggaaataggagacgaagaacgcggacgctggatggcacttgacgttctcttcacctggcgggagtttttcgtagggcctcttcaaatgggccaatcaccgaggagctgagatcgtggcggacacgttccgggacttcgccgtctccactgtgccagtctcgggtccatcccaactgagcggtctctgcggcatggggggacctcgcactgtttgtggcaggcagcagcgacgctgcccaaaaggtgtccgggcaaatggagtgctgacagatcaccatatgcttcctagacctccagatga

SEQ ID NO: 124838 - DNA, 703 bp, Homo Sapiens
  misc_feature (158)..(168): n is a, c, g, or t
acccgggattaatgagatttattgtttacagggggcgggcgggaatggggtggaaagaacaaacaatgggaaaggggagagttgccactcctccgattatagtattttgtgtagctctgacttcacgaacagtgttgccgtttcatatacataaaggnnnnnnnnnnnctaccaaggatggaggaaaaatcattaaaataaaatactgtcagaaccatataaatttcactacatttcacatatactgaagggaggagggaaaccagtattcacccagggaactttatatatatctttttaaattgagatatgattcacacaatattcacccttttaaagtgcagttcagtggatcctgtatattcacaaggtcgtataatcagcgctatccaattccagaatacattcatctttctaaaagtaaatgtcagactcattagcatgcactcactattcttccctctcccagctcctagcaatcactgatgtattttcagtctctatggatttacttattttggacattgcatgtaagtggaaccatattgtgtgtttagcttctttgttagcatgatattcttaaggctcatccattcacgttgtagtctgtatcaatacttcattcctttttatgcctgaatccagtccactgtatgcataaacacactgttcactcatcatcagatgatggatatctggggtc

SEQ ID NO: 124839 - DNA, 640 bp, Homo Sapiens
gcaagttataaaatgtttattgatatacattttgtcttttataaaacttccgttggccacattgggccactgtgcaccacagtgccagtccccaggtggccagggcggagccagtgtccactttcgggtgggggctggagccaagaggctgtccaggagctgcccagtgggtcctcatggcctgcgggatacctcaagtgctcccggaggcagcctaggactggctcgtcccggagtcagaaaaggcaggtcaactacccaaggcggccaaaggcccttcctgtctccagagccttgacataaccagaaatccccccatcaaagtcaccaaatgactcgacggggggaagggaggttgtttgcagaaagacttagctacaaggcatgtgaaccagaactttcttccagacaccatttccttcacatttgctcactgataatgccttaagaggatcgaatctctggaacagccctgaatggcagggatgaggctgctggcctggtgctggctgggacacagtcaaggagggctgacccaagaggcagaggtggctaggctgggtgttgacctcctctcttttaccaaccagcctagggcaaggaggggccccaccacctgggggcaacttctgtacaagag

SEQ ID NO: 124840 - DNA, 1272 bp, Homo Sapiens
  misc_feature (361)..(384): n is a, c, g, or t
agagtaatgtactaacatttttaatacagtctgatcagatcaattcacatcacaaggtcaacctgggcttgctcacatgtgacacaactgaggtacacaatgtccctacctgccggctgtcccaccttcctggttcccaacagcattgaaaccccctacttccctgaccagactggcattttttaaaattttgcataaaactatttcttccatagacttcaaacaatcaactagccaagttaattatggtacatctaaacaaagtttaatactaaccctaatgtgtgactgcggtttacaaagagctctgtatcacctgggatagctttcagtagcaattcactacaactggtcctaaaannnnnnnnnnnnnnnnnnnnnnnntagagaattaaaacccaacagcatgttgaatggttaaaatcacgtaagaactgaaatttggggtgggggtgtcctcaacagctgagcttgtcctagcagtgaaaatgctcgcctccaagcagggctcagaaaggtctggagccctccaggcagagggctgagctcagggggctcttggaggacactcaccccatggtccatgggatgcttctggcttccttaaaaacagttgggcatccgcattgtataagtaggtggagaccctagtgtggttcttttgaaggatatgggaagggaggatgacgaactagagaagtgggaggggaccaaaatcactgaggtcccagaatatcatagatttgggtataggattggggtcactaagaattgagcaccaggaattccagcttcttcccattaaagaaactgggactggttttgccttggaggcctatgtagtgttttctgcccctgtcccataccaagtctcattgatatttctgcagaatatcagatgaaaatctatttctaaagaccattgggagaatgggtggtggagaaggagttggagtggggttggggggcagttaaaaatgaataaaaatctctcagctacagaacccatacatcacttccctccgcattcacagcatttcccagcagtccccagatggttgtttccgtggggacacagcagctgcctcatttcccttcaggccccatgggctgctggtcaacctcaggatctactaaagatgacgcaaatgccgactgaacatctgaaacccataggactcgaggagagacatgttctgctgaggagagaaaggtgagccagggcagggcccacctcgtgccgattcacacccagcctcgctacctagccta

SEQ ID NO: 124841 - DNA, 669 bp, Homo Sapiens
ttttggtgctttttcttttctcttttcaacctccaggtgaattcctgatgcggagatgagaccatgccctgaggggagtgatgaaggtgctagtacatgcagggctgtgcagggggaggcccactagctgtgccacgcagcccctccccgcttcccaccggctctggctcccctctccctggcgggtggagtgacgtctggcagcctgcaagcctggtccaggtgtgcggtggaaagatggagaggaatgtgcctctgggggaagaccttgccttcgccatgtcggcgccagcttgctcctcgtcctctgtgcctgagcttcctctgtgtccggctcctctgctaacctctgtctttcccattctgcatcttctcttcttcttcctctgcaccttcctctgctgaatggagctccttcaccagggatgacatggtgttggtgatggagtcagctgccaccagcaggtcattgcggaggtttctcctcgtaccttgtgcgaaggcctcctgcacgtctcccccgactccgctcagcgagtcctgcggacagtggggtggggtggagccggcagacgtggagcgcactggcatgggcattggccggccgtctccatgggtgggcgatgtatgtggtgactctgtggccttgggcttcagcaatttcatcag

SEQ ID NO: 124842 - DNA, 584 bp, Homo Sapiens
gtattcagaacctgtaggtttaatttcagaccctcgggatgcatctaaggccaatctgtgagccattacaacctccaaaaggcatttaggactaatctgatgatctttgcactgccaataattaaagatggcaaccaatgggctaaatggtaacaacactcatatccttacattcatagtatttctccccagtgtgaattctttcatgcatacttaggcatgaggaaagagcaaatgctttcccaaattctttacatacaaaaggtttctctctggtaggagttcacaggtggggtgaggaatacagaaattctttcccacatatcttgcatttacctttctccactgtgagttttcaaatgtttactacgatgggaagaagtaatgaaggtcttcccacattcaacacattcataaggcttctctcctgtgtgaattcttctatgttgagtaagcgttgaagatctattgaaggctttcccacattccttacactgatagggtttctctccagtgtgatttcgtatgtgtatagcaaggcccgtgtactgagtgaaggcttggccacattccttacattcata

SEQ ID NO: 124843 - DNA, 416 bp, Homo Sapiens
tttggacatgtaattcttatttatttttcaccctcaacaaggaagaaaggtctctccctcaattctgctcttccaatacttgaggataggcacccctaaccctccttcctccagggaggcctcagcatcagtgtctgtggacgtagtctctgaagagtgcttcagctgatggggaaggagaaactcaagacagagatcctcctagggatggcgtcactttcctgccaactttctcgttgcctctccttgaaagcagaagaagtgccagccctcagcttccgtcagatcttgggctcctagggccttgtacaagtccatggccctctggttccagtccaggacggccaggcggaattgggagcagcccttatccaaggccacctgtgggagaagacaacactaacttttctggggtc

SEQ ID NO: 124844 - DNA, 1085 bp, Homo Sapiens
tttttttcaggacatgtaattcttatttatttttcaccctcaacaaggaagaaaggtctctccctcaattctgctcttccaatacttgaggataggcacccctaaccctccttcctccagggaggcctcagcatcagtgtctgtggacgtagtctctgaagagtgcttcagctgatggggaaggagaaactcaagacagagatcctcctagggatggcgtcactttcctgccaactttctcgttgcctctccttgaaagcagaagaagtgccagccctcagcttccgtcagatcttgggctcctagggccttgtacaagtccatggccctctggttccagtccaggacggccaggcggaattgggagcagcccttatccaaggccacctcagccacctttttgattattttggaaccaatcccttgaccccgatattccggcatcacatagatatcctccagataaatggtgcgtcccttccatgtactgtagatgaaatagtatatcccatagcccaccacgcagggccccagtagcttcccgggcgctggaagaatctctgctaccaaacagtgatagaaaggattgtctccaaagccatctgctctcagggctgccgagattggagttgtgacaaagagatagagaaagaggacgtgggtgtatgcccagcctggagctgtcgcctggggaacccatccctcatttcctccccagcctccgccagaacctgggcgctgagcccccaccttcttcactgatcttcacctgatccgagagtttttcgaattcggctagctccggcctgcagtcttcacccgaatcagcctcaggatatctccacagtctccctccttggcctctcggatccgcacggaagccatccggatccccgctgtctgggaccaaagtcccagggcctcgcaaacggcaactagaccccttaaagggcctacggacttggatcctgaagagcctgagagagcggggtggcgggagtcgggggggacggcggggtagccgcggcctggtaagtggagctgggattccggcgccgtacgggaggagagagtaggccagcgag

SEQ ID NO: 124845 - DNA, 905 bp, Homo Sapiens
cagcatcagtgtctgtggacgtagtctctgaggatgcttcagctgatggggaaggagaaactcaagacagagatcctcctagggatggcgtcactttcctgccaactttctcgttgcctctccttgaaagcagaagaagtgccagccctcagcttccgtcagatcttgggctcctagggccttgtacaagtccatggccctctggttccagtccaggacggccaggcggaattgggagcagcccttatccaaggccacctcagccacctttttgattattttggaaccaatcccttgaccccgatattccggcatcacatagatatcctccagataaatggtgcgtcccttccatgtactgtagatgaaatagtatatcccatagcccaccacgcagggccccagtagcttcccgggcgctggaagaatctctgctaccaaacagtgatagaaaggattgtctccaaagccatctgctctcagggcttcttcactgatcttcacctgatccgagagtttttcgaattcggctagctccggcctgcagtcttcacccgaatcagcctcaggatatctccacagtctccctccttggcctctcggatccgcacggaagccatccggatccccgctgtctgggaccaaagtcccagggcctcgcaaacggcaactagaccccttaaagggcctacggacttggatcctgaagagcctgagagagcggggtggcgggagtcgggggggacggcggggtagccgcggcctggtaagtggagctgggattccggcgccgtacgggaggagagagtaggccagcgaggcgatcctctgtccgggcatagccccaccccctcccccggccgtaatggccgaattcccgggcatatgtccggtaccgtcgactg

SEQ ID NO: 124846 - DNA, 1023 bp, Homo Sapiens
ccaaatgcagaaaaaaagtctttattctcataataaaaataagtctgttctgtattttacaatatatttcaaatatttccactatgaagcattcattagtcccacatggtcaagaagtatacaaccttttccaaagacagagctgccgggagtgtgtttaggacacacacctcgtacagccgcacttcaccactttctcaacctcgtccacaaaggaggagccgtcagtgcattcgaaagagtatttccgccgcttgctcctcagcggtccacagcactgccctcctgcacacccacctctgcactctaatcgggacaccttcttggttgtttggcaagcagcatagccctgctgcttttggtaataatctcttatcctttcccctcgacaagagatttctcgatcacagctgtcccccgtgtatccactgctgcattcacagtagggctgccccagacctgaaagcctgcacttcccatgcttgcacttgatcgcctggcatgggttaaacagatcctcctcttcatcacagaggacacctccatggccctccaagcacttacagctgtaggagaacgcattgatgggcaagcaggtgccatgtacgcatttatttccaaggcaagggtcattggtccgttggtcacagagggggcccatccatccttcctggcactcgcaggtgaagcctgcctggctgctgggctggcatgtgccatgggcacacaccttcttgtggcatggctcacagccaggcaaaatgcctgtttgcatcggcaccttctggaagtcctgcagctcactgttgatgtaaaggttccggatgcagccgtggaagctggttccgttctgcccaggggcctggcgcagagatgccacgttactcttcctggcatgcctcctacatagagtggagagtcaaaattcagagtggactgctttgacaagttagtgatgattttggggttcccacccggccgtaatggccgaattcccgggcatatgtccggtaccgtcgactg

SEQ ID NO: 124847 - DNA, 840 bp, Homo Sapiens
  misc_feature (67)..(117): n is a, c, g, or t
  misc_feature (803)..(803): n is a, c, g, or t
  misc_feature (817)..(817): n is a, c, g, or t
cgggcagtgccatgctcgaattaaccctcactacaagggaaaaagcttgcggccgcatacacggtcnnnnnnnnnnnnnnnnnnnnnnnnnnnnnnnnnnnnnnnnnnnnnnnnnnncccagttagaaaacgttttatggacacggaacgctccactgtaacgggcaggcagaacacactcctttcccaggctcatcaattaaacagaaaacaggggagctctcctcaccccagcctggccctgtgctccccaatggcccctgcgaggcccctaccatggcctgcctgggagacacaaactatgacaggaacacactggactgatacagaatgaggccagacacacccatgcctgtgcctcccaagagcgaccccaggacagtggggcagacagaggtgtctacactggcagaaacaagggctggagccacacgtgatgctcggacacaaacggcacgcagctctgcagcctggccacacacccttcgcgtatgactccactcctcagggttcacggggctgtgtacagagactctctctgctgacacgatggccacacgcccttcgtgtatgactccactcctcagggttcacggggctgtgtacagagactctctctgctgacacgatggccatatggccttcgcgtatgactccactcctcagggttcgtggggcttggagactctgctgacatgataccacagacaattcattacctccccgcggctgcttcccgcatgccaaaggggacaggatcaaagtccttgtctgatgacaaaaactctacacgtgcacaatanaactaaaaaaatanaattaaagagctgaaggtggtct

SEQ ID NO: 124848 - DNA, 483 bp, Homo Sapiens
atgagcaactgtgcccagcctactcactcttttttatacatatcttaatagttgctcttacagccagttctaacataatatttctgttctgagcaaatcttaggtatcatacttcagcaagttcttcctaatttcctttatttgcactgtcatatatattaacatcagtattatcagcttccatcgataatcacagtgatggatacatcattcttctcaaggtatactcttgaggtatactccctcaatgccacccacctgctccataccaaatacagatcatcttctcaccaaataaaccacttgcccatgctctccagttgctctctcaaaccagtctttcaggtgctatcagtggctttgaatcaagattcaccctgatcttccccctctaccctttcttagcaacaaagctctttaattaaaacttttcattcccccaaaatgaggacacccacttcgtccgatcttgatgtcacattt

SEQ ID NO: 124849 - DNA, 748 bp, Homo Sapiens
aaaaccgctttattcaggttggctggtagtcacagactggatcatgtatacagggcaacccacccctaggcaaagccctcggcctctcccacctcccccacgtcatcactgagctgcggcagccagaggtgccagccaattccgaggagaattgggtccaatagaaatatttacaaataaccagggggcaggtgtgcccgtgatcgggaatcgtgagggaactgagtaccagggggcccttggctcccaacagccccaggccctggggcggacttggcacaggacccaagagggagctggggcattggggggccggcagagggggactcctgggagagccttgaaggccctcaaaggggtcctgctggtgcaaaactctgcctggggccatgggtccgagggaaaggcccctcccttctgactcgccgtgtgacagggcagagaatcctggatcccctgcatccctggagggtcgcacagggagctgaacaggaaggactcgccaggaggtggtggggcatctcgctgttcccctaggcctccatgagtgaccctgcagagccactgccccagaagggccctcctgggttccctgggtcttcaccaggggagaggccctagttctgctcagaagattcaagtccatattcagggaggggtcactgtccacacccccaggtccacgtgagggatggtaggaggagggaggcgaggctggggggccccggctcaggacaggatgggggac

SEQ ID NO: 124850 - DNA, 955 bp, Homo Sapiens
  misc_feature (427)..(437): n is a, c, g, or t
  misc_feature (444)..(445): n is a, c, g, or t
  misc_feature (450)..(450): n is a, c, g, or t
  misc_feature (760)..(760): n is a, c, g, or t
ttttttaaaaccgctttattcaggttggctggtagtcacagactggatcatgtatacagggcaacccacccctaggcaaagccctcggcctctcccacctcccccacgtcatcactgagctgcggcagccagaggtgccagccaattccgaggagaattgggtccaatagaaatatttacaaataaccagggggcaggtgtgcccgtgatcgggaatcgtgagggaactgagtaccaggggagaggccctagttctgctcagaagattcaagtccatattcagggaggggtcactgtccacacccccaggtccaagtgagggatggtaggaggagggaggcgaggctggggggccccggctcaggacaggatgggggacaagcaagcaaagcaaaacactggactccacagaagctggtgacaggannnnnnnnnnncccgggnncccancatggtccctgccccagtgttcagggcggttggccccttggtgcccagggccaccttctccgagccaggtcaccgcaggggtctgaaagggcaggggtgggtggggcttacatgctgagcaaggggtggtggaaagagggccgacatggtgtgcaaggcggtctcggggatggggcacgggtggacgcaggcagtcggtcccggtggtccggcggctcctcatgcatctgttaatctgggggggttgggcgggggatgggcacaacctagaggtgcatgctctggtcaccgaggcttctcactcttgctngcttgggggcggcggctgcgcgcgtatggctctgcaaagcagcgggttccctggtgctcccagtgggccctgccgatctggcccgggcattcttatgtggtcttcagtccactgtaaatgttccggtgatgtgtccgcgttcacaaatcagcggtatatgtccctgggctatgtgtacaatatttttgcctgccg

SEQ ID NO: 124851 - DNA, 859 bp, Homo Sapiens
tttcgtaggagtcgtggccgtttatgcaccgtacgtctaagcagcgtcatgttatccttttaccgatatcgcagcctcttatctcattccatggttcccgtccatctctcctggttcccgagttccgttcttgagatcttccacatctcctgcccaagtctggaactgttcctttcttcctctcttcttcaagcatcctctgccgctcttccacctcctgctgccgtcgctttagagcttcagcctctcgttctgctttagagaggaacttgggcttagcctcagcttcttcctcagcctttttcttggccagaagctcctccagggataatggctgggccttaggcttcttatcaccatgttcatcctcttcatccttcttagagtctctgtccttccgagatttaaagtcttttcctcgaccaggagataagctggatcgtttacggtccttgtcccgtctgtgcccatccttgtctcgatctcggtccttcttattccgatcccgctccttatctcgttctcgttctttgtgccgtcgttctctttctgcagatttggaacgggaacgagagcgagaacggctgcctcctcgacgtctatcccttgaacgatgccgctttctatctttagatggggaagacttccggtcccggtctctatcccgctctctgtcaggagtccgtgatcgcttcctttcctccttggaaggtgatgcatcacggtcctttttgtcagccagctctcctgccatcaccctgagtctgaaccgcccaacgcggcctcaacgtcgcggagccgtcgccatctttcccgtttccctcgtgccgaattcggcgcgccgtcgacttcatactct

SEQ ID NO: 124852 - DNA, 3269 bp, Homo Sapiens
ttttttttaacagtcttaatattcatgtatttattctcagaacatacaaacttatcttctcagagaatagaaaacagagatttcactcagtgacaaagatggacacagccagttcaccgtgtccccccatctacttagaaaatcccctgggggaggggatgcctagagcatacagcaccccttggtgcggggctgtgcacaggtctaaagactctcaacttcctttaccatccaaacaggaaaacagctgtccagatgacagtaagattccactgtctgtaatcctcatggtgccaggtctcctggggcatctagggcaatgatgctactgcagtttatgcagttacacagtcaagtctgtgccaaaggaggtcccatccggcggccaggtttctgttcagtctggggagcaatgccaactggctgcccccatagcctggcatgagctgatggcccagtgcaatcccaaagcaaagaagggcagaactgggccaagaagctgtggtaatttgctctccctgcctccgacagcgtcgtcctctccttttgcagccccacacgcaggcctcctgacctgagggtctgggctagggagttggattgttttcctaagcccccatatcccaagagtgaggacctggaaagagggatgtgagggttctgaaaaacaggcatcaggcagctttggagatgccctcagcccacaggaagagtgctgtgtcaggcaaagatggtctcttcccggcgcttcttggtgaggatggtgcctggcttatgctgggcatctgggtggttggctagttcggggggacaggaagacactgggctttccaggatagcttgcttcagctcgtagaacacagcagagtcctctttttgtgaggaaggtgatggccaccccactcttgcctgctcgtcccgtgcggccaatgcggtggatgtaatcttcaatatttttggccatatcatagttgacaaccatagacacatcttggatgtcaataccacgaccagccacatctgtagccaccaaaatatccttggccccagccttgaggttggacaacgcaaactctcgctgctcctggccttttccaccgtgcagtgtgcaagcattgtaccccatcttctccagggatttggccaacacgtcgcagcccttcttctggttgacaaaaataatgatgggtgggtcaaagccttgctccaagattgccagcagctttttcctcttgttctgactctgacatgaggaagaccttctgttccacacgctcatggggcttgcctgcggagccaatgtacaccacagcaggtcgccgaagatagctcctggccagacgctccaccgctgggggcatggtggccgtgaacatgactgtttggcggtacttatgttttcccgactcaaagttggccagcatcttctcagggtcctcagcctcatccgtgtctggcttctggttgctgacaggcatgtgctccaggatcttctggacatctggctcaaagcccatgtcaatcatcctatctgcctcatccagaaccacataggtacagcggctcagcaccaggtagcggttctccagcacatcaatcaaacgcccaggggtagcaatcacaatctcacaacccatgcgcagcctgaagccctggtcttctctggagatgccaccaatgacagccacagtgcggatacctagcggtttcccaaacttgatggtctcttcctcaatctgttgagcccactcacgggtgggagccaggatgatggcataagggccttggtctgactcttcgatcctgtcaattttgggaagtgtggtgatccagaccagcagagggatgaggaaggctgctgtcttgccactgccagtctcagccacaccaatgatgtcacgattctgtagcccaatgggaattgcctgacgctggataggtgttggttccttgtagccacacttatcaatgacctccaagatgtgtgggggcagagaagagtctttccaggatcggatgggattggggatcttgccacctttggtggtgatgctgtagtcctcacggaagatccgccagtccctgtccgtcatctcatctaactttttctgagaccaatgacgatcatcccagcgctgcttggcttccttcttacgaagtttgcggagtcttgcctcctcctgctccttttcttccagggttcgcctcttctccattaggtctccatagaaacgtgactgctctcgcttctgctgcttgaggtcaatgcctgcaatgaagcctcgccctaacaactgcacctggtgccgttctttgtacagggggttgtagtcaatggatgtgtcctcagatgcatcccactcaaaaacaaatttccggtcattgagatgtctcgttcggcgccgctttttgatgccacccaggtaacgctccttaatggcatgcagttccttgctcttatccttctcttcccggatcttctgccgcccttcctcatcctcatttccattggtctcccgttccatcctctccctgcgttcccgacgttcccgttcctgaggatcttccaacatcttcctgcccaagtcttggaactgtttccttttcgttcctctcttcttcaagcagtcctctgccgctctgtccacctccgtgctgccgtcgctttagagcttcagcctctcgttctgctttagagaggaacttgggcttagcctcagcttcttcctcagcctttttcttggccagaagctcctccagggataatggctgggccttaggcttcttatcaccatgttcatcctcttcatccttcttagagtctctgtccttccgagatttaaagtcttttcctcgaccaggagataagctggatcgtttacggtccttgtcccgtctgtgcccatccttgtctcgatctcggtccttcttattccgatcccgctccttatctcgttctcgttctttgtgccgtcgttctctttctgcagatttggaacgggaacgagagcgagaacggctgcctcctcgacgtctatcccttgaacgatgccgctttctatctttagatggggaagacttccggtcccggtctctatcccgctctctgtcaggagtccgtgatcgcttcctttcctccttggaaggtgatgcatcacggtcctttttgtcagccagctctcctgccatcatcctgagtctgaaccgcccaccgcggcctcaacgtcgcggagccgtcgccatctttcccgtttcctgtcgcggagatg

SEQ ID NO: 124853 - DNA, 947 bp, Homo Sapiens
tcatcaacattattggtagctttattaaatttgtttaccttctaaaaaaaacgattacaaaaatgaatacttcatttaagtgtaatactggctttatggacgtaccgtgatcagaaagtgaaattaaagctcatggatatgcgtgagaagagaatgggcgcagaggcacgagtccagtatcccacggagagaaggacgtgtagagagatgcgtggacccatctcaggggtcacgcattcctgggccaaggagttgcttctaagagcttaaaataaatgcactggctggctccagggctggacacacaggcacagagctcttgtaccgcttctcaaagctgcccaaagctgcgaccttccccctcagacacccacaattaattgtttccaatcagctttggttttgttttctctgcaatttacatgcaaacaccatctatctattcatccatccatccatccatcctgcttgtctcctttgaccagccaagccctattttgttttacgtacattcccttcactaaaaatcaaagcaagccagtctacatcaagccaagaaacctacttttctaaggagagaaaccagtgctttgccttctttaatgaacctgcgagctctcagcgctttctcttgctgaaatgtggctttaaagccttggaggctgagctcactggcctcgaaagggcagcgcgcgtatttggtttggagcgcactcctgatcacaaagcacatttttagaggcttggaacccttccctttctgttgctcaccaaggaaaaggcacaagaaagacaatgatgtggagattcttaggggaccaaaacaggccatgaaggaaactgtgagtgtctactggcaagccccgtttcccacaggctctgttccaggcagctccggaaagtctctaggttgttaaaaagcccagctggcccatgtttggttttca

SEQ ID NO: 124854 - DNA, 1728 bp, Homo Sapiens
tttttggcaacaagcaatcaaccagaacaactttaaacagacctttagtgactgaggtgtggtttaggacttcaaggttggatggcccaggcgggaaacagagtggagagctcagtaggccgtctgagactgctgctggcggtagccaccgcggcgcatgtagccctcgtttttgcggtagccgtccttctggtctcggaagtagcccccgtaggtgccctgcttgtggtcaaacacccgttcgttgttctccaccaggctgcccagcttctcggccagctgcagagccaggttctgctgggcagtgggctcagtgcggtgcatcaccactgtctgtgttggctggtccagggaggccatcagctcctcattaatgatcattttgctgatgatggagtgcacagtgggcagatccagctcaaacatgtctgacagcgtctccatgctgatggagtcatagacactgctgtaggtgaagaggtaggtcctcagtgactcttcctggatcttcctaaccagcatggtgcggactttgtcagcctcggggaaaaggtcccacactttcccattcatcttctcattgatgataaaactgtgacaggtcttccagtcacccatcttcatggccttggaggcagcgaccacatgttcccgcatggactcagggggacccagcaggggctgtcgctcgcccacgcgcagctggtggtggaactgcttgctgatcatgcgtcggcgggcatcgctctcatgggcggccatgtaggggatctccaggagcatggcagacaccaggtagacacactccagcagctccaggttgatgtgcaggtggaaggggacctgacggcgccgctccaccttctcctgctcctggttgcgctcctgcaggctgcgcagcagcaggccctggcccagaagctccttggctcggccactcgactggatgtccagcagggcgttgtgtgcgtccttggtcaggccttggcggaaggcacagatgcccagctgcaccatggtgcggttgtaaaggatctgcactggcgggtctgcatgctgaatgttgtcctgcaagtggctcatgagcatgaggtcgcgggcctggtaccagcgcgagtgcagagcatggtggtagatgtggcagaggatggcacatgtgcggatccggtctgtgcggtccttggcgtagatgtacttgcacagtctctccatcaacacagccgagtcctcgccctcattttctgcctggtcttgctcagactttgaggagccctcaggcggggtcagctgtcgctgatgggccttgtaatcaaacttgtagtaggtgtgcaggatgcgcagcaggtagatgcggcagacctcctcggtagtgcccttctcctccaggtagcgctgcacacgctcgatgatggcacacacctgggcctcatccttcaagtgctccacgtactcttgggagtgagggtcagtattttgcattattttggtaaattcttcatccattcgttccaccagagttaggatgcagccacggacacgcagtggctggtcagcgttgtgcaggttctcactctcttccagaatattctctccaacaaaaatgttgggatttgcaaacaggatatccatcagctcattgatgcagtccaggcactctcccccacatctctggctgtcatgtaggcctcgtgccgattcacccccggcctcgtacctagccgtaaattt

SEQ ID NO: 124855 - DNA, 915 bp, Homo Sapiens
  misc_feature (795)..(827): n is a, c, g, or t
cgcaactgtcgggtctgcttagctgtgaatggctcgaaatcacgttgtttttcggatcttcgacgcaagtgctcagagccttggcatgttctgttcatcttcttcttcccttccttatcttcccaaagctcattaagatagtcctctaggtcagccaggatgcggatatagaaccggtggacaccttctgttgtccacaatgcttttggccttcccatatgcttttcccaggagctcaacgtcgttccaggcacttggtgacatcacgaatcttcatggcattacggatggtccggataaggttggtcagctcctcaaacctcttgtccttggcactgcggacaactctcttggtatcttctgtcagtcctcgctcagcaacaatggctgtttgccatagttgcctccgacaggtttggtgacgagctcctccccggacaaggacgactcggactcgctgtccgaaccggtggtgaaaaaccgcgacatggcgacggcgcggaggtgctacggccggacctggaagggggtagcctcgttaaggctgggtctcagacctcactggagagaggtggctgcagcccattggacggtgaggttggctgggttgccccaggtcacggctggtccacaaccagctggccgaggctggtggccaggggaccacaagcagaaacccctcctgctggggtgctggggtgaccaaggttgtcaggctgggaaccacacactggggctggcccccggaccgtaatggccgaattcccgggcatatgtgacggtaccgtcgactgnnnnnnnnnnnnnnnnnnnnnnnnnnnnnnnnngtgcggccgcttcctcgctagataactcgctgcgctcgttcgttcggataaaacagcgatgcaccatatgaggtagatagtcttttgg

SEQ ID NO: 124856 - DNA, 800 bp, Homo Sapiens
ttacggctaggtagcgaggctgggtggtgaattcggcacgaggtgcaaatcccaacatttttgttggagagaatattctggaagagagtgagaacctgcacaacgctgaccagccactgcggtgtccgtggctgcatcctaactctggtggaacgaatggatgaagaatttaccaaaataatgcaaaatactgaccctcactcccaagagtacgtggagcacttgaaggatgaggcccaggtgtgtgccatcatcgagcgtgtgcagcgctacctggaggagaagggcactaccgaggaggtctgccgcatctacctgctgcgcatcctgcacacctactacaagtttgattacaaggcccatcagcgacagctgaccccgcctgagggctcctcaaagtctgagcaagaccaggcagaaaatgagggcgaggactcggctgtgtcgatggagagactgtgcaagtacatctacgccaaggaccgcacagaccggatccgcacatgtgccatcctctgccacatctaccaccatgctctggactcgcgctggtaccaggcccgcgacctcatgctcatgaggccacttgcaggacaacattcagcatgcagacccgccagtgcagatcctttacaaccgcgaccatggtgcagctgggcatctgtgccttcgcaaggctgacaaggacgcacaaacgcctggtggactccagtcgagggcgaccaggagtctggccaggcgtgtgggacgtggggagccacagacggaagtggaggcgagtcctccagaaatatgggggg

SEQ ID NO: 124857 - DNA, 959 bp, Homo Sapiens
  misc_feature (151)..(151): n is a, c, g, or t
gggccctttttaagaatcttaggcccagcgcggtttgtttccccgtcgttcctcccttgagtcggaatcggaaagatgtggaacctggtgtcgcaagtcgtcatcatctttcggaatctttctgagtcctcatcttcatcatccatctgtntttgaggaaacgtttgcgactctccccagaaggagcttcatgaatttcttcttcaagacaagttgcagcactgactccgtcctcatcctcatcctcatctggagagccttctgaatcctcctcatgtttctcagcatcttcatccgcagactgctcggggttctgcttgtagcttgtgatatgggactcgaaatcacggttgtattttcggatcttctgacgcaaggtgctcagagccttggcattgttcttgttcatcttcttcttcccttccttatcttcccaaagctcattaagatagtcctctaggtcagccaggatgcggatatagaaccgggggacaccttctttgtccacaatgcttttggccttcccatatgcttttcccaggagctcaaactcttccaggcacttggtgacatcacgaatcttcatggcattacggatggtccggataaggttggtcagctcctcaaacctcttgtccttggcactgcggacaactctcttggtatcttcttcatcctcgctcagcaacaatggctgtttgccatagttgcctccgacaggtttggtgacgagctcctccccggacaaggacgactcggactcgctgtccgaaccggtggtgaaaaaccgcgacatggcgacggcgcggaggtgctacggccggaccagctgagcccgcgagtcacaccgcagggcctgacagccctcgtgccgaattcgccacccaggcctcgctaccttaaggaccgttatagttactgccgtcgtttaacagccttgctttttgacaactgcgtcg

SEQ ID NO: 124858 - DNA, 1202 bp, Homo Sapiens
gcttgtgggcgtcctggttcagccttgcggaagggcacagatgcccagctgcaccatggtgcggttgtaaaggatctgcactggcgggtctgcatgctgaatgttgtcctgcaagtggctcatgagcatgaggtcgcgggcctggtaccagcgcgagtgcagagcatggtggtagatgtggcagaggatggcacatgtgcggatccggtctgtgcggtccttggcgtagatgtacttgcacagtctctccatcaacacagccgagtcctcgccctcattttctgcctggtcttgctcagactttgaggagccctcaggcggggtcagctgtcgctgatgggccttgtaatcaaacttgtagtaggtgtgcaggatgcgcagcaggtagatgcggcagacctcctcggtagtgcccttctcctccaggtagcgctgcacacgctcgatgatggcacacacctgggcctcatccttcaagtgctccacgtactcttgggagtgagggtcagtattttgcattattttggtaaattcttcatccattcgttccaccagagttaggatgcagccacggacacgcagtggctggtcagcgttgtgcaggttctcactctcttccagaatattctctccaacaaaaatgttgggatttgcaaacaggatatccatcagctcattgatgcagtccaggcacttcccccacatctctggcttcatgtaggttgccaggttggggttgtagtcatagagagaggcgatgatattgaacttgatcttgacaatgacgccctctcccaggttgttttccgctgcaatctgaaccagcagttgcagcagctcaatctgggcagcacgatcagttcccttcttgcctcgtgcctgtaggatctcattcagtttcttgataacaacagcatgggtgatctcagttcccttggcaaacatttttggcttctccttaaccaacggcactccgccccggaccctttcccactccccgccttcattgtcctcctcctcctcatccaggcgcttggatttcctgtcgtgcttcttcttagctttgtcctcccgtttcttctcggctgccttcttgtcctcatctgtggtgggtgcctttttaagaaatcttgaggccagcgcggtttgtttccccctcgtgccgaattcaccacccagcctcgtacctagccgtaaagttt

SEQ ID NO: 124859 - DNA, 2115 bp, Homo Sapiens
tctgggcgtgctgctctttgtgccctgtttgtcccggccctcggtggcgggcccctgtggttttgtgggcctttggccctgttccggtgggcccggagcttccgtcggtagcatgaggccacgccctccttcggtctgtgccctcagtggcacacgcgtgccagaatgcgtgtcgccactcactgagtccgcagtgctgtgtgcttcctgtcggcctgcgaaggcccgagcgcatcggcgcctggagcgtggtaagatctgcctgcgggtttgcatgctgatgtttgtccgtgcaggtggctcatgtgcaagagtccggggccttggtaccagcgcgtacctgcagacccatgtcgggtaatctggccagaggaagggcacatggtgcggaatcccggtgcggctgcggtcccttggcgtagatttacttggcacaggtctcgtccatcaaccgcagccgagtcctcgccctcaatttttctgcctggtctttgctcagactttggaggagccctcagccggggtcagctgtcgctgatgggccttgtaatcaaacttgtaagtaggtgtgcagaatgcgcagcagttaaatcggcagacctcctcggtagtgcccttctcctccaggtagcgctgcacacgctcgatgatggcacacacctgggcctcatccttcaagtgctccacgtactcttgggagtgagggtcagtattttgcattattttggtaaattcttcatccattcgttccaccagagttaggatgcagccacggacacgcagtggctggtcagcgttgtgcaggttctcactctcttccagaatattctctccaacaaaaatgttgggatttgcaaacaggatatccatcagctcattgatgcagtccaggcacttcccccacatctctggcttcatgtaggttgccaggttggggttgtagtcatagagagaggcgatgatattgaacttgatcttgacaatgacgccctctcccaggttgttttccgctgcaatctgaaccagcagttgcagcagctcaatctgggcagcacgatcagttcccttcttgcctcgtgcctgtaggatctcattcagtttcttgataacaacagcatgggtgatctcagttcccttggcaaacatttttggcttctccttaaccaacggcactccgccccggaccctttcccactccccgccttcattgtcctcctcctcctcatccaggcgcttggatttcctgtcgtgcttcttcttagctttgtcctcccgtttcttctcggctgccttcttgtcctcatctgtggtgggtgcctttttaagaaatcttgaggccagcgcggtttgtttcccttcttcctcctctgagtcggaatcggaagatgtggaacctgtgtcccagtcttcatcatcttcggaatcttctgagtcctcatcttcatcatccatctttttgaggaacttgcgactctccccagaaggagcttctgatttcttcttcaagaaagttgcagcactgactccgtcctcatcctcatcctcatctgaagagccttctgaatcctcctcatttttctcagcatcttcatccgcagactgctcggggttctgcttgtagcttgtgatatgggactcgaaatcacggttgtattttcggatcttctgacgcaaggtgctcagagccttggcattgttcttgttcatcttcttcttcccttccttatcttcccaaagctcattaagatagtcctctaggtcagccaggatgcggatatagaaccgggggacaccttctttgtccacaatgcttttggccttcccatatgcttttcccaggagctcaaactcttccaggcacttggtgacatcacgaatcttcatggcattacggatggtccggataaggttggtcagctcctcaaacctcttgtccttggcactgcggacaactctcttggtatcttcttcatcctcgctcagctacaatggctgtttgccatagttgcctccgacaggtttggtgacgagctcctccccggacaaggacgactcggactcgccctcgtgccgaattcggcgcgccgtgacttcatactctcccccccctaaacg

SEQ ID NO: 124860 - DNA, 929 bp, Homo Sapiens
  misc_feature (41)..(41): n is a, c, g, or t
  misc_feature (49)..(50): n is a, c, g, or t
  misc_feature (52)..(52): n is a, c, g, or t
tctcccgtttctttcggctgcctctgtccctcatctgtgtnggtgcctnntnagaaatctgaggcccagcgcgtttgttttcctttcttcctcctctgagttggaatcggaagatgtggaacctgtgtcccagtcttcatcatcttcggaatcttctgagtcctcatcttcatcatccatctttttgaggaacttgcgactctccccagaaggagcttctgatttcttcttcaagaaagttgcagcactgactccgtcctcatcctcatcctcatctgaagagccttctgaatcctcctcatttttctcagcatcttcatccgcagactgctcggggttctgcttgtagcttgtgatatgggactcgaaatcacggttgtattttcggatcttctgacgcaaggtgctcagagccttggcattgttcttgttcatcttcttcttcccttccttatcttcccaaagctcattaagatagtcctctaggtcagccaggatgcggatatagaaccgggggacaccttctttgtccacaatgcttttggccttcccatatgcttttcccaggagctcaaactcttccaggcacttggtgacatcacgaatcttcatggcattacggatggtccggataaggttggtcagctcctcaaacctcttgtccttggcactgcggacaactctcttggtatcttcttcatcctcgctcagcaacaatggctgtttgccatagttgcctccgacaggtttggtgacgagctcctccccggacaaggacgactcggactcgctgtccgaaccggtggtgaaaaaccgcgacatggcgacggcgcggaggtgctacggccggaccagctgagcccgcgagtcacaccgcagggccccctcgtgccgaattcggcgcgcctcgacttcatactctctcccgt

SEQ ID NO: 124861 - DNA, 864 bp, Homo Sapiens
atgggtgtgctttagaatctgagcaggcgttgttccttctctctttgatcgatcgaagatgtggactgtgtccagtctcatctcttcgaatctctgagtctcatcttcatcatcctcttttgaggaacttgcgactctcccagaaggagcttctgattcttcttcaagaaagttgcagcactgactccgtcctcatcctcatcctcatctgaagagccttctgaatcctcctcatttttctcagcatcttcatccgcagactgctcggggttctgcttgtagcttgtgatatgggactcgaaatcacggttgtattttcggatcttctgacgcaaggtgctcagagccttggcattgttcttgttcatcttcttcttcccttccttatcttcccaaagctcattaagatagtcctctaggtcagccaggatgcggatatagaaccgggggacaccttctttgtccacaatgcttttggccttcccatatgcttttcccaggagctcaaactcttccaggcacttggtgacatcacgaatcttcatggcattacggatggtccggataaggttggtcagctcctcaaacctcttgtccttggcactgcggacaactctcttggtatcttcttcatcctcgctcagcaacaatggctgtttgccatagttgcctccgacaggtttggtgacgagctcctccccggacaaggacgactcggactcgctgtccgaaccggtggtgaaaaaccgcgacatggcgacggcgcggaggtgctacggccggaccagctgagcccgcgagtcacaccgcagggccctgactcgtgccgaattcggcgcgccgtcgacttcatactctctcccc

SEQ ID NO: 124862 - DNA, 805 bp, Homo Sapiens
  misc_feature (54)..(54): n is a, c, g, or t
  misc_feature (61)..(61): n is a, c, g, or t
  misc_feature (73)..(73): n is a, c, g, or t
  misc_feature (181)..(181): n is a, c, g, or t
catcagttctgatacacagcaggtgattcagttcctggcaacattttgctctcntaaccanggcatccgcccngaccttttccactcccccttcatgtctcctcctcttcatccaggcgctggatttcctgtcgtgctcttcttagctttgtcctcccgtttcttctcggctgccttctgntcctcatctgtggtgggtgcctttttaagaaatcttgaggccagcgcggtttgtttcccttcttcctcctctgagtcggaatcggaagatgtggaacctgtgtcccagtcttcatcatcttcggaatcttctgagtcctcatcttcatcatccatctttttgaggaacttgcgactctccccagaaggagcttctgatttcttcttcaagaaagttgcagcactgactccgtcctcatcctcatcctcatctgaagagccttctgaatcctcctcatttttctcagcatcttcatccgcagactgctcggggttctgcttgtagcttgtgatatgggactcgaaatcacggttgtattttcggatcttctgacgcaaggtgctcagagccttggcattgttcttgttcatcttcttcttcccttccttatcttcccaaagctcattaagatagtcctctaggtcagccaggatgcggatatagaaccgggggacaccttctttgtccacaatgcttttggccttcccatatgcttttcccaggagctcaaactcttccaggcactggtgacatcacgcctcgtgccgaattcggcgcgccgtcgacttcatactctctcgccta

SEQ ID NO: 124863 - DNA, 576 bp, Homo Sapiens
gcagaggtagaagctttcagaaagccttttggggtaagtgggaaaacccttttgaaagccgttatgtccttttatttggtgtgatagatgactgggtatctctctaactctatttgctgacttcagcaaagaatcaatgatgagcttagtttgcaagaaccggttccatcacatggaacgggaacgtatgttaagctctagcagccaccttctgtcaaaactgtttgtaaagcaataaccataatcaggttatgaggtcccttggttgggggaaaaagtattatcaagacttggcacagcacatgaaaagcaacatgttaagtttctaggttttaagcaaacatctgactatgctattttcaactacatcataactcattatcatagttttggggtttggaattgtcaagaaaaccagcattccaacaatttggcctgtgcaagtctttgaagggagtgtattgttagtgttaatatcccgtataagcagaggcagaattatatgtaactttggtttgactgaaaataaataccatggactacaattgctataatctttgctttcagtgtaaaaac

SEQ ID NO: 124864 - DNA, 1431 bp, Homo Sapiens
  misc_feature (69)..(111): n is a, c, g, or t
  misc_feature (1218)..(1218): n is a, c, g, or t
  misc_feature (1419)..(1419): n is a, c, g, or t
gagttttagagaaatagtccttttaatatgacttagaaactgcttttctctggctttgtttcactcttnnnnnnnnnnnnnnnnnnnnnnnnnnnnnnnnnnnnnnnnnnnaatgagctctgctgtgcaggtggcttctccaagactgttgacagccttgcaggtgtacttggcatcgtcatccccgcaaacatcactaataattaaagagcagttcccgtcctcatcgtagtctatctggaagtggcgggactccctgattgactggtcatctttgaaccagacaacctcggggtctgggtatccttcaatcttgcagtcaaatctagcagcacttcccttccacaacttctaaatcgcgaatggtcttagagaaatagggttttacatgaggcttttcctcagcaacagcctcaaggaaagcttgggacacatcttcagattctagtttttctgcattgagcgggctggttggtgaccctgttgaggatttcctgccactgagccctgagatcattgccatagaggacagtcttccaatggctctcacagcattgcccgttttctgccatttccttcttgccatgtacttcttcatccggtccttggagagtttcttggcctccatgttcttggtatctttcattagccatggatgctgaaatcgtgcgtgcagtccaggcggtttttcatatctttcttcagcagattgctgatgaaatccttggcatcgtcggagatctcatcgaatgcctcgtcgtcgaagtcccaggtggctgaggtaacgttggccaaggtttcgttatcgttgtctcccatgaagggggaaaggccactgactaggatgtagcagatgaccccgatgctccacatgtctgtggcgtagccgatgggctcatagttgatcacttcaggagccacaaattctggggtgccaaagaggaccttcagagaccccgcgttctccagcctcctggccagaccaaagtcgatgagcttgaacctggtgcccgtcttgttgacacacatgatgttctccggcttgaggtccaggtgcacgatgccctgcttgtggatgtactccactccctccgagatctgccgcatgtacttgatgcactcacgctccgtcagctcaaagtcctcgtcaatgatgcgctcaaacagctcccctcctgacacgatctccaggaccatgacgatgttggccttttcttnaaaggcatccacacactggaccagcttagggtggtggaggcagttcatgatgctaatctcctgccggatattctctttctcttttgctgaatatgccttgaagaacttccctgcccagacttttcgagttttcttttctacaagtcgaaagacctgtccaaatttcccagatcctaatctctcctcaatgtcgtagaagtnagatactttttg

SEQ ID NO: 124865 - DNA, 663 bp, Homo Sapiens
  misc_feature (69)..(111): n is a, c, g, or t
  misc_feature (651)..(651): n is a, c, g, or t
gagttttagagaaatagtccttttaatatgacttagaaactgcttttctctggctttgtttcactcttnnnnnnnnnnnnnnnnnnnnnnnnnnnnnnnnnnnnnnnnnnnaatgagctctgctgtgcaggtggcttctccaagactgttgacagccttgcaggtgtacttggcatcgtcatccccgcaaacatcactaataattaaagagcagttcccgtcctcatcgtagtctatctggaagtggcgggactccctgattgactggtcatctttgaaccagacaacctcggggtctgggtatccttcaatcttgcagtcaaatctagcagcacttccctccacaacttctaaatcgcgaatggtcttagagaaatagggttttacatgaggcttttcctcagcaacagcctcaaggaaagcttgggacacatcttcttcagattctagtttttctgcattgagcgggctggttggtgaccctgttgaggatttcctgccactgagccctgagatcattgccatagaggacagtcttccaatggctctcacagcattgcccgttttctgccatttccttcttgccatgtacttcttcatccggtccttggagagtttcttggcctccatgttcttggtatctttcattanccatggatgctg

SEQ ID NO: 124866 - DNA, 484 bp, Homo Sapiens
tgttttgaaattctttaccttataaagtttatttggcttaagctgctggtcacaaagtcattcctgcactcacagcttggtaaggcagtggagggaacccagcagaactgcatgagatctccgggcatggaccgcctccttactgtggaccaggcctggtgccagtgctgaacactgcaatttacttcatctttacagaaatgttaggatagtatagcatttaagaggacaggctctagaggcagatacctggcttccaatctcactggctgtgaatctttgggcaggtgacttgagcctgggctgtgcctcaattccctcatctggtcgtcgcgccctctcctagccacacctgctgtcctgctcttgtctctccagagtcagtggcctttcccccttcatgggagacaacgataacgaaaccttggccaacgttacctcagccacctgggacttcgacgacgaggcattcgatgagatctcc

SEQ ID NO: 124867 - DNA, 496 bp, Homo Sapiens
  misc_feature (73)..(115): n is a, c, g, or t
ttttgagttttagagaaatagtccttttaatatgacttagaaactgcttttctctggctttgtttcactcttnnnnnnnnnnnnnnnnnnnnnnnnnnnnnnnnnnnnnnnnnnnaatgagctctgctgtgcaggtggcttctccaagactgttgacagccttgcaggtgtacttggcatcgtcatccccgcaaacatcactaataattaaagagcagttcccgtcctcatcgtagtctatctggaagtggcgggactccctgattgactggtcatctttgaaccagacaacctcggggtctgggtatccttcaatcttgcagtcaaatctagcagcacttccctccacaacttctaaatcgcgaatggtcttagagaaatagggttttacatgaggcttttcctcagcaacagcctcaaggaaagcttgggacacatcttcagattctagtttttctgcattgagcgggcttggtggtgaccctgttgaggattt

SEQ ID NO: 124868 - DNA, 788 bp, Homo Sapiens
gagttttagagaaatagtccttttaatatgacttagaaactgcttttctctggctttgtttcactcttcttcctcttccccttccccttcaccttcctccatcgtttccacaatgagctctgctgtgcaggtggcttctccaagactgttgacagccttgcaggtgtacttggcatcgtcatccccgcaaacatcactaataattaaagagcagttcccgtcctcatcgtagtctatctggaagtggcgggactccctgattgactggtcatctttgaaccagacaacctcggggtctgggtatccttcaatcttgcagtcaaatctagcagcacttccctccacaacttctaaatcgcgaatggtcttagagaaatagggttttacatgaggcttttcctcagcaacagcctcaaggaaagcttgggacacatcttcttcagattctagtttttctgcattgagcgggctggttggtgaccctgttgaggatttcctgccactgagccctgagatcattgccatagaggacagtcttccaatggctctcacagcattgcccgttttctggaaaatagacacgagggttggactcaggcgttgtccctggttccagctgggtagtgcgaggggctgcagggagtagagcccagccccagagaagcagctgttccctggaacaaggacctcctgagagccgaggttctgccagaggagcgaacccaaccttgctctgctcagcactgtcagtgtgtcagaagatatcgaagaatccggaccggtccagc

SEQ ID NO: 124869 - DNA, 742 bp, Homo Sapiens
ggttttttggggggccaagggcggcccacaaggaagcttgtccctggcgcacttccccccccggggcttccccctccttgttttttgttatgaagatgcccaagggtgaaagcagccagccgtgggtgagggtagggggtgtctttattgcacagtaccaatgtcaggttggggagttaccacctgaaaagctcctgttttcaaagagaacttgaccctgtcactcagatccaccaaaggggccaggatccacccctgggcggcccctggtccatgctctaggctgatggcccctgccaggacatctaacttctgccaggcaagaccagcaaactgttcaacggcatctggttcatgctgtggcatccacagccaccttagcaccaggcccatggaggggtgactaaggcaggaagagtagtcaccagccttccagggggctttcttcaccacttcccaaggccacaaagggcttcttgcacagatccccaggttgtgctagctcctgagctctggggcccccagggtcttggtcaggagcctccctctttcgcttgtgcaaggaagggctctcctcacccagccgaccctcagggaggccctggctccgcagacagacgatggctgcagcctgctccgccagtttcttggacttgtcccacaaggtagactgatacttttgttcagcaacggtgacaatagaggagaacaggcgatctagagggcgttgaaccgtttcacc

SEQ ID NO: 124870 - DNA, 2162 bp, Homo Sapiens
  misc_feature (107)..(107): n is a, c, g, or t
  misc_feature (303)..(312): n is a, c, g, or t
gggagaaagaaaatgcccatggtaaagggcagctgacaccaatacctggggccttggggttcagaaggcctggtgtgtaaccaccgtcctttcctatcactgagctnggagccacaacagtgacactacaaacgaaagatgggtttccagctctggagaacaactttcttatttctggcattccaaacaatttttcagtcccaagatgagttttgataaaatcagcccatagccctgacacaatggacagtacataactcagatttcattattttgtataacaaacattgtaagccagacttnnnnnnnnnnttattgctatattttccccacatccaatctgggaacatttgctttcatccactttttcgtatcatgtttagagttgtttttaaaaaaatcatgcaaaccaggattaatcttctccttacaaaagaattttatttatactgcactgattcattccttcaaacacatagcttctaacaggtggagttagaaaagcgggtgccacaaactatggtttaatagtatgcaggccctgtacctgtttatctaactatacctgaaatttgctgataccccaagccagctacttacactaaaggcatctctggggggcatcatctagatgaagtctttaacctgatgggaatatctggttattctacagtttaaacaggatgtttggcttatgcttttgttcagctgactggtgcatgggaaggattaaagcccatatctaactacagcaggtcttcaagcttattatcctgtcatgagttcataaagatgacaaactcatcatttgggagctataaggtcaaagtggccagaatgcaactgcgctgttacactgtgcaaaatcaagtcaactgtcttgtaggtccttggctgtctcttgttataacctcgaacacttaaaaaaggaaacctcaagtatgctgagataattatcagaatgttcaggtacctttgttcctgaatatcaagtaatagggctcatctctgtgactgcttgcgacaagcacatagggcaactcattaccaactgctcattataatgctgagctcttgagttcctgaggagggggtgggctctagactatcgagggctgagtcaactaggtgaagggccaacctgtacagttctaagtcttattttggttctgggcacatttcagttctgctccaagtccgctttgctccaattcagcgatgacagacatatatttgaactcatttggtctgaggttaaaggtctccactaacccgtaggtctctttccgatcagtagcgtagaagagctgaacttggttggcgatgcactgtgcctcagcaacattcagaaatgtggaatccatttctgcagtcatcagcactatgccctttttttccttaagttcaggatagtgatataaaatcagctggctggctgcagcttccccctcgggtctgaatatttataagtgcagtgaagtggagttcagtacctgtccattgtcctacaaaaaactcataaccttcccttcttggcagagcacatagaaatgttggacaggactgagcccggttccagatcaaatcaaacttttctgcaggaataactgcgtagactgtatcttttgctgcaaaatattgctgccaaatctgttttatttcttctgcagttttttcttttaccatctcaatgttaaagattgaactgagagtcttgtccttagtgaatcctctgttcacagactgtttccccaaggcatctgtcttctgttccacacatttgataaaatcaccttgcctggaatgccccactggctgcttccgaaattcactgcgtttctccaggcgggactcaaaagcagctgggtctgacctgcgcagcagctggatcttgtcgcggtagcggtcgtagaaagggttggcctggagctcggcctcggccccgaccccgctgctgtcggcgcccccctcgggccggcccgagccggggcgcactgggaagacgcgcagctgcgcgggtgacacgagccccaggcccagggcgcggctgcgcaccgcgcacaggccccggtagagaccggccacctgcaggaccgccggtcccgcgccacccgcagccgccaccaccacagcagccatggccgcccccgcctcctcctcct

SEQ ID NO: 124871 - DNA, 970 bp, Homo Sapiens
ttttagttcattggaaaaggattttatttcaccataaaaatgcaaactggaataaacaccatctttcctaacgcgaacgttacagctatttttaggtatttctgagcttcacttggagaagcaaacgattataaaacaagtttgcagcctgaaatctgtttgaaacattccaagtaaaaataatttagcaaaacagcttcttaaaaaaaccacacacactaacctttactagaaaccaaagcttttaaccaatcttttttatgcttaattccttgacgttgtaaaaagtgaatgtttttgaaggagcatcagaccattttgtaccactccccacataccgacaccttagaaagaacggcccgtttgagttttgatcttaaaggacttgtaccttcctcatccgtgactcaatgtcagcacgacgattcggcatcccacccaaactgcacttcctgatcagttaacattacaaacgggggggaaagaatcaccagggcaacgctttcttttcagtgccagtgtgactatggtggcccgtgcacctcctaggccgtgcacgcagggaggtcgccaagcagacacagaaatccccgtgtgggggaatgcagcagctctgccatcctcacgactgtcggtctgtgcaattttcctgactgagagaggaccggccgcattaaagctatcggatcaagttttaaaggactacgtgtttgaaactgaagtgccaagtacgctgcggtgagtggagaaagatggatctctaaagcatggtgtcttccttcctgccggcgggctccgtggacattcgtggctgcagaagggtcttggctttgcaggggtggacggagagcggccaaggagcggccaggaggctcgagcaggtcctggtctttcccggacaggccgtggggaggccgtgcccgtcattacctgttccagtactgcggtatctgctcgcgacgataccgtc

SEQ ID NO: 124872 - DNA, 1245 bp, Homo Sapiens
ttttttatctgttatgattttatttcttcaattgttccaatcacagtttctaatacagaaataaaactattcagcgtctccgttcttgcttcattttgtttcacagagatctgcatttctgagtttccaggctccaatagcagttctgttaagaacagacagccagtatcatcctgagcactgaggtatgctttccatggccgagacccagccctactcattgcgatggtctggatgttcactacttgaagagccatctggagggtgtcaggatggaattctccccgccaaggcaacacttgctgatgagcaactttaaggctaagccaagttttctcaaaataatcagcagtaagctggcgattggggactagcatgagggctccagaatcagggagttcttgtaccctctccttgttctcttcaggaatcaagggtcctgatgcggcaaaggatgaagttttaggaagctctgggtcacaacgctctgccccctggcatttagagatagttgcccagtgggctttgccatacactggcaccagtgtgttgaagtctgaggcccagctattcacaggtctttctgccggatcctccaaaagtccaagagtagggtcagatttagggctacacagaatccgcttaacttcatcaatgccaactaagaggaggcgataatagaagagacctcggtcccgtacagccatatctttttcttcctctatgcagtaatacaacaaacgtcctagcatgtcctggcactcagcaggtcgggagaggaaaaggcgcagcaaagcagtgagcagctccatcttaacagctggaaatgtttccgacttcacattctcaacaaagtcctctaacacataaggagcattaggaattctttccccatggacaccaagtagccaaataagtgcttgcttcccctcactatcttgaatgttctcttcacagccgggcagtgcctgacatacagcttcagtacactgaggacacaaccaaaccaggtctcggaaagtctgcaccaccactgtggtaatgtgctcttgtcagatagacccagcaactctgttaaaatctgtacacattgatctgtgtaagtcctggcaatgccacctatggcaaagatggcagcctgtgcaaagtccgcagacacatccgtgcagtaccctcgaagctcctctagcacctgcccggccgtaatggccgaattcccgggcatatgtccggtaccgtcgactg

SEQ ID NO: 124873 - DNA, 746 bp, Homo Sapiens
tttttggtttctgctcagttctttattgattggtgtgccgttttctctggaagcctcttaagaacacagtggcgcaggctgggtggagccgtccccccatgaagtacaggcagacaagtccccgccccagctgtgtggcctcaagccagccttccgctccttgaagctggtctccacacagtgctggttccgtcaccccctcccagggaagcaggtctgagcagcttgtcctggctgtgtccatgtcagagcaacggcccaagtctgggtctgggggggaaggtgtcatggagccccctaggattcccagtcgtcctcgtcctcctctgcctgtggctgctgcggtggcggcagaggagggatggagtctgacacgcgggcaaaggctcctccgggcccctcaccagccccaggtcctttcccagagatgcccttgcgcctcatgaccagcttgttgaagagatccgacatcaagtgcccaccttggctcgtggctctcactgcaacgggaaagccacagactggggtgaagagttcagtcacatgcgaccggtggctccctgtccccacccccatgacactccccagccctccaaggccactgtgtttcctagttagctcagagcctcagtcgatgcctgacccagcaccgggcactgatgagaaagtggctgtttgaggagcacctcccagccacctcggggacaggccagggtgtgcagcacactgtacgatggggaaactgg

SEQ ID NO: 124874 - DNA, 1232 bp, Homo Sapiens
  misc_feature (704)..(744): n is a, c, g, or t
ctgctcagttctttattgattggtgtgccgttttctctggaagcctcttaagagaagaacacagtggcgcaggctgggtggagccgtccccccatggagcacaggcagacagaagtccccgccccagctgtgtggcctcaagccagccttccgctccttgaagctggtctccacacagtgctggttccgtcagagcaacggcccaagtctgggtctggcggggaaggtgtcatggagccccctaggattcccagtcgtcctcgtcctcctctgcctgtggctgctgcggtggcggcagaggagggatggagtctgacacgcgggcaaaggctcctccgggcccctcaccagccccaggtcctttcccagagatgcccttgcgcctcatgaccagcttgttgaagagatccgacatcaagtgcccaccttggctcgtggctctcacttgctcctgctccttctgcttcttcttctccagctttcgctccttcatgctgcgcagcttggccttgccgatgcccccagcttggcggatggactctagcagagtggcccggccaccggaggggtcgaccacttccctgggagctccctggactgaaggagacgcgctgctgctgctgtcgtcctgcctggcgccttggcctacaggggccgcggttgagggtgggagtgggggtgcactggccagcacctcaggagcnnnnnnnnnnnnnnnnnnnnnnnnnnnnnnnnnnnnnnnnnttagtaccccatcttgtaggtctgccttgagtggctcggctacctcagtgtggaaggtgggcagttccggaatggtgccaggggcagagggggcaatgccggggcccaggtcggcactgtacatgaggtcgttggcaatgccgggcaggtcaggcaggtaggacggaacatcaatctcaggcacctggcccaggtctggcacatagaagtagttctctgggacctgctgttccagctgctctctcttgctgatggacaagggggcatcaaacagcttctcctctgtctctgcccccagcatcacatgggtctttgttacagcaccagccagggggtccaggaagacatacttcttgtacaggttctcggtggtgttgaagagcagcaaggagctgacagagctgatgttgctgggaagacccccaagtccctcttctcctcgtgccgaattcaccacccaggcctcgcttacctagccgaaatttgtt

SEQ ID NO: 124875 - DNA, 742 bp, Homo Sapiens
ttttggtttctgctcagttctttattgattggtgtgccgttttctctggaagcctcttaagagaagaacacagtggcgcaggctgggtggagccgtccccccatgaagtacaggcagacagaagtccccgccccagctgtgtggcctcaagccagccttccgctccttgaagctggtctccacacagtgctggttccgtcaccccctcccagggaagcaggtctgagcagcttgtcctggctgtgtccatgtcagagcaacggcccaagtctgggtctggggggggaggtgtcatggagccccctaggattcccagtcatcctcgtcctcctctgcctgtggctgctgcggtggcggcagaggaggggatggagtctgacacacgggcaaaggctcctccgggcccctcaccagccccaggtcctttcccagagatgcctggagggaaaaggctgagtgagggtggttggtgggaaaccctggttcccccagcccccggagacttaaatacaggaagaaaaaggcaggacagaattacaatgtgccggcccagggcgggcagcggccctgcctcctacccttgcgcctcatgaccagcttgttgaagagatccgacatcaagtgcccaccttggctcgtggctctcacttgctcctgctccttctgcttcttcttctccagctttcgctccttcatgctgcgcagcttggccttgccgatgccccagcttggcggatggact

SEQ ID NO: 124876 - DNA, 743 bp, Homo Sapiens
ggatcctgcacagctagagatcctttattaaaagcacactgttggtttctgctcagttctttattgattggtgtgccgttttctctggaagcctcttaagagaagaacacagtggcgcaggctgggtggagccgtccccccatggagcacaggcagacagaagtccccgccccagctgtgtggcctcaagccagccttccgctccttgaagctggtctccacacagtgctggttccgtcaccccctcccaaggaagtaggtctgagcagcttgtcctggctgtgtccatgtcagagcaacggcccaagtctgggtctggcggggaaggtgtcatggagccccctaggattcccagtcgtcctcgtcctcctctgcctgtggctgctgcggtggcggcagaggagggatggagtctgacacgcgggcaaaggctcctccgggcccctcaccagccccaggtcctttcccagagatgcccttgcgcctcatgaccagcttgttgaagagatccgacatcaagtgcccaccttggctcgtggctctcacttgctcctgccccttctgcttcttcttctccagctttcgctccttcatgctgcgcagcttggccttgccgatgcccccagcttggcggatggactctagcagagtggcccgggcaccggaggggtcgaccacttccctgggagctccctggactggagccaggaggtggggaacaggtcaaggaggaaaggctgctc

SEQ ID NO: 124877 - DNA, 1185 bp, Homo Sapiens
  misc_feature (864)..(944): n is a, c, g, or t
ctgctcagttctttattgattggtgtgccgttttctctggaagcctcttaagagaagaacacagtggcgcaggctgggtggagccgtccccccatggagcacaggcagacagaagtccccgccccagctgtgtggcctcaagccagccttccgctccttgaagctggtctccacacagtgctggttccgtcaccccctcccaaggaagtaggtctgagcagcttgtcctggctgtgtccatgtcagagcaacggcccaagtctgggtctggcggggaaggtgtcatggagccccctaggattcccagtcgtcctcgtcctcctctgcctgtggctgctgcggtggcggcagaggagggatggagtctgacacgcgggcaaaggctcctccgggcccctcaccagccccaggtcctttcccagagatgcctggagggaaaaggctgagtgagggtggttggtgggaaaccctggttcccccagcccccggagacttaaatacaggaggaaaaaggcaggacagaattacgaggtgctggcccagggcgggcagcggccctgcctcctacccttgcgcctcatgaccagcttgttgaagagatccgacatcaagtgcccaccttggctcgtggctctcactgcaacgggaaagccacagactggggtgaagagttcagtcacatgcgaccggtgactccctgtccccacccccatgacgctccccagccctccaaggccactgtgtttcccagttagctcagagcctcagtcgatccctgacccagcaccgggcactgatgagacagcggcggtttgaggagccacctcccagccacctcggggccagggccagggtgtgcagcannnnnnnnnnnnnnnnnnnnnnnnnnnnnnnnnnnnnnnnnnnnnnnnnnnnnnnnnnnnnnnnnnnnnnnnnnnnnnnnntacaagctcaaaaccatagtgcccagggcactgccgctgcaggcgcaggcatcgcatcacaccagtgtctgcgttcacagcaggcatcatcagtagcctccggaggcctcaggtccagtctctaaaaatatctcaggaggctgcagtggctgaccattgccttggaccgctcttggcagtcgaagaagattctcctgtcagtttgagctgggcgagcttagagaggaaagctccactatgc

SEQ ID NO: 124878 - DNA, 1024 bp, Homo Sapiens
tttcctggaaggctgttagtacccccatctttgtaggttctggcctgaggaggctcgggctaccctccagtgtggaagggtgggcagttcccggaatggtgccagggggcagagggggcaaatgccgggggcccagtcgggcactgtacatgaggtcgttggcaatgcccgggcagggtcaggccaggttaggccgggaacatcaatctcaggccccctggcccagggtttggcacatagaaagtagttctctgggccctgctgttccaggtgctctctcttgctgatggacaagggggcatcaaacagtttctccctctgtctttgccccccagcatcacatggttctttgttacagccccagccagggggttcccaggaagacatacttcttgtacaggttctcggtggtgttgaagagcagcaaggagctgacagagctgatgttgctgggaagacccccaagtccctcttctgcatcgtcctcgggctccggcttggtgctcacacacacgggaaagtacttcagcttctcctgcagggcccgctcgtccagggggcggtgcttgctctggatcctgtggcgggagcgtctctgcaggccagggtcctgggcgcccgtgaagatggagccatattcctgcaggcgctctggagcagggtacttggcactggagaacaccttgatggccttcttgctgcccttgatcttctcaatcttggcctgggccaaggagaccttctctccaatggcctgcacctggctccggctctgctctacccgctgggagatcctgctgaagatgtctccagagaccttctgcaggtactgcagggcatccgccatctgctggacggcctcctctcgccgcaggtctggctggatgaggggcacggcataggtctgacctgccagggagtgctgcatcctcacaggagtcatggtgcctgcgagccgccctcccggaagctcccgccgccggacgcgtggtcgacgatatcccgggaattccggaccggtcca

SEQ ID NO: 124879 - DNA, 1246 bp, Homo Sapiens
cagtcgtatggcatcagcagagtccatctatgcgctcctggcctctcagcaaatgctctgtaccctactcccctatctgtgcaggctgaagctatgtgcatagttgggatgagggctgtgttgtctcaacaccacgctgccctgtggtgggggcgtgccggtggtcgtgggtggctctgacgctccggctccgagccacaggcaccatgactcctgtgaggatgcagcactccctggcaggtcagacctatgccgtgcccttcatccagccagacctgcggcgagaggaggccgtccagcagatggcggatgccctgcagtacctgcagaaggtctctggagacatcttcagcagtgagagcggccttgctgcggccaaagaacatggaaaagcatgagtggggtgatgtgccttaaagcatcagacacttgggcctcgggcatcaggagccagccacagggatgtctggggaaatggcgttccatgagatgcaagcacacaagaatgcacttggcacatctggggaacagcaggcagctgatatcactgggcccaccccgcaccagggaggatggaagcagcaggtagagcagagccggagccaggtgcaggccattggagagaaggtctccttggcccaggccaagattgagaagatcaagggcagcaagaaggccatcaaggtgttctccagtgccaagtaccctgctccagggcgcctgcaggaatatggctccatcttcacgggcgcccagtgaccctggcctgcatgagactgccccctgccacaggatccagagcaagcaccgccccctgtgacgagctgggccctgcagccctcccaggagaatgctgaaggactttcctgttgttgctgtgatgcaccaatggctggaggcccgaggacgatgcagaagagggacttgggtggtcttcccagcaacatcagctctgtcagctccttgctgctctttcaacaccaccgagaacctgtatggccagaaggcagggccgaggggtgtgggcggtaggcccgtgcctggcttagtgtgggacccagggcatcagacacatggtagaagaagtatgtcttcctggaccccctggctggtgctgtaacaaagacccatgtgatgctgggggcagagacgaggagaagctgtttgatgcccccttgtccatcagcaagagagagcagctggaacagcaggtctcagagaactatttctatgttgccagacctgg

SEQ ID NO: 124880 - DNA, 955 bp, Homo Sapiens
cccaaccaggtttcgcttaccaccagcatttccagtaccctccaggccttcaggtccagtcgtttaaaatatctcaggagcctccagtggctgaccatttcttggaccgctcttgccattcgaagaagattctccctgtccagttttgactggctgagctttagagaaggaaagctccaactatggcttcccaaaccaggaaggagccatagcccaggcaggagggctggaggacctctgtggcggcccagggcttccagcatgtgccctaggggaagcaggggccagctggcaagagcaggggtggcagaaagcacccggtggactcagggctggaggggaggaggcgatcttgcccaaggccctccgactgcaagctccagggcccgctcaccttgctcctgctccttctgctgcttcttctccagctttcgctccttcatgctgcgcagcttggccttgccgatgcccccagcttggcggatggactctagcagagtggcccagccaccggaggggtcaaccacttccctgggagctcctggactggagccgggaggtggggaacagggcaaggaggaaaggctgctcaggcagggctggggaagcttactgtgtccaagagcctgctgggagggaagtcacctcccctcaaacgaggagccctgcgctggggaggccggacctttggagactgtgtgtgggggcctgggcactgacttctgcaaccacctgagcgcgggcatcctgtgtgcagatactccctgcttcctctctagcccccaccctgcagagctggactcctgagctagccatgctctgacagtctcagttgcacacatgagccagcagaggggttttgtgccacttctggatgttagggttacattgggagacacagcagtgaagctgaacctcgtgccgaattcaccacccaggcctcgtacctagcctt

SEQ ID NO: 124881 - DNA, 1491 bp, Homo Sapiens
  misc_feature (796)..(827): n is a, c, g, or t
cctgcacagctagaggtcctttattaaaagcacactgttggtttctgctcagttctttattgattggtgtgccgttttctctggaagcctcttaagaacacagtggcgcaggctgggtggagccgtccccccatggagcacaggcagacagaagtccccgccccagctgtgtggcctcaagccagccttccgctccttgaagctggtctccacacagtgctggttccgtcaccccctcccagggaagcaggtctgagcagcttgtcctggctgtgtccatgtcagagcaacggcccaagtctgggtctgggggggaaggtgtcatggagccccctaggattcccagtcgtcctcgtcctcctctgcctgtggctgctgcggtggcggcagaggagggatggagtctgacacgcgggcaaaggctcctccgggcccctcaccagccccaggtcctttcccagagatgcccttgcgcctcatgaccagcttgttgaagagatccgacatcaagtgcccaccttggctcgtggctctcacttgctcctgctccttctgcttcttcttctccagctttcgctccttcatgctgcgcagcttggccttgccgatgcccccagcttggcggatggactctagcagagtggcccggccaccggaggggtcgaccacttccctgggagctccctggactgaaggagacgcgctgctgctgctgtcgtcctgcctggcgccttggcctacaggggccgcggttgagggtgggagtgggggtgcactggccagcacctcaggagcnnnnnnnnnnnnnnnnnnnnnnnnnnnnnnnnttagtaccccatcttgtaggtctgccttgagaggctcggctacctcagtgtggaaggtgggcagttctggaatggtgccaggggcagagggggcaatgccggggcccaggtcggcaatgtacatgaggtcgttggcaatgccgggcaggtcaggcaggtaggatggaacatcaatctcaggcacctggcccaggtctggcacatagaaatagttctctgggacctgtgtctgatgcctgggtccccactaagccaggccgggcctaccgcccacacccctcggccctgccttctggccatacaggttctcggtggtgttgaaaagcagcaaggagctgacagagctgatgttgctgggaagacccccaagtccctcttctgcatcgtcctcgggctccggcttggtgctcacgcacacaggaaattccttcagcttctcctgggagggctgcagggcccgctcgtccagggggcggtgcttgctctggatcctgtggcgggggcgtctctgcaggccagggtcctgggcgcccgtgaagatggagccatattcctgcaggtgctctggagcagggtacttggcactggagaacacctgcgaccgccctcccggagctccctcgtccgataccccggcccctgccgttgttttcttctctttctg

SEQ ID NO: 124882 - DNA, 451 bp, Homo Sapiens
acaagcattttttctttcgccgtgctccattgccgggtggtgcacggtttatatgaatattagtgattacaaaatattatcaatagatcttgtcaccactgttattgcagaactaatcatctattgcttatttaggtctttctctcctgccagaatgtgcgctccaggtggagaggtatgttgccttatccgtggctggatatatagagattcccacactgccttgcacacgagcactgctgggtaaatatttgttggctgctgaagatgtctccagagaccttctgcaggtactgcagggcatccgccatctgctggacggcctcctctcgccgcaggtctggctggatgaggggcacggcataggtctgacctgccagggagtgctgcatcctcacaggagtcatggtgcctgcgagccgccctcccggaagctcccgccgccgctccc

SEQ ID NO: 124883 - DNA, 1795 bp, Homo Sapiens
  misc_feature (41)..(115): n is a, c, g, or t
  misc_feature (241)..(278): n is a, c, g, or t
atggggccggggaattgggaacccttcttaaagcccaagannnnnnnnnnnnnnnnnnnnnnnnnnnnnnnnnnnnnnnnnnnnnnnnnnnnnnnnnnnnnnnnnnnnnnnnnnngactgaaagggaggaccgccgcttggctgcctgcttgttgttccttgccctggccgcctgggccttccagggggccgccgttgaggggtgggagtggggatccacgggccagcacctcaggagctnnnnnnnnnnnnnnnnnnnnnnnnnnnnnnnnnnnnnnctgttagtaccccatcttgtaggtctgccttgagaggctcggctacctcagtgtggaaggtgggcagttctggaatggtgccaggggcagagggggcaatgccggggcccaggtcggcactgtacatgaggtcgttggcaatgccgggcaggtcaggcaggtaggatggaacatcaatctcaggcacctggcccaggtctggcacatagaagtagttctctgggacctgctgttccagctgctctctcttgctgatggacaagggggcatcaaacagcttctcctctgtctctgcccccagcatcacatgggtctttgttacagcaccagccagggggtccaggaagacatacttcttgtacaggttctcggtggtgttgaagagcagcaaggagctgacagagctgatgttgctgggaagacccccaagtccctcttctgcatcgtcctcgggctccggcttggtgctcacgcacacgggaaagtacttcagcttctcctgcagggcccgctcgtccagggggcggtgcttgctctggatcctgtggcgggggcgtctctgcaggccagggtcctgggcgcccgtgaagatggagccatattcctgcaggcgctctggagcagggtacttggcactggagaacaccttgatggccttcttgctgcccttgatcttctcaatcttggcctgggccaaggagaccttctctccaatggcctgcacctggctccggctctgctctacccgctgggagatcctgctgaagatgtctccagagaccttctgcaggtactgcagggcatccgccatctgctggacggcctcctctcgccgcaggtctggctggatgaggggcacggcataggtctgacctgccagggagtgctgcatcctcacaggagtcatggtgcctgcgagccgccctcccggaagctcccgccccgcttccgccctgccggagccgctgggtcctagccccgccacccacagtccgcccgcgcctccgggtcctaacgccgccgctcgccctccgccgcgccctccccgagcgcggctccaggaccccgtcgacccggagcgctgtcctgtcgggccgagtcgcgggcctgggcacggaactcacgctcactccgagctcccgacgtgcacacggctcccatccgttgtcttccgagcgtcaggccgcccctacccgtgctttctgctctgcagaccctcttcctagacctccgtcctttgtcccatcgctgccttcccctcaagctcagggccagctgtccgccagcctcggctcctccgggcagccctcgcctgggtgcgccccggggcaggacccccagcccaggcccagggcccgcccctgccctccagccctacaccttgacccgctttcctgcgtctctcagcctacctgaccttgtctttacctctgtgggtagctcccttgtgatctgcttagttcccacccccctttaagaattaaatagagaagccagacgcaaactacagatatcgt

SEQ ID NO: 124884 - DNA, 1076 bp, Homo Sapiens
gggccatccggggccagggtcgcagtaccatgagtcattgccaatgccgtacagttcaggcaggtaggatggtgacatcaatctcaggcaccctgccccagtgctggcacatatgaagtagtgtctctgggacccggctggttccagcttgctctctcgtggctgatggacatgggggcatcaacagcttctcctctgtctctgcccccagcatcacatggtctttgttacagcaccagccaggggtccaggtagacatacttcttggtacctacggatgcgacatggggtcaggcaagctgacaccctgctgttcctgagcccaatgtttcctctcccacatcatcaggggcacagctgtgcactgtggggtcccaggcctcccgagccgagccaccccagtcaccccctggctcctggcctatgtgctgtacctgtgtctgatgccctgggtccccactaagccaggccgggcctcccgcccacacccctcggccctgccttctggccatacaggttctcggtggtgttgaagagcagcaaggagctgacagagctgatgttgctgggaagacccccaagtccctcttctgcatcgtcctcgggctccggcttggtgctcacgcacacaggaaagtccttcagcttctcctgcagggcccgctcgtccaggggcggtgcttgctctggatcctgtggcgggggcgtctctgcaggccagggtcctgggcgcccgtgaagatggagccatattcctgcaggcgctctggagcagggtacttggcactggagaacaccttgatggccttcttgcttcccttgatcttctcaatcttggcctgggccaaggagaccttctctccaatggcctgcacctggctccggctctgctctacctgctgaagatgtctccagagaccttctgcaggtactgcagggcatctgccatctgctggacggcctcctctcaccgcaggtctggctggatgaggggcacggcataggtctgacctgccagggagtgctgcatcctcacaggagtcatggtgcccgcgagccgccctcccggaagctcc

SEQ ID NO: 124885 - DNA, 426 bp, Homo Sapiens
tgtgtggcctcaggccagccttccgctccttgaagctggtctccgcacagtgctggttccgtcaccccctcccagggaagtaggtctgagcagcttgtcctggctgtgtccatgtcagagcaatggcccaagtctgggtctgggggggaaggtgtcatggagccccctacgattcccagtcgtcctcgtcctcctctgcctgtggctgctgcggtggcggcagaggagggatggagtctgacacgcgggcaaaggctcctccgggcccctcaccagccccaggtcctttcccagagatgcccttgcgcctcatgaccagcttgttgaagagatccgacatcaagtgcccaccttggctcgtggctctcacttgctcctgccccttctgtcgtcttctcgcagccgtatagtagtagtaggggccgc

SEQ ID NO: 124886 - DNA, 575 bp, Homo Sapiens
tttcatgttttgattaatttaatatttacaataattctaccaggaagctaccattattaccacaacttcacaaatgagaacactgaggcttagaggggttgggttgtccaaggttacagaagaagaaaacaggggagctggatctgagccaaggcatcaactccaaggtaacccctcagtcacttcagtgcgtgccacctggttactgggacattcttgacaagcttggggcaagccggtgagtcagtgggggaggactttcaggaagaggtgggttcccagttggtgacagaagaggaggctgctgaagatgtctccagagaccttctgcaggtactgcagggcatccgccatctgctggacggcctcctctcgccgcaggtctggctggatgaggggcacggcataggtctgacctgccagggagtgctgcatcctcacaggagtcatggtgcatatttcttttctttttctttcctctcactcagtgtcctgtgattccaaagaaatgagtctctgctcttttggggcaggagatatcctagaacggactctgaccgcaggccccggacgcc

SEQ ID NO: 124887 - DNA, 1237 bp, Homo Sapiens
cagttctgggtctatagaaacccaggtttattcccatttgctacaacagattcccttctaataaaatgcactggcaaggtgaccagtgagtgacccaatgtctggttgggaaatctctctctgaacttcttgctgttggacctaaaatgtggatgtaaattggatcacagctggtttggcattgaaaaaaatacatacacaacaaacaattacaacttctttatatggcagtttttactgggtgtctaatactctctttactgtctcaagtggaagtccaaacaaatttcatttttgtagtaaaaaatctttatttccaaaatgatttgttagccaaaagaactataaaccacctaacaagactttggtaagaaagagacttgatgcttcttataaattccccattgcaaacaaaaaataacaatccaacaagagtcatgttacccattcttagccattaacctggttttaagtctccaaaatcaggattttaaaatgtacccaactgggaccaaatacaaacatgagacactagggtggcttgtccttgattaggaatcaccagcttaaggaactttatcatgggctgagagttagatagatagcttagaacaacattgcaaaagtgggtgcttctacatgaggacttttttccccccaagtagaaaaataattaaatcttgtgtttctttatattgtgctttttttgggagaaagcaattcatttaaggatttaaaacatgttggatacaaaggtagttcagagatgtaataatggtccctccaagaacaagggagcaaaagccctatcttttattgaaaatgatggaggtggaggacaatataaaaaagaaccttctgaacacttacttagcttaaagacatgaaagacccagtgagtttttattgaatagtctctcttgtgttaaaagtacatattcaggactatactatgttgtatttggaaatattctgatgtgtttaatacaaattcgtagtgtattcagagcattgtatgtgtctcaccaatggtacacatttggattaagcagtaataaggcctataaaagaagaaatgaaacaatagttttcaacaataaatgcaggaagaaaaactgctgatggacccaactgagaaaatgtccttttacactatcccttggtggtcagtctccctgaatctggtgcccggccgtaatggccgaattcccgggcatatgtccggtaccgtcgactg

SEQ ID NO: 124888 - DNA, 1884 bp, Homo Sapiens
  misc_feature (454)..(454): n is a, c, g, or t
  misc_feature (460)..(460): n is a, c, g, or t
  misc_feature (1171)..(1236): n is a, c, g, or t
  misc_feature (1748)..(1759): n is a, c, g, or t
cgggattttcaggggttttcatccactatccccccttttggtggaaggggctttccccagagtcgcgcccaggaaaaggcctttaaagggaaatttcccaccccaggtattttccgaaatggaagtggccaggggcccgggggccgttaaattttgaataatccaaggctctggctttgggacttcccctgtggaataggattcccagtaaatggcccttcagggaacttccaatccgggaatttggttcaagaaccgcttcggttttccccccccggggcgtttttttatttgggtgaggaattcccaaagccattagtccatgtacccagggatcttcctagggaaaacaggctatgggccatgttccacttaccctacctggggcccgcccggccaaaaggaatggttttagaaaagtttttcgagggccgagggcggccgaccaaggganggtttncttcgtcggggttgctcgggtataaaagtctctttttaagtttttaaattaaaatttcgccctggtgagatgggattctgattcgggaactaaacccaaaggcaggctctccactttggacctggacacgcagcgggaggggcagggcgcccagggcagtcaagtcccctgctgggcagagcctggcctttgaccaaagtcagctcctcagtgccacatcagccctgcacattcagcaggagacaggggtgatgagctatggggccacaaccagcaatcagaggtggggaagaggccatggggagagagccctgataccaagagggccttccacagctttgacctcaggccctcctgggacctgcagctgctatgtggctgcccagtgactgcaggagtggtgtcctcttccagattccagaaggcatggctgttaaaggaggcagctgacagatgccttgtgcccacaacatcactccatcagctctgcagcatggcagccctacccccgagcaccccaggtgtgccaggcccattctcacgcacattagttatatttatctattcatatatattatagttatatattaaaaacagaggaaaaacttgcctgaaaaactcctgaaggacccacgtggcccaggaagtttactgtccccccgacccacaaaaattcttttataaaatcttccagtgcgatcttcgggaaannnnnnnnnnnnnnnnnnnnnnnnnnnnnnnnnnnnnnnnnnnnnnnnnnnnnnnnnnnnnnnnnnagctccagcccagcgcccggcggcgtccagtctcatctctggccgtccatggccgccatggctttctgctgggcgcccccctgctgtgctcctgggggccacgtgggctgtgggcggtggaggtggtggaaggtggtgggggaggagggcgggatccagggcgcctggtggctgggcggggacgaggcccagaaggggctgaagtttgcaggtggggagcaggctgcggctgtcatggggctgttgctgctctgcaggccctcggaggcgcggagcttggagaacatggccagcgcatcggggaagttgggcggcgtggcaggggtgttgctgggagtgcacatcatctggtggtggtggtggctgttgggaatgttggtttcttggaagaacgtgttcagcgcggtctcgaaattccaggggggccccttgcatcaactggcttcgcctggaaagaccgcccagcccctgggccagctcaacaccggctgatcaataaaattggtgcccannnnnnnnnnnnttttaacacaagattgggccccggggagagaaagaggggaccagccgccctcccgccgttattcgataagattgttgtattcctcgctctagtcatgcggcgttttctgcacagacctaaggtag

SEQ ID NO: 124889 - DNA, 1950 bp, Homo Sapiens
cccgtgtttgtttattgtctgttggcattttttagaaagagaattttatttggaatgaaaatatagagcccaccctcccgcctcctctggggagggagcagagggctgggcagtggtcggggagatggtccctcagaggtcgaggagctcgcctgggcgtagacatcctccacaggaacagtgaggaaagctgggcgctggcttcggcctgggcctgggacgggtgggggtgggaactgacccctgcgctgcctcagaggctctgggcagccagctagcccggtgcgacccgctggcagaagctgagtgggaagggggcggcggaggagatgaaggtggcgtgtggctgtggccctacgcatccccgttctccatgcggcccagctgctcctccaggcggcagatgcggtcgccctgctccttgaccagcgccctcagggcccgcagctcctgcatcacctcctccagcttcccagcctccccggctctggccaggctgccgctgggggtggcatcagcagcagtggtggtggaggcgggggcccctaggtgggaggagcccggggccatggcgggccggctgtcagacaacacgttgcgccggctgatcttcaggtcccgctgcttgctgggcacgtaggcctcccgcagtgagatgaggatcgggtcggcatcccgcccgctcacccactcctcagcctccagggctgcctcgggcccggctgtgtcggggtacagatcatcctggaagaggtccgactttcttggcacagtcatgacgatgggctcacacttgcgctcatgcagtttgtagaaccgggcgatctcgcacttgctgacctccaggccccgcttgggcatgctgcccataccccgctgcggctccttgctggtgaacgtgttcaggaagtggatgtagggaggctcctctgtgatctcaaagtaccggatgctggagtcacccttgccgcagacgtagaccacactggtgtcggggtcgtagaagggcagcagggccccgttgctcgagtccagttcctgcagggccatgggttcctcgaggttttctgggtcccagagcgccagctgccgctcgctcattcggctgaagcctgtggtgaacaccttgccatctgccaggaagatggcccgcatgggccgggccccctcatgagccttctcccgctctgccaccagggtgccccgacgggggtcgatgatgcgcacgctcttgtccttgcatgctgagcaaaacaggctgccattgtggttccagctgacattgtagatgaggtcagggtgcaggctgtccaggcggtacagctcctccgctgtgcccacattccagatgagtaccacgttgtcgcagcctgcactgagcagcacgtttcgggccgtggggtgccaggcgatgatgcccactcgcttggtgtgcccctccagtaccaccaccggctctgtcagcggggaggtcagcccgttctctgggatctgccacaccatgaccgtgcagtcctccgagccgctggctatgacttcgtcgttgtgaggacaccagtcgatgtccaggacaggtcccgtgtgcccacacaccgtcgggtaggccttgtcaatgcggcccgtcttgcttagggggagcaccagaaaggcaccccctccactggcctccacaatcaccgccaggaacttggggttgacggcgcagaaggtgctgtcccaggtaacacgggacacgcgaatgtcctcatagcactggtcgttcttgaccggctgcccgaacacatgccggaatttgctctgccggaccactttgcggaaggacatgtcgggggcaccgggggcgcagggggctgcggcaccggcttcgggcggctccggatcccggcctctgggaagcaggaagcagcctcgtgccgaattcaaaacccagcctcgtacctacctaagttt

SEQ ID NO: 124890 - DNA, 956 bp, Homo Sapiens
tgtagaagggggcagcaggggcccccgtttgctcgagtcccagtttcctgcagggcccatgggtttccctcgaaggtttttttgggttcccagaggcgcccggctgccgcttcgctcatttgggttgaaggcctgtggtgaaacacttgcccatctgccaggaaagatggcccgcatgggcccgggccccctcatgagccttctcccgctctgccaccagggtgccccgacgggggtcgatgatgcgcacgctcttgtccttgcatgctgagcaaaacaggctgccattgtggttccagctgacattgtagatgaggtcagggtgcaggctgtccaggcggtacagctcctccgctgtgcccacattccagatgagtaccacgttgtcgcagcctgcactgagcagcacgtttcgggccgtggggtgccaggcgatgatgcccactcgcttggtgtgcccctccagtaccaccaccggctctgtcagcggggaggtcagcccgttctctgggatctgccacaccatgaccgtgcagtcctccgagccgctggctatgacttcgtcgttgtgaggacaccagtcgatgtccaggacaggtcccgtgtgcccacacaccgtcgggtaggccttgtcaatgcggcccgtcttgcttagggggagcaccagaaaggcaccccctccactggcctccacaatcaccgccaggaacttggggttgacggcgcagaaggtgctgtcccaggtaacacgggacacgcgaatgtcctcatagcactggtcgttcttgaccggctgcccgaacacatgccggaatttgctctgccggaccactttgcggaaggacatgtcgggggcaccgggggcgcagggggctgcggcaccggcttcgggcggctccggatcccggcctagcggacccgaggccccttcgcgttcttgctcctcataatggcat

SEQ ID NO: 124891 - DNA, 840 bp, Homo Sapiens
  misc_feature (27)..(27): n is a, c, g, or t
  misc_feature (166)..(166): n is a, c, g, or t
  misc_feature (211)..(211): n is a, c, g, or t
  misc_feature (229)..(229): n is a, c, g, or t
  misc_feature (237)..(237): n is a, c, g, or t
atcaatggctggtcgagattgtgcatntcagcagagtatcacatgtccctgagatttgtggagagtctgattacatgatcgtgtggcagagtgatgtaatcagagttgaggcaaacgcacggattatgctggagtgagtgattcgtcatgtgtgtctactgggagnttgcctgcctcgcattacatctgtatcattgtgccacatcatacntgagaagcatcgaccctncaggcacntgagatcagctggactcagccctcccgtcgtcattagggaagaaaaaatgctggcatcttgtgcagcacaaatccggagtggcgtctcgggcatcgtggcatggaggtggatgggtgcccttccacaacacccacgccgagatgatccagaagctggtggacgtcaccacggcacaggtgtaaccgtccatgttccgtgtgagcagagtccctaccaacgggcaggtctgcatccggggagaatgcagctgcttctggcgacaatcctgctagtaaacactggtcttcggtgagcaacgaacactcgcctggcctgggaaactgcatgcccactttctgggaggggttagtgcaggtgccgtggacaaaggacaacatttctctggggctttttaacttttattcctaagactctaaaggcgttgatttcaaccctccttcactctggcttcttcaggcaacccacgtggtctcctatgagaatcttctcgacagttacttatggggacacttgtgaacaattaactgccaggcagagcatgagaacaaacattcccaggccatgtaggataggatactccagactccagtcatcctccccca

SEQ ID NO: 124892 - DNA, 1417 bp, Homo Sapiens
  misc_feature (928)..(966): n is a, c, g, or t
ggaccggtccggaattcccgggatatcgtcgaccacgcgtccgggcacatacggcacggggatgtcatcgcctgcgacgtggaggctgactttgccgtcattgctggtgtttctaactggggaggctatgccctggcctgcgcactctacatcctgtactcatgtgctgtccacagtcagtacctgaggaaagcagtcggaccctccagggcacctggagatcaggcctggactcaggccctcccgtcggtcattaaggaagaaaaaatgctgggcatcttggtgcagcacaaagtccggagtggcgtctcgggcatcgtgggcatggaggtggatgggctgcccttccacaacacccacgccgagatgatccagaagctggtggacgtcaccacggcacaggtgtaaccgtccatgttccgtgtgagcagagtccctaccaacgggcaggtctgcatccggggagaatgcagctgcttctggcgacaatcctgctagtaaacactggtcttcggtgagcaacgaacactcgcctggcctgggaaactgcatgcccactttctgggaggggttagtgcaggtgccgtggacaaaggacaacatttctctggggctttttaacttttattcctaagactctaaaggcgttgatttcaaccctccttcactctggcttcttcaggcaacccacgtggtctcctgtgagaatcttctcgacagttacttatggggacacttgtgaacaattaactgccaggcagagcatgagaacaaacattcccaggccatgtaggataggatactccagactccagtcatcctcccccatccatggtttctgttactcatggtttcagttactcatagccaactgcagaccgaaaatactaaatgaaaaatttcagaaataaacaactcttaagttttnnnnnnnnnnnnnnnnnnnnnnnnnnnnnnnnnnnnnnncaacaagggggggcggcgcgcataaaagacccgccggggagggcccaaaagttagcgaacaccagaggtttttggtaaaagggggccccaaagagagggccaattaaaacagagcagaggcaccgggccgcagcgaaaacaacagacgcgcggcgagcggggacaaccgcgcacagtgcaggacacttgtgagagagagagcccacaaaagtgtagggggggaaggggacacgataattgttgggggaaaacaagtatctctcaacaggaaatgtttaagaaggggtcgatgggggtgatactgtaaatgacacattagaaggagaggtactaaaaggggtagtagaaaacaataatcgatattaatagtagatgaggggttggaaaaaatgtatattagggcgaaagggagtgataagaatatagaaaagaattttttttatacaggagg

SEQ ID NO: 124893 - DNA, 940 bp, Homo Sapiens
gagatttttaaaaaagaccatttaaaaaaacaatttatataaatagattcgtatacaaagaagaaacacatatacagagtaccccaattaccagtatggtggaccctaccccttcttttctgcattgggaaacagaacagagaacagaaaaaatcattccatcttgctcttaactctttccacctatgtgctcagtttttcaagtagaatttctattcctttgctggtgcttttggttttttccaatgtaggaatcaagcttttcagtgcagctttgactttgtttgcaacttccaggtcacaactctggaggaggctagaaagaataatggcacctcgatttacactagcccaggacttcaggttcttcataccaacatgctctacaagtgtttttgcaaaacaaccttctctcccattttctttcatctttttatcttgctctattaaccacttcagaactagatgtcctgcaggatgttctgcaatgtgaagctctccgtccttgccaccaggatgcagtcctgttgctgccaagctggcgatggcattcatggtaggctgaacgtctccagtggcagatcccagaatgtcagacaccaacacacacgcagacttatctagcaccacttcttgggcgtgttcttgcaggtagcttaacaaagctggagaaatggattctaggagctcccgtctgcggacctctgtatctttcttactgtgtgcatttccatctcctttttgcagaacttcaatgatttctcgtactgtatgtgcaggatctctggggcttagtaagtacaataggaccttccttccatatttgtcatttactatgctaggcaatgaactgataatttctgatatgattatctgcttcacaagcttagtatcatcaatacaatcaaatgccgccagtaaaaccaaatgggagtattgg

SEQ ID NO: 124894 - DNA, 1382 bp, Homo Sapiens
  misc_feature (754)..(762): n is a, c, g, or t
gtgaaggggctcggggaggagggccgaaaggcttccatcggagggcccggggcccagcctcgcccccagagcaccagggccagagaaaacccccacgtgcggtggtcttttgccggctcagcatgtggatgggaaggaggccaaaaagggcagaaaagggccccttagcaggaagcgccacctcagcagagtaggcctggcctgggagctctggcgagaaaggtcacagtggaggctgaggagcgcccaagaggagaatggccctagtgcagaagtgctggcatggatgggtggggtaagtgcagtgccccaccctctgccagggcccttgggaaaggcagagcctccagaggtggccagtgagagtaggtgcagggccagagctagtagccaggagaggagcgagggtgctccacagcgacctcagcaggtggcctggtcttgcccactccagggctcccatccttcctttgggctccgctctaacactggtggctctggagggagggtgggaccaatcctttttcaaaacctttcctgaagaccacaggggagctagccttgcaggctagggagcaagagtggcaacaggccaaggcgagcccttaccaattggggaatcccactcctcctgctgctgccagctaaagggcaggacagtccctgaagacagttcagcttgttcctccccacctgaggcagaaggggttttgaggcaggccagagccctccagggacatgaaagcaggagatnnnnnnnnncatatggaggggtgtcccctcctgctctttttttcagggctggggatagtcaggggacaatcagcccagagtccgaaagccagcaagttgtagcaacctccacccctaacgccaaactaacaaacaaaacaggggaaatgaaaaaaaagggtggtggggaagacaaaccaaaacagaatcccctgacctcctgcccagggcagagggtccagccagtagcaggggctggggaccagggctggagggtctagctgggccggcactgcacctggccctcagagctgtcctcatcatcagaggccccggcacccccactgctcaggcccgtgatccggtagcccatgttgagcagcatcacctccaacgggtctgcattcatgcgccgctggttggcctgtgaagcaccctccatatcttccacgactcggcctgtgaggtcttcactctctggtcgggggttccagagccgcacaacaggatcgatgccactggtggccaggaagcagtagctggggtgtggctgcaggcagttgacaatggactcatccccttggagcacacggaccaggttggtgtctcctttcctcgtgccgaattcgccacccaggcctcgctaccta

SEQ ID NO: 124895 - DNA, 1280 bp, Homo Sapiens
ttttttcgcaggaaaagagctgggaaagcacttgtctcctttattgaacatctgcagggggcacctctgcactgaccaggcagccagagaagcaagcaggcaggtggtggggggcaggggagcatggggcaggaagacgcccaccctcatttccagtccttgaaaaattgcttgaagatgggactctcacggccctgaggcagaatctccacctgagtgttcggggcgtactgcatgcgcgagatgaagccctcggccacctgcagggctgcctgccgctccttctcattcgcttttcgccccttccagatatagatcttgccacagagcccgttgtccagcacaaagcagtcatcagatatcagcagttcaagggcaaatgggctggagtcagccaccttggtcaggttcatctgtccagtggcatcagagaccttatacagagctgcggcctgggcatttgccttgtcagctgtgaggtcttcctcagggttgccctccttcagagcaggcttggggcccaggacctggatcatctcagcaggctcctccccatcagtgacaatctccacctgggccttgccctgtcgctcactgtcccggatggccagggccaggtccctcgccttgttgcgttccaggatgttggactttccaccacaccaggcgaagatgttctggcccaggtccaggatgaagcagtccccagtgttgaagctgtcccagttcagtgcccgctcggtggcacggatgttcttcttccccttcacctggtagagtttcttgatggcagctggggctcctgtggaggtcttgtgaaatgctgactccacaccaccttcctggtacttgaggccccgtgggaagtagctcatgaagaggtcagactcattgccctgcacctcgcggtgctgcacaggccgctctcccagcagcgtgttgaggtgcacagccagcacggcacaggccccctgctcatcccgggatgactgctggcctatccacaggtgcagatgggaaacctcttctgggccattgtgcagcactaggtaggagtcccccgagaagaagacgccctggttctcttgcgccacaggcaccggcttcagcttctccacccgccacacatgcaggcctggatcctgcactgagcctgggaatggagagccactctggggaatggctgtgtacatgctgtcttcagatctctgcttcgtaggttcgtcttccttccagcctgcccctcgtgccgaattcgccacccaggcctcgctaccttg

SEQ ID NO: 124896 - DNA, 913 bp, Homo Sapiens
agggttccattctgttcccagtgggcatccagaaggccttttataccagaagctggcggcctgggccatttgccttttccaggtgtgagggtcttccttcaggggttgccctccttcagagcaggctttggggcccaggaccctggatcatctcagcaggctccttccccatcagtgacaatctccacctgggccttgccctgtcgctcactgtcccggatggccagggccagttccttcgccttgttgcgttccaggatgttggactttccaccacaccaggcgaagatgttctggcccaggtccaggatgaagcagtccccagtgttgaagctgtcccagttcagtgcccgctcggtggcacggatgttcttcttccccttcacctggtagagtttcttgatggcagctggggctcctgtggaggtcttgtgaaatgctgactccacaccaccttcctggtacttgaggccccgtgggaagtagctcatgaagaggtcagactcattgccctgcacctcgcggtgctgcacaggccgctctcccagcagcgtgttgaggtgcacagccagcacggcacaggccccctgctcatcccgggatgactgctggcctatccacaggtgcagatgggaaacctcttctgggccattgtgcagcactaggtaggagtcccccgagaagaagacgccctggttctcttgcgccacaggcaccggcttcagcttctccacccgccacacatgcaggcctggatcctgcactgagcctgggaatggagagccactctggggaatggctgtgtacatgctgtcttcagatctgccaacgccttgctccgaggccctgggcgctgtctcagccgccccccgccccctggaggtgcgcctcgtgccgaattcgccacccaggc

SEQ ID NO: 124897 - DNA, 1981 bp, Homo Sapiens
  misc_feature (157)..(165): n is a, c, g, or t
tagaagcaagcaatttattttcctcaaatgtagcaataattttaatctgtacatacataaaacaaacagtgcaattataaaaccttgaaggtgacatgcatattttaaggtgcagttgggatgggggaggatgttagcatctccaattttccttacnnnnnnnnnctagttccttatgcaaaagcactgagtcaggaaacttcatctggaatgctgaagttaaaggtgaacttcctgaagtctgcgcgtctaaatatcacaaacaaaatggaaatgaccttctagagcagtttggtagggactagagtaatatggctggctttcaagctggaaatgaatgaaatcagggatgcattttctgaaaaactaaaggagataatgtttgtaactgagtgtcctatttctgtttcatagttgctaaccacatgagcccttccaccaatctttttattcggcatagtttctgaatagatgctgttcaatggagttatttgtaactaggggtggtgagatgcagaaggaaggacctggggaaatggcttcttccttgaagtctgagtccatgctcctcttccactgttcttatggccttttctctgccatggaggcagaggtagctggtgcagaatgtcaggtgctgtcatcattcacaggcccagggatgcagacaaaggtgagtgatgggggtctacctttgcttcttccacaatacctttctcaagctttcctggccttgcagcggaacttctagaactagaaagtcagttcactgggttcttgactcagaggccaggatgagatgggatgtggcagagtcacaagacacaaagggaaaatatggtaccaattagcctcagagcaggatagagaaatttatatttgcactgatgaaaattcaaattcccaaagtcaatctaaaaaatgaagatttcctttgagtattaattttttctctgtacaagtagcctgtgcacttctgttcagatgatcccagggacactctagggcagtatgctctagatcagctggaacagctctttctggcagtgacattttgatttgaaccccaaagtaaatccatacatgacatcacagttattaaaataatgaaatattactaaccaaatgtaactgcaattcaatcaatgttatatttcacacacaaatttagaaaaatcaagagtataataaaagcataaaattaaacagaaggaaatcaatttctacaagaaatcaaatatatttacactgagatttaaagggaaaaataagctacttggatcataaatttaattttattttaaataactttagctacctcagctgttaatacaataaaagcagaaaaaacaggctgccttttatttttccagatttaatcagaaaattgtatctacaataattgacacaactcacttcttgtccttcacccatctcatcaaaaattattgcattttcccccaaactgtattttttggattcctctgtgaatatactcatttcgtcctctttcctggaggcatcttggtttaaatccatctttaaaaaaaggagaaggggtacatatgtggaggcaaaatattctcttgaagccaacagatacagagttgctagagaagctgattgtacacacaagctgcctgggattgggatggggagggctgctgatttcgagacacatgacagcctttggtggacgggcacaggcaaagccccacgggcccttcttcctgggcagggttgggactaagcggcggaggcggagcttcatcttcttcttggaacttgtcgttttggttctcctccaaaagccttcatccagataagaagccaatgactgattacaaaaataagaataattaaatttggctcaagaaatagattgtccaactgttctgccttggtattttttcaatatccaaggcctttacaaagaaagaaacaaaaacatctttcaatctcccgacaaactcgtgccgaa

SEQ ID NO: 124898 - DNA, 138 bp, Homo Sapiens
ttttttttcaaaatggcaccacactgttttatttaaacctgcaaacaatataaagaggtaaggacttctgacgccaaaccatgcaagtaataacaaaggaacagagaaaaatattaataacaaaaagaaaatcattaa

SEQ ID NO: 124899 - DNA, 456 bp, Homo Sapiens
  misc_feature (102)..(132): n is a, c, g, or t
ttttcatttaaaaaactgaatattttaatagtaaaaatatatgtttatatttctctttttaaaaagacatttaataacaatacttcataagactggatttannnnnnnnnnnnnnnnnnnnnnnnnnnnnnnaccacaagttgtccaggcagagatacattaaggcaaaggctcctggagaggtacgtccaccttggctgtgggctggagactcaaggtgaacacactctgctccttgcagggtcaacagaaaggcttctcccctcatgttcactgagccatcctgcatcccaaagtagactctctcagccatgttgatgaataggcctgtgtccaccacacctgggatcattttgatagctgtattcacttcactccatttgtgtacccggtcaaacttccagtccaagataaaattcccattatctgtcaccacaggacccttatgctttctag

SEQ ID NO: 124900 - DNA, 1955 bp, Homo Sapiens
  misc_feature (66)..(123): n is a, c, g, or t
  misc_feature (237)..(250): n is a, c, g, or t
  misc_feature (689)..(700): n is a, c, g, or t
  misc_feature (841)..(868): n is a, c, g, or t
taccgcgccctctctaactcgcctctctcctctgcacctccatgccacccgccactcccactgcgnnnnnnnnnnnnnnnnnnnnnnnnnnnnnnnnnnnnnnnnnnnnnnnnnnnnnnnnnnaacgtccccacacacattaacaagcactacagaccctctcccccgccaagcccaggccagctattacccgaggggcctggggaaaatttgtatttccgagaggaagagtcattnnnnnnnnnnnnnntcacaaggacctcgccatttcaccaacagtgctttggccagtactggcaagcatttgtggttcaactggttccaccagccaggaatatgaaagaaccccccagattttagccaaaggtgtaacaatcattttttccctgacagcttacattccaatgtcattccataccataccgcctccactccacagttttatacacctgatcttaagatgtaactaggtactatgtgtgctcacaataaaaactaactaaaaacaaatcagagggtagcagacaagtaaacaaagtttccagtaaggcatcaggagatcactgctggtgggcccctcactttaccagcttaaagaagttttgatttttgatttctcagcaaactcaatattcagaagctttaccagcagactcaagtcaaaggttttaagatacagtttacctcannnnnnnnnnnnggtaaatatttcatataaaacatgaactcaagttctacttcatttaaaaaactgaatattttaatagtaaaaatatatgtttatatttctctttttaaaaagacatttaataacaatacttcataagactggatttaactnnnnnnnnnnnnnnnnnnnnnnnnnnnnaccacaagttgtccaggcagagatacattaaggcaaaggctcctggagaggtacgtccaccttggctgtgggctggagactcaaggtgaacacactctgctccttgcagggtcaacagaaaggcttctccctcatgttcactgagccatcctgcatcccaaagtagactctctcagccatgttgatgaataggcctgtgtccaccacacctgggatcattttgatagctgtattcacttcactccatttgtgtacccggtcaaacttccagtccaagataaaattcccattatctgtcaccacaggaccagccttgttgacagccattcgaagttcaaccacgcccccaaacttctggctcacagctcggctcactgggacataggccattgggatgacctcgatggggattcccttgtgccactgatccccgagattcttcgaatctttcctgaaatcagcgatcacgatgaagcgactagcatagccagccacaatcttctcctgggtcaggcagcctccgccacccttgatgagattgagatcagcatctacttcatcagcaccatcgatggcaaggtcgatctctgggtgtcgatccagatcactgagggtcaagccatactgcaggatgagctggcgggcctggaaggaagtgggaatacagacgaggttcagattctcttgcttcaccctttcagctattcgctgcacagcatggacaattgtagaaccacttccaattcccagcacttggttattcctcacgtggttctccacagccgcgcggcccgccagcttcttggcctcctcggccttggacatcgtggagggggccgggcagatgctgttggagtccccgcagctggtgcttgtgttgccagcaccgccacgggtcccagactgtgcacgccccggcagccgcacgtgggaacccgggaggtcccagctgttccctcctccgccggaggccgcgcccccggccctcccgggcagcggggccaagacccgcccgtagagggtgctgaagggcccggggcgctgcatcccgacgcctcgctccggcctccgctgaagtcccgccccc

SEQ ID NO: 124901 - DNA, 561 bp, Homo Sapiens
ttttttatattcatacatatttattcacacaccacacacatataatttcatgtacattgtttgaatgtcccaaactttggagtttaaacatatatacacataagtttattttctcaagtcttactttgatgtagaaaattttattcttgattgatgagtaaggagaaagtgtttatctggcatagagaaaagggacagatagcaaaagggaatatgatgatactataacattactttcactaattgtcttcaacctcattttgattttacagatttggcctctgagtgattttggatttttacgtgccagccctaatggccacagattttctgatgattagtaagcatttattcttttgacttgattattgtctccttttcatgtgaatttattactcccgttgaaaccgtgtacttaccaataaactatttgctattcagttttacttgtttttaattgttaaatgtaaagaatattcaacacacattctgccaagttctgttagttcaaatatatggataaaaatgtaacccacaaaagtcatctaaattttatgatac

SEQ ID NO: 124902 - DNA, 705 bp, Homo Sapiens
  misc_feature (456)..(575): n is a, c, g, or t
  misc_feature (584)..(597): n is a, c, g, or t
ggcccacctgtgtcctggttgagggtctccagggttctttggggcccgagaggtgacattgtgattgcaaaaagcccaagtgatccaaaatcaaatatttgtaaaagagtaattggtttggaaggagacaaaatcctcaccactagtccatcagatttctttaaaagccatagttatgtgccaatgggtcatgtttggttagaaggtgacaatctacagaattctacagattccaggtgctatggacctattccatatggactaataagaggacgaatcttctttaagatttggcctctgagtgattttggatttttacgtgccagccctaatggccacagattttctgatgattagtaagcatttattcttttgacttgattattgtctccttttcatgtgaatttattactcccgttgaaaccgtgtacttaccaataaactatttgctattcnnnnnnnnnnnnnnnnnnnnnnnnnnnnnnnnnnnnnnnnnnnnnnnnnnnnnnnnnnnnnnnnnnnnnnnnnnnnnnnnnnnnnnnnnnnnnnnnnnnnnnnnnnnnnnnnnnnnnnnnttggggggnnnnnnnnnnnnnnaaaaattttttaaaccctttgtttggggcccgggcccaaaaaggaaagggaactgggccttcccgtttcccaaaaaaaccggggcaaggaatagggttggattccccc

SEQ ID NO: 124903 - DNA, 895 bp, Homo Sapiens
  misc_feature (694)..(710): n is a, c, g, or t
tttttagtttgtcaacatgtaatgccctgggtttattttgtgagaattctatcacaatttttccaggtgggattaaaaaccttaaggataatgtatgccattggactgggcattcagacttcggtactgacaaagcactagtagtagtctgttaagtaccattctcttcacagaagagaggtcaaatatttccaaaggaaggcacccgatatttgtggttctggccttgcagccttctggagaatcttaaaaggaaaaaagctggctggctgtttttagaaactggaatgatgatacacgtacagcaattactgcattcttctcccttatatccttttcgtaagaacaagtaaagaatgaagtcttttaaacaattcgacaataaaaaagtacaattttttttgtgctaaaaaaagggcaagacaacataaactccagttgtaaggactccatttgcatacttgatttaacactttttggtgtggaaggaaatgggactactgggctgttcgcagagcagcaacataatattagtgctttaagtaccagaaaccacccacagctttgtgggcaagttggggatggaaagattcaagagacttcatttttagcttgttacttgtcctaatgatagtagaccaggaagatccccatttaatagtacattcccccatttttaaaaaaactgatgccnnnnnnnnnnnnnnnnngtaaaattctgtatgtatgtcaccattttttttcacatgatacacagaaaactcaaggacccagagggggaccaagttatgttataccatttacaaaataccaaggagtccacagctacctaacacatttactacagcacaggaaccaatgaaggtacagtgtacaaaaaactgtaaacacggca

SEQ ID NO: 124904 - DNA, 541 bp, Homo Sapiens
ttctccttcgactagcattcgatccactgcttacatgtgtaggagagcctggggtactcgaacgcacgcttatactagccattgcaccactaagaccatgcagagctatggcttcccggaagggttgcaaatcagtctctacagatgagctagtttccgttgaagtagctcggttaggggacactacagtcagtcttgggggagctctagagtttcgtggtggaggaacttttccacacaggaagctgatcaaatcttctcgacgaatagttcttctgcgttttttaacccaagccaacacatccttattgcgtcgctgatagccaatctgaattccaatatcaaaacttcgttgatgggtatccacgctttctttgtagagattggtgacggcggtggctgcgttttggaaggggacccagagagaaagtcctggctgctgacacactcggtctttgtagagctgggccacggcggtggccgagttctggaagaggtgccacagcttctgctgcttgtgctcgggctgcgcggcggccgc

SEQ ID NO: 124905 - DNA, 539 bp, Homo Sapiens
  misc_feature (225)..(225): n is a, c, g, or t
agtttactggggttaatgttttattaatgataacctacattcacactgcatttctaagatttacatccaaagagcatactgtatttacatgcaccggtcagcccaagataacaaattcaaaccatggctgcgttaagacaatggtttgttccaattaaattaaacagataatactcttatccaccccccttggacatgtacaataagaacccctctttctccccnttcaaggaatataaaattgccattgataactgcactgatgagcaacaattacatttgaaacatttaaaacctgagagagaaacccaaatatgtttaagcactcacgtctacactcaaaatgccctgtgaactctagtgtaacacagattgctcagtggtcaacagtgcatgatctagctggctctgatagggactgacgccggctgctggcttttaacgggaagtgctattcttgcccagggcagagagagctacatccccgctgcctgcttgacggacagtcaggggcttttgttgttggtttgtttttgctt

SEQ ID NO: 124906 - DNA, 1206 bp, Homo Sapiens
tttcttgttaatttttattatatacatatcagtactcacaatacgttgcttatttaagatggctgtttataagtataaagcagtttgagcaacactgattgtgcattattgtacttcagatgaaaaatccttacatgcggaatcaatgtcttttaaaatttcagataaagaattttcatttgaggagacatacaattgtaagtgctcattttttgtcaattttaagacaccattatgtgtaagaaggattaattttaccataaaattacaaacaccctccatgtcttgacattcacatgaaagaacagcataacattaatcatccaaatgcatatcagagcaaactctaggccttagtgtgaggtgaacacggtaactgctacattatggaaatcggttgggccttagttaaatattgtagtatttttaaaatttgtatattgaaaaagacaaaatgagctgttaagtgataaacagcttactcaatttagcataactttaatttagaaatggaatagtgaaattaaaaaaagcatatgaagcagataaacagtatgtctttagaaatattaaagattttttactctgtttacaagttttgcttttttggttatgcctcttaaatatctgtctttttactttgtctataaaaataattgtccttagtattcctaaattcttttccaaataaagcaattatcgtttttatatggtaagaagttactgaatcataggtttaagatcagtggcacaaatcatacatgtagaagattatgtaacaaattcattgttaggtaaggagtcagagagtacagtacagtaacagccatacaggagaggtagaattcttaatcacagttttatagaaaagatgcagtagtttatatctgtaccctgctttattagttatggtactgtaaatttgcttctcattgcaaatttaacagcgcaaaagggaggggtattcataggcaaggatcttattgacctttgttctgcaagtgttgcagaggatacccctagacacctgaagcattttcttggccaattaaggtaattgatcatatacggcatttacctcatttttaaaaaccttgccagtagggaaatctaagctgctcttctcccaggggcctaagagggaaatgtatctctttttatactactatgagtgtaaatgaaatcactctctggttatcattattg

SEQ ID NO: 124907 - DNA, 1555 bp, Homo Sapiens
ccccaccacggcgccgggcctcagcctgcggggggcttgggctcccacggtggccagacaaggaggtgttgctggaggctgagtggaggctggtgagggagatgcggggtgaggggctggggagacagccccatgagggagctgaaggagccggcgggccagctcacagtgttccagctgttccatcagctcttgctccgtcaggccaccaggggcctggccgaggccgtccatggcggtggttaggtcccacatggccaagctgccgttggcctggccagtgagcaggtagcgccggggccgagagccgagccgccgggagccctcgcactccagcactgtgaaggccgtcgtgggtgagccgtccacggagcgcacggagcacacccgctgcccagtagatgagagacgcacgaagagctggctggcactgggcaccaccttctggatgaacacttgctggtcgtcccgctcaccgtaggggccaatgtcattgccagcactgcagccgccatgcccatctgccgactccagagccaggatcttaaaggaagcgagtggggtggagccgggctgggtggaaatcatgccgcggaagcgagtcacagaccatgtccgcacgtggttgttgtcggcacagactgagatgaggtgcttctccgacagcatgatcttggtgacagggctgcggtgcacagtgaaggtctggaagagctgaggccccgagcccacagtctccgggtgctgcacgatgacccgcacgccccctgagctggtgccataggcgatctcgatccagttcccactgtcactggtcttgggggtgaggtagacactgagggcggtgaccccatcctccgctgggtcccgatagagctcgctgacaaggaggtcgttgtctttcatgcgcaaggggaacttctgcacatccacgtagtaaatggagccgttgttgcagcccaggaggaggaaggagcctgccgcgtcataactggtgatgggctgcacctcctggacctgccagtgcttggtgacggcattccacaccccgatgcgccctgtgtggcttgtagcaatgagctggttcccgacgaagaacaaggcctccacaggcacccccagatgaaagacccctatctcggagccaccgccttccgcctgcagagcccatagcaggatctcgctgccggtggctgctgccaccatcttgtcatgttcacccaaagccccaccatgcacccgggctgtgagcgccagtcgttcgatgggccagtccaggcgggggctggaaaacaccagctgccagccagaggcttccttcaacctgtagcagactagaaactgggtataggccacagcgatccaattatggtgtccacacaccaggcgcaccatccccggctcctcaggttgtcctgagggtgagggaggggttttctcatccagcattcggcccagcagcctgcattgccaaggttggggggcatcgtgttgctccgtcggaaggggctggccgtcccctcgtgccgaattcagccaccagcctgtacctagc

SEQ ID NO: 124908 - DNA, 1775 bp, Homo Sapiens
  misc_feature (81)..(89): n is a, c, g, or t
  misc_feature (118)..(128): n is a, c, g, or t
  misc_feature (204)..(251): n is a, c, g, or t
  misc_feature (286)..(305): n is a, c, g, or t
  misc_feature (349)..(361): n is a, c, g, or t
  misc_feature (446)..(464): n is a, c, g, or t
  misc_feature (490)..(504): n is a, c, g, or t
  misc_feature (512)..(662): n is a, c, g, or t
ccccgcctcttttttctcccccgggggggaataattatttttcagcccacgccgccccaacggtggtttttaccccccgcnnnnnnnnnattttaggttcccccaccgcgcggggttnnnnnnnnnnncttcccagcggtggggaaaggatttttataaagaagaagctcccccccacttttctttataaaaaaagggggcccnnnnnnnnnnnnnnnnnnnnnnnnnnnnnnnnnnnnnnnnnnnnnnnnccccccccggtgtgattagccctccaagaaaaggnnnnnnnnnnnnnnnnnnnntgtggggtttttttaacaaaaccgttttggtttccccgcccggnnnnnnnnnnnnngtggggggggaaaacccacgcctcttttttcccgggcccggtttttttgaggaaaaaaaagttaaggccctttttccccttcccnnnnnnnnnnnnnnnnnnnaaagagaatgtttaaaaaattttttnnnnnnnnnnnnnnncccacaannnnnnnnnnnnnnnnnnnnnnnnnnnnnnnnnnnnnnnnnnnnnnnnnnnnnnnnnnnnnnnnnnnnnnnnnnnnnnnnnnnnnnnnnnnnnnnnnnnnnnnnnnnnnnnnnnnnnnnnnnnnnnnnnnnnnnnnnnnnnnnnnnnnnnnggcagtgaggactttattggggagggtgactttggcttccagaaaagagggaaggtggggacctagtaacaataaccatttattccaaggaggccctggccctgaacccggggttcccacaggaatcagggaggcacctgagtcccccaggaccagggcatcccaaggcatcatggcagctgcgttgttcaaaaggaagtttcattgagcttcatcttgggaggtgtgaggggagtgccgagaccgctggagggccacggggctggtgtgggtggccgtcggaggtctggcccactccgcaccagttcctggcagcgttccacaaagctgcccccaccacggcgccgggcctcagcctgcggggggcttgggctcccacggtggccaaacaaggaggtgttgctggaggctgagtggaggctggtgagggagatgcggggtgaggggctggggagacagccccatgagggagctgaaggagccggcggggccagctcacagtgttccagctgttccatcagctcttgctccgtcaggccacctgcaggggcctggccgaggccgtccatggcggtggttaggtcccacatggccaagctgccgttggcctggccagtgagcaggtagcgccggggccgagagccgagccgccgggagccctcgcactccagcactgtgaaggctgtcgtgggtgagccgtccacggagcgcacggagcacacccgctgcccagtagatgagagacgcacgaagagctggctggcactgggcaccaccttctggatgaacacttgctggtcgtcccgctcaccgtaggggccaatgtcattgccagcactgcagccgccatgcccatctgccgactccagagccaggatcttaaaggaagcgagtggggtggagccgggctgggtggaaatcatgccgcggaagcgagtcacagaccatgtccgcacgtggttgttgtcggcacagatggtcttgggggtgaggtagacactgagggcggtgaccccatcctccgctgggtcccgatagagctcgctgacaaggaggtcgttgtctttcatgcgcaaggggaacttctgcacatccacgtagtaaatggagccg

SEQ ID NO: 124909 - DNA, 466 bp, Homo Sapiens
aagttaaacacccatatgaatttattaaatccagactgtgttaaagggcggcggtctaggagggggagtgtggtagggggacgagggacaagatgatgaacggccgtgggatcccgtaggggaccggcccacaccccgcccaacccaccccctcggcaacgctgcatcagcttcaccatgattcccagtggtgctgggctggcagggcgagatggctggaaacacagagggacagagggacagacagcgcctccacaaacaaaccctggcctgccccggcccctacgtcacacgctgggccctgacctgaggcgggcctcccaccgccccggcctgatctgtccagggaaagggcgacagggaggggaggcgagggggccgggacgcaggggtagtggtcgccaggagccggagcacctcgtgccgaattcggcgcgccgtcgacttcatactcttccgcccttaa

SEQ ID NO: 124910 - DNA, 878 bp, Homo Sapiens
ggggccggggacgcaaggggtaagtggtcgcccaggagcccggagccaggtgaggacccagtctcgactaatcctttttcttgtcctctgctggctttggaggggcttcctggggctcgctggcagagctggccccctgggtgggcttggtgggcagggacgtggaggcctcctccctggtggcggtggtcgtggtgggtgcaggtgtgggcgtgagggcccctgctgctgtgggaacctcggccacgggggcggcagctgtggggtcttctccactcatgccaaactcgttgactcgggtggggtcgacgcggtagatccaccgttggtagaggtagatgaagaaaaccacatcgtcccgcaggcagccgatccggtacataacgggcatcttgatgacaaaggcgaacaggtcgtcgatgaatgtgttgagggccttgtaggtgagcatgcgccagggaaggtgggccacagacttgagcttgtagttgatgaagagctggggcgtcatggtgatgaagccgaaggtcagcaggaagccgtagagcatgctgagcacccaggagtaccagcccttgtgctccaggtacagaagactgtagacggcatagcagcccaggagcgggaagaggatccaggacaggtaccggaatgccatatcatcatacactttggtcgaggactcgatatacgtggacttgtccttgaaggataggcgggggaagattcctgccaccctgtgctctcggtccagccggacgtccatgaccttggtgatcttccagaggtcgatgaggaccccaatgaagacgctgacctggaccacgaagttggtctcgtgtccagatgtagagcctcgtgccgattcacccgggcct

SEQ ID NO: 124911 - DNA, 1485 bp, Homo Sapiens
  misc_feature (510)..(576): n is a, c, g, or t
  misc_feature (702)..(731): n is a, c, g, or t
ttctcctgtaataaaattgtctctgtacataactataaattgctcgtgttgatcactataattattcttattcatctcgagcgacacatgtattgttagctgcgctggtgtgttcttatccacactactacttagcactgctctgtcatgatctagcctgttagtattatattcttcatcgtgcatctggcgtcttcattattccttctccttgttgcggaggtatgatgctgctctcaacgtcgatttgtatcgtccaacctccctccgggtagtggttggtgcttgtccgacgaattggctctctctacggttcgcggcttgttctccctcgtctgtgcccctgttgttacgcggcgcgcgtgctgcgtgcggtcgctatactgcgccgcctctcattggtgggcgcgccgtcgttgacacagcgactggtgggttgtcgtcgtgttgtctgggtgctcctcctggtggatttgcttagtaggtgcggtccgcccctgctcttctgannnnnnnnnnnnnnnnnnnnnnnnnnnnnnnnnnnnnnnnnnnnnnnnnnnnnnnnnnnnnnnnnnnaagttaaacacccatatgaatttattaaatccagactgtgttaaagggcggcggtctaggagggggagtgtggtagggggacgagggacaagatgatgaacggccgtgggcatcccgtaggggggnnnnnnnnnnnnnnnnnnnnnnnnnnnnnntcggcaacgctgcatcagcttcaccatgattcccagtggtgctgggctggcagggcgagatggctggaaacacagagggacagagggacagacagcgcctccacaaacaaaccctggcctgccccggcccctacgtcacacgctgggccctgacctgaggcgggcctcccaccgccccggcctgatctgtccagggaaagggcgacagggaggggaggcgagggggccgggacgcaggggtagtggtcgccaggagccggagcaggtgaggaccagtctcgactaatcctttttcttgtcctctgctggctttggaggggcttcctggggctcgctggcagagctggccccctgggtgggcttggtgggcagggacgtggaggcctcctccctggtggcggtggtcgtggtgggtgcaggtgtgggcgtgagggcccctgctgctgtgggaacctcggccacgggggcggcagctgtggggtcttctccactcatgccaaactcgttgactcgggtggggtcgacgcggtagatccaccgttggtagaggtagatgaagaaaaccacatcgtcccgcaggcagccgatccggtacataacgggcatcttgatgacaaaggcgaacaggtcgtcgatgaatgtgttgagggccttgtaggtgagcatgcgccagggaaggtgggccacagacttgagcttgtagttgatgaagagctggggcgtcatggtgatgaagccgaaggtcagcaggaag

SEQ ID NO: 124912 - DNA, 2039 bp, Homo Sapiens
ttccttctgctgaccttggagggggcttcctggggggttcgctggcagagacgggcccccaggggtggggcttggtgggtagggaacgtggaggcctactcccctggtgagcggtggtcgtggtgggtgcaggtgtggacgtgagggcccctgctgctgtgggaacctcggccacggggggcggcagctggtggggtcttctccactcatgccaaactcgttgactcggggtggggtcgacgcggtagatccaccgttggtagaggtagatgaagaaaaccacatcgtcccgcaggcagccgatccggtacataacgggcatcttgatgacaaaggcgaacaggtcgtcgatgaatgtgttgagggccttgtaggtgagcatgcgccagggaaggtgggccacagacttgagcttgtagttgatgaagagctggggcgtcatggtgatgaagccgaaggtcagcaggaagccgtagagcatgctgagcacccaggagtaccagcccttgtgctccaggtacagaagactgtagacggcatagcagcccaggagcgggaagaggatccaggacaggtaccggaatgccatatcatcatacactttggtcgaggactcgatatacgtggacttgtccttgaaggataggcgggggaagattcctgccaccctgtgctctcggtccagccggacgtccatgaccttggtgatcttccagaggtcgatgaggaccccaatgaagacgctgacctggaccacgaagttggtctcgttgtccaggatgtagaggaggaccacgaatgactggaaaacgccgaagaagacggagcgcacggacaggccctccagggactgccggctgttccagaactggatatcattcttgaaggccaggaactcgaagacactgtgaacgatagacacgatgatggtgagcgccagcaggtaggggttggtctccagcagggccaccttcaccgagtcctgctcctcatctgactgctcgtacaactcatcgcccaggaagttccagggcgacttggtgctctgggcagcatagagctgccagcgccaaagcgagagtgggcagaaggagacgcggagcggcaggctggccaggctctcgttgatggggtagtagtccttctgcaggttccagtagtcattgaagtagatgatgggatagtagtcaccgctcacggcgtcgaacttcacatattgatccaggggagggggcacactgcccttcacccacggcgtgtggtcgtccacgatgttgatggtgatgttggggtgccaatgggagatcacctccacaggcccatagtcctcagccctcttgatcatttctgggtccgcttctgtctctcctgtcagcaggttcttggttttctgaaatcgtctgcgcttgtatttgttgatcatccgggacatgtggactgtggcaagccggcggtacagggccttctgccgggggtctgggtggaagccactcttggtgaagtaaacgtggatgtagatggagccgttctgctggacgctctgtgggatatcgagctcagcaaagtgctcgtagcagccgtctgagttctcgccgctagtccagtcgccatacacaagatcgtgctgttcccagaagagtgccgacgtggcgttgaagtctgtaaagtgctcgtgctctgagatgtacacatgcaggttcattaaagtgtctttggggaacaggttgcggctggcgacgcgtggggctcctccggggcccgcctggtcctgaggggccggccctcggcggaaccaactgctgatggcccagatgatgaagatcctaaacagcacacctttgatgacctgccaggcattgggtgccggctgggccggtgggttctgaggctgggtctccgctggcgggtccctcccgatgctgccattgctggtcacctgaccggagctgcctcccccggccgccaccacggcgctgcgggccccgtccgcctcctgcgccgccgccatcttccatcccgggaatccggaccggtccagc

SEQ ID NO: 124913 - DNA, 720 bp, Homo Sapiens
  misc_feature (600)..(654): n is a, c, g, or t
  misc_feature (693)..(693): n is a, c, g, or t
ttttttttggaggaactgatgaattcattttaatcacagaaatttgcctgggcttgagcaaactgtggggactcaatagatttggaggcctcctctcccttctgagaggcctgcctgcttcctgccctgatgaatccctaatttcagtacaaactgaggaacttgaaaaacatctgtgcactgggaccgcccctcacaggagggctgaaagcagcacagctgagtcagcggcacattcagcaggcgttcagtggggaagcaggagacagaggcggcgctcacaggacccgctccaggcttgtcacagccacacatcacagcactttgggttttgccacaacagagcagctctgagctcaatccttgcacctcagaagtgcatttatgattaaaatcatgctcgacatgaagccctgttatgatgtgcagtttaaaaagagaaacgggtccaaatcagcaccaacagagccccccagggggctccaagactcgccccagagacagcagaaggaccccatgtgcgcgctgatctgtaagaagggtggtggatgcagcagcagggggctgcgtccaaaggcagcaggtgggggcctctcatannnnnnnnnnnnnnnnnnnnnnnnnnnnnnnnnnnnnnnnnnnnnnnnnnnnnnnacagcaacacaatgagacaacagagactgtctagaatantaagaaaagaatgaaaaggtccatccc

SEQ ID NO: 124914 - DNA, 129 bp, Homo Sapiens
ggaggaactgatgaattcattttaatcacagaaatttgcctgggcttgagcaaactgtggggactcaatagatttggaggcctcctctcccttctgtcgtcttctcgcagccgtatagtagtagtaggc

SEQ ID NO: 124915 - DNA, 875 bp, Homo Sapiens
  misc_feature (89)..(107): n is a, c, g, or t
  misc_feature (115)..(128): n is a, c, g, or t
  misc_feature (140)..(140): n is a, c, g, or t
  misc_feature (142)..(142): n is a, c, g, or t
  misc_feature (148)..(149): n is a, c, g, or t
  misc_feature (151)..(275): n is a, c, g, or t
gggggggatccaacccctttgttttggccggggtttttttgggaaaaacgtttggccctttttcctttcctttggggcccccccgcccnnnnnnnnnnnnnnnnnnntttttgtnnnnnnnnnnnnnnccccaaattttntntttttnntnnnnnnnnnnnnnnnnnnnnnnnnnnnnnnnnnnnnnnnnnnnnnnnnnnnnnnnnnnnnnnnnnnnnnnnnnnnnnnnnnnnnnnnnnnnnnnnnnnnnnnnnnnnnnnnnnnnnnnnnnnnnntaagagtcagtatttattctgattaatattttacaaaattttgacatttaatttatgtaaggagggctaatttattaaacactttacaggtttttctttccacagaataacacggtaagtagcaaaataatacttggcacagttataaataaagaaaatataaaataaaaacatccatagcttaagtacaatgatgctgttttacgcccattaatatcaaataaattcctggaaacaacaaaaatatgaatgaaaaaaactccaaggaagtaattcatgttcagtgctgagaattaagttcctatttgctaaaagtatccaattaagttgataagaactattcccaaaggttcaccatcatacacaactttagaactgggtttatagttggttccacacacaggacctacaaaataattaaacagatggtatactgctgcatagctggctcctgaccatctgaccatttctgagttatagatttcacaggtactacaagatggttactacacaagcattcacattgctagtattttccatgtaattacacatctagaggtttgtctttttaactgaatgacatctcttttgcactgaaaa

SEQ ID NO: 124916 - DNA, 2110 bp, Homo Sapiens
  misc_feature (1155)..(1155): n is a, c, g, or t
tttttgaaccattttttttatatcctgcatttatttaagcaaaccaaatgtgtagagataggaaattaatgtgttataatgttttacaaatacagagagaaaacacagaatattaagaccctgaagagagtgcatttgagaacgcagttctatcataggagaccacttgcagggaacacattaaagccattgctgacacagccatctgtcattcctggtttgccgtcatttaagtagtttcaatagataaatcggtgatttgcttttaaacaaatattaatgttaatgattagggtagccttgaagggtttgtgagtgactgtactatacaatgtgatgctaggcttaatgtgtcatttcaatgctgttgtacattatgcaggggaaataatgtcttattacacattaactgcgacatccactaaaatgtgaactagtttgcataggttagtcctttgggcagcacgatgttgctctagtccaccaaggcttaaagattcacagtgtagaggaaaaaaatatgaattaaagcatttctactaaaatatattttaatagctggtgttaacaatttgcataacaaaagccaaattatattagtaacattgtaacattccgtgaagccccttcatttgcaaaacattcaatgttttcttcaaaactgttacactctcaaagttagtctcgcaaattaatcatcaaccacaattctacatattttgaagcaaacagaagccaaactgtacaatggttcaattttgatcacaggtcaaacatcaagtttcacaccatgcctgtaatagacttggtgctgcttcctaaatgctcagcaattcattgcatggacactggagaatgggactgtgatgcagttttctcttttcctttaaagtacatcattcttaacagcaactggattacaaagaagtgatactatgcaaactggataccatgtatcaagcacaaaaaatcctatggcattcccaggaatatactgaagtcatacagacaactgagaaaatttgctcaaagattcttccaagtttatgggttcaagtagtctaagcatcacagaataataaccacagaagcaacatacaatgccttgacttttttgatcaacagttgacagttagttgcgaggaaagggtccanaaggcatggaatacttcagagacttttattttagcatccttgtcagtttacatagcttcttacttaactaaaagctctcccacctccatatcaccttaaccaaaacaaccacaatctagccacttttagattatcagaagcaaatcgctaaggtataattaatttatgaagtgaagttcatcttgtgtagtgaatccagcctcacaattattctatcttacaataggcattttaaatcccaaatctaaagttaatgtttatatagctcaactctatataaatccacaaagaacctttcagaaatagatggaagaagtcggcattttctaaagttctaaatctttagagataaaatacaatcagctaacacctttaatatctgaggagcatcccacttccctaccacaaaaatatcaatcatgtgtaataaaatattcctatagaataggcagcaacttgcttgcttggttttctttccaagaccatactagacaaacaagagtaatcaaaaaggcacctatatttgtatatatctgtattacagttttggtatatcttttatccactttctatagggatgtgttattaaagatcacacacattttcttcatcttttattgaaaacattccactggagatggatgaacctgacaacgaggtacatcccttgaacttccactatctttttagaaaaagtcttgttcctcattcccagagtgttgtcaagctcagcatggagaggataaggaaagactgtggcacattggaaaaaccagatctgcatcttcttcaagaaataaacccagtggacagagaggggctggtctaatcttatccatattcctacaaggtgcttgtggaaactgtgcttacaaatgcctgtgtggtgtatggaggtcgaggagacctgggatcatcaagagcctcctccatgggcagttgataaccaaataaa

SEQ ID NO: 124917 - DNA, 975 bp, Homo Sapiens
tttttacagagctcattttatttaagtcctattttagaacaaaggaaacagtcttaggcaaggcaaactcacagttggctactcaatgtcttttatttctgcctgttttttggccccagaaaatgcaatattttgacacagaaaaaaacattaggatgagtgtgaaatcaaatacgattctggtttttgagctgacatttagtcatttggagccacatggctgtcccagggcctggtccccaggtcatgtgcttaaagcttccaggcggttctcatcatgatgatgaagtacacatcagtgtcaatggatgcgctcacacctgcatagtagttcatgaactcctcaggggtcaccaatccatctttgtcatagggtgaatcaaagttatccagaaatttcctaaatacttgttcctcactccattccccattctggtactttgggtggtgttttgcattatatacttcacgaaggtcttcgattgttataacaccatctccagtcttgtctaactttctaaaagcttgcatgattacctcttttctggctctggacattggaggtcttaatgtgagaagaaattcattgaagtctattgttccatttccatctttatcaaacctctggaaaagttcttccacctcttctttttccatgaccacagcataatcatttaaccctttcataaattctttaaaatcaagggttcgattattatcgtcatccataattctaaacactctgccaagtcctttgatcccagcagagcccctggccaggcactgcagtcggagtctttcaatggggtcggtggccgtggtgagctttttcttggcctggatcgccatctctcggtcatggcgcgctgtccctgccatcttaaatgctaaccttttgccaccagttgcttcgaactgaaactatggacgctgtctcctgcatctaggaaaactggtccctcccaagccaccttt

SEQ ID NO: 124918 - DNA, 961 bp, Homo Sapiens
agtgcatagactttatcaaatgttgaataaaaacagaaacaaaaaggagacaatcctacaatgaaaaggagacactcaggtccaccctagtgattccttgtatgtggaggaggtaagtgggacatggacagttctaaaatatagtacgtatatacccgacaaccacagtgttttgcatttctttatcagtgaaaaacaaactgatatctgaagtgtataaacagttccctagtagtctatttgagaaaaagtatcaaatgtgcatcaatatgttaaaactgacaaatacaagaaaagcattcagctagagaaaattcacagcattttattcaagttaatcaatttcattcaataatctgccatattgttcccagcaccactattactgttattatttctctttgaggaagaccaggtattaagaaatctggtttgaatttccatgatgcctaactctatggttaaaaatccttttccttaccaaaaaggaacttcttaatcaccagagaaacagagggaagactgagatatgtttgcagaaatttatctctactagagacaattcatagttcataatctttcagggttgtgctttacttgggggctccgttttcgggagcgggttgtttcccataaatgtttgcttaatacaaataatttgccccactgtaccacagaagggaaatgagggctagtgtccccagaaagcaagcaggcagtcctccagggaagaagccctaatggctcctagtggtgacagagtcattctgcctccccagcctgtgagcaataataaagtataactaagtgaacaggagaggtaataactagccagataacccatgggctagaatctctaaacagaaatgcttgtgttttgaataaatcagagctggaaagacacacttttggagaagtgattgagaatagaaaggtatgaaaaagataaaggtttctcacc

SEQ ID NO: 124919 - DNA, 708 bp, Homo Sapiens
  misc_feature (665)..(665): n is a, c, g, or t
tgtgatcaagtcctgtttatttcagaagcttgaacagtagaactaggaaggagtgatgaaaacaaggcaccagtccccttgacagggccaaatccggcacaagctctgtctgtgcgatcaaggctgacccagcagcctcaatccgccttttcctgtgaggagagggtttgaggacaacctgcgcacaggtgactgttccatagggtgaggttggggtaagttggctctgggttcctctggatcagctgcaaaaggccagagggcccccagtacccttggccaagagcattccatgctgactctgtctgtgctcaggcaaagccacattctggagaggaagccgtagtgcctggtgggcaccaggaaggcctcaggtgttcaagaacaacttgcaatgaggctccatggccagcaagcatctgcttccccagcccagtcatctctgcagagccttccaggagggggcagggggcatcccaggcagccagacttctcaggacccctctgttgggtgacataagccacaggcctctatacatactgcttcttagaagcagagctgctgggacgacttgggggtttttggccattctgagggggtgggtcccagaaggagagggggctggaagacgccagcctctcctctgtggtcaagtttggccagntctgcttactggatagaagccatttgaagtggggcatggtggg

SEQ ID NO: 124920 - DNA, 1152 bp, Homo Sapiens
agaagacatgaaaatttttattttcaaaaagaatgtatttttacataaatctacaacagaattcaaatgtagaaaaaataaactatattcagggatacagcgctcagcacagcacaccccctccccggagtgggccgtccccccagaacaagactgaaggggcctcgccggccccaggacccccacagcagggcagccacaggctggcacgcggagctccccgtgtctgtcacaacagactgcaaatgcgaggcgcccagaccctgagcgtcgaagacaaaaaccaacccattttcactgtggcaactcacttcttagtgcaggtcactcatccgtacacctcatcggaaacagaggggcaggggaaaccacaggatatacatctccagatgcctcagataatcccctcctcacccctgccactcgaggacctccaggagagcccacctgacaaaccccccgcttcctccctgggccggtgcaaccaaaaacctgcaggattcatccaggactccaggccctgagaaaggcagagctggctgagctcccccaggactccaggccctgagagaggcagagctggctgggctccggggccagggccctctgtagacccaggacccaagctggcttcccagagcatcacagccccaaagccctgccccgtgggacagacccaggcacctgtgccctcagccaccctgctccgccctcactgtgtgtggcaaccctcaccacaactgtctccatgggcaggttcaggtttcagcctcgctccccagaggctcccgctcggcctctgctgttaactgctgtgcaggtgagcaccgggaagccacactgccaggagcacaggcagaggggcaggcaggcgagggctccagcagggacggcgaggctcgcgcttagcacccaacccctcgaggagtccgaggggcagcactggccctgcagccctcatagggcgcatgagtcccactggcatctgacctggagtaagggactcagggagccttaccatgccacaggtgtcccccacatcccaacgcaagtccatcaggagcttggctccttccgacgcgtggtcgacgatatcccgggattccggaccgtaccagcctgctttgtgtacgactgtctatagtacatgcg

SEQ ID NO: 124921 - DNA, 854 bp, Homo Sapiens
  misc_feature (23)..(23): n is a, c, g, or t
  misc_feature (82)..(82): n is a, c, g, or t
  misc_feature (88)..(115): n is a, c, g, or t
aaggcccagttcacttcccttangggggccggggggccaaaagaaaaggtttggaaaagtttttaaagggccaagcgcgccnaacagnnnnnnnnnnnnnnnnnnnnnnnnnnnnttgtcaaacaataacttaggtatttatttcattagagaatcaggtaaacctcacattacacggccaaggccaagataattttgcacagttagaatgtgttcaagaaaccagccacaatgtaaccggattagatttcaccaaggagatgactgtgttcctccaaataaacttcatttaggaagatgacattcctccaatatgtggaaagacaataaatgcactttcttctctccgccactgaggaagaaagtctccctcttgagggaccaacactatttcctttttgctgctcttttcccttctcctttctttggtttctcctttccacgaagcttctttagtcgtttttgctcatccataaaatcctgatgctcatctctgtagagtccaagaaatcggagcgtctgcatgagttcagcgtaagtgtggtgatttggataccaatcataagtctccttcttcttggccaagggcagttcactaaacagtttcaccactttcatagacttggaattagtaggcctggtgacttcaccaaatagccgggcactgagacgagacatgcggaaggcatattctgaaagggaggacatttcttgagtggcaaggagttagagttcctagacctgaccttcctcacccacgcgccctcgtcccggaaggcccgccctctacccggctccaagctcgcgccggacgcgtggtcgacgatatcccgggaattccggaccggtccagc

SEQ ID NO: 124922 - DNA, 965 bp, Homo Sapiens
  misc_feature (912)..(912): n is a, c, g, or t
cctctttctctttcgccccctttttctctgcccttttttctccctttatcttgggttttctgtccttttcctgataggatgtgttaaaagtaacacggacattttaaaagcatgggctacattggtcatacatattagaaaccataaaaaaaagttaagaactaaaatgtacatcatacacttgtatatatattttttacacagaggtaaaaaggcttattataaaaaaatcaatacaacagggtttttagtatacaggtaaagaatgaattatgcttcaggcactttaatttgttaatgtgagcaaatagcttggggggtcggggaggcttctggacagaaaatcttttggttaatgttttgttaccacagatacaaaaataaaatctgaataatttctctcaaatgattgacgtcagtatggcaaagctgactgggaaaatactacacactgttcagctgcagtgtggcaattagagacgtatttacataaatgtccccatggctgtctttgtgcccttaaccgatgccttcacaaaccaaaaagtatacgtggagtaagatctgctagcgtaactcttaaaagggtggaaaaggacaaggggtgaaagaagagagaaacaggtaacaactaaatagaggtgacaaacaaaaaacagctgggatatgtgcgttcttattgaaataaataggggcacttgaactgaggtctaaggaaacgaacattagtgttgtgctttgtagagaagagaccctagagaaagaccccaaggaagtgcctccgggtcgggggaaggtggtctctcgacagcactggaggctggctgaaggttttctagatgttctccaggcatggatgaggttctcttttcttccatcaatccagatggacagctctctgctccttttcanactggaaagcctacacagttactccaatgaatgaagacgtctactaactgact

SEQ ID NO: 124923 - DNA, 902 bp, Homo Sapiens
  misc_feature (684)..(706): n is a, c, g, or t
cagacttctttgtcgttgttttatttaaaatgttattgtctctgattagaaaatacagtcatgagggctaaaaactgaaatgatgtgaaaaggcatccattaagcagtgttgccccaccaccctttccatcagtcttgtctcatggggatggggaaaatgaagacagaacgctttgccttgctttgcaatccctcctttgaaggccttctgtcccaggaagccaatgttcatttgatgtggaagagggacctgtgtttaaccagaagctgtcctccctcatccctttcccatggcttacacgcagaagggagaggagatgaccagaggagaaatcaggggaagaaaaggcaacaggggaggcaaagggaaaggagaggaatgcttaaaatatacagtgaaatttgagtaggattctctactcaaagacttctctgggaagtgtccagaattgaccacacaggtgctgacggtagaaagaacacagacccaaaaccctgatctagttgcattaactccattagccctgagttcctctgtaaaatgaagactgtggaggcaccaactagaggatttctgtgaccttctcaaactctaaaatttttggcactggactgttccactttgaagggtcaagaaagaaatctggaggttgcagaaatcagggtcaggcgcacatacacgcnnnnnnnnnnnnnnnnnnnnnnngcttatgtaaatcgactctccacagaacgggtgtgtagaccaccaagatcaccaaagtgcaacttgccactgggtcaagtttcccatggagacaatttgagggaggggccctgggaaaagttctgaggcctcgcagaaagcgtgcagatgtgcactatcaattttggggccccctcatctgaggaaaaccatctcc

SEQ ID NO: 124924 - DNA, 1784 bp, Homo Sapiens
aacttaggctaggtacgaggcctggtggcgaattcggcacgagggggggcgcatgtctgcccccactcccggggcttgccgggggttgcccggggcctctggggcatggctacagctgtggcagacagtgatgttcatgttcttaaaatgccacacacacatttcctcctcggataatgtgaaccactaagggggttgtgactgggctgtgtgagggtggggtgggagggggcccagcaaccccccaccctccccatgcctctctcttctctgcttttcttctcacttccgagtccatgtgcagtgcttgatagaatcacccccacctggaggggctggctcctgccctcccggagcctatgggttgagccgtccctcaagggcccctgcccagctgggctcgtgctgtgcttcattcacctctccatcgtctctaaatcttcctcttttttcctaaagacagaaggttttggtctgttttttcagtcggatcttctcttctctgggaggctttggaatgatgaaagcatgtaccctccacccttttcctggccccctaatggggcctgggccctttcccaacccctcctaggatgtgcgggcagtgtgctggcgcctcacagccagccgggctgcccattcacgcagagctctctgagcgggaggtggaagaaaggatggctctggttgccacagagctgggacttcatgttcttctagagagggccacaagagggccacaggggtggccgggagttgtcagctgatgcctgctgagaggcaggaattgtgccagtgagtgacagtcatgagggagtgtctcttcttggggaggaaagaaggtagagcctttctgtctgaatgaaaggccaaggctacagtacagggccccgccccagccagggtgttaatgcccacgtagtggaggcctctggcagatcctgcattccaaggtcactggactgtacgtttttatggttgtgggaagggtgggtggctttagaattaagggccttgtaggctttggcaggtaagagggcccaaggtaaggacgagagccaacgggcacaagcattctatatataagtggctcattaggtgtttattttgttctatttaagaatttgttttattaaattaatataaaaatctttgtaaatctctatatacatctggtcattggaggttccagttataaacccatcttagttccacccctttcccctcaaagggggagcaggggtcaagtgaccccaacccatcctgccagggcagggcctatcttcctgcctctggaagacttgttgcaggtgggtagtgggtcagattccaggtaggatgaactgggagaagctggcaccccaggtctggagggggctggggtgcagcctccagctgtagctgcctcctgccttccgaaggcagaaggaatgaaagatgcacattctgggctgacgggcatggctagcaccatcctaggccacccacgaggggctcattggcatttgtcgtcgctgtcggaagggctgccctcccgggggaggccatgacgggagtggggcccccagagtgcatgcacctcagtggtctccgtgtcactgctgctggtggcactgtctcggaagctggcgaggggcggccggactttcacaccctgtgctgtgacagagccctcgatggccttccggagctcctttagagtaacgattccaatgagtctgccaatactggtgacataagcatggtccactcccagcagtgagaagatagtgtgagtctgcagt

SEQ ID NO: 124925 - DNA, 1469 bp, Homo Sapiens
  misc_feature (184)..(230): n is a, c, g, or t
aatccaagtacaattttttaataaagataattacaaaagatggaaaaatcagctcagaaaggccaattacttctttaatagatcagtttttttgacataataactcacatcaattttaaatactatcacataaagcatggtggagaaaagaaattttgcttcataattagaaaaactcacaatnnnnnnnnnnnnnnnnnnnnnnnnnnnnnnnnnnnnnnnnnnnnnnntacagtccatgccaaagtagtataaaatgaagccagaagtcttcaaaaagaaaacattttcctttcaatattttctttttaatgattttctgaaattggtgagactgtcaaattcaggggttgctgagctgttctgatttggttcctttggtatctgttttttcaccactgttgtccttggatttatcttcttccttaacgtctgtttttttgtcctctgtttctttcttatcttcttcaattctagctttctttgctcctttcttatgatcagccacatttcttcgacctccttctccttcatcctcagaatctgagaattcttcatcacaagctatccgcttgtctgatgctcgaatagaaattctcttgtctggatcttctccatcttcatctccactgtcttcatgaacagcatcttctggaatagcttgcatctggacaccaggtgcatgaggtaacatgcgcaaattttcaaacaaacgctgttttatcttttccatatattctggagtgttctggtttgtcatgtttgaaggactaatatgcagtttgaagtctggtccaaaatactcaaagtaatcattatatggcaactcattgggaatctcacaatcaagggcaactgcagtctcatatgtccaacatcgagcaacattacggattgtgtagccacctcctccaagcatcagtaatggtaagttaaaagtttttacaacttctacacatttagcatgagctttgactgttagattgaaacaacccagtctatcaccagataatgagtctgcaccacactgtaataccacagcactaggttgatacatctccatcacctttgagataataggcttaaatatctgcccatatgactcatcatctataccatctctcattggaaaattgacagcatagtatttgccttttcccagcaccaaatatccctcaaggtttcctgtgccaggaaagtattccccatatttatggaatgataccgtcattacacgatctgttgtataaaaagcttcttcaacaccatcaccatgatgaatatctatatcaatatataagactctctgatgatactttagtaattcaaggatggcaagcacaatatcattaacgtaacagaatcctgatgcttctgatttcttagcatgatgtaatcctccagcccaattaacagccatatcagtctgttgtcggtttaacttcacagctccagcaactgaaccgccc

SEQ ID NO: 124926 - DNA, 508 bp, Homo Sapiens
  misc_feature (62)..(94): n is a, c, g, or t
  misc_feature (292)..(327): n is a, c, g, or t
gtgcctaagctaaaattaaccctcactacaagggaataagcttgcggccgcatacgcggtcnnnnnnnnnnnnnnnnnnnnnnnnnnnnnnnnnaactgaatgcataactttattaaataaatgctttgtcatgacaaaagacaaagatcaaggagtaacataaattataagttgaataaatagtatacagcaatcttcactttttaagaaaatgtgagatcctttgttggttttttatttccttaagtacaaaatgctaaacgggagccgagctcttccgcattcaggtgnnnnnnnnnnnnnnnnnnnnnnnnnnnnnnnnnnnnctcacaaactggttgcatttgttgatttatttttccatccttttcaccagtaaagattatcatcgtttatttttgtttttaaagttgaaaacaaaaaagaggagagaacagagttatggtatgaatgtatgtaaaactatagagaactacagtaatatgtactgtggttattgctgtcttc

SEQ ID NO: 124927 - DNA, 2792 bp, Homo Sapiens
  misc_feature (86)..(119): n is a, c, g, or t
  misc_feature (301)..(348): n is a, c, g, or t
aagaaaatgtgagatcctttgttggttttttatttccttaagtacaaaatgctaaacgggagccgagctcttccgcattcaggtgnnnnnnnnnnnnnnnnnnnnnnnnnnnnnnnnnnctcacaaactggttgcatttgttgatttatttttccatccttttcaccagtaaagattatcatcgtttatttttgtttttaaagttgaaaacaaaaaagaggagagaacagagttatggtatgaatgtatgtaaaactatagagaactacagtaatatgtactgtggttattgctgtcttcnnnnnnnnnnnnnnnnnnnnnnnnnnnnnnnnnnnnnnnnnnnnnnnncggtaggcaactcggaatctgaaggaatcttgtctgacaactgtgctatccatgtgggctacggtgtgacagtggcggtagagaggagactccggctggcgaccggggactggtggagtgggttgagtgggcacagggaagctggggtccccttcccctcggaccctccccaccttccctttccccatccaaaaggatttcaggagaggaggccagagtctgtgaaatgactaaactatatactccattagaaaaccaagaaagtatgtttgaaatagaaacaaaagcctaagagaaaataaaaagtggagaaacagtgcaatgtaaatcttgcactttagtggttttaaaaacacagacagtacaaggcccaggttgctggctggtgaaacccctgtccctcgtccctcctccactttgcaaaacggagcctcctttctcttggaagccagacatatcctctctgacgctatggggtttcttctccttagagctcttctctgaggttcccattctgggccggagccctctcaggagtgagtggatgggtccggggtactgtcccaccttgaggggggcttggcggttgccgtggcagccctgtctcactaaccggtgcgtggcgggagcaggtggttgaggcccaccctctaggggaggccagccctgtgggggtaccatggaggccacagaggtggtggtggggagatgggttgggagagaaggggcatgatcagaaaagggcctccctggacctcgtgcgcctgccttcctcccctcatggggccagtgtccccaggcctgtctgtctaggcctggctgtcaaagaaaggttccagtctcttcctccccatgtgccctgctttgccaggtgggtcagggcaggctggaggaaggagggtcagtcctggctgggcttccctatctcctggcagtcgtgggaaagacagaggcatcttcctcactggtggagtgaggcacgaatctaaaggggatgggaagaccttctgtgggtgtgagcatgggagtgggcagcacttagattcggagccatggatagtccggagtccaaggtctctgggtgagcagacagtcggccaaaggccagcctggagtcaaagagaccagacccctgcttagattgccatactcgcaccattccaaacctgcctccctcacaccctgccatgggggaagaggtgccgtcttcctccagtgcctcccttcccaggatctccccaccctgggctcagccagaactcccatttgggaggcttagttccatgtgtccatgaaggcccagcttctctggggagtgaccagctgcccaggagaaactcctgcatgcagaagagactcacaggtttgggttcgcaggcacgaactttggaaaccggaagagtctggcgcacttacaccaggctctaatcccccacctgatggctggcagcaaagagccaacgcaaggggcagaagcctgctcaaagtccagacacagtccgtgaagagagagcccctctcaagaattaggtccaggctgggaggaatgtggggggagcttgtagttcctggctcagtcttttctcaggggagtggcaccccagtatccacttggcagatcctagttggataactgctcaagatgcaaagggagaatgggtggaaagaacagtgacgtggaagaggtttgggatactggcctaagacatacagaaacgtgagttgggtttaggggacagctgtgcagagagatggggcatgctgactcggcaggtcaaggccttgtggctgctggccctatcgggcccctttgtctcatgaagattgagcacttctcctgtccccagccaactgtcctgtccaggggcataggagatagcccccaagttctatagctatagggttcccatcagttgaaacagatttgctttttcgctattcctcttcgtagccccaaattcgttgttggaggcggtctccgctgtgtcatgccatgagcaaagagtgaagagagctgtgtccacagcacgaaggggtctccttggccagtgtccaagccccctttcctggatatcttcagccttaaagaacagtcacaaggccacccattggttgaggaagtcattggagaatgggagtttcggaatctggctgccgagtgacagcatccctgaatcatgcgttccctgcttgtcccagctttccttccatcctccaccccagggaggatgcagggactggccagaatggaggaagagctggaaagactcgtgggcctcagtccctcattgcaggctgaaggtgggcagcggagcacatagtcttgtcccttccaaagcatggccagtttagactgattcttcctatctggcttctaaagtctagcaccctcctaaagttcctcgtgccgaattcggcgcgccgtcgacttcatactctctcgc

SEQ ID NO: 124928 - DNA, 1128 bp, Homo Sapiens
  misc_feature (116)..(117): n is a, c, g, or t
gctcagatgtcagtgagattggagtgtatctgtcatctctcaggatgcaccagatcactgcagtctagtgatatgctcagagcaaggagatggtgaagaacagtacgtgagagttnnggtactgcctaagactacagaaagtgagtgggtttagggacagctgtgcagagagatgggcatgctgactcggcaggtcaaggcattgtggctgctggccctatcgggcccctttgtctcatgaagattgagcacttctcctgtccccagccaactgtcctgtccaggggcataggagatagcccccaagttctatagctatagggttcccatcagttgaaacagatttgctttttcgctattcctcttcgtagccccaaattcgttgttggaggcggtctccgctgtgtcatgccatgagcaaagagtgaagagagctgtgtccacagcacgaaggggtctccttggccagtgtccaagccccctttcctggatatcttcagccttaaagaacagtcacaaggccacccattggttgaggaagtcattggagaatgggagtttcggaatctggctgccgagtgacagcatccctgaatcatgcgttccctgcttgtcccagctttccttccatcctccaccccagggaggatgcagggactggccagaatggaggaagagctggaaagactcgtgggcctcagtccctcattgcaggctgaaggtgggcagcggagcacatagtcttgtcccttccaaagcatggccagtttagactgattcttcctatctggcttctaaagtctagcaccctcctaaagttactcaccttccctggctctgcggcctggattaagctcatttctattttgcaacccattcccccattttcctctctttcctctcaaatcctagaaaatacatatggtggggaagctaaggaaatttctattggcttttccccctttctgctgctttgtgccaaagctagaatggaacagtcagccccctctcccttcagccctctgttcctccccacatcgactctggccggaaccatccatacattactgttctcctgcctcgtgccgacttaaaccaacgcaggcctcgtaacctagctatgtgttg

SEQ ID NO: 124929 - DNA, 854 bp, Homo Sapiens
caaaggcagttgggggaaccttctttctctcaatgaaagggctcttttttgagcagcaatcttttgacgtagggttctctctagagctcttttgagttccatttggcggagcctctcagagtgagggatggtccgggtactgtccaccttgaggggggttggcggttgccgtgcagccctgtctcactaaccggtgcgtggcgggagcaggtggttgaggcccaccctctaggggaggccagccctgtgggggtaccatggaggccacagaggtggtggtggggagatggggtgggagagaaggggcatgatcagaaaagggcctccctggacctcgtgcgcctgccttcctcccctcatggggccagtgtccccaggcctgtctgtctaggcctggctgtcaaagaaaggttccagtctcttcctccccatgtgccctgctttgccaggtgggtcagggcaggctggaggaaggagggtcagtcctggctgggcttccctatctcctggcagtcgtgggaaagacagaggcatcttcctcactggtggagtgaggcacgaatctaaaggggatgggaagaccttctgtgggtgtgagcatgggagtgggcagcacttagattcggagccatggatagtccggagtccaaggtctctgggtgagcagacagtcggccaaaggccagcctggagtcaaagagaccagacccctgcccaggttgctggctggtgaaacccctgtccctcgtccctcctccactttgcaaaacggagcctcctttctcttggaagccagacatatcctctctgacgctcctcgtgccgaattcggcgcgccgtcgactttcatactc

SEQ ID NO: 124930 - DNA, 885 bp, Homo Sapiens
gagacagactgagagtggatatgctagctacgaactgagtggttaggacacttgcaaggatgggcatgtactcgcagtcaggcctgtgctgctgcccatcgggcccttgttcatgagatgagcattctcctgtccccagccaactgtcctgtccaggggcataggagatagcccccaagttctatagctatagggttcccatcagttgaaacagatttgctttttcgctattcctcttcgtagccccaaattcgttgttggaggcggtctccgctgtgtcatgccatgagcaaagagtgaagagagctgtgtccacagcacgaaggggtctccttggccagtgtccaagccccctttcctggatatcttcagccttaaagaacagtcacaaggccacccattggttgaggaagtcattggagaatgggagtttcggaatctggctgccgagtgacagcatccctgaatcatgcgttccctgcttgtcccagctttccttccatcctccaccccagggaggatgcagggactggccagaatggaggaagagctggaaagactcgtgggcctcagtccctcattgcaggctgaaggtgggcagcggagcacatagtcttgtcccttccaaagcatggccagtttagactgattcttcctatctggcttctaaagtctagcaccctcctaaagttactcaccttccctggctctgcggcctggattaagctcatttctattttgcaacccattcccccattttcctctctttcctctcaaatcctagaaaatacatatggtggggaagctaaggaaatttctattggcttttccccctttctgccctcgtgccgaattcggcgcgccgtcgacttcatactctctcgc

SEQ ID NO: 124931 - DNA, 1383 bp, Homo Sapiens
gcttcgagccgtctgcacatgatcaacaggaggaacagacgaagtgtacgctacacgaactatgttagacatgcaaaaggcagtatgcagtcagctgtgtgctgctatcggccttgttcagagatggcactttctgtcccagcactgtctgtcagggcatagagaagcccccagtctatagctatagggtcccatcagttgaacagattgcttttcgctatcctcttcgtagccccaaattcgttgttggaggcggtctccgctgtgtcatgccatgagcaaagagtgaagagagctgtgtccacagcacgaaggggtctccttggccagtgtccaagccccctttcctggatatcttcagccttaaagaacagtcacaaggccacccattggttgaggaagtcattggagaatgggagtttcggaatctggctgccgagtgacagcatccctgaatcatgcgttccctgcttgtcccagctttccttccatcctccaccccagggaggatgcagggactggccagaatggaggaagagctggaaagactcgtgggcctcagtccctcattgcaggctgaaggtgggcagcggagcacatagtcttgtcccttccaaagcatggccagtttagactgattcttcctatctggcttctaaagtctagcaccctcctaaagttactcaccttccctggctctgcggcctggattaagctcatttctattttgcaacccattcccccattttcctctctttcctctcaaatcctagaaaatacatatggtggggaagctaaggaaatttctattggcttttccccctttctgctgctttgtgccaaagctagaatggaacagtcagccccctctcccttcagccctctgttcctccccacatcgactctggccggaaccatccatcttactgttctcctgcatctaaacctttttgccaccatctccctctgccatctcttacttcagtctccctcttgctctgccagcatggagagtgagggaggcttccaaaaatgcacattctgttcagatgaaaggaaaaggctggggtgggactggtggatccatcgtggacctgttgggctcatgtggtgtggtgtccggagactgtgacttcctgagggtttaaagactaaaatgggatggactgaggcgcgtgctgtgtgcaccacggagggctggcctctgcctggctcggtgggtgcagatgaacacacgtggggaatcactgtcaaatccagtactgtgccccacaaaaaagctgagtttattgctcacgggaaactctgcctcgaggcaggcaaaaatgctattacgggcctcgtgccgaattcggcgcgccgtcgacttcatactcttccccc

SEQ ID NO: 124932 - DNA, 1410 bp, Homo Sapiens
  misc_feature (1228)..(1264): n is a, c, g, or t
  misc_feature (1322)..(1331): n is a, c, g, or t
taaaagcttctccccaatctcgggaagaccccaatctagtaggtcccataaccatgttttctatctttggcccaatgtttggagcgttcgtggtcagcaggcaagatgaagagtgtccagcagaggggttcttgcaggtccagcccctttctgaattctcaccttaagaacagcacagcccaccatggttgagaagtcattgagaatggagttcggaatctggctgcgcgttgacagcatccctgaatcatgcgttccctgcttgtcccagctttccttccatcctccaccccagggaggatgcagggactggccagaatggaggaagagctggaaagactcgtgggcctcagtccctcattgcaggctgaaggtgggcagcggagcacatagtcttgtcccttccaaagcatggccagtttagactgattcttcctatctggcttctaaagtctagcaccctcctaaagttactcaccttccctggctctgcggcctggattaagctcatttctattttgcaacccattcccccattttcctctctttcctctcaaatcctagaaaatacatatggtggggaagctaaggaaatttctattggcttttccccctttctgctgctttgtgccaaagctagaatggaacagtcagccccctctcccttcagccctctgttcctccccacatcgactctggccggaaccatccatcttactgttctcctgcatctaaacctttttgccaccatctccctctgccatctcttacttcagtctccctcctgctctgccagcatggagagtgagggaggcttccaaaaatgcacattctgttcagatgaaaggaaaaggctggggtgggactggtggatccatcgtggacctgttgggctcatgtggtgtggtgtccggagactgtgacttcctgagggtttaaagactaaaatgggatggactgaggcgcgtgctgtgtgcaccacggagggctggcctctgcctggctcggtgggtgcagatgaacacacgtggggaatcactgtcaaatccagtactgtgccccacaaaaaagctgagtttattgctcacgggaaactctgcctcgaggcaggcaaaaatgctattacgggttgtattaggagaatatgggttttctcagttttcccagaatgaggaagctcctcaatgcccctataggaactactttgaaaagttaatgcaaacctttnnnnnnnnnnnnnnnnnnnnnnnnnnnnnnnnnnnnntagatttatatgcctatatatgactatatggagtcctgtagataaatacgagcccacnnnnnnnnnncagcctatcctcccccacagaggctgctgcgctcctcgtgccgaattcggcgcgccgtcgacttcatactctctcgccc

SEQ ID NO: 124933 - DNA, 863 bp, Homo Sapiens
  misc_feature (614)..(614): n is a, c, g, or t
gggagagagtatgaagtcgacggcgcgccgaattcggcacgaggcggcacgaggagagaggaaaatgggggaatgggttgcaaaatagaaatgagcttaatccaggccgcagagccagggaaggtgagtaactttaggagggtgctagactttagaagccagataggaagaatcagtctaaactggccatgctttggaagggacaagactatgtgctccgctgcccaccttcagcctgcaatgagggactgaggcccacgagtctttccagctcttcctccattctggccagtccctgcatcctccctggggtggaggatggaaggaaagctgggacaagcagggaacgcatgattcagggatgctgtcactcggcagccagattccgaaactcccattctccaatgacttcctcaaccaatgggtggccttgtgactgttctttaagggtgaagatatccaggaaagggggcttggacactggccaaggagaccccttcgtgctgtggacacagctctcttcactctttgctcatggcatgacacagcggagaccgcctccaacaacgaatttggggcttcgaagaggaatagcgaaaaagccaatctgtttncactggtgggaaccctatagctatagaacttgggggctatctcctatgcccctggacaggaagttggctggggacaggagaatgctcatcttctgagacaaggggccgatagggcacagcacaggcctgactgcgagtactgcccatctcttgccagtgtcctaaccactccgtttgatgctagcagatccactctccgtctgtctcccatccctgctctgcttttcaagatgcatgacggtgctccga

SEQ ID NO: 124934 - DNA, 767 bp, Homo Sapiens
  misc_feature (650)..(650): n is a, c, g, or t
  misc_feature (658)..(659): n is a, c, g, or t
  misc_feature (667)..(667): n is a, c, g, or t
  misc_feature (673)..(673): n is a, c, g, or t
  misc_feature (702)..(702): n is a, c, g, or t
taacggggagagagtatgaagtcgacggcgcgccgaattcggcacgaggtcaatcttcatgagacaaaggggcccgatagggccagcagccacaaggccttgacctgccgagtcagcatgccccatctctctgcacagctgtcccctaaacccaactcacgtttctgtatgtcttaggccagtatcccaaacctcttccacgtcactgttctttccacccattctccctttgcatcttgagcagttatccaactaggatctgccaagtggatactggggtgccactcccctgagaaaagactgagccaggaactacaagctccccccacattcctcccagcctggacctaattcttgagaggggctctctcttcacggactgtgtctggactttgagcaggcttctgccccttgcgttggctctttgctgccagccatcaggtgggggattagagcctggtgtaagtgcgccagtctcttccggtttccaaagttcgtgcctgcgaacccaaacctgtgagtctcttctgcatgcaggagtttctcctgggcagctggtcactccccagagaagctgggccttcatggacacatggaactaagcctcccaatgggagtctggctgagcccaggtggggagatctgggaanggagcacnnggagagangcactnctccccatgcaggtgtgagggagcagttngatgtgcaatatgcatctaacagggtctgtctctgatcagctggcttgcgatgctgtcacaagac

SEQ ID NO: 124935 - DNA, 796 bp, Homo Sapiens
ggggaagagttttggatactgccttaagacatacagaaacgtgagttggtttaggggacagctgtgcagagagatggggcatgctgactcggcaggtcaaggccttgtggctgctggccctatcgggcccctttgtctcatgaagattgagcacttctcctgtccccagccaactgtcctgtccaggggcataggagatagcccccaagttctatagctatagggttcccatcagttgaaacagatttgctttttcgctattcctcttcgtagccccaaattcgttgttggaggcggtctccgctgtgtcatgccatgagcaaagagtgaagagagctgtgtccacagcacgaaggggtctccttggccagtgtccaagccccctttcctggatatcttcagccttaaagaacagtcacaaggccacccattggttgaggaagtcattggagaatgggagtttcggaatctggctgccgagtgacagcatccctgaatcatgcgttccctgcttgtcccagctttccttccatcctccaccccagggaggatgcagggactggccagaatggaggaagagctggaaagactcgtgggcctcagtccctcattgcaggctgaaggtgggcagcggagcacatagtcttgtcccttccaaagcatggccagtttagactgattcttcctatctggcttctaaagtctagcaccctcctaaagttactcaccttccctggctctgcggccctcgtgccgaattcggcgcgccgtcgacttcataccctctcgcccctaa

SEQ ID NO: 124936 - DNA, 595 bp, Homo Sapiens
  misc_feature (544)..(544): n is a, c, g, or t
aatgttagacgaatttattttaaaactctgcatacacatcatttaaaatgagttaaaaacttaaaaagtgaactctgagctttggcaaagttgcaaaggtgatgcagcaaagttttctgtgtcattaaaactatgcctgaaactacaggattccttccgttggaatgaagttttcccttcagctccaagaattcagcctcccttaaccaagttgccttcagttttaggacctgcgctgtcagtcaggcccgacctccgcaacggcctccgaccaccgcctgtggagcagcacccagaacaggagcgcgccccccagcagcagggccaggcccagcctccagctcctgggggacttcagccacttccacagccgggccgacagccaggcgccccatggcctcctctgcaccctggctgccacgcgctccgccacccgccgggagccgctcctcagggcctgcccagcgcagcacctgcgccagctcatacacctcgttggagtaatgggcgcccttgtgctccagcaccaagccctcgaccatcnccagcagctgctccacctgggcttcctgctcccggccggtggcccggttat

SEQ ID NO: 124937 - DNA, 2053 bp, Homo Sapiens
  misc_feature (41)..(63): n is a, c, g, or t
ccctcaactaaagggaataagcttgcggccgctgctcaggnnnnnnnnnnnnnnnnnnnnnnncaggcaccattttttataaaaacgcatagtctcatttttcactctttaaaatcacattcaaaaatcggcaaagaaacgccccggggaatgagtagacgggaggggagggtgcgccaacccagccccgggggggagaaggcgcgacaccacacaggcagcgcgactggcacgagggggcatgcggtgggcgaggcggcggcactgacaggacgtgggctgtggggctggccagcctgggcgggggtacactgatgggccaggatggggggcacactgataggccccagccagcctccttgctgtgctgcccgcccacctggccggccccgtcctgggcagatggggtcgcacccagcccagcatcagcgagacctcaggccaggcgaggccagtatggcccaacctgcaggtgccttgctgtggtccctgagcccgggtgctgggggttggggcaagaggggacagcagggagggtagcagcacctgctgccaatgccactctctcagccaagccccgcagtgtcagggaagtgggagtggaggcagccagtgacacagaggcttttcctgaataagggcacaggagcccgagtcactgtgggaggccttgagggccagggagacaacgggcccctcctctcgccaacactgtggagcaggacagtgcagggcctgcccctctgcagcaggagggggtgcagtgggaaaattcaagtcggatccctgtgctgtgcctgcccctggtgaggggggatgggcccacccagcagtgcccatgggcacagagtgcagcccacagagcccagggtggcacagcttggtgtggcatcatccctcggggaaggggcgggagggctgtgctcttcccccacaggaagacactgggagcgggcagcccctgaagtcaggacagagggcgccgggcagcggctgggttggtgcagcaggagccgaggcaagcgggcccctcccgggggagctgggccaggctggggccacgggaaatcacaataattacaaaataaaaccttttccgcttggcgggaaaacaaataataaaaattcgacaaaataaattagaggtttataaaaggcgggtgggcgggtcagaggccgttggcactgccgcgctggaccagcggcaccttgctcagctccaccacgggcgagcgcggcttgttcttcatcttgggcacccgctgcaccagctgctgggcctcgcggtaggcgtcgcgcagctccttcttccactgcaccagctcagggtcgctatcgcactgcaaaatgaactgtttcccaccgcggatcttgaggagcaggcacttgcgctccttgatctgcgtctcctccaccgactggatctcctccatggtcagcaggctctgcggggcctcgccctcgccccgccactcgaggcggttggggaacaggtagaagtaccgccgctgccactgggtcaggaaggggttgcccatcttggacatgtagccatgcatgatgcagtccttgcccagggcgtagtcttcctcatggcccagctgcttgttcttggctttcttgcgagcctccagccggtctgtctcagcgttgatggtgtcgaagacagtctctgccacctcctgctgccaccgctccgagatggtgagggggaagttgcggtagagctcctgatcactgtccagtaacttgattccttttgtgtcctcctcatcgaaggagccaatgtcgaaggcgtcggccgcgttcacctcccctcgtggggggatcagcgggggagggtacttctgcaagaagaccatctgccagtccagggagcggaaaaaggggctctctttcacctcctgagcccctcggcccaggcagcccaatctccggttgacatccctctgcagcaacccctccagcagggagcgtagttcaggggagaaggagtcgggcagctccacggccatcgtcagcgtcatgcggtcgatcccgggaattccggacc

SEQ ID NO: 124938 - DNA, 2051 bp, Homo Sapiens
aaaaaattcggcccaaaacttaatttagagggttttataaaaagccgggtggggcgggttccaaaggccgcttggccactgccccccgtggggcccagggggccccctttttcacgttcccacccaggggggaggcggcgggttgtttcttccttcttggggcaaccgggtgccccaagctggtgggcccttcccggtaggggtcggccgcagctccttgttcccactgcccccagctccagggtcgctattcgcactgccaaaatggatctgttttcccctccgcgattcttgagggagcaggcaccttgcgctccttgatctgcgtctcctccaccgactggatctccttcatggtcagcaggctctgcggggcctcggccctcgccccgccactcgaggcggttggggaacaggtagaagtaccgccgctgccactgggtcaggaaggggttgcccatcttggacatgtagccatgcatgatgcagtccttgcccagggcgtagtcttcctcatggcccagctgcttgttcttggctttcttgcgagcctccagccggtctgtctcagcgttgatggtgtcgaagacagtctctgccacctcctgctgccaccgctccgagatggtgagggggaagttgcggtagagctcctgatcactgtccagtaacttgattccttttgtgtcctcctcatcgaaggagccaatgtcgaaggcgtcggccgcgttcacctcccctcgtggggggatcagcgggggagggtacttctgcaagaagaccatctgccagtccagggagcggaaaaaggggctctctttcacctcctgagcccctcggcccaggcagcccaatctccggttgacatccctctgcagcaacccctccagcagggagcgtagttcaggggagaaggagtcgggcagctccacggccatcgtcagcgtcatgcggtcgatctcatgcttgtctttggtcttgtgctgccggaaggggctgtgcccccgcagcaacttgaagagcatgcaccccagagagaaccagtcggcactgctgtcgtaggccacgcccttctgcaggacctccggagcccatgtacccgtgggtgcccacgctggcatggggcttcttcttggagaagtcacaggccaggcccaggtccgagatccgcacgtggccatgctcgtccagaaggatgttggctggcttcaggtcccggtagaccacgaagcggttgtgcatgtgctccaggcccaggatgatctcggccgcatagaagcgcatgtcagcctctgagaagaccccgtgctgggagaggtggtagtgcaggtccccaccgttcatgaggtccaggatgaagctgagcttgtctggcgtgtggaacgcgtatgacatgcagacaatgaatgggcagtccccagtgctgacgagcgagagcatgatgcgctcgttcagggccagggtctccccctgcttcatcttgatgcgctttttgtccaggcacttcatggcgtacatcttgcctgtgtcagccttccggcacccatagacctcgccaaagcccccgcgcccaatgatgcgatgcacgctgaagtcattcatggtcaggtggatgttgagctccacattcttccactggcaaaaccgtgtgaacttatcgctctcaatgaatttctggaacacgtcccctcggaggttttgaccaatctcttcgatgtatggctggaagagatccggaggcacctgcttcttccccaggtggccttggacatgctcagtggcactcttcgagaagggatgcgagcaggccagcagctccttcatgatgtatgagtcgaagatctcccggctgcgggccacacgctcctcctccgtctccagcttctcgtacttcttgatctcctcatagaattccaccaagggcctggcctcctccaggtggttcaggcagaagtctcggaagagcaggtaccccagcttctgggaaaagatccctcgtgccgaattcgccacccaggcctcgctaccttaaaccgttagagtactgcctt

SEQ ID NO: 124939 - DNA, 505 bp, Homo Sapiens
  misc_feature (161)..(175): n is a, c, g, or t
caactttcaaaaaactaattttaatcaaaacaaaaattgttgatcattaacaagtttataaaacagtgatttagttacataaataaattgatatcagtgtatcaaatcttaattactttcaacttcatgagcatgtttacatgggtgatgaattacaaccnnnnnnnnnnnnnnnacctattataataaataaaatggagcgcatgaaatagttcttctaaacaaaaatacctacaaacatacctctaagcatgttctctagtgaagggaacaagagacactggacaacttttgcaccaaaacataaaaattgctttaaaaagcacaaggttacagaaccatcagctaaagtaaagacactatactgtaaccaaagttggtatttaataatataatgaacagtttggtagttagatctccagtttggttattttaaagcattaagacaaggcaagatagaaggctgcttttgtttgagtaatttctagagaaaataaaatatatt

SEQ ID NO: 124940 - DNA, 494 bp, Homo Sapiens
  misc_feature (163)..(177): n is a, c, g, or t
  misc_feature (287)..(287): n is a, c, g, or t
  misc_feature (324)..(324): n is a, c, g, or t
  misc_feature (443)..(443): n is a, c, g, or t
  misc_feature (475)..(475): n is a, c, g, or t
tcaagctttcaaaaaactaattttaatcaaaacaaaaattgttgatcattaacaagtttataaaacagtgatttagttacataaataaattgatatcagtgtatcaaatcttaattactttcaacttcatgagcatgtttacatgggtgatgaattacaaccnnnnnnnnnnnnnnnacctattataataaataaaatggagcgcatgaaatagttcttctaaacaaaaatacctacaaacatacctctaagcatgttctctagtgaagggaacaagagacactggncaacttttgcaccaaaacataaaatttgctttaaaangcacaagggttaccgaaccatcaggctaaaggtaaagggcactttactggtaacccaaggttggggattttaataatttattggacccgtttggggaggttaggatctcccgtttgggntattttaaaggcattaaggacagggcaagganaggagggctgcttttgttt

SEQ ID NO: 124941 - DNA, 1384 bp, Homo Sapiens
  misc_feature (116)..(124): n is a, c, g, or t
  misc_feature (131)..(162): n is a, c, g, or t
  misc_feature (182)..(196): n is a, c, g, or t
  misc_feature (279)..(310): n is a, c, g, or t
  misc_feature (357)..(449): n is a, c, g, or t
  misc_feature (492)..(504): n is a, c, g, or t
  misc_feature (515)..(516): n is a, c, g, or t
  misc_feature (519)..(676): n is a, c, g, or t
gttggcgccgtgttttttccccccggggggggagagagattattattttccaacccgggtttcaaagaggtgggttgtgttaacccccccgcgggggaaacacgatgtcttcccannnnnnnnnttttgtnnnnnnnnnnnnnnnnnnnnnnnnnnnnnnnnagttttggtgtatttttttnnnnnnnnnnnnnnntttaaaaaaaccaacggcgggccgcggggggggatatatattttaaaaaaacccccgggggggcccccttggtttaaagacannnnnnnnnnnnnnnnnnnnnnnnnnnnnnnnggggggggttttttagaaaaaacggcggttgggcccccccggggcgnnnnnnnnnnnnnnnnnnnnnnnnnnnnnnnnnnnnnnnnnnnnnnnnnnnnnnnnnnnnnnnnnnnnnnnnnnnnnnnnnnnnnnnnnnnnngggggggcccccgcccccaaaaaggttttaagaattttttttnnnnnnnnnnnnnccccctccccnnttnnnnnnnnnnnnnnnnnnnnnnnnnnnnnnnnnnnnnnnnnnnnnnnnnnnnnnnnnnnnnnnnnnnnnnnnnnnnnnnnnnnnnnnnnnnnnnnnnnnnnnnnnnnnnnnnnnnnnnnnnnnnnnnnnnnnnnnnnnnnnnnnnnnnnnnnnnnnnnataaaagtattttttaataaatcaatgtatttcaatgttgtaacatgatagcccaatgctatatcaaggtagcaaaagtgaagattcctggtattttgatataaacactatgaatgacagtacacttgcattcaacttcacaagaaattatcttcaggtccatgaagattctttgacagctgtaacacttttcaaacagtaaagatgtacatgtattgaaagagaagacaacgaaagcctactaactgatctgggctctaaaccatactgaagagaaagagatacaatggttgtatggctagcttgctgaaaaaacatctaaatcttttaaagaaagaaaatacagcatatatcaaagttacagagtagcttacagaaatggagtcataaggagacacacagattagaaccctgaagcagtgaatgtgtttctacccgttttgtgatggaaagaagccatggatatcgagtcctgcagctgtctgtggtgttgaatctcctcatacacacaatgctaccaatggactaaaaccagaattccctgctctgtacaaatgctggtgatgggtaacttgctctattgctgtgggtcagagcaacagctggctggattcaggcatcaggacgaggctaagatcatacaccactgccttctacactcctacagagtcacactttccagagctgatgctccccttgtaagggttt

SEQ ID NO: 124942 - DNA, 581 bp, Homo Sapiens
ctccacagtcctttttttcacctaacgcacctaaatcttgaaactacattgttgttttagcttcgccagtgtcaccccttgcaaaactatgaattgagccccatgttttaggtgttactcatggatgaggaggctgttctttcctatgccctgtatttctggataagtggattgtgtaccctttagttaaatttcacctcccgacttcagcatagatcacaggaaatcacatggcacacggttaaacacgtatggcttcaaatccatagccggtggtgtaaaatgatcatattcattcaaaggcctacacagtacaaatgagcacgctgccatgtactggtttgagcagtaggggctgcatcgcacagcgctcgtcccccgggacttacactgcatgattccctcgctgtatatcctcaaccctcccataatgcaaggccttgttcattgatgtgctttcgtcggctgtcggaaagttctgagcagtggctccagaccaccttgtcttgctacttggaactttttattcataccagcctttgaaaagttactgtgccaataaagaggtacaactgtgttct

SEQ ID NO: 124943 - DNA, 1763 bp, Homo Sapiens
  misc_feature (162)..(177): n is a, c, g, or t
  misc_feature (1543)..(1635): n is a, c, g, or t
gcaagttttttgacttttattaaatctttacaaaacagaatacaaaattccggcattgacagttggtgtaaaggaaaacttctgagctccgtcagttcacctggtacattggaattaaagtgcttggatgtttttcccccactttaaaaaaacttttgaggnnnnnnnnnnnnnnnngtcttttaaaaacatcgtaacattaacacatggccgttcaccgtcccccagcgatgggagctggcctggggcccagggtcctccaggatcttcactcattcacagtaacggttctgaccagtcctccaggtcgcacgtggatgcgacaggggtggggagggaggaggaagtgactgtcccacctctgcaggaccatgggagtgggcaaggtgttctccggggcgcacccctgaacccaggggtgctgcaggacttgggcggcactcagcctctgcttggcgtcacggaccagcagcttggagatgaggtctttggcagcgcaggagatgtgggcccagtccttgtcggggaactcgtacttgccctcctggatgctctcaaacagcatgttctggcaggcagggcaggcctcgccgcggtcccagccgcagtcgctgccacagcggcccacgaagggcgggtagccgctgagtaggatatacaagatgacgcccaggctccacaggtcgcagcgcttgtcgtagatgctagcctcctcgctgaaggcctccactacctccggggccatgtactccgccgagccgcacggagtgagcagctccggggtggagataggggagcagtccccgttgagtttgatgccgctgcccaggtcgaagtcacagatcttcacgggggagacctggttggggtgctcacagaggatgttttccggctttaggtccctgtgggcgatgcctttgttatgcagaaagtccaaggcgctggccacgtcctgcaccaccacgctggcctccagctcgttgaagtgccggcgcttgtggatgtggctcaggatggagcctccccgcatcttctcaaacaccaggtagaagcggtcctcctcctcgaagaactcaatcagctctaggacgttcctgtgtccctggcactggtacagcatctccacctccctgaaaaccctgctccgaatgtggcctggctgcttctccaatgatcttgacggcgtactcctggctggtgatcaggttgatgcaggtctgcactcgggcatgagcgccctcccccagcacatcttcctgcagctggtagacgtcttcaaacctgcccgagaagctgtcagtggcccggccgcgcttcttcttcttgcccctcttcttggcgtccgggatgtcaatgggctggctggcgggcatgtcagggcgggctgagcactgcaggccaaagtcagagtctccgtggtcgggctggtctagggagaaggccagctcgaaggggttctgccccttgaacgaacggtggaaaccctgaagttcggctggtttcttctgcaccatcttctgtccgggccccgccagcgggggannnnnnnnnnnnnnnnnnnnnnnnnnnnnnnnnnnnnnnnnnnnnnnnnnnnnnnnnnnnnnnnnnnnnnnnnnnnnnnnnnnnnnnnnnnnncagtgccgccgccgccccacgtcgcgcagcccggaccccgctccgcggaccgcgcggggaacagcgccgccgccgccgccagcgcggacccctctacctgggcctcgtctgagaaagccacccaggcc

SEQ ID NO: 124944 - DNA, 933 bp, Homo Sapiens
  misc_feature (110)..(110): n is a, c, g, or t
  misc_feature (112)..(112): n is a, c, g, or t
  misc_feature (123)..(124): n is a, c, g, or t
  misc_feature (151)..(159): n is a, c, g, or t
  misc_feature (339)..(361): n is a, c, g, or t
gactttgcgcgagccttgcgctttatggaacgcgagaggggggcgggaattgagtgctcaccttccccccaagatatccggaggattggtggaaattggggtgggtgtgntngttgtgtgggnntcctcggttcaaaccctggcggggctnnnnnnnnntgcgcaaacaagggtgacacctgggggccccgtcccattggcagagggggaaccaggcccaggggacccggggaggggggcaaggcccacccaccttacccctctgctcaccttcccggggtgcctgcaatgcttttaaccatccaaaggaaaaaataacggggaggggtggaaacaggnnnnnnnnnnnnnnnnnnnnnnnccttctataaaacacccccctcagctgagcttagtgcctgggaatccaggcagaggaggggcagcccgctggacaccggctggcgatagcttaaaaaacctttagatttgattgggggacgggtgacctatgtacagaggggagatgggagggtcaggcgtggtctcccaccaggaccactggggccgaggacagactggccctttgccgccgctgcgccagcttggactgggagggtggagacagctgcaggcagcgtgaggtagctcggaccaggacgggctggccctgccccgcggcctcctcctcagccaggtcctcgtcgtgctgggccagctgccggttcatggcaatggcctcagccgcgaaggacgtgaggtctttggcacagctgttcctctgcaggaccatgggagtgggcaaggtgttctccggggcgcacccctgaacccaggggtgctgcaggacttgggcggcactcagcctctgcttggcgtcacggaccagcagcttggagatgaggtctttggcagcgcaggagatgtgggcccagtccttgtcggggaactcgt

SEQ ID NO: 124945 - DNA, 511 bp, Homo Sapiens
  misc_feature (192)..(204): n is a, c, g, or t
tttgtcttttaaaaacatcgtaacattaacacatggccgttcaccgtcccccagcgatgggagctggcctggggcccagggtcctccaggatcttcactcattcacagtaacggttctgaccagtcctccaggtcgcacgtggatgcgacaggggtggggagggaggaggaagtgactgtcccaccttcagnnnnnnnnnnnnncaacaaacaaacaaacgctgctagccactcagctttagagacccgatggctatgggcgcctgcagcgggcgggggtccatttgcttgttctttgatacaaaaaggcagagaatcccccgttacgaaacatggaatcactgacaggcgagaagtgatggtggaaaggggtgggcggaatgccccatcccccccaggggtctttggaaggggcagtccacagatatgggcagtggggaccagggaaggcagagcacccccacggccaccggactgtgaccatcatacgagattcaggaggggcggccgc

SEQ ID NO: 124946 - DNA, 588 bp, Homo Sapiens
  misc_feature (9)..(17): n is a, c, g, or t
gtggtgtcnnnnnnnnnttttatttatctggttcaaaaaattttttagaatgaatgcatttagattgaccaaatagatttttaaaaacaaatctttgccaaatagtttaagtacttttaaacttcaaaatcttcttagggtaaaataaatacccgtatctatgcagtaccataaacatgttaataaaaggccactcaacattgaaagccttctatgaccagtaactgaaatttacacaagtgtaaagaagggattaaaccatgccgttgacaagttaacttacccctgggctccttgaaggcttgtcagtttagtctttggaggtccccgagtaccattttaagtgttaccatgttactgctgctgagtaatagtgcaagtgctaaaatgcaaaattcagatggtacagggtttggaaatcatgcagattcagatgcagaaaaaaacattaaaacaactcaagatccctttacagaggaaactgaataatgaaacaatgtggcgattacaagtctaaaggatgacttcattgataaatgtttaaaacatgtaacttgcaaaatgacaaacctatttatcataatctaa

SEQ ID NO: 124947 - DNA, 821 bp, Homo Sapiens
  misc_feature (142)..(142): n is a, c, g, or t
  misc_feature (144)..(148): n is a, c, g, or t
  misc_feature (150)..(169): n is a, c, g, or t
gttgggaatactacccagctgttctcgatcaggcatgttcctcgtaagacaacatatgaccaccatgctcttccttcctggggccgcggcgcaacaagaagaatctagtaagtatcttgtggagggacgaggcggccaacangnnnnntnnnnnnnnnnnnnnnnnnnnttttcactgtggcttctgcatttcaaatcagcacttgcagggagacaacggggtttttgaatagtatcacctggtatgaaaagttttcccaagaaaccacaaacgattgttcattttttctccttttttgttaactttttgccacactcaagtcagtttaagtcctagcaaaaagacggtagttaggataccactgtggctgtagatgatgtgacactggttgaatttgtgctggcgtttgtgtaacttccctcgctgtttgtgtttgattcgttagggggcacctggcttgaattggctcgaaggattgctcctgctgcactgcaatgtggccgcggccctggttctggtgtgtaggtaaaggtaaggctggtggaataaatgattccatcatttcggaccaaagttactggaacctggactggttgccggacccatctccaaccttctcggaatgcagaaatgtctgggacgacacagagcatactctctccacacctgtacatagtttcagcttctacatccccaaaccacactcgtaaatttggagtgaaattctgtcctgtaagttcaagcattgctacgtcgccaccgccattcaactgaaggctctctaccacaggcacaggagtgactggggcaagcctcgtgc

SEQ ID NO: 124948 - DNA, 1130 bp, Homo Sapiens
  misc_feature (65)..(65): n is a, c, g, or t
  misc_feature (74)..(74): n is a, c, g, or t
  misc_feature (111)..(111): n is a, c, g, or t
  misc_feature (126)..(126): n is a, c, g, or t
  misc_feature (193)..(193): n is a, c, g, or t
  misc_feature (252)..(252): n is a, c, g, or t
  misc_feature (308)..(308): n is a, c, g, or t
  misc_feature (418)..(431): n is a, c, g, or t
taattccatttccattccagggcccagggaaaagaatccttcctggtcccccacaacccctttanaaaaccttntggatgatgcaaaaagttttatcaaagtacctgtacnatagtttcagctttntacatcccccaaacccacactggtaaaattttggagtgaaattctgtcctgtaagttcaagcattgntacgtccccaccgccatcaaactgcaattcacagaaaatcacaccactgagaaaacttntcatttttcattaaagtacacaaattagattctcattcaacttcatttgttttttnaaaaaagggcaattaaaatgttttttattacaaagctagctaaaaacatttcaagataacatacaagtttatttacatttaaattttctggcaagtacgctcctcctaannnnnnnnnnnnnnctttaaatcaacaaatggtgtatataaaaatcccctaatcagacgattggagaaaaatcaaaactcccatgaaatgaaatgatgccaggtcacagctgagagtagctgcaaagagctgaaggccaacttggactaggcgttctcacctgaaggctctctaccacaggcacaggagtgactggggcaaggacagggcccattccctcataaaatgtatactctgccttatctgtgctaatgattgtccaggaagcgccatcatttatcatctctttatttggttcttttggacatggagtggcctgaaattgaattattctttcttgagaaaggcacaaatacattctttctgtatccttaaggtaaaatgcacatttatggagttgtgacacaggatcatctgcatccaataatgcggtctgcttatcaactttcctaattatcaatcttgggagtgccatgccagtaactgagcacacaagtttgactgtttgtccataatggatgtagccatctcggactgtgaattcttctccttctgattcatcatcatccaagagatgaataaaaaaggctccccactgctgtgaactggcatgaaaattacctccttctacatgcaagtatctggtactaactgtctgggatcgtagtcgattaaacagagccacctttgttcctgatcccggaattccgacc

SEQ ID NO: 124949 - DNA, 1048 bp, Homo Sapiens
atgttccaaatgtgatgggtttattttattttactatgatgcaaaaccaaagattccactatagcacagagaccagtatattacaaggtcatgaaaaaatggtgtgggacatgcaggacgtgatgtacaaactggtgggtcagatcgtctcctctaacatgacgctacactgtcgctgaggaacacatttaataacacttcagaactgaactgaaacgtggcacaaacatgacaacttccaggcatgccttcaagcatctccctcaggagggattcgcaacccctagacttcagtgtggggaggattacaattctttggaagaataaaaagttcacacttttgaaatttcacagaagaattttaaggccaaaacatagtgggttcatttctcttcacttccagggacaaatctgatgctttcctcaaaccacattaagcttccagttcaaatcccaagccaaccttgtgacctcctgcactgaagttcttcccatcgattaaagctgataaagtcaatttgactcctaggaagaagaaaacaccacaatcacttgaaacaagtattacaattagatctgaactttctagaaacaacagatggaatcaatggtgtggattgtagctgggtatacgagctataagcaaacagctattactcaatcggttatttataactatctgatgtgtaatgaggaaagcatgatcatggcaaactttctctgaagttcagggttaagggcaatgagtgatcaaccaaactcaaaggccaaagtgaccacattatagtcagaaatacatacttttttaatgcaaaagtatttgatctgtattgttttctgtctgaacaaccaaatgttacagaatggtccaaatcaacttacagtgactacaggttgttctgcaggttattttcattgttttctctatcaccttccacctcaacccctctgttactaattcctttacttacctggtcgaagggtctgagtataacccagtccaatcaggctggcattatttactttagcctaagattaagagatagaa

SEQ ID NO: 124950 - DNA, 1652 bp, Homo Sapiens
  misc_feature (53)..(65): n is a, c, g, or t
  misc_feature (69)..(69): n is a, c, g, or t
  misc_feature (71)..(71): n is a, c, g, or t
  misc_feature (102)..(102): n is a, c, g, or t
  misc_feature (110)..(253): n is a, c, g, or t
gggccgggtttccctggggaccccgggttggccctcgttgcccgttgttgttnnnnnnnnnnnnncctngngggtggtttttaaaggtttttttgggggtgngggggggnnnnnnnnnnnnnnnnnnnnnnnnnnnnnnnnnnnnnnnnnnnnnnnnnnnnnnnnnnnnnnnnnnnnnnnnnnnnnnnnnnnnnnnnnnnnnnnnnnnnnnnnnnnnnnnnnnnnnnnnnnnnnnnnnnnnnnnnnnnnnnnnatgttccaaatgtgatgggtttattttattttactatgatgcaaaaccaaagattccactatagcacagagaccagtatattacaaggtcatgaaaaaatggtgtgggacatgcaggacgtgatgtacaaactggtgggtcagatcgtctcctctaacatgacgctacactgtcgctgaggaacacatttaataacacttcagaactgaactgaaacgtggcacaaacatgacaacttccaggcatgccttcaagcatctccctcaggagggattcgcaacccctagacttcagtgtggggaggattacaattctttggaagaataaaaagttcacacttttgaaatttcacagaagaattttaaggccaaaacatagtgggttcatttctcttcacttccagggacaaatctgatgctttcctcaaaccacattaagcttccagttcaaatcccaagccaaccttgtgacctcctgcactgaagttcttcccatcgattaaagctgataaagtcaatttgactcctggtcgaagggtctgagtataacccagtccaatcaggctggcattatttactttagcagagagagaagttctacaatccagcatgtacttagcagcaatgccaaaacgggtgttgttactcccagctgtccaagcaaggtttatggatgtttcaatcttctcattcaccttctggtagatagaacctccaaattcagtgccatcgttcacatgtgtgtgcagctggaagtccgcagccttgtaacccagggcgaaattattctgtgacagtttggatttggctgtgtcaaaactcatctgatagccagcaagccacccttcgaaggccaacacagcccagccatagatggttggtccagaaaaatctatatcaacattactgccaacactaaaacaatcccgtttataggaggccttcaatttcccactcttctttcctgtgttcggtacaaatatggtatcaagagtcagtttcaacccttcagccaacttattctcccaagagatttctgtccctagagtattgtctgtgttccatttctgggtgaaggtaagtccatagttacagaccttatatttggtttctaggttgcctgatgctttccctgtatcagtgtaagcatgaccagaagtagaaaattccactccactacaagacttggttttcaggtctatcttgaccatgccaaagccatatcctttgttgaagacatccttagcagcctttcctaggtcacagtacgttggtgtgttacacatatcttagaaaaatctctctcaggctcttatgaaaccaaagacctccaccccgagggcctgtctctgctccgccagggcaacgctgaaggtcttcaaaccaacgccgtccgcccc

SEQ ID NO: 124951 - DNA, 1295 bp, Homo Sapiens
caggggaccacaagagtattctctttttttaaaaaagaaaaagataaatgggcacatatatacaaaatactgtcaatttctactgggccaacacagtagccactgcaatgtttctccttcttccggagctttcctcccatagtctcacatgtactcctggcacagccacaataccagtctctgggaagcatatgtcacctactccacgtgggtcccattccagtcaccacagatggaagcacctgagcctccttgccagtctttccctgcagagtcactgcactggcagggagctggagtggagcacgtggttttcctgtcctatatctcctccccccaccgcagataatactgcttcctcgggtggcccttggggcaagtcatcaggctttatgggccaggagggtggtcagcttgatcttgccatccatggaggcggtgaggcaggtcccacagtccatggcagtgctccagtccacggtgaccacaggggtctcggtggccacctaggctcaagcagctctccagaaccttctcatcgccacccagcttgtagatgacgccgcctgtggcagaacatgtcagcatgtaatttccctctgagtcaaaagcgaagagtcggcccctggggacttgaacctgcttgtagccgctgtatccagactagcactaaggggggcccgtggcatctgaggggaggctgtactcggataccttgaggccactcttgtggatgttccactggatgaacttcccgtcctcgccgatgctgtacacggtgttctcatcatagctgaactccacagagtagacctccccgtagtgggccctccagctcatcgcgcactcatgctgctgcatgtcaaacagccggatgacgccatcagctgcccctgtgaccagcaggttcccgttgtgattgaaggctgtacagttgatagcaatgggttctggatccagggagaactggagctgctgcttcatggttttcgtgtcccacagcagcagcctgccaggaacctggttcatgcccttgctgccgatgtctggtgctgagaagtccacctgggaagtgaggctcggagctgctgccgaacagacgaaagaggccccgttggggctgcacgcaagagacaggattctgggcatgttgtcgttgatattgatttcacagagattcttcttggcttccgtgtcatagagacgcactgttcccacaccactgcccagcaagagcagtctgtcccgtttggggcccattcccctcgtgccgaattcgccacccaggcctcgct

SEQ ID NO: 124952 - DNA, 725 bp, Homo Sapiens
  misc_feature (583)..(606): n is a, c, g, or t
  misc_feature (650)..(650): n is a, c, g, or t
  misc_feature (707)..(707): n is a, c, g, or t
gaggaaatggaactttatttccataaatacagggataacacctattcaaaggtagttaaaagagggcctggggcctcaaagaaactaggctctcccaggggggtactccaacactgatcatagggactgggggatccccaaacctgagatgggcctcataggccacagatattccccaacactgacacttcaagaacggaactgtccccataggggagcctcagaaccccactctcatgggtagtccctcttaggagttgggagggctgatgtcaggggactttagagaaaaaagggaacatggggaggagagaagctaaaaatgtcctgagtggcctggaaggagacccctgtggtgggcagggggtgggttctccacccatacagccagatacggaggagcagcagcagcaaaagcagccacaagttaaaaacatggtttctcacttcccaacttcggccttgagagaaagggacagcacggagcaatcccccaaatgagaggacatgaggtaggggaggcctggaattgtcattcatggaggagcagaggaagggggttctgggaggccaagtctctacnnnnnnnnnnnnnnnnnnnnnnnngggggataatatgggagcaatgagggtggtcacaggcacaccanagcctgacatctgctttccaaggccaccacttggtctctggaccgaggagttcctgnggaccctgaatatatctc

SEQ ID NO: 124953 - DNA, 560 bp, Homo Sapiens
  misc_feature (126)..(159): n is a, c, g, or t
tctggatttcagtgccagcacttctacttgcattaactttattacacaaataagacatttacaaagcacgacacgaaaggtatgtaacaaaacagacattggttttacaaaaaaagtgcttacaannnnnnnnnnnnnnnnnnnnnnnnnnnnnnnnnngtatttaactaaatagtcttgatggcctgtacgttcccaggctgctcttaacagggtagtggagacatgtttgaactgtaacatgctacggccacataatccacgcaaggaatataccctgaggagaggctcaaggcagagtgtgttgggtgaccctgggtagggcttggttggccacttaccacatggttgccactggggccttgatgatcaggagcacaaatcaaaggaaagatttgagctccaaggccaggaattgggccctggttgctcctgttaatgtcagcgcctagcacagggctgggcacaagttaccactgactgagtgctgagctgagctgtactcaccacgttctgagtggtgcctgctctttgccctcagtcagctgtcactgtctttg

SEQ ID NO: 124954 - DNA, 409 bp, Homo Sapiens
  misc_feature (249)..(282): n is a, c, g, or t
cttggagctcaaatctttcctttgatttttgctcctgatcatcaaggccccagtggcaaccatgtggtaagtggccaaccaagccctacccagggtcacccaacacactctgccttgagcctctcctcagggtctattccttgcgtggattatgtggccgtagcatgttacagttcaaacatgtctccactaccctgttaagagcagcctgggaacgtacaggccatcaagactatttatttaaatacnnnnnnnnnnnnnnnnnnnnnnnnnnnnnnnnnnttgtaagcactttttttgtaaaaccaatgtctgttttgttacatacctttgatgtcgtgctttgtaaatgtcttatttgtgtaataaagttaatgcaagtagaagtgctggcactgaaatccagaac

SEQ ID NO: 124955 - DNA, 2023 bp, Homo Sapiens
ttttttgaaaaataaggatgtttattaaggacatttctagcccacagctagggctcatactcggctctatgagccactgtccgacctcatccccattcaatgtgaatgacattagggaggccgggccacaggtagatcccactgcctggctaaaggggccatagcaaggggtccctcccatgcaaggggtctctcccatagccaggtatagaatagatacactgctgcggatgaagagggaaatctcattggactaatacattcccctacaccctgcctggaccctctcattcctccccacctcccaagatgatgggtcaaaggtacctagcactattatgtggggtaccaaaggaagcccctttatttgtcccagaactgtgggaaaaggatacccttcccttctcagccatctcaggcctgggggctactgaggtagagggggaggggccaggccactctaatcccccttgtgggccctgctctggacctgccccttagggaagcagggggcattttgctggtatgggaggctgggacatcagcccagactggaatgctgcagttcttcccgaagccacgagggcactggctgtccaagccggctcagcagcttcgacaactccaaattatggttccggaaaaaatccgtaaggaaaagacgggactcagtgtccatatctggatacctccggcctttgctccggcctagacagcgagtcttaccaccttcaggtccctggcaccaaaatcccttatcatcatcaaacctgagggtccgtgtgtagttcagaaagggtgtgatacccaggaactttctggatgctctccattgaggctgctgggttggtacgcagctcttgcccatccacaatcagcaactgtccagaggggtagtaagtcagccagcgttgtagatgggtagaatagtagccagggacaagacagcggttctgcagggagcgtagtgccagaggggtctgggaggaggctgaaatcacctgatagaaggtatagttcagagcaactgggtctccatgggctcgctgatgctggtaccaggagtaggccctgtcagcagggttggtgagcactgtgatgatcttggctcgtggcaggagggcagccccccgccgtggtacaacttcagagtcaaagtaggtggcacttttttcaaataggaaatcagtgctggcattggaaggaacagggaagaaatccatgtaccagtcaatacccttgtggtaattagggctgttgaagaactgaatctcctcaaatgtgctggggctagggaagctgctagttacagctgggtgcaggctcaggaagaagtgaatagctgtagtccctgttttctggggtcccacaatgaggaacttcgggagacgatcacaggttttctccttggaccagatatctttgtgcctcttgtcatcacagggattctgccaaagggggcttcgctcctgagggaaaagttcaaagtacttctgtgcaagtgggacaggaggaagggtctgtaggcgcagccgtgtccaacactggaggaagcgcaccaagctctcaaaggtgtataggcccagccggtcatttccataattggacagatgggtcataaagatgctgatcggattaagcagcactgtcagaaagagctctccacctcggatgctccggtctagttcacgagagcctccaggatactcattatagaagattgtgtgagtgaagaggccacatgtctgccggggcagcaccataatgccattgtgaatgaagccacggcggtaagcgggcagggcggagatggggatactcctcagtgctggtcacctggatgccccacacggatttccaggcctcatagagctgcgtgtggatggggtacacacccgagtggtggggggccacagcataccccaggtccgtgggaatcccatgctcctgggaatggcatagactctcaccaggacctggtgaggtttggggagtagagggtaaacagggtggggaagcctcc

SEQ ID NO: 124956 - DNA, 514 bp, Homo Sapiens
tgtttatcgatgccacccatgaatttaggttcgcatgggtggctggatggcaagttggcagtggggcaaatagaaagtcttaggcaaggatcagggatggaaggtggtcagtgttgttacaaaataaaggagggaacaggggctgactggctgtggtcagtggtcagcgtgtggtcatagggacagaggaggaggatgcaggggacgacatgctgctgaagcaccgcaaagagttctggtggttcccccacatgtggagccacatgcagccacacctgttccacaatcgctccgtgctggctgaccagatgaggctcaacaaacagtttgctctggagcatgggattcccacggacctggggtatgctgtggccccccaccactcgggtgtgtaccccatccacacgcagctctatgaggcctggaaatccgtgtggggcatccaggtgaccagcactgaggagatccccatctccgccctccccacaccgccgcgcatcgaaacccggacgac

SEQ ID NO: 124957 - DNA, 1467 bp, Homo Sapiens
  misc_feature (47)..(86): n is a, c, g, or t
  misc_feature (93)..(196): n is a, c, g, or t
ggaaaaagtattgccccggttcctttccctttggggccccgggcccnnnnnnnnnnnnnnnnnnnnnnnnnnnnnnnnnnnnnnnncgccaannnnnnnnnnnnnnnnnnnnnnnnnnnnnnnnnnnnnnnnnnnnnnnnnnnnnnnnnnnnnnnnnnnnnnnnnnnnnnnnnnnnnnnnnnnnnnnnnnnnnnnntgataacatgggtggatttatttcttaagatttgagtgcaaacttaaaaacaagaacaaacaaagcttttcatcaagaataaacacaaaatctaaacaattctgcaatcatgcattttaacagaaagtacaaatatgaatacattataatttgtaactgcatttaaaaattaaaatatttctctccaaatccaaaacaccacacaatctttatctgttctcatcttgttaccttagaaacatttgtcatatgctatcaggaaaatataggcaagacttactaatcagttattcatgatcaaagaaacatgattctccttaactgtgactttttgaatcatttatctgtatttctgaaatatcacacaattatacctctactctagagaaaaaaagaataaatacaaatatcaaggaggcaggaacattcatggaattaaagcaaaagtcacaagtgtttgacttagaaatgtacatattgtagtaaatttttaaagtacaactttagttgatggctgatgtgtatgtaataactgtgagcaatttaaacaggtataaaaatgtgagatcaaaatctttaggcttaaatacttgaaaagtcactatggatatggaaagatttgtttacataaacatgtatatttttagatggaaaatcaaggggtagtggcatctccctggtcccttaacaatatttggatttttgcaaagaattagcagcacccaaccttaagtgttaattatgtgtttctaaaggacctataacagatcagttggcagtgttctagcttttgggagttgggggcagattgggggtgcaaatatctgagataagatagtacatgcactcacacatttaaaatcaccattctaaatgggaaaaaaaatcacatattggaaaagtctaagaaactcattcttaagggataaacagcagggcaggaataaaagctgaacagtagtctacttgataataatggtatttcactcttcaaaggcaagttgggaagaatgagaatactcacatacacataacttcagggaaaacttgcctaaaattttaccttgcaaaacgctgaacagaaatctttacaaaaaccttcattcttgtttataatacttgatttttcccttattaccaccatatacataacatttaagtattttcttcataaatattttagagcaaaaagaatgtattttgttgcaatggcggacgcgtgggcggacgcgtgggtcgacgatatcccgggaattccggaccggtaccag

SEQ ID NO: 124958 - DNA, 755 bp, Homo Sapiens
  misc_feature (659)..(659): n is a, c, g, or t
  misc_feature (686)..(686): n is a, c, g, or t
  misc_feature (735)..(735): n is a, c, g, or t
ttttagtgtgtattaaaatgaatttatttacacagtaacatgatgccacggagtacacagcaaagtaccacagcaaaccaaagggtggcaccactgctggcagagaggacctttcaatgatagatttatacaactttacaatatgtaagtagaggggtgaagctccggaaagagcaaaaacaagattttcaaatacagagtgtgggcagggccagagagaattaaagagagattggaatgaggactgtcatgattcaaatcaccaagtagaatgaaatcttgcttctgtatttgcctcatgccaaaatgccctgcatatcctcaacagaaaatcccaacccagtgtgttcatacatcacactctttagttctaactggtaaaggaagggataaccaagtagtatttggagcaagttcctgaaacagtgtggtttaacctttcaaaaatgaaccctatgtctggttcaacattcaagttatcatgagtgcggacacacacatactatccacacactaacgggcaaagtgggttttctgtactacaacaatattcgtagcacaatatatgactctgtacttctgctaggttaaaaaatgtccgacctcttttgattccctgaaactttcttgatttaaaaaacaaaaccaaaccaaaccanaccatgggggtgaatgggacacgtcanagataaaagctggaataaacccagagactttctggagtgggaaacatgntatgggatgttgggaatgca

SEQ ID NO: 124959 - DNA, 2951 bp, Homo Sapiens
  misc_feature (62)..(72): n is a, c, g, or t
  misc_feature (206)..(217): n is a, c, g, or t
  misc_feature (2230)..(2261): n is a, c, g, or t
cagagtggaaagcattttcaaactttatttacaactgtcacagtgacaaaaagtagtttggnnnnnnnnnnntgctagtttctccctgagcctcaaaaaagaacagatagaagttacaggaggttcatctcacaacaggcatttttactgaaatactaggaattttttcaatacaatcagttagaaatacacacaaattacttggnnnnnnnnnnnngaggaggccagataggagctcagccacttgtccaagagcagctgggtccccccagcaggctccaccgctgagggtcctgacattagctgtcagcccctggcctgctcagactgcaaacggtcatacaaagtggtctagggaccagcaaaaataataaaccacccccataaacagacacatacacaaagtagatttgttacgcagtttacaagcatgttcccatcacacagcaagaccaggacaggtgattcagggtagcagataagggaagacaccaaaacacaggaattgaaaaggcaagacccccgtccacaaggggaggcgagggaatgagagtatggatgaaccactctctgcagccaaaacagaacgaagcggggagcaagagagaggaaagcccctctcggtgcaggctgccggcctctcccacttctgcgaggagttggaagaagttattgccattgatgtgtgtcacacaggcagacaacagagggaggaagcaagggtgccggcgaccattggcttcccagaacggaattccgcggactgctgtgtccacagcgcaccctcgtcctcctgccccggcatccccagagccacaatgaccttgaggtattaaatacagctatatacacacgtccagaactgagggtcaacctggactgactggagacctgaggggacatgctgcgtgccttggttggccgagtttagctcaaggaaggctctgagtccacctcttggccacacggtactgctctcggcggactgaagcatttgtcctgcaacctgctgcttcagatggctcttagctacaataagaaatcctaagtccaaaggccaactttctcatacaactggtgcccttgcaggaagcagtgggaggtggggagggatgaggaccactgttgagtaaggacagcagaggtcccttgccatgcctcccttctgcccttgtccgggaacaacatggggagaagccagggatctcatgacatcctttagtctcaaactcgatcccaaggttgccacgacagccttgtccccaccatgcaagtcacctccccaacaagacacataaaaagccacgtctgctctccactaggctcccacaagaaaaacagaccaagatcccccatggggcgtgagtactgcagctgggcagactggcgggaatccataggtgagctggggacccatgtacccatggctgctggggctggggcagggaaggtggcggtgaggagaaggaagggccagcctggaagaccacgcccactccatctcgggagcaagtcttggaagggcagcagttaagggagagaccttcgtgctgagtgtccaccctggggcttccaacaagggcaggaagtgctctcactactcctaaaaagtgctgggaagcaaaatggatatatcagggagaaaagctgaaaagcactgcctcttaaaaaccgatcacactggctatgtgagcctaccacagctgggagcagagaggccatggagtagaatggggtgacctttcctttcctgcacttcacctccagctggctttgcaggcagccaattgctcctgctctcctttactctcctccctgtcatatagaccaacacacctgaaatgaaagcaaagggtggggtgggtgaaactggagagagagatgaagactttgttttctgatgtcccagcagccagagtgaatgtctgctgagcgcatcctggctgcagttctctgctcaatgttttcttaaaaacatgtattttttcttttgcctcatgtttgttttcttaccccaaatgttccttgcttgctttgcacatgccccacctcccacccaccaagacccattggaatcccaccactgcctctactaggctgcctgagttcagataatgatctcaaaaacagcactcgctcccctcacccactaaccccctggctctaagcagcttcctttctcagagggccttgcaaattgtcagagggctccactgctcggcaaatttcnnnnnnnnnnnnnnnnnnnnnnnnnnnnnnnnccaactcggtgatctgcaggtgcaaaacagaagccttcgtttgacattttcagaacaaatgcggctcactctcttcttccgtcatgatgggaaaaacacagttcaggaacagatgctggctggtatgacccatgggagtccacagggactctactgctctttattttctttcgctgtctcttcgcagttatcttgctcatcctcctggaccaggaactcctcagggggccaccggagctccccgctctccacctccccttctgtgggttccaccactatggagggcagacggtccttcagtttgcagcagcggtcaaaatctgacgggtctgggaagatctggtaggaaaggccatccttgcgggggctgaggccgatctcctccatgggctgggtgttcatcatcacctcagtcatcttggccgatctcagatagtcggggcagtgaatggggaaatatatagacatgaagtcctagggcaggctgacacacgcccctgtgatttaaaaacggtccctgcgtcccgagtgaggatgacacgggcgcagacgggcacggcaggcggccgagtgcggacaccgggcgctcgccgtccgccttcccaggacagccccacggctagcgacgtcggcaaggtggacacaaccctcgtgccgaattcggcgcgcctcgacttcatactctctcgc

SEQ ID NO: 124960 - DNA, 822 bp, Homo Sapiens
  misc_feature (89)..(105): n is a, c, g, or t
cccaccccctaaccccctggctctaagcagcttcctttctcagagggccttgcaaattgtcagagggctccactgctcggcaaatttcnnnnnnnnnnnnnnnnnggcaagaaaagaaaagaaacccaactcggtgatctgcaggtgcaaaacagaagcctcgtttgacattttcagaacaattgcggctcactctcttcttccgtcatgatgggaaaaacacagttcaggaacagatgctggctggtatgacccatgggagtccacagggactctactgctctttattttctttcgctgtctcttcgcagttatcttgctcatcctcctggaccaggaactcctcagggggccaccggagctccccgctctccacctccccttctgtgggttccaccactatggagggcagacggtccttcagtttgcagcagcggtcaaaatctgacgggtctgggaagatctggtaggaaaggccatccttgcgggggctgaggccgatctcctccatgggctgggtgttcatcatcacctcagtcatcttggccgatctcagatagtcggggcagtgaatggggaaatatatagacatgaagtcctagggcaggctgacacacgcccctgtgatttaaaaacggtccctgcgtcccgagtgaggatgacacgggcgcagacgggcacggcaggcggccgagtgcggacaccgggcgctcgccgtccgccttcccaggacagccccacggctagcgacgtcggcaaggtggacacaactccccgctctcccctcgtgccgaattcggcgcgccgtcgacttcatactct

SEQ ID NO: 124961 - DNA, 2057 bp, Homo Sapiens
cagaggctgagcctacaacctcctccgtggcatctttatttttctacatgggatgtgaacaacgtgaacatgggtcagaaaagtcagctgcacaaaaacacttcagccaattctaacacagagggagcatagacatggaggggctgggggttaggctgggggagaccagccttccctgctaagggctcgtggtccaagcccacaaccagagggtgctctgggtggtgtccaggaacatgcagtgccggctccggggaggagggacgagaagagaaaggggagtcacagaggaggctgcagatgagcacgagtttattggactctggcctcgcgctgctgcttgatgaagttgatgagcccattggtagaagcgtcgtgagaggtcacttgagcactgccatcaagctcaggctctattttcttagccagctgctttcccagctccactccccactggtcaaagctgttgatgtcccagatgatgccctgaacgaagatcttgtgctcatacatggcgaccaaggctccaagcatgaatggtgtgagcttggtgaacacaatagagttggttgggcgatttccttcaaagaccttatgtggcagcagcctctcaaggtcctctggactcttgcccgcagcctggagctcctttcgggcctcctccgtcgattttcccctcatcagggcctctgtctgggccaagaagttggccaggaggatcttgtgatgcagacccttccgtatggggtgctgggtctggaccgggatgaggaagtcacagggtatcatcttggtgccttggtggatgagctggtaaaaagcatgctggccattggtccctggctccccccacacaatggggcctgtctggtggtccacacgggttccagatttggtgatgtatttcccattggactccatgtcgccctgctggaagtacgcagcaaagcggtgcaggtactggtcatagggcagcatggcgtgtgtctcacacccaaagcagttgatgtaccagatacccagcagggccagcaagacgggggcgttcttctccaggggcgtcgtgcggaagtgctggtccatccagtgagcccccgagagcagctgctcgaagttgtcaaaacccacgtgcagggcaatggagagtccgatggccgaccacagcgagtagcgtcctcccacccaatcccagaactcgaacatgttttgagggtcaattccaaactctttcactttggttgtgttagtagacagggcaacaaagtgcttcgccactgcagaaggatccttggccgcctggagaaaccactccttcgccgtctctgcattcgtgatggtctcctgggtagtaaaggtcttggaggcaatgatgaacagggaggactcggggttcagctgggccagggttttggcaatgtgagttccatcaatgttggagacataccagacgcggggacctcctgaagagtatggcttaagggcttcagtcaccatgaggggtcccaggtcggagccgccaatgccaatgttgatgacgtccgtgatggtcttgcctgtgtaccccttccagtcaccgctccggacacgctggcagaaagacttcatcttgtccagaaccttgttgacctctggcatcacatccttgccgtctaccaggatgggtgtgtttgaccggttccgcagagccacgtgcagcacggctcgaccctcggtgtagttgatcttctcaccattgaacatccgctcccgggcggcctccacgcccctggacttggccaagtccaccagcatccgcatcacgtcctccgtcaccaggttcttggagtaatccaccaggatatgcccatggttggtgttgagggtcaagctgaagtggttgaagcggtccttgttggcatcgaagaggcggcgcaggttcagctcggagcggtgctcgcggtaccattgctgcagcttctggaactgggggtcccgggtgagagcggccatggcgggactagaaggtacaccggacgcgtgggtcgacgatatcccgggattaaatccggacggtacca

SEQ ID NO: 124962 - DNA, 1668 bp, Homo Sapiens
tccaataccacaatggggggggaccccaaaagggggtttcccccaaggcccaggaaaattgggtggtggaagcctttggggtggaaccccccaattaggaagttttgggttgggggcggaatttttccttttcaaaaggacccctttattgtgggccagccaacccttttccaagggttcccttctggggaataattggcccccgccaggcctgggagtttccctttccgggggcctccctccggttggaatttttccccttcattcagggccttctgtctggggcccaagaagttggcccaggaggattcttgtgatgcagaccctttccgtatggggtgctgggtctggaccgggatgaggaagtcacagggtatcatcttggtgccttggtggatgagctggtaaaaagcatgctggccattggtcctggctccccccacacaatggggcctgtctggtggtccacacgggttccagatttggtgatgtatttcccattggactccatgtcgccctgctggaagtacgcagcaaagcggtgcaggtactggtcatagggcagcatggcgtgtgtctcacacccaaagcagttgatgtaccagatacccagcagggccagcaagacgggggcgttcttctccaggggcgtcgtgcggaagtgctggtccatccagtgagcccccgagagcagctgctcgaagttgtcaaaacccacgtgcagggcaatggagagtccgatggccgaccacagcgagtagcgtcctcccacccaatcccagaactcgaacatgttttgagggtcaattccaaactcctttcactttggttgtgttagtagacagggcaacaaagtgcttcgccactgcagaaggatccttggccgcctggagaaaccactccttcgccgtctctgcattcgtgatggtctcctgggtagtaaaggtcttggaggcaatgatgaacagggaggactcggggttcagctgggccagggttttggcaatgtgagttccatcaatgttggagacataccagacgcggggacctcctgaagagtatggcttaagggcttcagtcaccatgaggggtcccaggtcggagccgccaatgccaatgttgatgacgtccgtgatggtcttgcctgtgtaccccttccagtcaccgctccggacacgctggcagaaagacttcatcttgtccagaaccttgttgacctctggcatcacatccttgccgtctaccaggatgggtgtgtttgaccggttccgcagagccacgtgcagcacggctcgaccctcggtgtagttgatcttctcaccattgaacatccgctcccgggcggcctccacgcccctggacttggccaagtccaccagcatccgcatcacgtcctccgtcaccaggttcttggagtaatccaccaggatatgcccatggttggtgttgagggtcaagctgaagtggttgaagcggtccttgttggcatcgaagaggcggcgcaggttcagctcggagcggtgctcgcggtaccattgctgcagcttctggaactgggggtcccgggtgagagcggccatggcgggactagaaggtacactgagtgagacgcgagccgaggaggaaggagcgccggcagcgcgcagcaagcgaggcgcgcctcgtgcc

SEQ ID NO: 124963 - DNA, 754 bp, Homo Sapiens
  misc_feature (16)..(16): n is a, c, g, or t
  misc_feature (34)..(34): n is a, c, g, or t
  misc_feature (453)..(523): n is a, c, g, or t
gaattcgagaaagctnggatatttttattcagtntcttccttaatcgattaagttcaggcattatttctggaacagctacgtaaaagtctgcaacaatttcatcatcccaaatcttctgtatcagactagtgcctcctgcaaatgcagctccattttcttccgctattttgacctctgatgcattctctgtaaatacagcaactttattgatttcggaagcaaatgggtatggcaaactaagaacactggtaaatggctccacgtttttcttctttcccagtgccatatccagtgtcaaatcaagataaacactttgctttggactagtaaagtcaagaatttgaaatttcttaagtaagtgaacagctttctccacctcatatatctgtctcgggtataagcgttttaaatagacatcatcctcaggttcgccttccatatagggatatgcnnnnnnnnnnnnnnnnnnnnnnnnnnnnnnnnnnnnnnnnnnnnnnnnnnnnnnnnnnnnnnnnnnnnnnncagactttgtagcagcagcaaaatgtctgttgggcactcggatgtttacagaacaagaacaaagtgatgtctgataaaccatcttggaaaggctatgcctttgatgatgtatcaaggctctacccatgcaccttacggccgccgccatgttgggcactccggattgcgttcacgaaattgttcctacgtttctactgggaagaattaaaaaaagcctacagccgcggccgc

SEQ ID NO: 124964 - DNA, 1169 bp, Homo Sapiens
  misc_feature (946)..(1016): n is a, c, g, or t
tttgcaggttcagacaaagagaaaattttattttcttattcttgaaatgactgtacgatttttcaatgttaaagttcactttcaagtatgatcaataacaagacatcaaatgtaaaaattatgctgtattatcattttctccattgcttcttaaaccactgaaagtaatttcacaattcaccacatttaggcatcttctttttcactttcttcattttttacttctttaggcaacaatggatcaatcttcagtaataaaccttcacttgttgaactacgaaggaaagcacgtaccacaaagggacccaaattcagcggtctgtgcctacaaacttcattaataactgcttgcagattggcagctatctggtcacttgacatatccaatgttgctattttggtctggagaaagttctccctttcttcatctaccttaatttcatgtccatttttaaataattcaagcattttggggatgtcacggccaatggaatttcgagaaagctttggatattttttattcagtttcttccttaatcgattaagttcaggcattatttctggaacagctacgtaaaagtctgcaacaatttcatcatcccaaatcttctgtatcagactagtgcctcctgcaaatgcagctccattttcttccgctattttgacctctgatgcattctctgtaaatacagcaactttattgatttcggaagcaaatgggtatggcaaactaagaacactggtaaatggctccacgtttttcttctttcccagtgccatatccagtgtcaaatcaagataaacactttgctttggactagtaaagtcaagaatttgaaatttcttaagtaagtgaacagctttctccacctcatatatctgtctcgggtataagcgttttaaatagacatcatcctcaggttcgccttccatatagggatatgcnnnnnnnnnnnnnnnnnnnnnnnnnnnnnnnnnnnnnnnnnnnnnnnnnnnnnnnnnnnnnnnnnnnnnnncagactttgtagcagcagcaaaatgtctgttgggcactcggatgtttacagaacaagaacaaagtgatgtctgataaaccatcttggaaaggctatgcctttgatgatgtatcaaggctctacccatgcaccttacggccgccgccatgttgg

SEQ ID NO: 124965 - DNA, 1470 bp, Homo Sapiens
  misc_feature (275)..(329): n is a, c, g, or t
gggtttcttgctcttcttttctaccatgggaacgtccttctcaggggattttgaggtctcggtgtttctgtgtttctgaataggcagtttctcgctgtcggctaagggcttatccaggtcaatatccagagccctgtaggggtcgttggggtctttgtcatcctcgtcgctgggcagagcattctcaggcatctcctctgtgacgatgtccacctgctgggcaggggcgatgtcctcgtcgctctccgtgggcagcgagctgtggcggcgcttgnnnnnnnnnnnnnnnnnnnnnnnnnnnnnnnnnnnnnnnnnnnnnnnnnnnnnnngccggtgccgccgctcctcctccagcttcacatactgatctgacataggcagccctggaactttcaaggggacggagaggtcaatctgcaccacgggaatgtgctccacgcccggggtgtcctggtaccgcttctgtggcgatggcgagctcttgatgtagaaggggttgttggcctgctcctgcttccgggcctctcggcgccgagccagctcttcctcgtccgcctccgacggccggtgcttgggacgccgctgctcctcctcgtggaagacggccctgggcctctcgtcctctgactcgctgtccgagagtggctcattgatccaggcgtccaggtccaggccttcggggactggaaccttcttctgggccttgggggccactgggttcagctccccagcaaagagagcgctgacctcctctgccacaggcacgtccttggcctgaagcttctggatgtgcttgaccagctgcaggatgcaggacgcccgctcctgcacctccaggtctgcgctctgcacaaactggggcagccggtccaccatgagctgggtgacggcctgagcgccctctgcctccccggcctgctccttctgctgcaggatggaggcgtagagcttgaccacgttctgcacatacacggcctggatgtggcctggcagcgtggtgactctgggccgcagcatggcctccaaagtgtggtgtggttcctgcagatgctctgagaactccccgcagatccaggcggcagcgtacagcacctcacagatcccgttccgctgggtgctgctggccagcaggtgtgcactgtcaagcagcgcagacatctgggacacggcgaacttgcggatggccttcacgcggatggccacgtccagcatttgggcggcgatgaggtggccgtgccgtgtgccctccagccgggtcagctccaccaggatgctgatgtaccactcgaagttggtgatgtactggtagttggactggctgcagatgtcaatgatcttggtgagcagctcgtcacggtaggtggtaccctctgccttgtctacgtgggtcatcagcttcttcacgatctccatcagttcttcttggcctcgtgccgaattcgacaccaggcctcgtacctagaccgtaag

SEQ ID NO: 124966 - DNA, 1107 bp, Homo Sapiens
  misc_feature (926)..(926): n is a, c, g, or t
  misc_feature (975)..(975): n is a, c, g, or t
  misc_feature (999)..(999): n is a, c, g, or t
  misc_feature (1017)..(1017): n is a, c, g, or t
  misc_feature (1068)..(1068): n is a, c, g, or t
  misc_feature (1076)..(1076): n is a, c, g, or t
  misc_feature (1097)..(1097): n is a, c, g, or t
ggaaatgcctgttttacaactttattggatcatcttgacacaaaatcatgacagcagcgtgatatgtctctctctttatacgggaatgtcgatagcaaataaattcttatgtaacacatcatacaatttcaaatcctggaatcactgcatgggattctgtaatggattacatgctaaagtgacagttttcatcaaaaggagaagataaaatgtcattatctctgaagaagggtcagtcctgtgcccacgctggccgtggggagtgagcggagtctccttgccctgcctggtgggggctctgcctgtgaggtggctctcacaggtcctgcccaagggcactgggcacactccttcaacacagaacagcccaggtccgctgcttccaggccctgcctgggccttcctaagggtgctgggaaggatgtggggaaaccttggtgcgcatagtggcaagcaggggatgcggaccaccccaaacccaagccgagatgcacttctgctgaccaggaagacgggtggcagagaggcctcaacccaccccgtccacggttctgactgcaacctctctttggcgtccctggccccgccctgcccacagcctggctggcgcgtggcctgggatcccaagacccagtcaccagcccacgagcacactgacaatggacaacgcctggcaagaccgctttcccactgtgggttctgggagagaaaaccttggcgacagcggcccttccttcccctcccccggacgcaaccgtcaggacctttgggtcaaaagcaggcgaccccagaggaggccacgtcagccccgccctgtccaccaagtgcccctcacgtggtgcccatcaggccctggcccaggacaggagcccctgaagccacatttcaggactcggcgcccagcgcggggcagggcacagacccanggtgggggagtccttttgctggtttgggggcgagaaggggacttcttgnccaaagagattgggaagagtcacnagtaaaaaggatggtcangatatttcacgcaacaaatgactcgggatgtctacacggggggcaccatanagttaaanaccactcaggcttggggtaantaacaccgag

SEQ ID NO: 124967 - DNA, 1710 bp, Homo Sapiens
  misc_feature (84)..(84): n is a, c, g, or t
  misc_feature (113)..(113): n is a, c, g, or t
  misc_feature (978)..(1040): n is a, c, g, or t
  misc_feature (1176)..(1198): n is a, c, g, or t
  misc_feature (1242)..(1332): n is a, c, g, or t
  misc_feature (1589)..(1639): n is a, c, g, or t
ggagagggcgagacacgtcagggcctgcggtccctggggtacgtgctcccccgggtgggtccggggctcgcaggcagctctcancacttggccagcgtcgccttcatctcttntaacaagttgctcagtagcgtggagtcactgcacttcccgtcgactgagacagagttctcacccttttcaccagggaggcagacatggtggccctggatggagcggctgtacatggaggcgcaggagtccactcgctccacaactgcaacagagcgggcagtgttaggcttcccggacattgcatggctgcagccccacccccagagcaggggccaccttcttgggctgcccttggccacagcttcaggaggccggaaaaatggtggtgaaaacagatcttcgccagaagattctggaaggacatccgaatgccatcgactttgattgagctcatgctcaagtccccagactccagcaacttagcaaaggcgtcactgtagcagggagtggtgatcaagtaggagctgcagctgaagtgcagcctgaagtccagcttctcgtgggtcgcaccctcgtcattcttggcaatgaaggacagggtccccttgagcttctgcgccatgacgatgctctggatggtgaacacatactgggcttcgttggagacgcctgggggcagctggaaaggcacggggacgccatcgtggacggaggagccctgcggccgggccatcctggcattgagtgagtccagcacgctgagctccatgcccttgaggaatgctgctgctcctgttctcccagcacgatggcccacagtgacctggctgtcctcctgcagactgccccgggatgtcacaggtcattttaacataggaattttcagcgaggagggagtagctggcctcaggcgggagctgctcctcctctggcgcgccattctgcaccggctcccccgctgcctcctcgctgcctggaggctgnnnnnnnnnnnnnnnnnnnnnnnnnnnnnnnnnnnnnnnnnnnnnnnnnnnnnnnnnnnnnnnaggcttgggagatttcttgtcctggtcttgcccctcggcatcgtcctcctcgccctgcgcctccgtcttggcgtcctcacactcgtccttcggggtagtgacagtgttcacactgagctcccccgtggatggaacnnnnnnnnnnnnnnnnnnnnnnncaggcggtggggtggtagacagccagaagtccaggtcctcagcnnnnnnnnnnnnnnnnnnnnnnnnnnnnnnnnnnnnnnnnnnnnnnnnnnnnnnnnnnnnnnnnnnnnnnnnnnnnnnnnnnnnnnnnnnnaccatgggaacgtccttctcaggggattttgaggtctcggtgtttctgtgtttctgaataggcagtttctcgctgtcggctaagggcttatccaggtcaatatccagagccctgtaggggtcgttggggtctttgtcatcctcgtcgctgggcagagcattctcaggcatctcctctgtgacgatgtccacctgctgggcaggggcgatgtcctcgtcgctctccgtgggcagcgagctgtggcggcgcttgccctnnnnnnnnnnnnnnnnnnnnnnnnnnnnnnnnnnnnnnnnnnnnnnnnnnngccggtggcgccgctcctcctccagcttcacatactgatctgacataggcagccctggaaccttcaagggg

SEQ ID NO: 124968 - DNA, 2298 bp, Homo Sapiens
  misc_feature (1717)..(1751): n is a, c, g, or t
  misc_feature (1785)..(1873): n is a, c, g, or t
aggcgcaaagccggtaccccgctaaggagaaggggacgggcaggccacggggcgccccccaccacgagaccttggaccggaacggcgcggggcccaacccccccgcacggtcggacgcacctctctggcggtcgggcccgcctgcccacacctgttgcgcttgccctgggatccccaggcccagtcaccagcccacgagcacactgacattgacaacgcctggccagaccgctttccccactgtgggttctgggagagaaaacttggcgacagcggcccttccttcccctcccccggacgcaaccgtcaggacctttgggtcaaaagcaggcgaccccagaggaggccacgtcagccccgccctgtccaccaagtgcccctcacgtggtgcccatcaggccctggcccaggacaggagcccctgaagccacattcaaggactcggcccccagcgcggggcagggcacagacccaggtgggggagtcccttgctggtttgggggcgagaaggggacttcttgccaaagagaatgggaagagtcacagtaaaaaaggatggtcagataattcaacgcaacaaatgacctcggatgtctacacggcggacaacatagagttaaattaacactcaggcttgggtacagtacacacgactgaggagaggcgagacacgtcagggctgcggtccctgggtacgtgctccgcggggtggtgcggggctcgcaggcagctctcaacacttggccagcgtcgccttcatctcttctaacaagttgctcagtagcgtggagtcactgcacttcccgtcgactgagacagagttctcaccctttttcaccaggaggcagacatggtggccctggatggagcggctgtacatggaggcgcaggagtccactcgctccacaacggaaaaatggtggtgaaaacagatcttcgccagaagattctggaaggacatccgaatgccatcgactttgattgagctcatgctcaagtccccagactccagcaacttagcaaaggcgtcactgtagcagggagtggtgatcaagtaggagctgcagctgaagtgcagcctgaagtccagcttctcgtgggtcgcaccctcgtcattcttggcaatgaaggacagggtccccttgagcttctgcgccatgacgatgctctggatggtgaacacatactgggcttcgttggagacgcctgggggcagctggaaaggcacggggacgccatcgtggacggaggagccctgcggccgggccatcctggcattgagtgagtccagcacgctgagctccatgcccttgaggatgctgctgctcctgttctccagcacgatggccacagtgacctggctgtcctcctgcagactgccccggatgtcacaggtcattttaacataggaattttcagcgaggagggagtagctggactcaggcgggagctgctcctcctctggcgcgccattctgcaccggctcccccgctgcctcctcgctgcctggaggctgcttcttggacttcttcttgcctttggtccgctcctccttctccttcctgtgcttcttcttcttaggcttgggagatttcttgtcttggtcttgcccctcggcatggtcttcctcgccttgcgcctccgtcttggcgtcctcaacactcgtccttcggggtagtgacagtgttcacactgagctccccccgtggatggaacnnnnnnnnnnnnnnnnnnnnnnnnnnnnnnnnnnntggtagacagccagaagtccaggtcctcagcctnnnnnnnnnnnnnnnnnnnnnnnnnnnnnnnnnnnnnnnnnnnnnnnnnnnnnnnnnnnnnnnnnnnnnnnnnnnnnnnnnnnnnnnnnaccatgggaacgtccttctcaggggattttgaggtctcggtgtttctgtgtttctgaataggcagtttctcgctgtcggctaagggcttatccaggtcaatatccagagccctgtaggggtcgttggggtctttgtcatcctcgtcgctgggcagagcattctcaggcatctcctctgtgacgatgtccacctgctgggcaggggcgatgtcctcgtcgctctccgtgggcagcgagctgtggcggcgcttgcccttcttctccttctccttcctctttttcctcctcttgtccttctccagcttctgccggtgccgccgctcctcctccagcttcacatactgatctgacattggcagcccttgtacctgcaaggggaccgtgaggtcattctcaccccggttattttctccacccccaggtgt

SEQ ID NO: 124969 - DNA, 882 bp, Homo Sapiens
tagcaggatgcttttgctttgggacggcgatgaggtggccgtgcgtgtgccctccagaccgggtcagctccaccaggatgctgatgtaccactcgaagttggtgatgtactggtagttggactggctgcagatgtcaatgatcttggtgagcagctcgtcacggtaggtggtaccctctgccttgtctacgtgggtcatcagcttcttcacgatctccatcaggttcttcttggacaccatcccatagagcaggtccagggcccgcagccggatggactcgtccttgtcgtccaggcactgcaggatgaggtccttgtgggactgcacggacttggggtgggtcttcaggatcttggacattgccagcagccccaggtacttcaagttctgatcggagtcctcgatcaatatccttaatttctgaacacaaagctggatgctggcgctgtggttgggcatgccggaggacagcgagatgagcactgcaatcacggtgttcacacattcatagaggagagacatggcagacgtgctgtggatgagattggtgaggggctcgatcagcttcttgcccagccgcggttccaaaggagtaagagcaccgaacagcttgatgatcttgatgaggacccagttgttggtggaggacgtcatcagcttgaaaaagagcggggccagggacaggtagttcttagggttgcgtctggccagctcgcagatgacattgacggcagccgactgaaccccggggtcggggtcctccagcttctccttcagccggggaaaggcagggcgcagcgactcggggtacttcaggaacaccttgtacatgatcagcacagcctcgtgccgaattcgccacccaggcctcgtacctagcg

SEQ ID NO: 124970 - DNA, 923 bp, Homo Sapiens
attattatatattactccagtttattaaataaatgaaacaaggcttatgccacatattccaacaatgtttaaataaagagcttgaaatataaaggcttatgaaaacttcatactctttatataatgcatactatttctagcacatgaataaatataaaggacaggagccactttttatattatgaatccacaacattaagcatcaatgattacacaaatccataagcacacaaacaaaaaaacccattggttataaaaactagaattccttttggcatatttaagaaaacccaaaggtggggaggtacttatagccagaaccctgacaacgaggggaccaagtctcccaattccttaagttgtttcttggttagaagcttcaacaattgcattaactctttcaaaaaaacagaaaaagcaggttaagatcctgttcaataaggcacttaataagtctacactgaagaaatactatgcttttatcttaaatcgtgcttaagttttaccatgaggtttgaatttctttccaccttggtaggaacatgtatgtaatttgaataaactggtaataatactgtctgacattcgctctttacatggtcattaaaatgaatttgcttctactgttttacaaattgtatgcatatttgaaaaagtaaaatttttctacattaaaaaaagagcgtttcaagaaaagcaatctttaaactcaaagaactcaaaagtgaaagcctctctatagaaagtctttataaaatcaatggaatgttttggaaagaagaaaaaatcctaaggtgtagtttagaacaagcagcaaggcctgaatgagctctggggtcctctgctgccctctagggttgcccagggagagctggactttcatctgagtctcagcaattaacaggtaaccctaccccactgca

SEQ ID NO: 124971 - DNA, 788 bp, Homo Sapiens
  misc_feature (476)..(603): n is a, c, g, or t
  misc_feature (605)..(699): n is a, c, g, or t
ctaaaatctcctactagaaatattaagcagaattgtgttgatgtaatatgctaacaaaattgagtcttccaagcaatgaacatgatatatatttatttagccttctttaatttttctcaccaattgcttttaggggccttgtacctgcttcattgcatgtattgttaagcatgtaatgattctggctgttaatctctattatgttttattgaatttcattttctagctgctaattgctagtatggagaaattaagatgatgaaatcaactttataaaggcataatttcggtacaacagactgcaccactttaaaatgtgtaattcaatgcacgtttacaaatggatacactaacggaactactgccacaaccaagatagaggaaattccctatgccccaaagtttcttgtacccctttgcagttcatcagcctttcaaccctcagccccaaggagccactgtcacttcaggtccgnnnnnnnnnnnnnnnnnnnnnnnnnnnnnnnnnnnnnnnnnnnnnnnnnnnnnnnnnnnnnnnnnnnnnnnnnnnnnnnnnnnnnnnnnnnnnnnnnnnnnnnnnnnnnnnnnnnnnnnnnnnnnnnncnnnnnnnnnnnnnnnnnnnnnnnnnnnnnnnnnnnnnnnnnnnnnnnnnnnnnnnnnnnnnnnnnnnnnnnnnnnnnnnnnnnnnnnnnnnnnnnccatacgtggcaggccaggtctcactaacacaggcctccctaacaactgtttcagtaccgactgagtggttcaattaaatattaagagg

SEQ ID NO: 124972 - DNA, 524 bp, Homo Sapiens
tgaaccactgtgcctggccaattaaacgtttttaatacagtaataagtgaataatagaattgagccagattcaggattgaaatgatgtagtcctccatgaagaattcaaagcaagagttttcatctcaacctccaacatttcacgtaggtaaagaccatacctcaagcacctccaagccctcatttccccagcctctacctcatggccctctgcacagccatctgcgcacaaccagtgcttacacacaggaggccctcaaaataatactaataatctaaggtccaaatcccacgaactcccgggaagactgagagtgaggctggagccaaggcttgaaccaaacacccaggaaggaatctgcagcccgcttttctaagtcgtaaaactcctacgacctggactctctcaggaagcctgctccggcctgaggaggatggaggtagccaagctctccagatttctgtcccgggccaaaggtgcttccagcttccctctcctttgcttctccgcccggctccccggc

SEQ ID NO: 124973 - DNA, 969 bp, Homo Sapiens
  misc_feature (610)..(610): n is a, c, g, or t
  misc_feature (632)..(632): n is a, c, g, or t
  misc_feature (655)..(655): n is a, c, g, or t
  misc_feature (666)..(666): n is a, c, g, or t
caaattgacacattttattaaatataatgtgcaacatataatgaagtaacttctatttacaaaatggtacaaggcaggtattatttaaaatgctttagtaactcattttccataaaaagaaatctggcattataaaaatacataaaataatcatgatttatatcattaatttacgtaagatacttttttgcataaaacaaagttaaaaaatagtttaaaaaggtattcttatatgagcatcattcccagtataaaaattttcataactttttgtaattttggttcatctgtataaataaagcatttttatccttttaaaattcataactccatttaaaaaacataagattctctctcttttaaataaaagttcacttgaggtagtatgttaagcttttcctttggtctcattcagtctatgtgtccaagtcataagactgaaaatttggagtcctgtagttttctaaagtctgtttaaaggtacaaatgtgattttcttcctgaaaatctgtcctttctttcccatcttcctctgacccagagtccaagtctggggaagaatgagctttcaaataaaaggctcttggctgacaatctgatggctgtccanagcttgaataggcatctaggtnaggtctcctgagagcttttccanaggtacccatngaaagattactcgaggcaaccgacgctggctctggatttgcactaaaatctaaagaggacttgtttagacacagatttttcattccaggtccttcattgtgagagtactagtgttagtagctcctcacatgtgaaggcacgatatatactgagctcgttcgcagattctctgaggatggacatggtagactctttttctttagtactgggtcatagggtcaataactgttctggtaggatgcactgtatatagttaaaggattgacatcaattccctcaatcaaggctgtgtcccaaacgcaa

SEQ ID NO: 124974 - DNA, 1003 bp, Homo Sapiens
ccgtcctggtctttgaggcttttacaagtccgctcgcagttcaaaatttggtttagtaagactttcgtctctcgtacccatgcactgttaggatcttcttcaaagaatcccgtaacaggaactcagattgttttctgtagataaattgcagtttcttccattacgcctggatatctgtgttcaaggtcatcttgctgatggcacagtgaatctgcgtgtggcatgtggtcagggtttggccaaaaagagaaatatgttggctgtactggtttaagttattgcataaaagttgaattctttccttctccagctccagaatgctctggtagcagttctctagtgtgttttcccatttcagtctggtagaataacccgccatgtttttttggtagtaattttcatcttcctttttccaacttttcagttgattttgtcagtttattgaggagcttccgcttctccttctcagtcatagattgcttggagctttctacaagctggaaaagtgcttcatgtttcttggtactaaccattaatttcttcttggccttaatttgctgattccagttgctaatgacaagatttgctgtcttttcaacttcattgtcaagtgattttctcttcttctcttgtacatttaggacttgataagtcggttttattgcttccaattcaattgctttgccaagtttttgatgcaggtccgctgtggatttcattccctctgaggcccaggcccaggcactgctaacacaactttttctcgtgttctgtaatgctttgctcagcttgcttgccagtttctgaagtcctttggcatagctaatttccaggtttgccctttgctgaagaacagatgtgacctgtttgcagaaattctctccattttgagaaaactcctttaggttcttgtatactttattatacggacaatctgtcagtgggtccctcatgttgaaatgtgtctggcttttgtcctttcacctacgctccagcattctgg

SEQ ID NO: 124975 - DNA, 1070 bp, Homo Sapiens
ttttttttgttcacacaactgaagtttgatatatggttctttaaatgagaagacccctgccaaatagcaaaagcagatcaatcctaactctgaatgaaacctctgagcatcatatggtcccttttctggccattcaaagagatggttacacaccttccttgtcttttgaggctttttcaatgtctctctgcagtctcaataattttggttttagtaaagactttcgtctctctttatccattgcactgttaggatcttcttcaaagtaatccgttaacaggaactcagatttgttttctgtagataaaattgcagtttcgttccattacagcctggatatctttttcaatgtcaatcttgctgatggcacagtgaatctgcgtgtggcatgtggtcagggttggccaaaaagagaaatatgttggctgtactggtttaagttattgcataaaagttgaattcttgtccttctccagctccagaatgctctggtagcagttctctagtgtgttttcccatttcagtctggtagaataacccgccatgtttttttggtagtaattgttcatcttccgtgtgccaacttttcagttgattttgtcagtttattgaggagcttccgcttctccttctcagtcatagattgcttggagctttctacaagctggaaaagtgcttcatgtttcttggtactaaccattaatttcttcttggctgattttctcttcttctcttgtacatttaggacttgataagtcggttttattgcttccaattcaattgctttgccaagtttttgatgcaggtccgctgtggatttcattccctctgaggcccaggcccaggcactgctaacacaactttttctcgtgttctgtaatgctttgctcagcttgcttgccagtttctgaacgtcctttggcatagctaatttccaggtttgccctttgctgaagaacagatgtgacctgtttgcagatattctctccattttgagaaaactcctttaggttcttgtatactttattataccggacactctgtcagtgggtccctcatgttgaaatgtg

SEQ ID NO: 124976 - DNA, 1124 bp, Homo Sapiens
ttttccccttgggccacctttactgtgcccatggaggcagctccgagagtaggttaacactatggagcaaaggagtagagaagggggacaggagttagggggcccctgtgtaggggtatagggctcctgcatccctctgggatctgagcctagaaggctcgggcagagtccggcgagtgcctcaatggaagcggtactttctggctggcttgaggttgatgtatgtggccttcatctcctcggcctcagggttccgcacatctttgaatcgctcccctttggtgctcactacctggttgtcgatgtatcggatcagcttcttgggggcctccttgggagccatgggccggtgaatcttctgatcctctgcgctatccaccatcatgtacttctgcaggatgaaggacttcagctcatccttttgggggcctctgaggcgtctgggcaggtcctggttggggccctcccaggctgcaggcccctcttcctttccctctaccagcatctgcacagcttcttccaagtccccccgagctttggccagcacccactgggcctgctccaccgaacaggtagggaacacctccaggagtacatccacccctggcagaagctcctcctcagcgccagttgcctcatcttgggtgtctgcagcagcagcagccgaagacctagtctcttctttgagcatttcgggccgctgcaggggctctggggagatgggcacctgaccttggacaccagagctctgcggttgcaggttctctttgttcctggcatcgctcagctgccctgagagcttctgcatcatgtcccctattgtgcccctggggatgtgggcgaagccaggcacataggcctccatcatctcagtgaaagcctccatatcgaagttctcctctgatgggcccgaggggcccaggtcctccaggaccccaagcacataggagaagatgacctcatccaagccactgaggtcggcctccgggaggtgtgtctggacaaaggcaaggagggctgcactgacgatcctctccagctccatgctctctcttctgctccgtcgggcgccgccggcgacttgtcccgcgcggtgcagctctcatcccccagccccaccaacg

SEQ ID NO: 124977 - DNA, 437 bp, Homo Sapiens
acatcatcatggacaatcatggttttcacagattccgtttcaccattgctcaaattcagagatgacctatggagaaaaaatccagacgtgaaaggccttaatctctggagtcaaggagatcctgtttaggcttttcgccttctcaaaatcaaaacatgagatgaggctaccgatataaagcctcctccaaaaaagcaactgcttagctttctccctttaacaaagaatttctttccagtgccatttgtttctgagcaaaaacttagaatgaataattatggctaattaaagtagttataccaaactgaaatttcccctggatcatatatcctcaaatcaaaaggaaaaaataaagtacacgcctggggtgctgggggaagcactgacatatgcacacaccaacgaagagaaggggaaacacaaggcgacctgctgct

SEQ ID NO: 124978 - DNA, 2033 bp, Homo Sapiens
  misc_feature (70)..(79): n is a, c, g, or t
  misc_feature (1388)..(1433): n is a, c, g, or t
cttttcccggggaaggattctttccccttaggggcttcctggtttccatccccattccccaggaaaattnnnnnnnnnnaaaatgtccacttgttgtttccgcttagatggaagaaatcggtaggtaattctgggggtctataaaaaaggtgtaaagggaggagggaagattttgtgtttctgggagtgtgctacctagcgggattgagtctcattagccagtgagcttgtcctgggggtgtctgtgggggacatggtgggtgtcgggctggctggaggatggggaggagggaggtggaggaagtggaggaggaatgcctttgctgtaagagatctggcaagaggtgaatgcgaccggcaaagccattgctctcatgatggctggcacgcttttggtcaactgtactctggcggacgattagagtgccctccttggatggggtcatggccggctcactttctacatcatcatggacaatcatggttttcacagattccgtttcaccattgctcaaattcagagatgacgctgctctggtgtcctctggtcctgaggtggactcgtcagccccttcctgctccacatcgtcgtcctcctcatccgtcgtccccgactcctcactggatgaggagtagtccgttactttgtgaggtggccgtacatcttccactgctcgaagctctttggccagtgcggtcagatcagcaggcttgaggggtctgaaaacttcctttttatcttcaggttttttcactgcattttccaggcgctgagatggagagccttcagacttggatgatgatctcactctgaagccgttccccgggagcccactctgagacccagggtgagacccgggctgggatcctgagttgctggaccctgaggagctgccactgccaggtctgggcaccagcttctccactctctcccacagaagcctgggctcaatactgctggtggagtttctctgtcctgcctggctattctgctgcccactgccctgcagtggggaatctcgacgggacagaacaggggagcgagatgttgttctcacaggaacctctcgcgctcggtcagcaggctcgtagtgggctttgggctcgggagcatggaagcttggcttgctcctttcctgctgcggtggtggcggctgctgcgagtgctgcgggtgcggcctcctatggtcatgctgtagagacaggagatatgcttgttcttgttgcaactgcctctggagcctctctgcctgccggtgctcctccatctcccgccatcggcactccagtaacatggcctgctcctggagcagctgctgctgaaggacttccaagtgccgctgctcctcttctagctgtcgcctgatatactcctgttctctttcaannnnnnnnnnnnnnnnnnnnnnnnnnnnnnnnnnnnnnnnnnnnnngcgccttctctccaactcctctagacgcctcttttcttcttgttctctccttcgctgttcacgttcctgctgccttctagcttcccgctctctcctttgttgctcttctagccgtcgcctctgttctttctgctgctcaatccgcttctgtctctctgccagcagttgccttttatattcttcctgctcccggagctgttgctcctgtagtaactgttgtctccgaagagcctcggaacgttccttgttctcctgctgcagtctcaggaaatctcggcgaagagtagactcaccaggcacgttcacaatggaacttggctctccttcctgttcaggcacttcctcctcttcttcctcactcccactgtactcatactcagtttcatctttctcgcctctcctcttcctggtacgatctatatgatccttaagctggattctaacttgcctttcatttggctgatcccttataaaaggatgtttcaaaagctgctctgtagagggccgctgcatgtaattcttcaccaggcacccttctataaaactaaaaaacttcttcgaccatttttttgacttcagccggggaggagggtttctggg

SEQ ID NO: 124979 - DNA, 580 bp, Homo Sapiens
gaccacaatcaatactttgtttcatgtacaaaattatttaaaatactgtatagagttaccttcaggctacatgtataaggtatatataaaacatgaatgaatttcatgtttagacatgagacctaccaagatacctcattatgtatatatgcaaatattccaaagtctgaaaaaatccaaaatctgtaacactcctgtcccaagcatttcagataagaaacgcttagcccgtcttgggaaacagcagccactggatggaaaggggcagccagtagcagaggcctcagcccctgccttcatcctgagaatcttctgtaacaaaagctgccagctttcagggaagaaaaagaattctgtggccttgacttaagcccagagaaacaggaactgccaaaccttgttacccagcagaacagacagagagctgacctggctccatggcaaagcaacaggagagcctggagaggttcagttcggggccagcagagccaggctgggtgggagggctgtcactgaagcaaagtgacacacatcctagaaagagacatcaggggaccacaagagtattctctttttttaa

SEQ ID NO: 124980 - DNA, 664 bp, Homo Sapiens
  misc_feature (223)..(240): n is a, c, g, or t
ggaggtttcatatcatttattgtaaagcacaaaacaggcattttaaaagtgaaagtatacattgaaaaagtacatttatatcacaaagcatcaaccacataattgcaaatacatttgctggaatgtgtacatctacactaaatactaaaaacaaaccaattttcatttctacacagaaatattaacctcctatcagtagtgatagatattttgtacattttcnnnnnnnnnnnnnnnnnnggaaacactattttaaaccaaaaacaaaattaagatcttcatcaagtcgtctgcatccatatatttaacaaaggtttttttcccccacacaatgaagcaaatactgtattgtccacttcttattattggccctgaggtgctggaggatgctgtggcattccctggggacttgtctgggcataataggctgcttgttgtctataatactcagcccaggctgcactataatctggctgaccacctggaggagccccagtcggagcaggaactgcctgacccattttcttgtagtactcttcccaagccttggtataatcaacctgtccagctggggctggattctgctgatctccttgtccattagtttgagttgtagttggtgcacctgcaggggctgctggtggtggctgtgcttgctgttgat

SEQ ID NO: 124981 - DNA, 518 bp, Homo Sapiens
  misc_feature (310)..(318): n is a, c, g, or t
tgggatcaactgagaatatgtttatttaaaagcaattttaaatattaaaaaaagtagaaattaacacatacagtactgaaaaactgtcacattaaacacatgtgaaatgacaagtgtactgatgtttgatggtaacatccagatgagaattcggcatttaactagtggcactacaggattcctatacaacatgttgaagttctaggcaataaaaaaataaatagcaattgctgttcaacagtaaaataagacacacactatttgcagaacataactttcccctctgggggaaaaagaactaatttgctannnnnnnnncataaggttccatatcttcaaaatactatataatgtacaaaattgcagatagtggcttactgagtttaagatcaagatcagacttaaactcaacaagatcaccaaaggtatttctactgagttttcctatgtcccacagtaagctgggttagagagaactcaaattcctgatggaaaacaaaaccgaacaaaaaaactag

SEQ ID NO: 124982 - DNA, 1138 bp, Homo Sapiens
  misc_feature (135)..(184): n is a, c, g, or t
  misc_feature (480)..(489): n is a, c, g, or t
ctggctcgtgtcacataaggcaccaacatccttttcaaggtagtaaccatctagaatcaactcaattgtaacctgaattcataagcttaagtcaccaaaagacatcactgggtcataattatataggttcccctnnnnnnnnnnnnnnnnnnnnnnnnnnnnnnnnnnnnnnnnnnnnnnnnnnggtttaggtgcctttgccttgtgcaatggatatttcatatgtttattaattggtttcagttaatatgtaatatgaaggcatgataaatgtgtcaaactgttctcttgtttcagatacaattcttggcatttcaatataggttattatctcatatgtcagacttgagtccagagaatactagaaggacatttaatttcctttcctcctccttcctttcactactcaattcaaagaaaagttatgagtacacagctaggaaccatttttacgtaggcatccatctgagcccatcttgnnnnnnnnnnctaaaacaacaaaaagactaaggacaattacataatgcattcccaagccttttatggatatcagggcctggggggactatctggcctatttgggttctttcattcaccaaaattctattatacatgccaagggttaaagggaacaccatcagtcaagagacggctgggccctagaatggaatctattagcataaaatggaacagtgggacccaaagagctatcagcaaaattccctttgtaacagacgtaaaaatcatgaatttgaggggaaaaataaactagttttggtgggatgcagtggctaacaggaattacttattagaaggtaatgaagttgctaaattttccttgtttttgatccctgtgttctgttcgtctcttgaagcaatctgagtgggaaaggaaagtgaaagaaatgttttatgccagctgcctcttgtattcccattaatgggagtctctacattaatgctctacataatttggtcagactgatgagaggcaatagatttccaatgctgatgagatccagagccctggagcccatttatggcttgacattcacccagcaagacgctgacgtggcagcaaacacggctccaatgtccagcttacctcatagttatcccttcaatccttcttgatgag

SEQ ID NO: 124983 - DNA, 785 bp, Homo Sapiens
  misc_feature (706)..(706): n is a, c, g, or t
ttttgcttttttttaaagtccccaagaaattcaaaagtgtagcccaggttaagaacccctattaatgataaacagaaattgacccatgtccgctaaaaaatgtattaagtaggtttcttgtagagcaatatcaatgagaaaaacttttaatattcacaaccagtatattaagccttggaaaacattagcattattctcggggaaataactttgggactacataacaatggtacagattcaaagttctctgaatttactcatcaagtataaaataaagcctcttaaaatatcccatgctgctattattttaccagcttatactgataaactatttacagtttacaaagcgttttatctaaattctctgcttttcacaaaaaccctgatcaggtagggcaagtataattatcaccacctctaacagatggagaaattaggtctcaaagctatttaaacggcttgcctacagtcattcagctggtaaaaacctaagctgaaaataaaatctaggtcttttgactcctagccaaatattctatcctgggacacttagcccaaaacaaacctctgttctggttccagtcatgggcatcaccaagttgattaacattatacctgtacccatcttgatggtgaaaatagtcatcagtgctgaacacaatgccatcacgattctgaccaagcagaaatcgagacaatggtgttnttcccagatccagcagaccctctaaaaagataagtaacttctgcaatttatttactttttcctcttgaaactgctggtc

SEQ ID NO: 124984 - DNA, 627 bp, Homo Sapiens
atgagccaccacgcccagcctcatattgttttgactttccttaaggatagtaatcttaaggaattactattccttgagaatagtaatcaaaatttatccggttaaatagtcttaactgttataaaccatattattttataaagcgtcatttttcttggtcgagcaagtgtatagtattgtcgaaatgaaatttaactgtctgccttctttttactttaagaagtacttctttgggtttttgttttcttcctttcctttgtgtaggccataggaaaaggatacagagtagagtttcatgaacctgaaacttggtggaaatttgatcctgaagaattagaaaagaggaataaacatggtgtgtctcgaaagaagattgctcagatgttggatcgttatgaatatcaaatgtccatttctattgtaatgaattcagtggaaccatcacacaaaagcacacaaagacctcctcctccacaggggagacagaggtggggaggctctcttggctcacataatcgtgtctgtgtcacaaataatcattaaattagctattttcagctaacacatttgttgttgcacttgacaaagagttagtgagcctgtcttggagtttaagtagtttaaaat

SEQ ID NO: 124985 - DNA, 2044 bp, Homo Sapiens
tttttgaattccatctcagtttttaattttatatgaagaaacacatctaaaaactatccagtgagagaaatataatttgctctacagaaaaattagtactagaagatattctatagtacaaatcctcttatgaccatgttaagcaactgtccaaaatatttttatactagaattatatcacattaaattgaacagagagaagtaaaacattattacaatcactttatcccttcaagaactggcaagcatgtggggttagggagatgggttgagaaggaggatgataactatgtatgcattacaagatgaatatgcatattatgaagaaaactccccaggtgactgatatacctactatctaacatttgctggggaattttgtttgaactaagtgatgtgctgattatagctaagaaataattttgtcacacagatcaatcagctgaaatataattttacctgtctaatgaatagagaaaactaaggtaccctataccaagtcagtatttcttgcatatttaaggtagtgaaggaaaaaccgtaaagttttatgaaaagttagatttagatatgaactattaaaaaactgttctatagtgtctataaaatagataaattagtttaaaattcgattgtagaaaaacagtcctagctcctacccaccactctattactcaggtgcttccataacagccaagagtattacaacaagagaatataaaaacatttaaaatacaatttcatatatttttatttacactttaacaacttgctgggaatttaaacaacttgctgggaacatcctttgtgaggcactgtagcctttttttatttgaaactacttaaactccaagacaggctcactaactctttttcaagtgcaacaacaaatgtgttagctgaaaatagctaatttaatgattatttgtgacacagacacgattatgtgagccaagagagcctccccacctctgtctcccctgtggaggaggaggtctttgtgtgcttttgtgtgatggttccactgaattcattacaatagaaatggacatttgatattcataacgatccaacatctgagcaatcttctttcgagacacaccatgtttattcctcttttctaattcttcaggatcaaatttccaccaagtttcaggttcatgaaactctactctgtatccttttcctatggccacttccacatatggcttcatttcccaagcttgtatattagtgttatctattataactggagatcttccctgatcgatagcttgttttgctctgttctggttccagtcatgggcatcaccaagttgattaacattatacctgtacccatcttgatggtgaaaatagtcatcagtgctgaacacaatgccatcacgattctgaccaagcagaattcgagacaatgttgttttcccagaaccaggcagacctcttaaaagaataagtaacttctgcaatttatttaacttttcctcttgaaactgctggttcacaaacctgtctgttccattatgcttgtccatacaatgatctttccagcatctttctctgacttcacagaaaccattactcacatatcgatcttgcatactgcagccatttccagagggatgaacactactcctattctcactacagtcagtatattcattgttctgatcaaaagtcatgcaattccagttaacatgacaattatttacataatatccattttgtatctgagagtcatcttgggcttggaaaatatttgatggtggatttggtggaccactgaatctctgaatgtttaaatgatagttcaaactgggaagagggggaccatagggcactataaaaggatatactgactgccattcaggcctgaaagaagtaaatgaagtgtcacaaaatgtaggtattacttgtccattacagggatatttgtctggctcattccccaagttctgctgataatcacaatgtgatggcatagctttattactaagatctttcttttcttcatcaggttttaagagaccattattatgaccct

SEQ ID NO: 124986 - DNA, 381 bp, Homo Sapiens
ggatacagagtagagtttcatgaacctgaaacttggtggaaatttgatcctgaagaattagaaaagaggaataaacatggtgtgtctcgaaagaagattgctctgatgttggatcgttatgaatatcaaatgtccatttctattgtaatgaattcagtggaaccatcacacaaaagcacacaaagacctcctcctccacaggggagacagagaattctgcttggtcagaatcgtgatggcattgtgttcagcactgatgactattttcaccatcaagatgggtacaggtataatgttaatcaacttggtgatgcccatgactggaaccagacagagcaaaacaagctgacgatcgagacatagggtaccgctcgattcgta

SEQ ID NO: 124987 - DNA, 703 bp, Homo Sapiens
gcactcagagatcccctagtttcgatcgtagcttttttgctctttctggtccattcatggcatcaccaagttgataacattatacctgtacccatcttgatggtgaaaatagtcatcagtgctgaacacaatgccatcacgattctgaccaagcagaattctctgtctcccctgtggaggaggaggtctttgtgtgcttttgtgtgatggttccactgaattcattacaatagaaatggacatttgatattcataacgatccaacatctgagcaatcttctttcgagacacaccatgtttattcctcttttctaattcttcaggatcaaatttccaccaagtttcaggttcatgaaactctactctgtatcccctctcccacgaccatctgtccacagtacggccacattctccaccatcccatgaccagcagttcgactctatgatgatcccccatatgttctcgatcgatagcttcttttgctctgttctggttccagtcatgggcatcacccagttgattaacattatacctgtacccatcttgatggtgaaaatagtcatcagtgctgaacacaatgccatcacgattctgaccaagcagaattctctgtctcccctgtggaggaggaggtctttgtgtgcttctcgtgtgatggttccgctgaattccttaccatagcaatggaccatttgatatcat

SEQ ID NO: 124988 - DNA, 289 bp, Homo Sapiens
tcgaatcgagctcggtaccggtatgtcctcgatcgtgagctggtggcgtctgttctgggttccggtcgatggtgcatcaccagatgttgattagggattatacctgtacccatcttgatggtgaaaatagtcatcagtgctgaacacaatgccatcacgattctgaccaagcagaattctctgtctcccctgtggaggaggaggtctttgtgtgcttttgtgtgatggttccactgaattcattacaatagaaatggacatttgatattcataacgatcgagaatatgg

SEQ ID NO: 124989 - DNA, 375 bp, Homo Sapiens
tgaatatcaaatgcatttctatttaatgattcagtggaaccatcacacaaaagcacacaaagacctcctcctccacaggggagacagagaattctgcttggtcagaatcgtgatggcattgtgttcagcactgatgactattttcaccatcaagatgggtacaggtataatgttaatcaacttggtgatgcccatgactggaaccagaacagagcaaaacaagctatcgatcagggaagatctccagttataatagataacactaatatacaagcttgggaaatgaagccatatgtggaagtggccataggaaaaggatacagagtagagtttcatgaacctgccccgtcgcgacaatgtgatcctgcagccata

SEQ ID NO: 124990 - DNA, 205 bp, Homo Sapiens
gcgctggctgcctatctttatttctattgtaaagtttccatatttgcttcaattaatttacatataattactgtacatgagagataatgttatgacaagaatagtttctgcaacattaagtatgggtcaaaaaaagaagaaatgggccaggcgcggtggctcatcccttctgtcgtcttctcgcagccgtatagtagtagtaggc

SEQ ID NO: 124991 - DNA, 701 bp, Homo Sapiens
  misc_feature (626)..(626): n is a, c, g, or t
  misc_feature (660)..(660): n is a, c, g, or t
tttttaagattcaacaaaaaaaagtttattttccaaatttgcttttactcccaccccaaaatttccctgtttcacagttctgactgggggctcttgtttatttcactgagtcgctatacgggtttttcagtgtgtggccacttggtccatatgaagttccaggtttgtatttctggacctcagctagattaggccctgcccagagttctagcatacgtggacttccaggtgggctcttaggatttggctggtctttggggacctggagtatgacctgcagaggggtgtgagctttggagttcatctggggaattgaggttggcagctggggagcttggaattatggttggacttcgtgcttgttgtacagtctttgtgatagacttctttctgagtttcttctgactgtctggatcatggggcttgcctaagatttcaggacacagcccattggaggccttgagtaaatcaggatttttctgtatccatttggtgagggaggcagcaccagcagttgtacgggaggtcagggtcacccgagcagggggtatcttcagaggcatttgccaggtgcccatgaaggaaccccaaggatttgccttggaacggggcacagaaggcagtanatgaccacgatcgttggcaataatttgagtgtangcttcatgagaagagatgctctcttttgttggcttagtggg

SEQ ID NO: 124992 - DNA, 1004 bp, Homo Sapiens
  misc_feature (896)..(930): n is a, c, g, or t
ttttttttaaagttcactataaattttaatctatgatataaaatattacctaaagataaaattgaacatcatgtatcagaaaataaaacataacaatgaaatgcaatttcgtaaatacttctatggcacaaggattattttcctcagattcaaccttgtaattgtgttgtttgctttctgaaaatcacactttataaagaacacaagtagagcttgttaaaaatgattgtcacagatgtactgtttactaattcaaagaacactatattcattcatatcaattttattcattaattatgaacaataaaatataatattccatgcttttcatgaaatagtggtttcttcttccagtctaatcagggaactaataaatgcttagttcatgggaaaacttccatttgatttacattgacttaattacttcttagggtctagcctcatccatggagaaaaagcactttttcttgaggcaacagcaaattaacagcactgatacaaaatatggcaaattcaatggttgtagcattgctttaggaattttgagactataaataaaactataaccataaataaaagggcttattaatatcttcttttcaggagagtgatacattctgaagttttcttgttattctgttgaatagcaaggacttccaaacttaaatgtcttaaggctgaaaattagttatattcctcaaattttagccttattaatgaaattccaaaagtattataaaataagattcaatttgtcttgaaattataaatttgtaacagatatttttcaaaatacatgccttcaaacaacttaaatgcaaaaatcattcattcttaataatacccccggccgtaatggccgaattcccgggcatatgtccggtaccgtcgactgnnnnnnnnnnnnnnnnnnnnnnnnnnnnnnnnnnncgccgcttcctcgctcactgacttcgctgcgctcgtcgttcgctctaagcgcagcgccctatatatcttacatt

SEQ ID NO: 124993 - DNA, 447 bp, Homo Sapiens
aatgctttttcatggcttcagtgcagagcactattttccggtttcccatttcaccatgatctcacgtacaccctgtcctcaagataaatcggaaacaatcaacccaaaaacatgttctcccaaagaatatttggaaactttcatctttcctgttctgcttcccggaatggctagcctgcttcaccaagcgaagaaagaaaaatgttttgaggttgttctccagatgaccccttcgggagggaaagcctgtgtttggggtcacttacccagttccagccacaccatctagttgtgcacatacatgcgctgccatctgtctggccacttggactccggagagctttttcgccttgcttggcctcctgcctgaccttctcctgtgcagtttggcatccaccaggtttcttgggtcttcagcttctgtttattacatgcactgattaaagc

SEQ ID NO: 124994 - DNA, 1731 bp, Homo Sapiens
  misc_feature (1717)..(1717): n is a, c, g, or t
ttttttagcccagatgccgtcaggacccactgaacaagggtgaactcgggtggtggtctcggttggccaaggctgagttgaacgcctcaggccaaaccccaagttgaaagggagcattgtggcttttataatccaatgatgcaatgatgataccagcttacaggagttctcagcaggtgctttttattaactgatgaagagctaaggctcacttttgatagataatatatatttattaaatgcattaatgtgtgttttataatgtacctttatcttcccccggctgactgttgcatacttataaaaaagaagttaaagaaatttcaagacaatcaatatgtaccataaacgactatataaatattacaaatttaaaaggctgtaaagcatgggcagataggttttattttcaaaatgctgttcttaacacaaaaataaaggctttactatttacttaagacgtgtggtagcttgtcaaaacaacccagtgcaactaactactaggctttcggatctgccttgagggtcggtctgtggcattttaaatgggagaatcttggttaacagcaaaccacagaacatattaaggtaataagtttacccataaaagcaggaactttctatataatactttgggacttagacaacaaaaatcctttgttacatctgtctgggtttaagtgtctcatcttgttgggtttgcagtaaaagttaaggagtggtctcctttggaaatgatcattaagtataaggtcttttttataaagagagtagtcagtcactaggtaaacttaaaaccaaattcagaggttggggacttaaattagaatatggatctttgcaaaggcggccacaagtgggaaaactggtaataagagcacttctgtattccttgggactagagttcattgtacattttaacagcagctggtgtagaagaatactcctgaggcactgaagaagtaatctggatgaatgaataaaatgtggggataatgcagaaagtgaagactggtcctttcttttctaaactatttgcattaaagcttgtttgcaatgaatcctatcttgtacagaaaagattccatttgcacatgttccaagtcttgttaaagaaatcacaagagagagagcatcatttggacattttccttgcacaaggtaacttgtgctcgaatgggcaaagatacgtcttagctatggttaagatgatggaattttcatcttggctgcaggtactgcatcgtcctccattttgcatttcactttttgttcttgcttggcccagaaaattttgacttgctggtgaatgtgcttggcctcgcgaagtttcttctgccactgacgcagttcttgaatctcaggatcacagcgaaccacacaggctctccagaaggattgaatgtagagggctgcttcctcttctgtcagcaggagcgagagtgggattggcggccgtgggtgttgctttagccgctcctccacaaatggaatggagaaaaattctgtgaatggctcccctgccctctttggattttggttgtataaccactcagtcagaaaatcacaggcaatgaatttggttcttttcctctcaaaacatttttctttcttcgcttggtgaagcaggctagccattccgggaagcagaacaggaaagatgaaagtttccaaatattctttgggagaacatgtttttgggttgattgtttccgantttatccggacgcg
